United States Patent Application Publication US 2024/0401047 A1 - sequence listing, part 3

SEQ ID NO: 6201 - RNA, 75 nt, synthetic construct; identical to SEQ ID NO: 3311
  source 1..75: mol_type = other RNA
  modified_base 1: mod_base = OTHER; note = 2'-Omethylguanosine phosphorothiorate
  modified_base 2: mod_base = OTHER; note = 2'-Omethylguanosine
  modified_base 4: mod_base = OTHER; note = Uridine phosphorothiorate
  modified_base 11: mod_base = OTHER; note = Uridine phosphorothiorate
  modified_base 12: mod_base = OTHER; note = 2'-fluoroguanosine
  modified_base 18: mod_base = OTHER; note = 2'-fluoroguanosine
  modified_base 19: mod_base = OTHER; note = 2'-fluorouridine
  modified_base 20: mod_base = OTHER; note = 2'-fluoroadenosine phosphorothiorate
  modified_base 21: mod_base = OTHER; note = 2'-fluoroadenosine
  modified_base 22: mod_base = OTHER; note = Guanosine phosphorothiorate
  modified_base 23: mod_base = OTHER; note = 2'-fluorocytosine
  modified_base 31: mod_base = OTHER; note = 2'-Omethyladenosine
  modified_base 38: mod_base = OTHER; note = 2'-fluoroadenosine phosphorothiorate
  modified_base 41: mod_base = OTHER; note = 2'-fluorocytosine
  modified_base 44: mod_base = OTHER; note = 2'-fluorocytosine
  modified_base 53: mod_base = OTHER; note = 2'-fluorouridine
  modified_base 59: mod_base = OTHER; note = 2'-fluorouridine
  modified_base 64: mod_base = OTHER; note = 2'-fluoroguanosine
  modified_base 65: mod_base = OTHER; note = 2'-fluorouridine
  modified_base 69: mod_base = OTHER; note = 2'-fluoroadenosine
  modified_base 72: mod_base = OTHER; note = Uridine phosphorothiorate
  modified_base 73: mod_base = OTHER; note = Cytosine phosphorothiorate

SEQ ID NO: 6202 - RNA, 76 nt, synthetic construct; identical to SEQ ID NO: 625
  source 1..76: mol_type = other RNA
  modified_base 1: mod_base = OTHER; note = 2'-Omethylguanosine
  modified_base 2: mod_base = OTHER; note = 2'-Omethylguanosine
  modified_base 3: mod_base = OTHER; note = 2'-Omethylcytosine
  modified_base 4: mod_base = OTHER; note = 2'-Omethyluridine
  modified_base 5: mod_base = OTHER; note = 2'-Omethylcytosine
  modified_base 6: mod_base = OTHER; note = 2'-Omethylcytosine
  modified_base 7: mod_base = OTHER; note = 2'-Omethylguanosine phosphorothiorate
  modified_base 10: mod_base = OTHER; note = 2'-Omethylguanosine
  modified_base 11: mod_base = OTHER; note = 2'-Omethylcytosine
  modified_base 12: mod_base = OTHER; note = 2'-Omethylguanosine
  modified_base 13: mod_base = OTHER; note = 2'-Omethylcytosine
  modified_base 15: mod_base = OTHER; note = 2'-Omethyladenosine
  modified_base 16: mod_base = OTHER; note = 2'-Omethyluridine
  modified_base 17: mod_base = OTHER; note = 2'-Omethylguanosine
  modified_base 18: mod_base = OTHER; note = 2'-Omethylguanosine
  modified_base 19: mod_base = OTHER; note = 2'-Omethyladenosine
  modified_base 21: mod_base = OTHER; note = 2'-fluoroadenosine phosphorothiorate
  modified_base 22: mod_base = OTHER; note = 2'-Omethylguanosine
  modified_base 23: mod_base = OTHER; note = 2'-Omethylcytosine
  modified_base 24: mod_base = OTHER; note = 2'-Omethylguanosine
  modified_base 25: mod_base = OTHER; note = 2'-Omethylcytosine
  modified_base 29: mod_base = OTHER; note = 2'-fluoroguanosine phosphorothiorate
  modified_base 30: mod_base = OTHER; note = 2'-Omethylguanosine
  modified_base 31: mod_base = OTHER; note = 2'-Omethyladenosine phosphorothiorate
  modified_base 32: mod_base = OTHER; note = 2'-Omethylcytosine phosphorothiorate
  modified_base 33: mod_base = OTHER; note = 2'-fluorouridine
  modified_base 35: mod_base = OTHER; note = 2'-Omethylcytosine phosphorothiorate
  modified_base 36: mod_base = OTHER; note = 2'-Omethyladenosine phosphorothiorate
  modified_base 37: mod_base = OTHER; note = Adenosine phosphorothiorate
  modified_base 38: mod_base = OTHER; note = 2'-Omethyladenosine phosphorothiorate
  modified_base 39: mod_base = OTHER; note = Uridine phosphorothiorate
  modified_base 40: mod_base = OTHER; note = 2'-Omethyluridine
  modified_base 41: mod_base = OTHER; note = 2'-fluorocytosine
  modified_base 42: mod_base = OTHER; note = Adenosine phosphorothiorate
  modified_base 43: mod_base = OTHER; note = Adenosine phosphorothiorate
  modified_base 44: mod_base = OTHER; note = 2'-Omethyladenosine
  modified_base 48: mod_base = OTHER; note = 2'-fluorouridine
  modified_base 49: mod_base = OTHER; note = 2'-Omethylcytosine
  modified_base 50: mod_base = OTHER; note = 2'-Omethylcytosine
  modified_base 51: mod_base = OTHER; note = 2'-Omethylguanosine phosphorothiorate
  modified_base 52: mod_base = OTHER; note = 2'-Omethylguanosine
  modified_base 53: mod_base = OTHER; note = 2'-fluoroguanosine
  modified_base 54: mod_base = OTHER; note = Uridine phosphorothiorate
  modified_base 55: mod_base = OTHER; note = Uridine phosphorothiorate
  modified_base 56: mod_base = OTHER; note = 2'-Omethylcytosine
  modified_base 57: mod_base = OTHER; note = 2'-Omethylguanosine
  modified_base 59: mod_base = OTHER; note = 2'-Omethylguanosine
  modified_base 60: mod_base = OTHER; note = 2'-Omethyluridine phosphorothiorate
  modified_base 61: mod_base = OTHER; note = 2'-Omethylcytosine
  modified_base 62: mod_base = OTHER; note = 2'-Omethylcytosine
  modified_base 63: mod_base = OTHER; note = 2'-fluorocytosine
  modified_base 64: mod_base = OTHER; note = 2'-Omethylguanosine phosphorothiorate
  modified_base 65: mod_base = OTHER; note = 2'-Omethylguanosine phosphorothiorate
  modified_base 66: mod_base = OTHER; note = 2'-fluorocytosine
  modified_base 67: mod_base = OTHER; note = 2'-fluoroguanosine
  modified_base 68: mod_base = OTHER; note = 2'-Omethylguanosine
  modified_base 69: mod_base = OTHER; note = 2'-fluoroadenosine
  modified_base 73: mod_base = OTHER; note = 2'-Omethylguanosine
  modified_base 74: mod_base = OTHER; note = 2'-fluorocytosine phosphorothiorate
  modified_base 75: mod_base = OTHER; note = 2'-fluorocytosine
  modified_base 76: mod_base = OTHER; note = 2'-Omethyladenosine

SEQ ID NO: 6203 - RNA, 76 nt, synthetic construct; identical to SEQ ID NO: 3318
  source 1..76: mol_type = other RNA
  modified_base 1: mod_base = OTHER; note = 2'-Omethylcytosine
  modified_base 66: mod_base = OTHER; note = 2'-Omethyluridine
  modified_base 67: mod_base = OTHER; note = 2'-Omethylcytosine
  modified_base 68: mod_base = OTHER; note = 2'-Omethylguanosine
  modified_base 69: mod_base = OTHER; note = 2'-Omethyladenosine
  modified_base 71: mod_base = OTHER; note = 2'-Omethylguanosine
  modified_base 72: mod_base = OTHER; note = 2'-Omethylguanosine
  modified_base 73: mod_base = OTHER; note = 2'-Omethyladenosine

SEQ ID NO: 6204 - RNA, 75 nt, synthetic construct; identical to SEQ ID NO: 3311
  source 1..75: mol_type = other RNA
  modified_base 2: mod_base = OTHER; note = 2'-Omethylguanosine phosphorothiorate
  modified_base 12: mod_base = OTHER; note = Guanosine phosphorothiorate
  modified_base 14: mod_base = OTHER; note = Adenosine phosphorothiorate
  modified_base 16: mod_base = OTHER; note = 2'-fluorouridine
  modified_base 23: mod_base = OTHER; note = 2'-fluorocytosine
  modified_base 25: mod_base = OTHER; note = 2'-fluorocytosine
  modified_base 31: mod_base = OTHER; note = 2'-fluoroadenosine phosphorothiorate
  modified_base 36: mod_base = OTHER; note = 2'-fluoroadenosine
  modified_base 44: mod_base = OTHER; note = 2'-fluorocytosine
  modified_base 55: mod_base = OTHER; note = 2'-fluorocytosine phosphorothiorate
  modified_base 64: mod_base = OTHER; note = Guanosine phosphorothiorate
  modified_base 65: mod_base = OTHER; note = Uridine phosphorothiorate
  modified_base 73: mod_base = OTHER; note = Cytosine phosphorothiorate
  modified_base 74: mod_base = OTHER; note = 2'-Omethylcytosine

SEQ ID NO: 6205 - RNA, 75 nt, synthetic construct; identical to SEQ ID NO: 1045
  source 1..75: mol_type = other RNA
  modified_base 2: mod_base = OTHER; note = 2'-Omethylguanosine phosphorothiorate
  modified_base 3: mod_base = OTHER; note = Uridine phosphorothiorate
  modified_base 17: mod_base = OTHER; note = 2'-Omethylguanosine
  modified_base 20: mod_base = OTHER; note = 2'-fluoroadenosine
  modified_base 23: mod_base = OTHER; note = Cytosine phosphorothiorate
  modified_base 25: mod_base = OTHER; note = Cytosine phosphorothiorate
  modified_base 35: mod_base = OTHER; note = Uridine phosphorothiorate
  modified_base 36: mod_base = OTHER; note = 2'-fluoroadenosine
  modified_base 39: mod_base = OTHER; note = 2'-Omethyluridine
  modified_base 43: mod_base = OTHER; note = Guanosine phosphorothiorate
  modified_base 45: mod_base = OTHER; note = 2'-fluoroguanosine
  modified_base 54: mod_base = OTHER; note = 2'-Omethyluridine
  modified_base 56: mod_base = OTHER; note = 2'-Omethylguanosine
  modified_base 69: mod_base = OTHER; note = 2'-fluoroadenosine
  modified_base 75: mod_base = OTHER; note = 2'-fluoroadenosine

SEQ ID NO: 6206 - RNA, 76 nt, synthetic construct; identical to SEQ ID NO: 625
  source 1..76: mol_type = other RNA
  modified_base 2: mod_base = OTHER; note = 2'-Omethylguanosine
  modified_base 5: mod_base = OTHER; note = 2'-fluorocytosine phosphorothiorate
  modified_base 11: mod_base = OTHER; note = 2'-Omethylcytosine
  modified_base 13: mod_base = OTHER; note = 2'-Omethylcytosine
  modified_base 15: mod_base = OTHER; note = 2'-Omethyladenosine
  modified_base 16: mod_base = OTHER; note = 2'-fluorouridine
  modified_base 17: mod_base = OTHER; note = 2'-Omethylguanosine
  modified_base 20: mod_base = OTHER; note = 2'-fluorouridine
  modified_base 24: mod_base = OTHER; note = 2'-fluoroguanosine
  modified_base 27: mod_base = OTHER; note = Uridine phosphorothiorate
  modified_base 28: mod_base = OTHER; note = Uridine phosphorothiorate
  modified_base 30: mod_base = OTHER; note = Guanosine phosphorothiorate
  modified_base 33: mod_base = OTHER; note = 2'-fluorouridine
  modified_base 39: mod_base = OTHER; note = 2'-Omethyluridine
  modified_base 40: mod_base = OTHER; note = 2'-fluorouridine
  modified_base 41: mod_base = OTHER; note = 2'-Omethylcytosine
  modified_base 44: mod_base = OTHER; note = 2'-fluoroadenosine
  modified_base 45: mod_base = OTHER; note = Guanosine phosphorothiorate
  modified_base 46: mod_base = OTHER; note = 2'-fluoroguanosine
  modified_base 48: mod_base = OTHER; note = Uridine phosphorothiorate
  modified_base 49: mod_base = OTHER; note = 2'-fluorocytosine
  modified_base 50: mod_base = OTHER; note = 2'-fluorocytosine
  modified_base 51: mod_base = OTHER; note = 2'-Omethylguanosine
  modified_base 53: mod_base = OTHER; note = 2'-fluoroguanosine
  modified_base 54: mod_base = OTHER; note = 2'-Omethyluridine
  modified_base 57: mod_base = OTHER; note = 2'-fluoroguanosine
  modified_base 59: mod_base = OTHER; note = 2'-Omethylguanosine
  modified_base 60: mod_base = OTHER; note = Uridine phosphorothiorate
  modified_base 61: mod_base = OTHER; note = 2'-Omethylcytosine
  modified_base 64: mod_base = OTHER; note = 2'-Omethylguanosine
  modified_base 66: mod_base = OTHER; note = 2'-fluorocytosine
  modified_base 71: mod_base = OTHER; note = 2'-fluorouridine phosphorothiorate
  modified_base 75: mod_base = OTHER; note = 2'-fluorocytosine
  modified_base 76: mod_base = OTHER; note = 2'-fluoroadenosine

SEQ ID NO: 6207 - RNA, 85 nt, synthetic construct; identical to SEQ ID NO: 3297
  source 1..85: mol_type = other RNA
  modified_base 1: mod_base = OTHER; note = 2'-Omethylguanosine phosphorothiorate
  modified_base 2: mod_base = OTHER; note = Cytosine phosphorothiorate
  modified_base 84: mod_base = OTHER; note = 2'-Omethylcytosine phosphorothiorate

SEQ ID NO: 6208 - RNA, 75 nt, synthetic construct; identical to SEQ ID NO: 3306
  source 1..75: mol_type = other RNA
  modified_base 1: mod_base = OTHER; note = 2'-Omethylguanosine
  modified_base 2: mod_base = OTHER; note = 2'-Omethyladenosine
  modified_base 3: mod_base = OTHER; note = 2'-Omethylcytosine
  modified_base 4: mod_base = OTHER; note = 2'-Omethylcytosine
  modified_base 5: mod_base = OTHER; note = 2'-Omethyluridine
  modified_base 6: mod_base = OTHER; note = 2'-Omethylcytosine
  modified_base 16: mod_base = OTHER; note = 2'-Omethylcytosine
  modified_base 17: mod_base = OTHER; note = 2'-Omethylguanosine
  modified_base 18: mod_base = OTHER; note = 2'-Omethylguanosine
  modified_base 32: mod_base = OTHER; note = 2'-fluorouridine
  modified_base 34: mod_base = OTHER; note = Uridine phosphorothiorate
  modified_base 36: mod_base = OTHER; note = Guanosine phosphorothiorate
  modified_base 37: mod_base = OTHER; note = Adenosine phosphorothiorate
  modified_base 43: mod_base = OTHER; note = 2'-Omethyladenosine
  modified_base 44: mod_base = OTHER; note = 2'-Omethylguanosine
  modified_base 45: mod_base = OTHER; note = 2'-fluoroguanosine
  modified_base 46: mod_base = OTHER; note = 2'-fluorouridine
  modified_base 47: mod_base = OTHER; note = 2'-fluorouridine
  modified_base 55: mod_base = OTHER; note = 2'-Omethylcytosine
  modified_base 58: mod_base = OTHER; note = 2'-Omethyladenosine
  modified_base 60: mod_base = OTHER; note = 2'-Omethylcytosine
  modified_base 61: mod_base = OTHER; note = 2'-Omethyladenosine
  modified_base 62: mod_base = OTHER; note = 2'-fluorocytosine
  modified_base 63: mod_base = OTHER; note = 2'-Omethylguanosine
  modified_base 64: mod_base = OTHER; note = 2'-Omethyluridine
  modified_base 65: mod_base = OTHER; note = 2'-Omethylcytosine
  modified_base 66: mod_base = OTHER; note = 2'-Omethylguanosine
  modified_base 67: mod_base = OTHER; note = 2'-Omethylguanosine
  modified_base 72: mod_base = OTHER; note = 2'-Omethyladenosine

SEQ ID NO: 6209 - RNA, 76 nt, synthetic construct
  source 1..76: mol_type = other RNA
ggcggactggcgcaatggatagcgcattggacttcaaattcaaaggttacgggttcgagtcccgtgtccgtcgcca

SEQ ID NO: 6210 - RNA, 75 nt, synthetic construct; identical to SEQ ID NO: 1045
  source 1..75: mol_type = other RNA
  modified_base 1: mod_base = OTHER; note = 2'-Omethylguanosine phosphorothiorate
  modified_base 2: mod_base = OTHER; note = 2'-Omethylguanosine phosphorothiorate
  modified_base 3: mod_base = OTHER; note = 2'-Omethyluridine
  modified_base 4: mod_base = OTHER; note = 2'-Omethyluridine
  modified_base 5: mod_base = OTHER; note = 2'-Omethylcytosine
  modified_base 6: mod_base = OTHER; note = 2'-Omethylcytosine
  modified_base 16: mod_base = OTHER; note = 2'-Omethyluridine
  modified_base 17: mod_base = OTHER; note = 2'-Omethylguanosine
  modified_base 18: mod_base = OTHER; note = 2'-Omethylguanosine
  modified_base 33: mod_base = OTHER; note = 2'-fluorouridine
  modified_base 35: mod_base = OTHER; note = Uridine phosphorothiorate
  modified_base 37: mod_base = OTHER; note = Adenosine phosphorothiorate
  modified_base 38: mod_base = OTHER; note = Adenosine phosphorothiorate
  modified_base 44: mod_base = OTHER; note = 2'-Omethylcytosine
  modified_base 45: mod_base = OTHER; note = 2'-Omethylguanosine
  modified_base 46: mod_base = OTHER; note = 2'-fluoroadenosine
  modified_base 47: mod_base = OTHER; note = 2'-fluorouridine
  modified_base 48: mod_base = OTHER; note = 2'-Omethylcytosine
  modified_base 49: mod_base = OTHER; note = 2'-Omethylcytosine
  modified_base 50: mod_base = OTHER; note = 2'-Omethylguanosine
  modified_base 53: mod_base = OTHER; note = 2'-Omethyluridine
  modified_base 55: mod_base = OTHER; note = 2'-Omethylcytosine
  modified_base 58: mod_base = OTHER; note = 2'-Omethylguanosine
  modified_base 60: mod_base = OTHER; note = 2'-Omethylcytosine
  modified_base 61: mod_base = OTHER; note = 2'-Omethyluridine
  modified_base 62: mod_base = OTHER; note = 2'-fluorocytosine
  modified_base 63: mod_base = OTHER; note = 2'-Omethylguanosine
  modified_base 64: mod_base = OTHER; note = 2'-Omethylguanosine
  modified_base 65: mod_base = OTHER; note = 2'-Omethyluridine
  modified_base 66: mod_base = OTHER; note = 2'-Omethylguanosine
  modified_base 67: mod_base = OTHER; note = 2'-Omethylguanosine
  modified_base 72: mod_base = OTHER; note = 2'-Omethyluridine

SEQ ID NO: 6211 - RNA, 76 nt, synthetic construct; identical to SEQ ID NO: 3490
  source 1..76: mol_type = other RNA
  modified_base 1: mod_base = OTHER; note = 2'-Omethylguanosine phosphorothiorate
  modified_base 2: mod_base = OTHER; note = 2'-Omethylguanosine phosphorothiorate
  modified_base 13: mod_base = OTHER; note = 2'-fluorocytosine
  modified_base 14: mod_base = OTHER; note = 2'-fluoroadenosine
  modified_base 54: mod_base = OTHER; note = 2'-fluorouridine
  modified_base 59: mod_base = OTHER; note = 2'-Omethylguanosine
  modified_base 75: mod_base = OTHER; note = Cytosine phosphorothiorate
  modified_base 76: mod_base = OTHER; note = 2'-Omethyladenosine

SEQ ID NO: 6212 - RNA, 74 nt, synthetic construct; identical to SEQ ID NO: 3293
  source 1..74: mol_type = other RNA
  modified_base 1: mod_base = OTHER; note = 2'-fluoroadenosine phosphorothiorate
  modified_base 6: mod_base = OTHER; note = Guanosine phosphorothiorate
  modified_base 8: mod_base = OTHER; note = 2'-Omethylguanosine
  modified_base 12: mod_base = OTHER; note = 2'-fluorocytosine
  modified_base 26: mod_base = OTHER; note = Cytosine phosphorothiorate
  modified_base 34: mod_base = OTHER; note = 2'-fluoroadenosine
  modified_base 48: mod_base = OTHER; note = Cytosine phosphorothiorate
  modified_base 62: mod_base = OTHER; note = 2'-fluoroguanosine
  modified_base 73: mod_base = OTHER; note = 2'-Omethylcytosine phosphorothiorate

SEQ ID NO: 6213 - RNA, 85 nt, synthetic construct; identical to SEQ ID NO: 3297
  source 1..85: mol_type = other RNA
  modified_base 1: mod_base = OTHER; note = 2'-Omethylguanosine phosphorothiorate
  modified_base 2: mod_base = OTHER; note = Cytosine phosphorothiorate
  modified_base 4: mod_base = OTHER; note = 2'-Omethylguanosine
  modified_base 14: mod_base = OTHER; note = 2'-Omethyladenosine phosphorothiorate
  modified_base 20: mod_base = OTHER; note = 2'-fluorouridine
  modified_base 34: mod_base = OTHER; note = 2'-fluorouridine
  modified_base 35: mod_base = OTHER; note = 2'-fluorocytosine
  modified_base 44: mod_base = OTHER; note = Uridine phosphorothiorate
  modified_base 58: mod_base = OTHER; note = 2'-Omethylguanosine phosphorothiorate
  modified_base 61: mod_base = OTHER; note = 2'-fluoroguanosine phosphorothiorate
  modified_base 82: mod_base = OTHER; note = 2'-Omethylguanosine

SEQ ID NO: 6214 - RNA, 86 nt, synthetic construct; identical to SEQ ID NO: 3290
  source 1..86: mol_type = other RNA
  modified_base 1: mod_base = OTHER; note = 2'-Omethyladenosine
  modified_base 2: mod_base = OTHER; note = 2'-Omethylcytosine
  modified_base 3: mod_base = OTHER; note = 2'-Omethylcytosine
  modified_base 4: mod_base = OTHER; note = 2'-Omethyladenosine
  modified_base 5: mod_base = OTHER; note = 2'-Omethylguanosine
  modified_base 6: mod_base = OTHER; note = 2'-Omethylguanosine
  modified_base 14: mod_base = OTHER; note = 2'-Omethyladenosine
  modified_base 15: mod_base = OTHER; note = 2'-fluoroguanosine
  modified_base 16: mod_base = OTHER; note = 2'-Omethyluridine
  modified_base 17: mod_base = OTHER; note = 2'-Omethylguanosine
  modified_base 18: mod_base = OTHER; note = 2'-Omethylguanosine
  modified_base 19: mod_base = OTHER; note = 2'-fluorouridine
  modified_base 20: mod_base = OTHER; note = 2'-Omethyluridine
  modified_base 25: mod_base = OTHER; note = 2'-Omethylcytosine
  modified_base 33: mod_base = OTHER; note = 2'-fluorouridine
  modified_base 35: mod_base = OTHER; note = Cytosine phosphorothiorate
  modified_base 37: mod_base = OTHER; note = Guanosine phosphorothiorate
  modified_base 38: mod_base = OTHER; note = Adenosine phosphorothiorate
  modified_base 41: mod_base = OTHER; note = 2'-Omethylcytosine
  modified_base 42: mod_base = OTHER; note = 2'-Omethyladenosine
  modified_base 43: mod_base = OTHER; note = 2'-Omethyladenosine
  modified_base 44: mod_base = OTHER; note = 2'-Omethyluridine
  modified_base 59: mod_base = OTHER; note = 2'-Omethylguanosine
  modified_base 60: mod_base = OTHER; note = 2'-Omethyluridine
  modified_base 62: mod_base = OTHER; note = 2'-Omethylguanosine
  modified_base 64: mod_base = OTHER; note = 2'-Omethyluridine
  modified_base 65: mod_base = OTHER; note = Uridine phosphorothiorate
  modified_base 66: mod_base = OTHER; note = 2'-Omethylcytosine
  modified_base 67: mod_base = OTHER; note = 2'-fluoroguanosine
  modified_base 69: mod_base = OTHER; note = 2'-Omethyladenosine
  modified_base 71: mod_base = OTHER; note = 2'-Omethylcytosine
  modified_base 75: mod_base = OTHER; note = 2'-Omethylcytosine
  modified_base 83: mod_base = OTHER; note = 2'-Omethyladenosine

SEQ ID NO: 6215 - RNA, 85 nt, synthetic construct; identical to SEQ ID NO: 3286
  source 1..85: mol_type = other RNA
  modified_base 1: mod_base = OTHER; note = 2'-Omethylcytosine
  modified_base 16: mod_base = OTHER; note = Guanosine phosphorothiorate
  modified_base 25: mod_base = OTHER; note = 2'-fluoroguanosine phosphorothiorate
  modified_base 26: mod_base = OTHER; note = 2'-fluorouridine
  modified_base 30: mod_base = OTHER; note = 2'-fluoroadenosine
  modified_base 32: mod_base = OTHER; note = 2'-fluorouridine
  modified_base 37: mod_base = OTHER; note = 2'-fluoroadenosine phosphorothiorate
  modified_base 40: mod_base = OTHER; note = 2'-fluorocytosine phosphorothiorate
  modified_base 43: mod_base = OTHER; note = 2'-Omethyluridine
  modified_base 46: mod_base = OTHER; note = Adenosine phosphorothiorate
  modified_base 47: mod_base = OTHER; note = 2'-Omethylcytosine
  modified_base 50: mod_base = OTHER; note = 2'-Omethyladenosine
  modified_base 56: mod_base = OTHER; note = 2'-Omethylguanosine
  modified_base 59: mod_base = OTHER; note = 2'-Omethyluridine
  modified_base 61: mod_base = OTHER; note = 2'-Omethylguanosine
  modified_base 65: mod_base = OTHER; note = Cytosine phosphorothiorate
  modified_base 75: mod_base = OTHER; note = 2'-fluorouridine phosphorothiorate
  modified_base 84: mod_base = OTHER; note = 2'-fluorocytosine
  modified_base 85: mod_base = OTHER; note = 2'-fluoroadenosine

SEQ ID NO: 6216 - RNA, 75 nt, synthetic construct; identical to SEQ ID NO: 3299
  source 1..75: mol_type = other RNA
  modified_base 5: mod_base = OTHER; note = 2'-Omethylguanosine phosphorothiorate
  modified_base 16: mod_base = OTHER; note = 2'-fluorocytosine
  modified_base 24: mod_base = OTHER; note = Cytosine phosphorothiorate
  modified_base 38: mod_base = OTHER; note = 2'-fluorouridine
  modified_base 47: mod_base = OTHER; note = 2'-fluorocytosine
  modified_base 50: mod_base = OTHER; note = 2'-fluoroguanosine phosphorothiorate
  modified_base 62: mod_base = OTHER; note = Cytosine phosphorothiorate
  modified_base 72: mod_base = OTHER; note = 2'-Omethylguanosine

SEQ ID NO: 6217 - RNA, 73 nt, synthetic construct; identical to SEQ ID NO: 935
  source 1..73: mol_type = other RNA
  modified_base 43: mod_base = OTHER; note = 2'-Omethyladenosine
  modified_base 49: mod_base = OTHER; note = 2'-Omethylcytosine
  modified_base 73: mod_base = OTHER; note = 2'-Omethylguanosine

SEQ ID NO: 6218 - RNA, 85 nt, synthetic construct; identical to SEQ ID NO: 3288
  source 1..85: mol_type = other RNA
  modified_base 1: mod_base = OTHER; note = 2'-Omethylcytosine
  modified_base 36: mod_base = OTHER; note = 2'-Omethylguanosine
  modified_base 56: mod_base = OTHER; note = 2'-Omethylguanosine
  modified_base 58: mod_base = OTHER; note = 2'-Omethylguanosine
  modified_base 64: mod_base = OTHER; note = Uridine phosphorothiorate

SEQ ID NO: 6219 - RNA, 85 nt, synthetic construct; identical to SEQ ID NO: 3297
  source 1..85: mol_type = other RNA
  modified_base 1: mod_base = OTHER; note = 2'-Omethylguanosine phosphorothiorate
  modified_base 4: mod_base = OTHER; note = Guanosine phosphorothiorate
  modified_base 15: mod_base = OTHER; note = 2'-Omethylguanosine
  modified_base 57: mod_base = OTHER; note = Cytosine phosphorothiorate
  modified_base 61: mod_base = OTHER; note = 2'-Omethylguanosine phosphorothiorate
  modified_base 83: mod_base = OTHER; note = 2'-Omethylcytosine phosphorothiorate

SEQ ID NO: 6220 - RNA, 76 nt, synthetic construct; identical to SEQ ID NO: 3289
  source 1..76: mol_type = other RNA
  modified_base 1: mod_base = OTHER; note = 2'-Omethylguanosine phosphorothiorate
  modified_base 2: mod_base = OTHER; note = 2'-Omethylcytosine phosphorothiorate
  modified_base 74: mod_base = OTHER; note = Cytosine phosphorothiorate
  modified_base 75: mod_base = OTHER; note = Cytosine phosphorothiorate

SEQ ID NO: 6221 - RNA, 76 nt, synthetic construct
  source 1..76: mol_type = other RNA
ggctccgtggcgcaatggagagcgcattggacttcaaattcaaaggttcggggttcgagtccccgcggagtcgcca

SEQ ID NO: 6222 - RNA, 76 nt, synthetic construct
  source 1..76: mol_type = other RNA
ggctccgtgaaataatggatcatttattggacttcaaattcaaaggttccgggttcgagtcccggcggagtcgcca

SEQ ID NO: 6223 - RNA, 75 nt, synthetic construct; identical to SEQ ID NO: 3306
  source 1..75: mol_type = other RNA
  modified_base 1: mod_base = OTHER; note = 2'-Omethylguanosine
  modified_base 13: mod_base = OTHER; note = 2'-Omethylcytosine
  modified_base 17: mod_base = OTHER; note = 2'-Omethylguanosine
  modified_base 18: mod_base = OTHER; note = 2'-Omethylguanosine
  modified_base 24: mod_base = OTHER; note = 2'-Omethylcytosine
  modified_base 32: mod_base = OTHER; note = Uridine phosphorothiorate
  modified_base 33: mod_base = OTHER; note = 2'-Omethylcytosine
  modified_base 34: mod_base = OTHER; note = Uridine phosphorothiorate
  modified_base 36: mod_base = OTHER; note = Guanosine phosphorothiorate
  modified_base 37: mod_base = OTHER; note = Adenosine phosphorothiorate
  modified_base 40: mod_base = OTHER; note = 2'-fluoroadenosine
  modified_base 41: mod_base = OTHER; note = 2'-Omethylguanosine
  modified_base 42: mod_base = OTHER; note = 2'-Omethyladenosine
  modified_base 43: mod_base = OTHER; note = 2'-fluoroadenosine
  modified_base 48: mod_base = OTHER; note = 2'-Omethylguanosine
  modified_base 49: mod_base = OTHER; note = 2'-Omethylcytosine
  modified_base 51: mod_base = OTHER; note = 2'-Omethyluridine
  modified_base 53: mod_base = OTHER; note = Uridine phosphorothiorate
  modified_base 54: mod_base = OTHER; note = Uridine phosphorothiorate
  modified_base 55: mod_base = OTHER; note = 2'-Omethylcytosine
  modified_base 56: mod_base = OTHER; note = Adenosine phosphorothiorate
  modified_base 57: mod_base = OTHER; note = Adenosine phosphorothiorate
  modified_base 58: mod_base = OTHER; note = 2'-Omethyladenosine
  modified_base 60: mod_base = OTHER; note = 2'-Omethylcytosine
  modified_base 64: mod_base = OTHER; note = 2'-Omethyluridine
  modified_base 72: mod_base = OTHER; note = 2'-Omethyladenosine

SEQ ID NO: 6224 - RNA, 76 nt, synthetic construct; identical to SEQ ID NO: 3289
  source 1..76: mol_type = other RNA
  modified_base 1: mod_base = OTHER; note = 2'-Omethylguanosine
  modified_base 2: mod_base = OTHER; note = 2'-Omethylcytosine
  modified_base 3: mod_base = OTHER; note = 2'-Omethylcytosine
  modified_base 4: mod_base = OTHER; note = 2'-Omethyluridine
  modified_base 5: mod_base = OTHER; note = 2'-Omethylguanosine
  modified_base 6: mod_base = OTHER; note = 2'-Omethylguanosine
  modified_base 10: mod_base = OTHER; note = 2'-Omethylguanosine
  modified_base 11: mod_base = OTHER; note = 2'-Omethylcytosine
  modified_base 12: mod_base = OTHER; note = 2'-Omethyluridine
  modified_base 13: mod_base = OTHER; note = 2'-Omethylcytosine
  modified_base 49: mod_base = OTHER; note = 2'-Omethylcytosine
  modified_base 50: mod_base = OTHER; note = 2'-Omethyladenosine
  modified_base 51: mod_base = OTHER; note = 2'-Omethylguanosine
  modified_base 52: mod_base = OTHER; note = 2'-Omethylguanosine
  modified_base 53: mod_base = OTHER; note = 2'-Omethylguanosine

SEQ ID NO: 6225 - RNA, 75 nt, synthetic construct; identical to SEQ ID NO: 1045
  source 1..75: mol_type = other RNA
  modified_base 1: mod_base = OTHER; note = 2'-Omethylguanosine
  modified_base 14: mod_base = OTHER; note = 2'-Omethyladenosine phosphorothiorate
  modified_base 15: mod_base = OTHER; note = 2'-Omethyladenosine phosphorothiorate
  modified_base 16: mod_base = OTHER; note = 2'-Omethyluridine phosphorothiorate
  modified_base 17: mod_base = OTHER; note = 2'-Omethylguanosine phosphorothiorate
  modified_base 18: mod_base = OTHER; note = 2'-Omethylguanosine phosphorothiorate
  modified_base 19: mod_base = OTHER; note = Uridine phosphorothiorate
  modified_base 20: mod_base = OTHER; note = 2'-Omethyladenosine phosphorothiorate
  modified_base 21: mod_base = OTHER; note = Adenosine phosphorothiorate
  modified_base 49: mod_base = OTHER; note = 2'-Omethylcytosine
  modified_base 51: mod_base = OTHER; note = 2'-Omethyladenosine
  modified_base 72: mod_base = OTHER; note = 2'-Omethyluridine

SEQ ID NO: 6226 - RNA, 85 nt, synthetic construct; identical to SEQ ID NO: 3286
  source 1..85: mol_type = other RNA
  modified_base 54: mod_base = OTHER; note = 2'-fluorocytosine
  modified_base 55: mod_base = OTHER; note = 2'-Omethylcytosine
  modified_base 58: mod_base = OTHER; note = Guanosine phosphorothiorate
  modified_base 73: mod_base = OTHER; note = 2'-fluoroadenosine
  modified_base 77: mod_base = OTHER; note = 2'-Omethylcytosine
  modified_base 85: mod_base = OTHER; note = 2'-Omethyladenosine

SEQ ID NO: 6227 - RNA, 76 nt, synthetic construct; identical to SEQ ID NO: 3295
  source 1..76: mol_type = other RNA
  modified_base 1: mod_base = OTHER; note = 2'-fluorocytosine
  modified_base 2: mod_base = OTHER; note = 2'-Omethylcytosine
  modified_base 3: mod_base = OTHER; note = 2'-Omethyluridine phosphorothiorate
  modified_base 4: mod_base = OTHER; note = 2'-Omethyluridine phosphorothiorate
  modified_base 6: mod_base = OTHER; note = 2'-fluoroguanosine phosphorothiorate
  modified_base 8: mod_base = OTHER; note = 2'-fluorouridine phosphorothiorate
  modified_base 9: mod_base = OTHER; note = 2'-fluoroadenosine
  modified_base 16: mod_base = OTHER; note = Uridine phosphorothiorate
  modified_base 17: mod_base = OTHER; note = 2'-Omethyluridine
  modified_base 27: mod_base = OTHER; note = 2'-Omethylguanosine phosphorothiorate
  modified_base 28: mod_base = OTHER; note = 2'-fluoroadenosine phosphorothiorate
  modified_base 30: mod_base = OTHER; note = Guanosine phosphorothiorate
  modified_base 38: mod_base = OTHER; note = 2'-Omethyladenosine
  modified_base 39: mod_base = OTHER; note = 2'-fluorouridine
  modified_base 41: mod_base = OTHER; note = 2'-fluorocytosine phosphorothiorate
  modified_base 43: mod_base = OTHER; note = 2'-Omethyluridine
  modified_base 47: mod_base = OTHER; note = 2'-fluorouridine phosphorothiorate
  modified_base 52: mod_base = OTHER; note = 2'-Omethylguanosine
  modified_base 53: mod_base = OTHER; note = Guanosine phosphorothiorate
  modified_base 54: mod_base = OTHER; note = 2'-fluorouridine phosphorothiorate
  modified_base 66: mod_base = OTHER; note = 2'-fluorouridine
  modified_base 74: mod_base = OTHER; note = 2'-fluorocytosine
  modified_base 75: mod_base = OTHER; note = 2'-Omethylcytosine phosphorothiorate
  modified_base 76: mod_base = OTHER; note = 2'-fluoroadenosine

SEQ ID NO: 6228 - DNA, 76 bp, synthetic construct; identical to SEQ ID NO: 1924
  source 1..76: mol_type = other DNA
  modified_base 1: mod_base = OTHER; note = 2'-Omethylguanosine phosphorothiorate
  modified_base 2: mod_base = OTHER; note = 2'-Omethylguanosine phosphorothiorate
  modified_base 45: mod_base = OTHER; note = Guanosine phosphorothiorate
  modified_base 65: mod_base = OTHER; note = 2'-Omethylguanosine
  modified_base 73: mod_base = OTHER; note = Guanosine phosphorothiorate
  modified_base 74: mod_base = OTHER; note = Cytosine phosphorothiorate
  modified_base 75: mod_base = OTHER; note = 2'-Omethylcytosine phosphorothiorate
  modified_base 76: mod_base = OTHER; note = 2'-Omethyladenosine
  misc_feature 1..45: note = RNA
  misc_feature 46: note = DNA
  misc_feature 47..76: note = RNA

SEQ ID NO: 6229 - RNA, 76 nt, synthetic construct; identical to SEQ ID NO: 625
  source 1..76: mol_type = other RNA
  modified_base 1: mod_base = OTHER; note = 2'-Omethylguanosine
  modified_base 2: mod_base = OTHER; note = 2'-fluoroguanosine phosphorothiorate
  modified_base 3: mod_base = OTHER; note = 2'-Omethylcytosine
  modified_base 4: mod_base = OTHER; note = 2'-Omethyluridine phosphorothiorate
  modified_base 5: mod_base = OTHER; note = 2'-fluorocytosine
  modified_base 6: mod_base = OTHER; note = 2'-Omethylcytosine
  modified_base 10: mod_base = OTHER; note = 2'-fluoroguanosine
  modified_base 11: mod_base = OTHER; note = 2'-Omethylcytosine
  modified_base 16: mod_base = OTHER; note = 2'-Omethyluridine
  modified_base 17: mod_base = OTHER; note = 2'-Omethylguanosine
  modified_base 20: mod_base = OTHER; note = Uridine phosphorothiorate
  modified_base 24: mod_base = OTHER; note = Guanosine phosphorothiorate
  modified_base 25: mod_base = OTHER; note = 2'-Omethylcytosine
  modified_base 27: mod_base = OTHER; note = Uridine phosphorothiorate
  modified_base 28: mod_base = OTHER; note = 2'-Omethyluridine
  modified_base 31: mod_base = OTHER; note = 2'-fluoroadenosine
  modified_base 39: mod_base = OTHER; note = 2'-fluorouridine
  modified_base 41: mod_base = OTHER; note = Cytosine phosphorothiorate
  modified_base 42: mod_base = OTHER; note = 2'-Omethyladenosine
  modified_base 43: mod_base = OTHER; note = 2'-Omethyladenosine phosphorothiorate
  modified_base 44: mod_base = OTHER; note = 2'-Omethyladenosine
  modified_base 45: mod_base = OTHER; note = Guanosine phosphorothiorate
  modified_base 46: mod_base = OTHER; note = 2'-Omethylguanosine
  modified_base 52: mod_base = OTHER; note = 2'-fluoroguanosine
  modified_base 54: mod_base = OTHER; note = 2'-Omethyluridine
  modified_base 55: mod_base = OTHER; note = Uridine phosphorothiorate
  modified_base 60: mod_base = OTHER; note = 2'-fluorouridine
  modified_base 63: mod_base = OTHER; note = Cytosine phosphorothiorate
  modified_base 64: mod_base = OTHER; note = 2'-Omethylguanosine
  modified_base 65: mod_base = OTHER; note = 2'-Omethylguanosine
  modified_base 67: mod_base = OTHER; note = 2'-fluoroguanosine phosphorothiorate
  modified_base 68: mod_base = OTHER; note = 2'-fluoroguanosine
  modified_base 69: mod_base = OTHER; note = 2'-fluoroadenosine
  modified_base 73: mod_base = OTHER; note = 2'-Omethylguanosine
  modified_base 74: mod_base = OTHER; note = 2'-fluorocytosine
  modified_base 76: mod_base = OTHER; note = 2'-fluoroadenosine

SEQ ID NO: 6230 - RNA, 76 nt, synthetic construct; identical to SEQ ID NO: 3318
  source 1..76: mol_type = other RNA
  modified_base 1: mod_base = OTHER; note = 2'-Omethylcytosine
  modified_base 2: mod_base = OTHER; note = 2'-Omethylcytosine
  modified_base 3: mod_base = OTHER; note = 2'-Omethyluridine
  modified_base 4: mod_base = OTHER; note = 2'-Omethyluridine
  modified_base 5: mod_base = OTHER; note = 2'-Omethylcytosine
  modified_base 6: mod_base = OTHER; note = 2'-Omethylguanosine
  modified_base 13: mod_base = OTHER; note = 2'-Omethylcytosine
  modified_base 18: mod_base = OTHER; note = 2'-Omethylguanosine
  modified_base 19: mod_base = OTHER; note = 2'-Omethylguanosine
  modified_base 25: mod_base = OTHER; note = 2'-Omethylcytosine
  modified_base 33: mod_base = OTHER; note = Uridine phosphorothiorate
  modified_base 34: mod_base = OTHER; note = 2'-Omethylcytosine
  modified_base 35: mod_base = OTHER; note = Uridine phosphorothiorate
  modified_base 37: mod_base = OTHER; note = Guanosine phosphorothiorate
  modified_base 38: mod_base = OTHER; note = Adenosine phosphorothiorate
  modified_base 41: mod_base = OTHER; note = 2'-fluorocytosine
  modified_base 42: mod_base = OTHER; note = 2'-Omethyluridine
  modified_base 43: mod_base = OTHER; note = 2'-Omethyluridine
  modified_base 44: mod_base = OTHER; note = 2'-fluoroadenosine
  modified_base 49: mod_base = OTHER; note = 2'-Omethylguanosine
  modified_base 50: mod_base = OTHER; note = 2'-Omethylcytosine
  modified_base 51: mod_base = OTHER; note = 2'-Omethyluridine
  modified_base 52: mod_base = OTHER; note = 2'-Omethylguanosine
  modified_base 53: mod_base = OTHER; note = 2'-Omethylguanosine
  modified_base 54: mod_base = OTHER; note = Uridine phosphorothiorate
  modified_base 55: mod_base = OTHER; note = Uridine phosphorothiorate
  modified_base 61: mod_base = OTHER; note = 2'-Omethylcytosine
  modified_base 65: mod_base = OTHER; note = 2'-Omethylcytosine
  modified_base 73: mod_base = OTHER; note = 2'-Omethyladenosine

SEQ ID NO: 6231 - RNA, 74 nt, synthetic construct; identical to SEQ ID NO: 3293
  source 1..74: mol_type = other RNA
  modified_base 1: mod_base = OTHER; note = 2'-Omethyladenosine
  modified_base 2: mod_base = OTHER; note = Cytosine phosphorothiorate
  modified_base 3: mod_base = OTHER; note = Cytosine phosphorothiorate
  modified_base 4: mod_base = OTHER; note = 2'-fluorouridine
  modified_base 8: mod_base = OTHER; note = Guanosine phosphorothiorate
  modified_base 9: mod_base = OTHER; note = 2'-fluoroguanosine
  modified_base 10: mod_base = OTHER; note = 2'-Omethylcytosine phosphorothiorate
  modified_base 24: mod_base = OTHER; note = Guanosine phosphorothiorate
  modified_base 27: mod_base = OTHER; note = 2'-fluorouridine
  modified_base 34: mod_base = OTHER; note = 2'-Omethyladenosine
  modified_base 37: mod_base = OTHER; note = 2'-fluorouridine
  modified_base 42: mod_base = OTHER; note = Adenosine phosphorothiorate
  modified_base 48: mod_base = OTHER; note = 2'-fluorocytosine
  modified_base 50: mod_base = OTHER; note = Uridine phosphorothiorate
  modified_base 51: mod_base = OTHER; note = 2'-fluoroguanosine
  modified_base 59: mod_base = OTHER; note = 2'-fluorocytosine phosphorothiorate
  modified_base 73: mod_base = OTHER; note = 2'-Omethylcytosine phosphorothiorate

SEQ ID NO: 6232 - RNA, 76 nt, synthetic construct; identical to SEQ ID NO: 625
  source 1..76: mol_type = other RNA
  modified_base 1: mod_base = OTHER; note = Guanosine phosphorothiorate
  modified_base 2: mod_base = OTHER; note = 2'-Omethylguanosine
  modified_base 7: mod_base = OTHER; note = Guanosine phosphorothiorate
  modified_base 16: mod_base = OTHER; note = 2'-fluorouridine phosphorothiorate
  modified_base 17: mod_base = OTHER; note = 2'-Omethylguanosine
  modified_base 20: mod_base = OTHER; note = 2'-fluorouridine
  modified_base 22: mod_base = OTHER; note = 2'-Omethylguanosine
  modified_base 23: mod_base = OTHER; note = 2'-Omethylcytosine
  modified_base 27: mod_base = OTHER; note = 2'-fluorouridine
  modified_base 28: mod_base = OTHER; note = Uridine phosphorothiorate
  modified_base 29: mod_base = OTHER; note = 2'-fluoroguanosine
  modified_base 30: mod_base = OTHER; note = 2'-Omethylguanosine
  modified_base 31: mod_base = OTHER; note = 2'-fluoroadenosine
  modified_base 32: mod_base = OTHER; note = 2'-fluorocytosine
  modified_base 34: mod_base = OTHER; note = 2'-Omethyluridine
  modified_base 38: mod_base = OTHER; note = 2'-fluoroadenosine
  modified_base 39: mod_base = OTHER; note = 2'-fluorouridine
  modified_base 46: mod_base = OTHER; note = Guanosine phosphorothiorate
  modified_base 47: mod_base = OTHER; note = 2'-Omethyluridine
  modified_base 48: mod_base = OTHER; note = 2'-fluorouridine
  modified_base 49: mod_base = OTHER; note = 2'-fluorocytosine
  modified_base 52: mod_base = OTHER; note = Guanosine phosphorothiorate
  modified_base 53: mod_base = OTHER; note = Guanosine phosphorothiorate
  modified_base 60: mod_base = OTHER; note = 2'-Omethyluridine phosphorothiorate
  modified_base 61: mod_base = OTHER; note = 2'-Omethylcytosine
  modified_base 62: mod_base = OTHER; note = 2'-Omethylcytosine
  modified_base 63: mod_base = OTHER; note = Cytosine phosphorothiorate
  modified_base 64: mod_base = OTHER; note = 2'-Omethylguanosine
  modified_base 66: mod_base = OTHER; note = 2'-fluorocytosine
  modified_base 70: mod_base = OTHER; note = 2'-fluoroguanosine
  modified_base 72: mod_base = OTHER; note = 2'-Omethylcytosine
  modified_base 73: mod_base = OTHER; note = 2'-fluoroguanosine
  modified_base 74: mod_base = OTHER; note = Cytosine phosphorothiorate
  modified_base 75: mod_base = OTHER; note = Cytosine phosphorothiorate
  modified_base 76: mod_base = OTHER; note = 2'-fluoroadenosine

SEQ ID NO: 6233 - RNA, 76 nt, synthetic construct; identical to SEQ ID NO: 625
  source 1..76: mol_type = other RNA
  modified_base 1: mod_base = OTHER; note = 2'-Omethylguanosine phosphorothiorate
  modified_base 2: mod_base = OTHER; note = 2'-Omethylguanosine phosphorothiorate
  modified_base 18: mod_base = OTHER; note = 2'-fluoroguanosine
  modified_base 73: mod_base = OTHER; note = Guanosine phosphorothiorate
  modified_base 74: mod_base = OTHER; note = Cytosine phosphorothiorate
  modified_base 75: mod_base = OTHER; note = 2'-Omethylcytosine phosphorothiorate
  modified_base 76: mod_base = OTHER; note = 2'-Omethyladenosine

SEQ ID NO: 6234 - RNA, 76 nt, synthetic construct; identical to SEQ ID NO: 3289
  source 1..76: mol_type = other RNA
  modified_base 1: mod_base = OTHER; note = 2'-Omethylguanosine
  modified_base 13: mod_base = OTHER; note = 2'-Omethylcytosine
  modified_base 14: mod_base = OTHER; note = 2'-Omethyladenosine
  modified_base 15: mod_base = OTHER; note = 2'-Omethylguanosine
  modified_base 16: mod_base = OTHER; note = 2'-Omethyluridine
  modified_base 18: mod_base = OTHER; note = 2'-Omethylguanosine
  modified_base 19: mod_base = OTHER; note = 2'-Omethylguanosine
  modified_base 20: mod_base = OTHER; note = Uridine phosphorothiorate
  modified_base 21: mod_base = OTHER; note = Adenosine phosphorothiorate
  modified_base 25: mod_base = OTHER; note = 2'-Omethylcytosine
  modified_base 33: mod_base = OTHER; note = 2'-fluorouridine
  modified_base 34: mod_base = OTHER; note = 2'-Omethyluridine
  modified_base 35: mod_base = OTHER; note = Uridine phosphorothiorate
  modified_base 37: mod_base = OTHER; note = Adenosine phosphorothiorate
  modified_base 38: mod_base = OTHER; note = Adenosine phosphorothiorate
  modified_base 49: mod_base = OTHER; note = 2'-Omethylcytosine
  modified_base 50: mod_base = OTHER; note = 2'-Omethyladenosine
  modified_base 51: mod_base = OTHER; note = 2'-Omethylguanosine
  modified_base 52: mod_base = OTHER; note = 2'-Omethylguanosine
  modified_base 53: mod_base = OTHER; note = 2'-Omethylguanosine
  modified_base 54: mod_base = OTHER; note = Uridine phosphorothiorate
  modified_base 55: mod_base = OTHER; note = Uridine phosphorothiorate
  modified_base 61: mod_base = OTHER; note = 2'-Omethylcytosine
  modified_base 65: mod_base = OTHER; note = 2'-Omethylguanosine
  modified_base 73: mod_base = OTHER; note = 2'-Omethylguanosine

SEQ ID NO: 6235 - RNA, 76 nt, synthetic construct; identical to SEQ ID NO: 625
  source 1..76: mol_type = other RNA
  modified_base 3: mod_base = OTHER; note = 2'-fluorocytosine phosphorothiorate
  modified_base 4: mod_base = OTHER; note = 2'-fluorouridine
  modified_base 6: mod_base = OTHER; note = 2'-fluorocytosine
  modified_base 8: mod_base = OTHER; note = Uridine phosphorothiorate
  modified_base 10: mod_base = OTHER; note = 2'-fluoroguanosine
  modified_base 13: mod_base = OTHER; note = 2'-fluorocytosine phosphorothiorate
  modified_base 22: mod_base = OTHER; note = 2'-Omethylguanosine
  modified_base 28: mod_base = OTHER; note = 2'-Omethyluridine
  modified_base 30: mod_base = OTHER; note = Guanosine phosphorothiorate
  modified_base 31: mod_base = OTHER; note = 2'-fluoroadenosine
  modified_base 33: mod_base = OTHER; note = Uridine phosphorothiorate
  modified_base 34: mod_base = OTHER; note = 2'-fluorouridine
  modified_base 40: mod_base = OTHER; note = 2'-Omethyluridine
  modified_base 41: mod_base = OTHER; note = 2'-fluorocytosine
  modified_base 44: mod_base = OTHER; note = 2'-Omethyladenosine
  modified_base 46: mod_base = OTHER; note = 2'-Omethylguanosine phosphorothiorate
  modified_base 47: mod_base = OTHER; note = 2'-Omethyluridine
  modified_base 51: mod_base = OTHER; note = 2'-Omethylguanosine
  modified_base 53: mod_base = OTHER; note = 2'-Omethylguanosine
  modified_base 54: mod_base = OTHER; note = 2'-fluorouridine
  modified_base 56: mod_base = OTHER; note = 2'-Omethylcytosine
  modified_base 57: mod_base = OTHER; note = 2'-Omethylguanosine
  modified_base 58: mod_base = OTHER; note = 2'-fluoroadenosine
  modified_base 59: mod_base = OTHER; note = 2'-fluoroguanosine
  modified_base 61: mod_base = OTHER; note = 2'-Omethylcytosine
  modified_base 64: mod_base = OTHER; note = 2'-fluoroguanosine
  modified_base 65: mod_base = OTHER; note = 2'-Omethylguanosine
  modified_base 66: mod_base = OTHER; note = 2'-fluorocytosine
  modified_base 69: mod_base = OTHER; note = 2'-fluoroadenosine
  modified_base 72: mod_base = OTHER; note = 2'-Omethylcytosine phosphorothiorate
  modified_base 73: mod_base = OTHER; note = 2'-fluoroguanosine
  modified_base 75: mod_base = OTHER; note = 2'-Omethylcytosine phosphorothiorate
  modified_base 76: mod_base = OTHER; note = 2'-Omethyladenosine

SEQ ID NO: 6236 - RNA, 75 nt, synthetic construct; identical to SEQ ID NO: 1045
  source 1..75: mol_type = other RNA
  modified_base 1: mod_base = OTHER; note = 2'-Omethylguanosine
  modified_base 10: mod_base = OTHER; note = 2'-Omethylguanosine
  modified_base 11: mod_base = OTHER; note = 2'-Omethyluridine
  modified_base 12: mod_base = OTHER; note = 2'-Omethylguanosine
  modified_base 13: mod_base = OTHER; note = 2'-Omethyluridine
  modified_base 17: mod_base = OTHER; note = 2'-Omethylguanosine
  modified_base 18: mod_base = OTHER; note = 2'-Omethylguanosine
  modified_base 25: mod_base = OTHER; note = 2'-Omethylcytosine
  modified_base 33: mod_base = OTHER; note = Uridine phosphorothiorate
  modified_base 34: mod_base = OTHER; note = 2'-Omethyluridine
  modified_base 35: mod_base = OTHER; note = Uridine phosphorothiorate
  modified_base 37: mod_base = OTHER; note = Adenosine phosphorothiorate
  modified_base 38: mod_base = OTHER; note = Adenosine phosphorothiorate
  modified_base 41: mod_base = OTHER; note = 2'-fluorocytosine
  modified_base 42: mod_base = OTHER; note = 2'-Omethyladenosine
  modified_base 43: mod_base = OTHER; note = 2'-Omethylguanosine
  modified_base 44: mod_base = OTHER; note = 2'-fluorocytosine
  modified_base 48: mod_base = OTHER; note = 2'-Omethylcytosine
  modified_base 49: mod_base = OTHER; note = 2'-Omethylcytosine
  modified_base 51: mod_base = OTHER; note = 2'-Omethyladenosine
  modified_base 53: mod_base = OTHER; note = Uridine phosphorothiorate
  modified_base 54: mod_base = OTHER; note = Uridine phosphorothiorate
  modified_base 60: mod_base = OTHER; note = 2'-Omethylcytosine
  modified_base 64: mod_base = OTHER; note = 2'-Omethylguanosine
  modified_base 72: mod_base = OTHER; note = 2'-Omethyluridine

SEQ ID NO: 6237 - RNA, 76 nt, synthetic construct; identical to SEQ ID NO: 3329
  source 1..76: mol_type = other RNA
  modified_base 1: mod_base = OTHER; note = 2'-Omethylguanosine
  modified_base 2: mod_base = OTHER; note = 2'-Omethylguanosine
  modified_base 3: mod_base = OTHER; note = 2'-Omethylcytosine
  modified_base 4: mod_base = OTHER; note = 2'-Omethylcytosine
  modified_base 5: mod_base = OTHER; note = 2'-Omethylcytosine
  modified_base 6: mod_base = OTHER; note = 2'-Omethylcytosine
  modified_base 14: mod_base = OTHER; note = 2'-Omethyladenosine
  modified_base 15: mod_base = OTHER; note = 2'-Omethyladenosine
  modified_base 16: mod_base = OTHER; note = 2'-Omethyluridine
  modified_base 17: mod_base = OTHER; note = 2'-Omethylguanosine
  modified_base 18: mod_base = OTHER; note = 2'-Omethylguanosine
  modified_base 20: mod_base = OTHER; note = 2'-Omethyluridine
  modified_base 25: mod_base = OTHER; note = 2'-Omethylcytosine
  modified_base 41: mod_base = OTHER; note = 2'-Omethylcytosine
  modified_base 42: mod_base = OTHER; note = 2'-Omethyladenosine
  modified_base 43: mod_base = OTHER; note = 2'-Omethyladenosine
  modified_base 44: mod_base = OTHER; note = 2'-Omethyladenosine
  modified_base 49: mod_base = OTHER; note = 2'-Omethylcytosine
  modified_base 50: mod_base = OTHER; note = 2'-Omethylcytosine
  modified_base 52: mod_base = OTHER; note = 2'-Omethylguanosine
  modified_base 54: mod_base = OTHER; note = 2'-Omethyluridine
  modified_base 55: mod_base = OTHER; note = Uridine phosphorothiorate
  modified_base 56: mod_base = OTHER; note = 2'-Omethylcytosine
  modified_base 57: mod_base = OTHER; note = 2'-fluoroguanosine
  modified_base 59: mod_base = OTHER; note = 2'-Omethylguanosine
  modified_base 61: mod_base = OTHER; note = 2'-Omethylcytosine
  modified_base 65: mod_base = OTHER; note = 2'-Omethylguanosine
  modified_base 73: mod_base = OTHER; note = 2'-Omethylguanosine

SEQ ID NO: 6238 - RNA, 85 nt, synthetic construct; identical to SEQ ID NO: 3310
  source 1..85: mol_type = other RNA
  modified_base 13: mod_base = OTHER; note = 2'-Omethyladenosine
  modified_base 28: mod_base = OTHER; note = 2'-fluoroguanosine
  modified_base 49: mod_base = OTHER; note = 2'-Omethyluridine
  modified_base 52: mod_base = OTHER; note = Guanosine phosphorothiorate
  modified_base 67: mod_base = OTHER; note = 2'-fluoroadenosine
  modified_base 84: mod_base = OTHER; note = 2'-fluorocytosine
  modified_base 85: mod_base = OTHER; note = 2'-fluoroadenosine

SEQ ID NO: 6239 - RNA, 86 nt, synthetic construct; identical to SEQ ID NO: 3290
  source 1..86: mol_type = other RNA
  modified_base 1: mod_base = OTHER; note = 2'-Omethyladenosine
  modified_base 2: mod_base = OTHER; note = 2'-Omethylcytosine
  modified_base 3: mod_base = OTHER; note = 2'-Omethylcytosine
  modified_base 4: mod_base = OTHER; note = 2'-Omethyladenosine
  modified_base 5: mod_base = OTHER; note = 2'-Omethylguanosine
  modified_base 6: mod_base = OTHER; note = 2'-Omethylguanosine
  modified_base 59: mod_base = OTHER; note = 2'-Omethylguanosine
  modified_base 60: mod_base = OTHER; note = 2'-Omethyluridine
  modified_base 61: mod_base = OTHER; note = 2'-Omethylguanosine
  modified_base 62: mod_base = OTHER; note = 2'-Omethylguanosine
  modified_base 63: mod_base = OTHER; note = 2'-Omethylguanosine

SEQ ID NO: 6240 - RNA, 86 nt, synthetic construct; identical to SEQ ID NO: 3290
  source 1..86: mol_type = other RNA
  modified_base 16: mod_base = OTHER; note = 2'-Omethyluridine
  modified_base 83: mod_base = OTHER; note = 2'-Omethyladenosine

SEQ ID NO: 6241 - RNA, 76 nt, synthetic construct; identical to SEQ ID NO: 3318
  source 1..76: mol_type = other RNA
  modified_base 1: mod_base = OTHER; note = 2'-Omethylcytosine
  modified_base 54: mod_base = OTHER; note = 2'-Omethyluridine
  modified_base 56: mod_base = OTHER; note = 2'-Omethylcytosine
  modified_base 57: mod_base = OTHER; note = 2'-fluoroguanosine
  modified_base 58: mod_base = OTHER; note = 2'-fluoroadenosine
  modified_base 59: mod_base = OTHER; note = 2'-Omethyladenosine
  modified_base 60: mod_base = OTHER; note = 2'-fluorouridine
  modified_base 73: mod_base = OTHER; note = 2'-Omethyladenosine

SEQ ID NO: 6242 - RNA, 86 nt, synthetic construct; identical to SEQ ID NO: 3290
  source 1..86: mol_type = other RNA
  modified_base 32: mod_base = OTHER; note = Cytosine phosphorothiorate

SEQ ID NO: 6243 - RNA, 76 nt, synthetic construct; identical to SEQ ID NO: 3289
  source 1..76: mol_type = other RNA
  modified_base 1: mod_base = OTHER; note = 2'-Omethylguanosine
  modified_base 2: mod_base = OTHER; note = 2'-Omethylcytosine
  modified_base 3: mod_base = OTHER; note = 2'-Omethylcytosine
  modified_base 4: mod_base = OTHER; note = 2'-Omethyluridine
  modified_base 5: mod_base = OTHER; note = 2'-Omethylguanosine
  modified_base 6: mod_base = OTHER; note = 2'-Omethylguanosine
  modified_base 14: mod_base = OTHER; note = 2'-Omethyladenosine
  modified_base 18: mod_base = OTHER; note = 2'-Omethylguanosine
  modified_base 19: mod_base = OTHER; note = 2'-Omethylguanosine
  modified_base 22: mod_base = OTHER; note = 2'-Omethylguanosine
  modified_base 25: mod_base = OTHER; note = 2'-Omethylcytosine
  modified_base 27: mod_base = OTHER; note = 2'-Omethyluridine
  modified_base 33: mod_base = OTHER; note = 2'-fluorouridine
  modified_base 41: mod_base = OTHER; note = 2'-Omethyluridine
  modified_base 44: mod_base = OTHER; note = 2'-Omethylguanosine
  modified_base 45: mod_base = OTHER; note = 2'-Omethylguanosine
  modified_base 46: mod_base = OTHER; note = 2'-fluoroguanosine
  modified_base 47: mod_base = OTHER; note = 2'-fluorouridine
  modified_base 48: mod_base = OTHER; note = 2'-fluorocytosine
  modified_base 52: mod_base = OTHER; note = 2'-Omethylguanosine
  modified_base 55: mod_base = OTHER; note = Uridine phosphorothiorate
  modified_base 73: mod_base = OTHER; note = 2'-Omethylguanosine

SEQ ID NO: 6244 - RNA, 76 nt, synthetic construct; identical to SEQ ID NO: 625
  source 1..76: mol_type = other RNA
  modified_base 49: mod_base = OTHER; note = Cytosine phosphorothiorate
  modified_base 50: mod_base = OTHER; note = Cytosine phosphorothiorate
  modified_base 51: mod_base = OTHER; note = Guanosine phosphorothiorate
  modified_base 52: mod_base = OTHER; note = Guanosine phosphorothiorate
  modified_base 53: mod_base = OTHER; note = Guanosine phosphorothiorate

SEQ ID NO: 6245 - RNA, 76 nt, synthetic construct; identical to SEQ ID NO: 3289
  source 1..76: mol_type = other RNA
  modified_base 1: mod_base = OTHER; note = 2'-Omethylguanosine
  modified_base 2: mod_base = OTHER; note = 2'-Omethylcytosine
  modified_base 3: mod_base = OTHER; note = 2'-Omethylcytosine
  modified_base 4: mod_base = OTHER; note = 2'-Omethyluridine
  modified_base 5: mod_base = OTHER; note = 2'-Omethylguanosine
  modified_base 6: mod_base = OTHER; note = 2'-Omethylguanosine
  modified_base 65: mod_base = OTHER; note = 2'-Omethylguanosine
  modified_base 66: mod_base = OTHER; note = 2'-Omethyluridine
  modified_base 67: mod_base = OTHER; note = 2'-Omethylcytosine
  modified_base 68: mod_base = OTHER; note = 2'-Omethylcytosine
  modified_base 73: mod_base = OTHER; note = 2'-Omethylguanosine

SEQ ID NO: 6246 - RNA, 76 nt, synthetic construct; identical to SEQ ID NO: 625
  source 1..76: mol_type = other RNA
  modified_base 1: mod_base = OTHER; note = 2'-Omethylguanosine
  modified_base 2: mod_base = OTHER; note = 2'-fluoroguanosine
  modified_base 4: mod_base = OTHER; note = 2'-fluorouridine
  modified_base 5: mod_base = OTHER; note = 2'-Omethylcytosine
  modified_base 6: mod_base = OTHER; note = Cytosine phosphorothiorate
  modified_base 15: mod_base = OTHER; note = Adenosine phosphorothiorate
  modified_base 16: mod_base = OTHER; note = 2'-fluorouridine
  modified_base 20: mod_base = OTHER; note = 2'-fluorouridine phosphorothiorate
  modified_base 28: mod_base = OTHER; note = Uridine phosphorothiorate
  modified_base 29: mod_base = OTHER; note = 2'-fluoroguanosine
  modified_base 32: mod_base = OTHER; note = 2'-fluorocytosine
  modified_base 34: mod_base = OTHER; note = 2'-Omethyluridine
  modified_base 36: mod_base = OTHER; note = Adenosine phosphorothiorate
  modified_base 38: mod_base = OTHER; note = 2'-fluoroadenosine
  modified_base 39: mod_base = OTHER; note = 2'-fluorouridine phosphorothiorate
  modified_base 40: mod_base = OTHER; note = 2'-Omethyluridine
  modified_base 43: mod_base = OTHER; note = 2'-fluoroadenosine
  modified_base 45: mod_base = OTHER; note = 2'-Omethylguanosine
  modified_base 47: mod_base = OTHER; note = Uridine phosphorothiorate
  modified_base 48: mod_base = OTHER; note = 2'-Omethyluridine
  modified_base 49: mod_base = OTHER; note = Cytosine phosphorothiorate
  modified_base 50: mod_base = OTHER; note = 2'-Omethylcytosine
  modified_base 51: mod_base = OTHER; note = Guanosine phosphorothiorate
  modified_base 52: mod_base = OTHER; note = 2'-fluoroguanosine
  modified_base 54: mod_base = OTHER; note = 2'-Omethyluridine
  modified_base 56: mod_base = OTHER; note = Cytosine phosphorothiorate
  modified_base 58: mod_base = OTHER; note = 2'-fluoroadenosine
  modified_base 62: mod_base = OTHER; note = 2'-fluorocytosine
  modified_base 65: mod_base = OTHER; note = 2'-Omethylguanosine
  modified_base 67: mod_base = OTHER; note = Guanosine phosphorothiorate
  modified_base 68: mod_base = OTHER; note = 2'-Omethylguanosine phosphorothiorate
  modified_base 69: mod_base = OTHER; note = 2'-fluoroadenosine
  modified_base 70: mod_base = OTHER; note = Guanosine phosphorothiorate
  modified_base 71: mod_base = OTHER; note = 2'-Omethyluridine
  modified_base 72: mod_base = OTHER; note = 2'-Omethylcytosine phosphorothiorate
  modified_base 74: mod_base = OTHER; note = 2'-Omethylcytosine phosphorothiorate

SEQ ID NO: 6247 - RNA, 73 nt, synthetic construct; identical to SEQ ID NO: 935
  source 1..73: mol_type = other RNA
  modified_base 1: mod_base = OTHER; note = 2'-Omethylguanosine phosphorothiorate
  modified_base 2: mod_base = OTHER; note = 2'-Omethylguanosine
  modified_base 3: mod_base = OTHER; note = 2'-Omethylcytosine
  modified_base 4: mod_base = OTHER; note = 2'-Omethyluridine
  modified_base 5: mod_base = OTHER; note = 2'-Omethylcytosine
  modified_base 6: mod_base = OTHER; note = 2'-Omethylcytosine
  modified_base 43: mod_base = OTHER; note = 2'-Omethyladenosine
  modified_base 44: mod_base = OTHER; note = 2'-Omethyladenosine
  modified_base 45: mod_base = OTHER; note = 2'-Omethylguanosine
  modified_base 46: mod_base = OTHER; note = 2'-fluoroguanosine
  modified_base 48: mod_base = OTHER; note = 2'-fluorouridine
  modified_base 49: mod_base = OTHER; note = 2'-Omethylcytosine
  modified_base 73: mod_base = OTHER; note = 2'-Omethylguanosine

SEQ ID NO: 6248 - RNA, 76 nt, synthetic construct; identical to SEQ ID NO: 625
  source 1..76: mol_type = other RNA
  modified_base 1: mod_base = OTHER; note = 2'-Omethylguanosine
  modified_base 5: mod_base = OTHER; note = 2'-Omethylcytosine
  modified_base 10: mod_base = OTHER; note = 2'-fluoroguanosine
  modified_base 11: mod_base = OTHER; note = Cytosine phosphorothiorate
  modified_base 12: mod_base = OTHER; note = 2'-fluoroguanosine
  modified_base 14: mod_base = OTHER; note = 2'-Omethyladenosine
  modified_base 16: mod_base = OTHER; note = Uridine phosphorothiorate
  modified_base 17: mod_base = OTHER; note = 2'-Omethylguanosine
  modified_base 18: mod_base = OTHER; note = 2'-fluoroguanosine phosphorothiorate
  modified_base 19: mod_base = OTHER; note = Adenosine phosphorothiorate
  modified_base 20: mod_base = OTHER; note = 2'-Omethyluridine phosphorothiorate
  modified_base 22: mod_base = OTHER; note = 2'-fluoroguanosine
  modified_base 24: mod_base = OTHER; note = 2'-fluoroguanosine
  modified_base 25: mod_base = OTHER; note = 2'-fluorocytosine
  modified_base 31: mod_base = OTHER; note = 2'-fluoroadenosine
  modified_base 34: mod_base = OTHER; note = 2'-Omethyluridine
  modified_base 40: mod_base = OTHER; note = Uridine phosphorothiorate
  modified_base 42: mod_base = OTHER; note = 2'-Omethyladenosine phosphorothiorate
  modified_base 43: mod_base = OTHER; note = 2'-Omethyladenosine
  modified_base 48: mod_base = OTHER; note = 2'-fluorouridine
  modified_base 49: mod_base = OTHER; note = 2'-Omethylcytosine
  modified_base 50: mod_base = OTHER; note = 2'-Omethylcytosine
  modified_base 51: mod_base = OTHER; note = 2'-Omethylguanosine
  modified_base 52: mod_base = OTHER; note = Guanosine phosphorothiorate
  modified_base 56: mod_base = OTHER; note = 2'-Omethylcytosine
  modified_base 58: mod_base = OTHER; note = 2'-fluoroadenosine
  modified_base 59: mod_base = OTHER; note = 2'-fluoroguanosine
  modified_base 60: mod_base = OTHER; note = 2'-Omethyluridine
  modified_base 61: mod_base = OTHER; note = 2'-fluorocytosine
  modified_base 63: mod_base = OTHER; note = 2'-Omethylcytosine
  modified_base 65: mod_base = OTHER; note = Guanosine phosphorothiorate
  modified_base 66: mod_base = OTHER; note = 2'-Omethylcytosine
  modified_base 71: mod_base = OTHER; note = Uridine phosphorothiorate
  modified_base 76: mod_base = OTHER; note = 2'-Omethyladenosine

SEQ ID NO: 6249 - RNA, 76 nt, synthetic construct; identical to SEQ ID NO: 3289
  source 1..76: mol_type = other RNA
  modified_base 1: mod_base = OTHER; note = 2'-Omethylguanosine
  modified_base 13: mod_base = OTHER; note = 2'-Omethylcytosine
  modified_base 14: mod_base = OTHER; note = 2'-Omethyladenosine
  modified_base 15: mod_base = OTHER; note = 2'-Omethylguanosine
  modified_base 16: mod_base = OTHER; note = 2'-Omethyluridine
  modified_base 18: mod_base = OTHER; note = 2'-Omethylguanosine
  modified_base 19: mod_base = OTHER; note = 2'-Omethylguanosine
  modified_base 20: mod_base = OTHER; note = Uridine phosphorothiorate
  modified_base 21: mod_base = OTHER; note = Adenosine phosphorothiorate
  modified_base 25: mod_base = OTHER; note = 2'-Omethylcytosine
  modified_base 41: mod_base = OTHER; note = 2'-fluorouridine
  modified_base 42: mod_base = OTHER; note = 2'-Omethylguanosine
  modified_base 43: mod_base = OTHER; note = 2'-Omethyladenosine
  modified_base 44: mod_base = OTHER; note = 2'-fluoroguanosine
  modified_base 49: mod_base = OTHER; note = 2'-Omethylcytosine
  modified_base 50: mod_base = OTHER; note = 2'-Omethyladenosine
  modified_base 51: mod_base = OTHER; note = 2'-Omethylguanosine
  modified_base 52: mod_base = OTHER; note = 2'-Omethylguanosine
  modified_base 53: mod_base = OTHER; note = 2'-Omethylguanosine
  modified_base 54: mod_base = OTHER; note = Uridine phosphorothiorate
  modified_base 55: mod_base = OTHER; note = Uridine phosphorothiorate
  modified_base 61: mod_base = OTHER; note = 2'-Omethylcytosine
  modified_base 65: mod_base = OTHER; note = 2'-Omethylguanosine
  modified_base 73: mod_base = OTHER; note = 2'-Omethylguanosine

SEQ ID NO: 6250 - RNA, 76 nt, synthetic construct; identical to SEQ ID NO: 3295
  source 1..76: mol_type = other RNA
  modified_base 1: mod_base = OTHER; note = 2'-Omethylcytosine phosphorothiorate
  modified_base 2: mod_base = OTHER; note = 2'-Omethylcytosine
  modified_base 10: mod_base = OTHER; note = 2'-fluoroguanosine
  modified_base 18: mod_base = OTHER; note = Guanosine phosphorothiorate
  modified_base 20: mod_base = OTHER; note = 2'-Omethyluridine
  modified_base 55: mod_base = OTHER; note = Uridine phosphorothiorate
  modified_base 56: mod_base = OTHER; note = 2'-fluorocytosine phosphorothiorate
  modified_base 74: mod_base = OTHER; note = 2'-Omethylcytosine phosphorothiorate

SEQ ID NO: 6251 - RNA, 76 nt, synthetic construct; identical to SEQ ID NO: 625
  source 1..76: mol_type = other RNA
  modified_base 16: mod_base = OTHER; note = Thymine
  modified_base 20: mod_base = OTHER; note = Thymine
  modified_base 33: mod_base = OTHER; note = Thymine
  modified_base 34: mod_base = OTHER; note = Thymine

SEQ ID NO: 6252 - RNA, 76 nt, synthetic construct; identical to SEQ ID NO: 625
  source 1..76: mol_type = other RNA
  modified_base 1: mod_base = OTHER; note = 2'-Omethylguanosine phosphorothiorate
  modified_base 2: mod_base = OTHER; note = 2'-Omethylguanosine
  modified_base 3: mod_base = OTHER; note = 2'-Omethylcytosine
  modified_base 10: mod_base = OTHER; note = 2'-Omethylguanosine
  modified_base 11: mod_base = OTHER; note = 2'-Omethylcytosine
  modified_base 12: mod_base = OTHER; note = 2'-Omethylguanosine
  modified_base 13: mod_base = OTHER; note = 2'-Omethylcytosine
  modified_base 14: mod_base = OTHER; note = 2'-Omethyladenosine
  modified_base 15: mod_base = OTHER; note = 2'-fluoroadenosine
  modified_base 16: mod_base = OTHER; note = 2'-Omethyluridine
  modified_base 17: mod_base = OTHER; note = 2'-Omethylguanosine
  modified_base 18: mod_base = OTHER; note = 2'-Omethylguanosine
  modified_base 19: mod_base = OTHER; note = 2'-fluoroadenosine
  modified_base 20: mod_base = OTHER; note = 2'-Omethyluridine
  modified_base 21: mod_base = OTHER; note = 2'-fluoroadenosine
  modified_base 22: mod_base = OTHER; note = 2'-Omethylguanosine
  modified_base 23: mod_base = OTHER; note = 2'-Omethylcytosine
  modified_base 24: mod_base = OTHER; note = 2'-Omethylguanosine
  modified_base 25: mod_base = OTHER; note = 2'-Omethylcytosine
  modified_base 38: mod_base = OTHER; note = Adenosine phosphorothiorate
  modified_base 39: mod_base = OTHER; note = Uridine phosphorothiorate
  modified_base 40: mod_base = OTHER; note = 2'-fluorouridine
  modified_base 43: mod_base = OTHER; note = 2'-Omethyladenosine
  modified_base 44: mod_base = OTHER; note = 2'-Omethyladenosine
  modified_base 45: mod_base = OTHER; note = 2'-Omethylguanosine
  modified_base 46: mod_base = OTHER; note = 2'-fluoroguanosine
  modified_base 48: mod_base = OTHER; note = 2'-fluorouridine
  modified_base 49: mod_base = OTHER; note = 2'-Omethylcytosine
  modified_base 50: mod_base = OTHER; note = 2'-Omethylcytosine
  modified_base 54: mod_base = OTHER; note = 2'-Omethyluridine phosphorothiorate
  modified_base 55: mod_base = OTHER; note = Uridine phosphorothiorate
  modified_base 56: mod_base = OTHER; note = 2'-Omethylcytosine
  modified_base 57: mod_base = OTHER; note = 2'-fluoroguanosine
  modified_base 61: mod_base = OTHER; note = 2'-Omethylcytosine
  modified_base 62: mod_base = OTHER; note = 2'-Omethylcytosine
  modified_base 63: mod_base = OTHER; note = 2'-fluorocytosine
  modified_base 64: mod_base = OTHER; note = 2'-Omethylguanosine
  modified_base 65: mod_base = OTHER; note = 2'-Omethylguanosine
  modified_base 66: mod_base = OTHER; note = 2'-Omethylcytosine
  modified_base 67: mod_base = OTHER; note = 2'-Omethylguanosine
  modified_base 68: mod_base = OTHER; note = 2'-Omethylguanosine

SEQ ID NO: 6253 - RNA, 76 nt, synthetic construct; identical to SEQ ID NO: 625
  source 1..76: mol_type = other RNA
  modified_base 1: mod_base = OTHER; note = 2'-Omethylguanosine phosphorothiorate
  modified_base 2: mod_base = OTHER; note = 2'-Omethylguanosine
  modified_base 3: mod_base = OTHER; note = 2'-Omethylcytosine
  modified_base 4: mod_base = OTHER; note = 2'-Omethyluridine
  modified_base 5: mod_base = OTHER; note = 2'-Omethylcytosine
  modified_base 6: mod_base = OTHER; note = 2'-Omethylcytosine
  modified_base 10: mod_base = OTHER; note = 2'-Omethylguanosine
  modified_base 11: mod_base = OTHER; note = 2'-Omethylcytosine
  modified_base 12: mod_base = OTHER; note = 2'-Omethylguanosine
  modified_base 13: mod_base = OTHER; note = 2'-Omethylcytosine
  modified_base 14: mod_base = OTHER; note = 2'-Omethyladenosine
  modified_base 15: mod_base = OTHER; note = 2'-fluoroadenosine
  modified_base 16: mod_base = OTHER; note = 2'-Omethyluridine
  modified_base 17: mod_base = OTHER; note = 2'-Omethylguanosine
  modified_base 18: mod_base = OTHER; note = 2'-Omethylguanosine
  modified_base 19: mod_base = OTHER; note = 2'-fluoroadenosine
  modified_base 20: mod_base = OTHER; note = 2'-Omethyluridine
  modified_base 40: mod_base = OTHER; note = 2'-fluorouridine
  modified_base 41: mod_base = OTHER; note = 2'-fluorocytosine
  modified_base 42: mod_base = OTHER; note = 2'-fluoroadenosine
  modified_base 43: mod_base = OTHER; note = 2'-fluoroadenosine
  modified_base 54: mod_base = OTHER; note = 2'-Omethyluridine
  modified_base 56: mod_base = OTHER; note = 2'-Omethylcytosine
  modified_base 57: mod_base = OTHER; note = 2'-fluoroguanosine
  modified_base 59: mod_base = OTHER; note = 2'-Omethylguanosine
  modified_base 61: mod_base = OTHER; note = 2'-Omethylcytosine
  modified_base 62: mod_base = OTHER; note = 2'-Omethylcytosine
  modified_base 63: mod_base = OTHER; note = 2'-Omethylcytosine
  modified_base 64: mod_base = OTHER; note = 2'-Omethylguanosine
  modified_base 65: mod_base = OTHER; note = 2'-Omethylguanosine
  modified_base 66: mod_base = OTHER; note = 2'-Omethylcytosine
  modified_base 67: mod_base = OTHER; note = 2'-Omethylguanosine
  modified_base 68: mod_base = OTHER; note = 2'-Omethylguanosine
  modified_base 69: mod_base = OTHER; note = 2'-Omethyladenosine
  modified_base 73: mod_base = OTHER; note = 2'-Omethylguanosine

SEQ ID NO: 6254 - RNA, 75 nt, synthetic construct; identical to SEQ ID NO: 3306
  source 1..75: mol_type = other RNA
  modified_base 42: mod_base = OTHER; note = 2'-Omethyladenosine
  modified_base 51: mod_base = OTHER; note = 2'-Omethyluridine

SEQ ID NO: 6255 - RNA, 76 nt, synthetic construct; identical to SEQ ID NO: 3419
  source 1..76: mol_type = other RNA
  modified_base 1: mod_base = OTHER; note = 2'-Omethylguanosine
  modified_base 61: mod_base = OTHER; note = 2'-Omethylcytosine
  modified_base 62: mod_base = OTHER; note = 2'-Omethylcytosine
  modified_base 64: mod_base = OTHER; note = 2'-Omethylguanosine
  modified_base 65: mod_base = OTHER; note = 2'-Omethylguanosine
  modified_base 66: mod_base = OTHER; note = 2'-Omethylcytosine
  modified_base 67: mod_base = OTHER; note = 2'-Omethylguanosine
  modified_base 68: mod_base = OTHER; note = 2'-Omethylguanosine
  modified_base 69: mod_base = OTHER; note = 2'-Omethyladenosine
  modified_base 70: mod_base = OTHER; note = 2'-fluoroguanosine
  modified_base 71: mod_base = OTHER; note = 2'-Omethyluridine
  modified_base 72: mod_base = OTHER; note = 2'-Omethylcytosine
  modified_base 73: mod_base = OTHER; note = 2'-Omethylguanosine

SEQ ID NO: 6256 - RNA, 76 nt, synthetic construct; identical to SEQ ID NO: 3289
  source 1..76: mol_type = other RNA
  modified_base 49: mod_base = OTHER; note = 2'-Omethylcytosine
  modified_base 50: mod_base = OTHER; note = 2'-Omethyladenosine
  modified_base 51: mod_base = OTHER; note = 2'-Omethylguanosine
  modified_base 52: mod_base = OTHER; note = 2'-Omethylguanosine
  modified_base 53: mod_base = OTHER; note = 2'-Omethylguanosine
  modified_base 73: mod_base = OTHER; note = 2'-Omethylguanosine

SEQ ID NO: 6257 - RNA, 76 nt, synthetic construct; identical to SEQ ID NO: 625
  source 1..76: mol_type = other RNA
  modified_base 3: mod_base = OTHER; note = 2'-Omethylcytosine
  modified_base 5: mod_base = OTHER; note = 2'-Omethylcytosine phosphorothiorate
  modified_base 8: mod_base = OTHER; note = Uridine phosphorothiorate
  modified_base 16: mod_base = OTHER; note = 2'-fluorouridine
  modified_base 17: mod_base = OTHER; note = 2'-Omethylguanosine phosphorothiorate
  modified_base 18: mod_base = OTHER; note = Guanosine phosphorothiorate
  modified_base 20: mod_base = OTHER; note = 2'-fluorouridine phosphorothiorate
  modified_base 23: mod_base = OTHER; note = 2'-fluorocytosine
  modified_base 25: mod_base = OTHER; note = Cytosine phosphorothiorate
  modified_base 26: mod_base = OTHER; note = 2'-fluoroadenosine
  modified_base 28: mod_base = OTHER; note = Uridine phosphorothiorate
  modified_base 29: mod_base = OTHER; note = 2'-Omethylguanosine
  modified_base 36: mod_base = OTHER; note = Adenosine phosphorothiorate
  modified_base 37: mod_base = OTHER; note = Adenosine phosphorothiorate
  modified_base 39: mod_base = OTHER; note = 2'-Omethyluridine
  modified_base 41: mod_base = OTHER; note = 2'-Omethylcytosine
  modified_base 42: mod_base = OTHER; note = 2'-Omethyladenosine
  modified_base 45: mod_base = OTHER; note = 2'-Omethylguanosine
  modified_base 47: mod_base = OTHER; note = Uridine phosphorothiorate
  modified_base 48: mod_base = OTHER; note = 2'-Omethyluridine phosphorothiorate
  modified_base 49: mod_base = OTHER; note = 2'-fluorocytosine
  modified_base 52: mod_base = OTHER; note = 2'-fluoroguanosine phosphorothiorate
  modified_base 53: mod_base = OTHER; note = 2'-Omethylguanosine
  modified_base 54: mod_base = OTHER; note = 2'-Omethyluridine
  modified_base 58: mod_base = OTHER; note = 2'-fluoroadenosine
  modified_base 59: mod_base = OTHER; note = 2'-fluoroguanosine phosphorothiorate
  modified_base 60: mod_base = OTHER; note = 2'-fluorouridine
  modified_base 67: mod_base = OTHER; note = 2'-fluoroguanosine
  modified_base 68: mod_base = OTHER; note = Guanosine phosphorothiorate
  modified_base 69: mod_base = OTHER; note = 2'-Omethyladenosine
  modified_base 71: mod_base = OTHER; note = 2'-fluorouridine
  modified_base 72: mod_base = OTHER; note = Cytosine phosphorothiorate
  modified_base 73: mod_base = OTHER; note = 2'-fluoroguanosine

SEQ ID NO: 6258 - RNA, 86 nt, synthetic construct; identical to SEQ ID NO: 3290
  source 1..86: mol_type = other RNA
  modified_base 58: mod_base = OTHER; note = Cytosine phosphorothiorate

SEQ ID NO: 6259 - RNA, 85 nt, synthetic construct; identical to SEQ ID NO: 3301
  source 1..85: mol_type = other RNA
  modified_base 1: mod_base = OTHER; note = 2'-Omethylguanosine phosphorothiorate
  modified_base 2: mod_base = OTHER; note = 2'-Omethylcytosine phosphorothiorate
  modified_base 3: mod_base = OTHER; note = 2'-Omethyluridine phosphorothiorate
  modified_base 4: mod_base = OTHER; note = 2'-Omethylguanosine
  modified_base 14: mod_base = OTHER; note = 2'-Omethyladenosine phosphorothiorate
  modified_base 16: mod_base = OTHER; note = 2'-Omethyluridine phosphorothiorate
  modified_base 22: mod_base = OTHER; note = 2'-fluoroadenosine
  modified_base 27: mod_base = OTHER; note = 2'-Omethyluridine
  modified_base 29: mod_base = OTHER; note = 2'-fluoroguanosine
  modified_base 33: mod_base = OTHER; note = 2'-fluorouridine
  modified_base 37: mod_base = OTHER; note = 2'-fluoroadenosine
  modified_base 41: mod_base = OTHER; note = 2'-fluorocytosine
  modified_base 47: mod_base = OTHER; note = 2'-fluoroguanosine
  modified_base 50: mod_base = OTHER; note = 2'-fluorocytosine phosphorothiorate
  modified_base 54: mod_base = OTHER; note = 2'-Omethylcytosine
  modified_base 56: mod_base = OTHER; note = 2'-Omethylguanosine
  modified_base 64: mod_base = OTHER; note = 2'-fluorouridine
  modified_base 65: mod_base = OTHER; note = 2'-fluorocytosine
  modified_base 70: mod_base = OTHER; note = 2'-Omethylcytosine
  modified_base 73: mod_base = OTHER; note = 2'-fluoroguanosine
  modified_base 82: mod_base = OTHER; note = 2'-Omethylguanosine

SEQ ID NO: 6260 - RNA, 85 nt, synthetic construct; identical to SEQ ID NO: 3286
  source 1..85: mol_type = other RNA
  modified_base 1: mod_base = OTHER; note = 2'-Omethylcytosine phosphorothiorate
  modified_base 16: mod_base = OTHER; note = Guanosine phosphorothiorate
  modified_base 42: mod_base = OTHER; note = Adenosine phosphorothiorate
  modified_base 57: mod_base = OTHER; note = 2'-Omethylcytosine
  modified_base 60: mod_base = OTHER; note = Guanosine phosphorothiorate
  modified_base 67: mod_base = OTHER; note = Adenosine phosphorothiorate
  modified_base 84: mod_base = OTHER; note = 2'-Omethylcytosine

SEQ ID NO: 6261 - RNA, 75 nt, synthetic construct; identical to SEQ ID NO: 1045
  source 1..75: mol_type = other RNA
  modified_base 1: mod_base = OTHER; note = 2'-Omethylguanosine
  modified_base 2: mod_base = OTHER; note = 2'-Omethylguanosine
  modified_base 3: mod_base = OTHER; note = 2'-Omethyluridine
  modified_base 4: mod_base = OTHER; note = 2'-Omethyluridine
  modified_base 5: mod_base = OTHER; note = 2'-Omethylcytosine
  modified_base 6: mod_base = OTHER; note = 2'-Omethylcytosine
  modified_base 13: mod_base = OTHER; note = 2'-Omethyluridine
  modified_base 14: mod_base = OTHER; note = 2'-Omethyladenosine
  modified_base 15: mod_base = OTHER; note = 2'-Omethyladenosine
  modified_base 16: mod_base = OTHER; note = 2'-Omethyluridine
  modified_base 17: mod_base = OTHER; note = 2'-Omethylguanosine
  modified_base 18: mod_base = OTHER; note = 2'-Omethylguanosine
  modified_base 19: mod_base = OTHER; note = Uridine phosphorothiorate
  modified_base 20: mod_base = OTHER; note = 2'-Omethyladenosine
  modified_base 21: mod_base = OTHER; note = Adenosine phosphorothiorate
  modified_base 25: mod_base = OTHER; note = 2'-Omethylcytosine
  modified_base 33: mod_base = OTHER; note = 2'-fluorouridine
  modified_base 34: mod_base = OTHER; note = 2'-Omethyluridine
  modified_base 35: mod_base = OTHER; note = Uridine phosphorothiorate
  modified_base 37: mod_base = OTHER; note = Adenosine phosphorothiorate
  modified_base 38: mod_base = OTHER; note = Adenosine phosphorothiorate
  modified_base 41: mod_base = OTHER; note = 2'-Omethylcytosine
  modified_base 42: mod_base = OTHER; note = 2'-Omethyladenosine
  modified_base 43: mod_base = OTHER; note = 2'-Omethylguanosine
  modified_base 44: mod_base = OTHER; note = 2'-Omethylcytosine
  modified_base 48: mod_base = OTHER; note = 2'-Omethylcytosine
  modified_base 49: mod_base = OTHER; note = 2'-Omethylcytosine
  modified_base 51: mod_base = OTHER; note = 2'-Omethyladenosine
  modified_base 53: mod_base = OTHER; note = Uridine phosphorothiorate
  modified_base 54: mod_base = OTHER; note = Uridine phosphorothiorate
  modified_base 60: mod_base = OTHER; note = 2'-Omethylcytosine
  modified_base 64: mod_base = OTHER; note = 2'-Omethylguanosine
  modified_base 72: mod_base = OTHER; note = 2'-Omethyluridine

SEQ ID NO: 6262 - RNA, 76 nt, synthetic construct; identical to SEQ ID NO: 625
  source 1..76: mol_type = other RNA
  modified_base 2: mod_base = OTHER; note = 2'-Omethylguanosine
  modified_base 4: mod_base = OTHER; note = 2'-fluorouridine
  modified_base 5: mod_base = OTHER; note = 2'-fluorocytosine
  modified_base 6: mod_base = OTHER; note = Cytosine phosphorothiorate
  modified_base 11: mod_base = OTHER; note = 2'-Omethylcytosine
  modified_base 14: mod_base = OTHER; note = 2'-fluoroadenosine
  modified_base 15: mod_base = OTHER; note = 2'-Omethyladenosine phosphorothiorate
  modified_base 16: mod_base = OTHER; note = 2'-fluorouridine
  modified_base 17: mod_base = OTHER; note = Guanosine phosphorothiorate
  modified_base 18: mod_base = OTHER; note = 2'-fluoroguanosine
  modified_base 19: mod_base = OTHER; note = Adenosine phosphorothiorate
  modified_base 20: mod_base = OTHER; note = 2'-Omethyluridine
  modified_base 23: mod_base = OTHER; note = Cytosine phosphorothiorate
  modified_base 26: mod_base = OTHER; note = 2'-fluoroadenosine
  modified_base 27: mod_base = OTHER; note = Uridine phosphorothiorate
  modified_base 28: mod_base = OTHER; note = 2'-Omethyluridine
  modified_base 30: mod_base = OTHER; note = 2'-fluoroguanosine
  modified_base 32: mod_base = OTHER; note = 2'-fluorocytosine
  modified_base 33: mod_base = OTHER; note = 2'-fluorouridine phosphorothiorate
  modified_base 34: mod_base = OTHER; note = 2'-fluorouridine
  modified_base 36: mod_base = OTHER; note = Adenosine phosphorothiorate
  modified_base 39: mod_base = OTHER; note = 2'-Omethyluridine
  modified_base 43: mod_base = OTHER; note = 2'-Omethyladenosine
  modified_base 45: mod_base = OTHER; note = 2'-Omethylguanosine
  modified_base 46: mod_base = OTHER; note = 2'-fluoroguanosine
  modified_base 49: mod_base = OTHER; note = Cytosine phosphorothiorate
  modified_base 50: mod_base = OTHER; note = 2'-Omethylcytosine
  modified_base 51: mod_base = OTHER; note = 2'-Omethylguanosine phosphorothiorate
  modified_base 52: mod_base = OTHER; note = 2'-Omethylguanosine
  modified_base 54: mod_base = OTHER; note = 2'-Omethyluridine
  modified_base 56: mod_base = OTHER; note = Cytosine phosphorothiorate
  modified_base 57: mod_base = OTHER; note = 2'-fluoroguanosine
  modified_base 59: mod_base = OTHER; note = 2'-Omethylguanosine
  modified_base 61: mod_base = OTHER; note = 2'-Omethylcytosine
  modified_base 62: mod_base = OTHER; note = 2'-fluorocytosine
  modified_base 64: mod_base = OTHER; note = 2'-fluoroguanosine
  modified_base 66: mod_base = OTHER; note = 2'-Omethylcytosine phosphorothiorate
  modified_base 69: mod_base = OTHER; note = 2'-fluoroadenosine
  modified_base 71: mod_base = OTHER; note = 2'-Omethyluridine
  modified_base 72: mod_base = OTHER; note = Cytosine phosphorothiorate
  modified_base 73: mod_base = OTHER; note = 2'-fluoroguanosine

SEQ ID NO: 6263 - RNA, 76 nt, synthetic construct; identical to SEQ ID NO: 625
  source 1..76: mol_type = other RNA
  modified_base 1: mod_base = OTHER; note = 2'-fluoroguanosine
  modified_base 6: mod_base = OTHER; note = Cytosine phosphorothiorate
  modified_base 7: mod_base = OTHER; note = Guanosine phosphorothiorate
  modified_base 11: mod_base = OTHER; note = 2'-Omethylcytosine
  modified_base 12: mod_base = OTHER; note = Guanosine phosphorothiorate
  modified_base 13: mod_base = OTHER; note = 2'-Omethylcytosine
  modified_base 14: mod_base = OTHER; note = 2'-fluoroadenosine phosphorothiorate
  modified_base 20: mod_base = OTHER; note = 2'-fluorouridine
  modified_base 22: mod_base = OTHER; note = 2'-Omethylguanosine phosphorothiorate
  modified_base 23: mod_base = OTHER; note = 2'-Omethylcytosine
  modified_base 24: mod_base = OTHER; note = 2'-Omethylguanosine
  modified_base 27: mod_base = OTHER; note = 2'-fluorouridine
  modified_base 29: mod_base = OTHER; note = 2'-Omethylguanosine
  modified_base 30: mod_base = OTHER; note = 2'-fluoroguanosine phosphorothiorate
  modified_base 37: mod_base = OTHER; note = Adenosine phosphorothiorate
  modified_base 38: mod_base = OTHER; note = 2'-fluoroadenosine
  modified_base 45: mod_base = OTHER; note = 2'-fluoroguanosine
  modified_base 47: mod_base = OTHER; note = 2'-fluorouridine
  modified_base 48: mod_base = OTHER; note = 2'-fluorouridine
  modified_base 49: mod_base = OTHER; note = 2'-Omethylcytosine
  modified_base 50: mod_base = OTHER; note = 2'-fluorocytosine
  modified_base 53: mod_base = OTHER; note = Guanosine phosphorothiorate
  modified_base 56: mod_base = OTHER; note = 2'-Omethylcytosine
  modified_base 59: mod_base = OTHER; note = 2'-fluoroguanosine
  modified_base 60: mod_base = OTHER; note = 2'-fluorouridine
  modified_base 62: mod_base = OTHER; note = 2'-fluorocytosine
  modified_base 63: mod_base = OTHER; note = 2'-Omethylcytosine phosphorothiorate
  modified_base 65: mod_base = OTHER; note = 2'-Omethylguanosine
  modified_base 66: mod_base = OTHER; note = 2'-Omethylcytosine
  modified_base 67: mod_base = OTHER; note = 2'-Omethylguanosine phosphorothiorate
  modified_base 68: mod_base = OTHER; note = 2'-fluoroguanosine
  modified_base 70: mod_base = OTHER; note = Guanosine phosphorothiorate
  modified_base 71: mod_base = OTHER; note = 2'-fluorouridine
  modified_base 75: mod_base = OTHER; note = 2'-Omethylcytosine
  modified_base 76: mod_base = OTHER; note = 2'-Omethyladenosine

SEQ ID NO: 6264 - RNA, 76 nt, synthetic construct; identical to SEQ ID NO: 625
  source 1..76: mol_type = other RNA
  modified_base 1: mod_base = OTHER; note = 2'-Omethylguanosine phosphorothiorate
  modified_base 2: mod_base = OTHER; note = 2'-Omethylguanosine
  modified_base 17: mod_base = OTHER; note = 2'-fluoroguanosine phosphorothiorate
  modified_base 33: mod_base = OTHER; note = 2'-fluorouridine
  modified_base 35: mod_base = OTHER; note = Cytosine phosphorothiorate
  modified_base 37: mod_base = OTHER; note = Adenosine phosphorothiorate
  modified_base 38: mod_base = OTHER; note = Adenosine phosphorothiorate
  modified_base 52: mod_base = OTHER; note = 2'-Omethylguanosine
  modified_base 56: mod_base = OTHER; note = 2'-Omethylcytosine
  modified_base 62: mod_base = OTHER; note = 2'-Omethylcytosine
  modified_base 63: mod_base = OTHER; note = 2'-fluorocytosine
  modified_base 73: mod_base = OTHER; note = 2'-Omethylguanosine
  modified_base 75: mod_base = OTHER; note = 2'-fluorocytosine phosphorothiorate

SEQ ID NO: 6265 - RNA, 76 nt, synthetic construct
  source 1..76: mol_type = other RNA
ggctccgtggcgcaacggatagcgcatgggacttcaaattccaaggttccgggttcgagtcccggcggagtcgcca

SEQ ID NO: 6266 - RNA, 75 nt, synthetic construct; identical to SEQ ID NO: 3306
  source 1..75: mol_type = other RNA
  modified_base 1: mod_base = OTHER; note = 2'-Omethylguanosine
  modified_base 17: mod_base = OTHER; note = 2'-Omethylguanosine
  modified_base 18: mod_base = OTHER; note = 2'-Omethylguanosine
  modified_base 32: mod_base = OTHER; note = Uridine phosphorothiorate
  modified_base 33: mod_base = OTHER; note = 2'-Omethylcytosine
  modified_base 34: mod_base = OTHER; note = Uridine phosphorothiorate
  modified_base 35: mod_base = OTHER; note = Adenosine phosphorothiorate
  modified_base 36: mod_base = OTHER; note = Guanosine phosphorothiorate
  modified_base 37: mod_base = OTHER; note = Adenosine phosphorothiorate
  modified_base 49: mod_base = OTHER; note = 2'-Omethylcytosine
  modified_base 51: mod_base = OTHER; note = 2'-Omethyluridine
  modified_base 72: mod_base = OTHER; note = 2'-Omethyladenosine

SEQ ID NO: 6267 - RNA, 85 nt, synthetic construct; identical to SEQ ID NO: 3310
  source 1..85: mol_type = other RNA
  modified_base 1: mod_base = OTHER; note = 2'-fluorocytosine phosphorothiorate
  modified_base 23: mod_base = OTHER; note = 2'-fluoroguanosine
  modified_base 33: mod_base = OTHER; note = Cytosine phosphorothiorate
  modified_base 41: mod_base = OTHER; note = Adenosine phosphorothiorate
  modified_base 47: mod_base = OTHER; note = Cytosine phosphorothiorate
  modified_base 64: mod_base = OTHER; note = Uridine phosphorothiorate

SEQ ID NO: 6268 - RNA, 76 nt, synthetic construct; identical to SEQ ID NO: 3295
  source 1..76: mol_type = other RNA
  modified_base 1: mod_base = OTHER; note = 2'-Omethylcytosine
  modified_base 2: mod_base = OTHER; note = 2'-fluorocytosine phosphorothiorate
  modified_base 4: mod_base = OTHER; note = 2'-Omethyluridine phosphorothiorate
  modified_base 9: mod_base = OTHER; note = Adenosine phosphorothiorate
  modified_base 16: mod_base = OTHER; note = Uridine phosphorothiorate
  modified_base 40: mod_base = OTHER; note = 2'-Omethylcytosine
  modified_base 46: mod_base = OTHER; note = 2'-Omethylguanosine
  modified_base 51: mod_base = OTHER; note = Uridine phosphorothiorate
  modified_base 56: mod_base = OTHER; note = 2'-fluorocytosine phosphorothiorate

SEQ ID NO: 6269 - RNA, 76 nt, synthetic construct; identical to SEQ ID NO: 625
  source 1..76: mol_type = other RNA
  modified_base 1: mod_base = OTHER; note = 2'-Omethylguanosine
  modified_base 2: mod_base = OTHER; note = 2'-Omethylguanosine
  modified_base 18: mod_base = OTHER; note = 2'-fluoroguanosine
  modified_base 33: mod_base = OTHER; note = 2'-fluorouridine
  modified_base 35: mod_base = OTHER; note = Cytosine phosphorothiorate
  modified_base 37: mod_base = OTHER; note = Adenosine phosphorothiorate
  modified_base 38: mod_base = OTHER; note = Adenosine phosphorothiorate
  modified_base 52: mod_base = OTHER; note = 2'-Omethylguanosine
  modified_base 57: mod_base = OTHER; note = 2'-Omethylguanosine
  modified_base 62: mod_base = OTHER; note = 2'-Omethylcytosine
  modified_base 73: mod_base = OTHER; note = 2'-Omethylguanosine
  modified_base 75: mod_base = OTHER; note = 2'-fluorocytosine phosphorothiorate

SEQ ID NO: 6270 - RNA, 75 nt, synthetic construct; identical to SEQ ID NO: 1045
  source 1..75: mol_type = other RNA
  modified_base 1: mod_base = OTHER; note = 2'-Omethylguanosine phosphorothiorate
  modified_base 2: mod_base = OTHER; note = 2'-Omethylguanosine
  modified_base 3: mod_base = OTHER; note = 2'-Omethyluridine
  modified_base 4: mod_base = OTHER; note = 2'-Omethyluridine
  modified_base 5: mod_base = OTHER; note = 2'-Omethylcytosine
  modified_base 6: mod_base = OTHER; note = 2'-Omethylcytosine
  modified_base 48: mod_base = OTHER; note = 2'-Omethylcytosine
  modified_base 49: mod_base = OTHER; note = 2'-Omethylcytosine
  modified_base 50: mod_base = OTHER; note = 2'-Omethylguanosine
  modified_base 51: mod_base = OTHER; note = 2'-Omethyladenosine
  modified_base 52: mod_base = OTHER; note = 2'-Omethylguanosine
  modified_base 60: mod_base = OTHER; note = 2'-Omethylcytosine
  modified_base 61: mod_base = OTHER; note = 2'-Omethyluridine
  modified_base 62: mod_base = OTHER; note = 2'-fluorocytosine
  modified_base 63: mod_base = OTHER; note = 2'-Omethylguanosine
  modified_base 64: mod_base = OTHER; note = 2'-Omethylguanosine
  modified_base 65: mod_base = OTHER; note = 2'-Omethyluridine
  modified_base 66: mod_base = OTHER; note = 2'-Omethylguanosine
  modified_base 67: mod_base = OTHER; note = 2'-Omethylguanosine
  modified_base 68: mod_base = OTHER; note = 2'-fluoroadenosine
  modified_base 70: mod_base = OTHER; note = 2'-Omethylcytosine
  modified_base 71: mod_base = OTHER; note = 2'-Omethylcytosine

SEQ ID NO: 6271 - RNA, 75 nt, synthetic construct; identical to SEQ ID NO: 3306
  source 1..75: mol_type = other RNA
  modified_base 1: mod_base = OTHER; note = 2'-Omethylguanosine phosphorothiorate
  modified_base 2: mod_base = OTHER; note = 2'-Omethyladenosine
  modified_base 3: mod_base = OTHER; note = 2'-Omethylcytosine
  modified_base 4: mod_base = OTHER; note = 2'-Omethylcytosine
  modified_base 5: mod_base = OTHER; note = 2'-Omethyluridine
  modified_base 6: mod_base = OTHER; note = 2'-Omethylcytosine
  modified_base 48: mod_base = OTHER; note = 2'-Omethylguanosine
  modified_base 49: mod_base = OTHER; note = 2'-Omethylcytosine
  modified_base 50: mod_base = OTHER; note = 2'-Omethylguanosine
  modified_base 51: mod_base = OTHER; note = 2'-Omethyluridine
  modified_base 52: mod_base = OTHER; note = 2'-Omethylguanosine
  modified_base 60: mod_base = OTHER; note = 2'-Omethylcytosine
  modified_base 61: mod_base = OTHER; note = 2'-Omethyladenosine
  modified_base 62: mod_base = OTHER; note = 2'-fluorocytosine
  modified_base 63: mod_base = OTHER; note = 2'-Omethylguanosine
  modified_base 64: mod_base = OTHER; note = 2'-Omethyluridine
  modified_base 65: mod_base = OTHER; note = 2'-Omethylcytosine
  modified_base 66: mod_base = OTHER; note = 2'-Omethylguanosine
  modified_base 67: mod_base = OTHER; note = 2'-Omethylguanosine
  modified_base 68: mod_base = OTHER; note = 2'-fluoroguanosine
  modified_base 70: mod_base = OTHER; note = 2'-Omethyluridine
  modified_base 71: mod_base = OTHER; note = 2'-Omethylcytosine

SEQ ID NO: 6272 - RNA, 85 nt, synthetic construct; identical to SEQ ID NO: 3297
  source 1..85: mol_type = other RNA
  modified_base 1: mod_base = OTHER; note = 2'-Omethylguanosine phosphorothiorate
  modified_base 2: mod_base = OTHER; note = Cytosine phosphorothiorate
  modified_base 25: mod_base = OTHER; note = 2'-fluorocytosine
  modified_base 44: mod_base = OTHER; note = 2'-Omethyluridine
  modified_base 55: mod_base = OTHER; note = 2'-fluorocytosine
  modified_base 56: mod_base = OTHER; note = 2'-fluoroguanosine phosphorothiorate
  modified_base 80: mod_base = OTHER; note = 2'-Omethylguanosine
  modified_base 82: mod_base = OTHER; note = 2'-fluoroguanosine phosphorothiorate

SEQ ID NO: 6273 - RNA, 76 nt, synthetic construct; identical to SEQ ID NO: 3289
  source 1..76: mol_type = other RNA
  modified_base 1: mod_base = OTHER; note = 2'-Omethylguanosine
  modified_base 44: mod_base = OTHER; note = 2'-Omethylguanosine
  modified_base 45: mod_base = OTHER; note = 2'-Omethylguanosine
  modified_base 46: mod_base = OTHER; note = 2'-fluoroguanosine
  modified_base 48: mod_base = OTHER; note = 2'-fluorocytosine
  modified_base 73: mod_base = OTHER; note = 2'-Omethylguanosine

SEQ ID NO: 6274 - RNA, 76 nt, synthetic construct; identical to SEQ ID NO: 3295
  source 1..76: mol_type = other RNA
  modified_base 1: mod_base = OTHER; note = 2'-Omethylcytosine phosphorothiorate
  modified_base 2: mod_base = OTHER; note = 2'-Omethylcytosine
  modified_base 3: mod_base = OTHER; note = 2'-Omethyluridine
  modified_base 4: mod_base = OTHER; note = 2'-Omethyluridine
  modified_base 8: mod_base = OTHER; note = Uridine phosphorothiorate
  modified_base 9: mod_base = OTHER; note = 2'-fluoroadenosine
  modified_base 13: mod_base = OTHER; note = 2'-fluorocytosine
  modified_base 17: mod_base = OTHER; note = 2'-Omethyluridine
  modified_base 20: mod_base = OTHER; note = 2'-Omethyluridine
  modified_base 26: mod_base = OTHER; note = 2'-Omethylguanosine phosphorothiorate
  modified_base 27: mod_base = OTHER; note = 2'-fluoroguanosine
  modified_base 29: mod_base = OTHER; note = 2'-fluoroguanosine
  modified_base 31: mod_base = OTHER; note = 2'-fluoroadenosine phosphorothiorate
  modified_base 37: mod_base = OTHER; note = 2'-Omethylguanosine
  modified_base 41: mod_base = OTHER; note = 2'-fluorocytosine phosphorothiorate
  modified_base 47: mod_base = OTHER; note = 2'-fluorouridine phosphorothiorate
  modified_base 52: mod_base = OTHER; note = 2'-Omethylguanosine
  modified_base 54: mod_base = OTHER; note = 2'-fluorouridine phosphorothiorate
  modified_base 66: mod_base = OTHER; note = 2'-fluorouridine
  modified_base 74: mod_base = OTHER; note = 2'-Omethylcytosine phosphorothiorate
  modified_base 75: mod_base = OTHER; note = Cytosine phosphorothiorate

SEQ ID NO: 6275 - RNA, 86 nt, synthetic construct; identical to SEQ ID NO: 3290
  source 1..86: mol_type = other RNA
  modified_base 14: mod_base = OTHER; note = 2'-fluoroadenosine

SEQ ID NO: 6276 - RNA, 76 nt, synthetic construct; identical to SEQ ID NO: 3490
  source 1..76: mol_type = other RNA
  modified_base 1: mod_base = OTHER; note = 2'-Omethylguanosine
  modified_base 2: mod_base = OTHER; note = 2'-Omethylguanosine
  modified_base 3: mod_base = OTHER; note = 2'-Omethylcytosine
  modified_base 4: mod_base = OTHER; note = 2'-Omethyluridine
  modified_base 5: mod_base = OTHER; note = 2'-Omethylcytosine
  modified_base 6: mod_base = OTHER; note = 2'-Omethylcytosine
  modified_base 14: mod_base = OTHER; note = 2'-Omethyladenosine
  modified_base 15: mod_base = OTHER; note = 2'-Omethyladenosine
  modified_base 16: mod_base = OTHER; note = 2'-Omethyluridine
  modified_base 17: mod_base = OTHER; note = 2'-Omethylguanosine
  modified_base 18: mod_base = OTHER; note = 2'-Omethylguanosine
  modified_base 20: mod_base = OTHER; note = 2'-Omethyluridine
  modified_base 25: mod_base = OTHER; note = 2'-Omethylcytosine
  modified_base 41: mod_base = OTHER; note = 2'-Omethylcytosine
  modified_base 42: mod_base = OTHER; note = 2'-Omethyladenosine
  modified_base 43: mod_base = OTHER; note = 2'-Omethyladenosine
  modified_base 44: mod_base = OTHER; note = 2'-Omethyladenosine
  modified_base 49: mod_base = OTHER; note = 2'-Omethylguanosine
  modified_base 50: mod_base = OTHER; note = 2'-Omethylcytosine
  modified_base 52: mod_base = OTHER; note = 2'-Omethylguanosine
  modified_base 54: mod_base = OTHER; note = 2'-Omethyluridine
  modified_base 55: mod_base = OTHER; note = Uridine phosphorothiorate
  modified_base 56: mod_base = OTHER; note = 2'-Omethylcytosine
  modified_base 57: mod_base = OTHER; note = 2'-fluoroguanosine
  modified_base 59: mod_base = OTHER; note = 2'-Omethylguanosine
  modified_base 61: mod_base = OTHER; note = 2'-Omethylcytosine
  modified_base 62: mod_base = OTHER; note = 2'-Omethylcytosine
  modified_base 63: mod_base = OTHER; note = 2'-fluorocytosine
  modified_base 64: mod_base = OTHER; note = 2'-Omethylguanosine
  modified_base 65: mod_base = OTHER; note = 2'-Omethylcytosine
  modified_base 73: mod_base = OTHER; note = 2'-Omethylguanosine

SEQ ID NO: 6277 - RNA, 85 nt, synthetic construct; identical to SEQ ID NO: 3310
  source 1..85: mol_type = other RNA
  modified_base 1: mod_base = OTHER; note = 2'-Omethylcytosine
  modified_base 11: mod_base = OTHER; note = Cytosine phosphorothiorate
  modified_base 14: mod_base = OTHER; note = Guanosine phosphorothiorate
  modified_base 26: mod_base = OTHER; note = 2'-fluorouridine
  modified_base 28: mod_base = OTHER; note = 2'-fluoroguanosine
  modified_base 30: mod_base = OTHER; note = 2'-fluoroadenosine
  modified_base 34: mod_base = OTHER; note = Uridine phosphorothiorate
  modified_base 35: mod_base = OTHER; note = Adenosine phosphorothiorate
  modified_base 43: mod_base = OTHER; note = 2'-Omethyluridine
  modified_base 54: mod_base = OTHER; note = 2'-fluorocytosine
  modified_base 57: mod_base = OTHER; note = 2'-Omethylcytosine
  modified_base 59: mod_base = OTHER; note = 2'-fluorouridine
  modified_base 72: mod_base = OTHER; note = 2'-fluorocytosine
  modified_base 76: mod_base = OTHER; note = 2'-fluorocytosine
  modified_base 84: mod_base = OTHER; note = Cytosine phosphorothiorate
  modified_base 85: mod_base = OTHER; note = 2'-fluoroadenosine

SEQ ID NO: 6278 - RNA, 76 nt, synthetic construct; identical to SEQ ID NO: 625
  source 1..76: mol_type = other RNA
  modified_base 3: mod_base = OTHER; note = Cytosine phosphorothiorate
  modified_base 4: mod_base = OTHER; note = Uridine phosphorothiorate
  modified_base 6: mod_base = OTHER; note = 2'-Omethylcytosine
  modified_base 9: mod_base = OTHER; note = Guanosine phosphorothiorate
  modified_base 10: mod_base = OTHER; note = 2'-Omethylguanosine
  modified_base 13: mod_base = OTHER; note = 2'-fluorocytosine
  modified_base 15: mod_base = OTHER; note = 2'-fluoroadenosine phosphorothiorate
  modified_base 16: mod_base = OTHER; note = 2'-fluorouridine
  modified_base 23: mod_base = OTHER; note = Cytosine phosphorothiorate
  modified_base 28: mod_base = OTHER; note = 2'-fluorouridine
  modified_base 29: mod_base = OTHER; note = 2'-fluoroguanosine
  modified_base 30: mod_base = OTHER; note = 2'-Omethylguanosine
  modified_base 38: mod_base = OTHER; note = 2'-Omethyladenosine
  modified_base 40: mod_base = OTHER; note = Uridine phosphorothiorate
  modified_base 44: mod_base = OTHER; note = Adenosine phosphorothiorate
  modified_base 45: mod_base = OTHER; note = 2'-fluoroguanosine
  modified_base 47: mod_base = OTHER; note = 2'-Omethyluridine phosphorothiorate
  modified_base 48: mod_base = OTHER; note = 2'-fluorouridine
  modified_base 50: mod_base = OTHER; note = 2'-Omethylcytosine
  modified_base 53: mod_base = OTHER; note = 2'-Omethylguanosine
  modified_base 54: mod_base = OTHER; note = Uridine phosphorothiorate
  modified_base 57: mod_base = OTHER; note = 2'-fluoroguanosine
  modified_base 58: mod_base = OTHER; note = Adenosine phosphorothiorate
  modified_base 59: mod_base = OTHER; note = 2'-fluoroguanosine phosphorothiorate
  modified_base 60: mod_base = OTHER; note = 2'-fluorouridine
  modified_base 61: mod_base = OTHER; note = 2'-fluorocytosine
  modified_base 66: mod_base = OTHER; note = 2'-Omethylcytosine
  modified_base 68: mod_base = OTHER; note = Guanosine phosphorothiorate
  modified_base 70: mod_base = OTHER; note = 2'-fluoroguanosine
  modified_base 71: mod_base = OTHER; note = 2'-Omethyluridine
  modified_base 74: mod_base = OTHER; note = 2'-Omethylcytosine phosphorothiorate
  modified_base 75: mod_base = OTHER; note = 2'-Omethylcytosine

SEQ ID NO: 6279 - RNA, 74 nt, synthetic construct; identical to SEQ ID NO: 766
  source 1..74: mol_type = other RNA
  modified_base 1: mod_base = OTHER; note = 2'-Omethylguanosine phosphorothiorate
  modified_base 2: mod_base = OTHER; note = 2'-Omethylguanosine phosphorothiorate
  modified_base 3: mod_base = OTHER; note = 2'-Omethylcytosine
  modified_base 4: mod_base = OTHER; note = 2'-Omethyluridine
  modified_base 5: mod_base = OTHER; note = 2'-Omethylcytosine
  modified_base 6: mod_base = OTHER; note = 2'-Omethylcytosine
  modified_base 16: mod_base = OTHER; note = 2'-Omethyluridine
  modified_base 17: mod_base = OTHER; note = 2'-Omethylguanosine
  modified_base 18: mod_base = OTHER; note = 2'-Omethylguanosine
  modified_base 20: mod_base = OTHER; note = 2'-Omethyluridine
  modified_base 25: mod_base = OTHER; note = 2'-Omethylcytosine
  modified_base 33: mod_base = OTHER; note = 2'-fluorouridine
  modified_base 35: mod_base = OTHER; note = Cytosine phosphorothiorate
  modified_base 37: mod_base = OTHER; note = Adenosine phosphorothiorate
  modified_base 38: mod_base = OTHER; note = Adenosine phosphorothiorate
  modified_base 41: mod_base = OTHER; note = 2'-Omethylcytosine
  modified_base 42: mod_base = OTHER; note = 2'-Omethyladenosine
  modified_base 43: mod_base = OTHER; note = 2'-Omethyladenosine
  modified_base 44: mod_base = OTHER; note = 2'-Omethyladenosine
  modified_base 49: mod_base = OTHER; note = 2'-Omethylcytosine
  modified_base 50: mod_base = OTHER; note = 2'-Omethylcytosine
  modified_base 52: mod_base = OTHER; note = 2'-Omethylguanosine
  modified_base 54: mod_base = OTHER; note = Uridine phosphorothiorate
  modified_base 55: mod_base = OTHER; note = Uridine phosphorothiorate
  modified_base 61: mod_base = OTHER; note = 2'-Omethylcytosine
  modified_base 65: mod_base = OTHER; note = 2'-Omethylguanosine
  modified_base 73: mod_base = OTHER; note = 2'-Omethylguanosine

SEQ ID NO: 6280 - RNA, 75 nt, synthetic construct; identical to SEQ ID NO: 3311
  source 1..75: mol_type = other RNA
  modified_base 1: mod_base = OTHER; note = 2'-Omethylguanosine phosphorothiorate
  modified_base 2: mod_base = OTHER; note = 2'-Omethylguanosine phosphorothiorate
  modified_base 19: mod_base = OTHER; note = 2'-fluorouridine
  modified_base 23: mod_base = OTHER; note = 2'-fluorocytosine
  modified_base 27: mod_base = OTHER; note = Cytosine phosphorothiorate
  modified_base 28: mod_base = OTHER; note = 2'-fluorouridine
  modified_base 40: mod_base = OTHER; note = Cytosine phosphorothiorate
  modified_base 41: mod_base = OTHER; note = 2'-fluorocytosine
  modified_base 43: mod_base = OTHER; note = 2'-fluoroguanosine
  modified_base 44: mod_base = OTHER; note = 2'-fluorocytosine
  modified_base 58: mod_base = OTHER; note = Guanosine phosphorothiorate
  modified_base 59: mod_base = OTHER; note = 2'-fluorouridine
  modified_base 66: mod_base = OTHER; note = 2'-fluoroguanosine
  modified_base 67: mod_base = OTHER; note = 2'-fluoroguanosine
  modified_base 68: mod_base = OTHER; note = 2'-fluoroadenosine
  modified_base 69: mod_base = OTHER; note = Adenosine phosphorothiorate
  modified_base 73: mod_base = OTHER; note = Cytosine phosphorothiorate

SEQ ID NO: 6281 - RNA, 85 nt, synthetic construct; identical to SEQ ID NO: 3297
  source 1..85: mol_type = other RNA
  modified_base 1: mod_base = OTHER; note = 2'-Omethylguanosine phosphorothiorate
  modified_base 2: mod_base = OTHER; note = 2'-Omethylcytosine
  modified_base 3: mod_base = OTHER; note = 2'-Omethyluridine
  modified_base 4: mod_base = OTHER; note = 2'-Omethylguanosine
  modified_base 5: mod_base = OTHER; note = 2'-Omethyluridine
  modified_base 6: mod_base = OTHER; note = 2'-Omethylguanosine
  modified_base 44: mod_base = OTHER; note = 2'-Omethyluridine
  modified_base 56: mod_base = OTHER; note = 2'-fluoroguanosine
  modified_base 57: mod_base = OTHER; note = 2'-Omethylcytosine
  modified_base 58: mod_base = OTHER; note = 2'-Omethylguanosine
  modified_base 82: mod_base = OTHER; note = 2'-Omethylguanosine

SEQ ID NO: 6282 - RNA, 76 nt, synthetic construct; identical to SEQ ID NO: 625
  source 1..76: mol_type = other RNA
  modified_base 1: mod_base = OTHER; note = Guanosine phosphorothiorate
  modified_base 11: mod_base = OTHER; note = Cytosine phosphorothiorate
  modified_base 12: mod_base = OTHER; note = 2'-fluoroguanosine
  modified_base 14: mod_base = OTHER; note = Adenosine phosphorothiorate
  modified_base 15: mod_base = OTHER; note = 2'-Omethyladenosine
  modified_base 18: mod_base = OTHER; note = 2'-Omethylguanosine
  modified_base 20: mod_base = OTHER; note = 2'-fluorouridine
  modified_base 23: mod_base = OTHER; note = 2'-Omethylcytosine
  modified_base 24: mod_base = OTHER; note = Guanosine phosphorothiorate
  modified_base 26: mod_base = OTHER; note = 2'-Omethyladenosine
  modified_base 27: mod_base = OTHER; note = 2'-Omethyluridine
  modified_base 32: mod_base = OTHER; note = 2'-fluorocytosine
  modified_base 34: mod_base = OTHER; note = 2'-fluorouridine
  modified_base 38: mod_base = OTHER; note = Adenosine phosphorothiorate
  modified_base 45: mod_base = OTHER; note = Guanosine phosphorothiorate
  modified_base 47: mod_base = OTHER; note = 2'-fluorouridine
  modified_base 49: mod_base = OTHER; note = 2'-Omethylcytosine
  modified_base 52: mod_base = OTHER; note = 2'-Omethylguanosine
  modified_base 56: mod_base = OTHER; note = 2'-Omethylcytosine phosphorothiorate
  modified_base 57: mod_base = OTHER; note = 2'-Omethylguanosine
  modified_base 59: mod_base = OTHER; note = 2'-Omethylguanosine
  modified_base 61: mod_base = OTHER; note = 2'-Omethylcytosine
  modified_base 62: mod_base = OTHER; note = 2'-Omethylcytosine
  modified_base 63: mod_base = OTHER; note = 2'-fluorocytosine phosphorothiorate
  modified_base 64: mod_base = OTHER; note = 2'-Omethylguanosine
  modified_base 65: mod_base = OTHER; note = Guanosine phosphorothiorate
  modified_base 66: mod_base = OTHER; note = 2'-fluorocytosine
  modified_base 68: mod_base = OTHER; note = Guanosine phosphorothiorate
  modified_base 69: mod_base = OTHER; note = 2'-fluoroadenosine
  modified_base 70: mod_base = OTHER; note = Guanosine phosphorothiorate
  modified_base 71: mod_base = OTHER; note = Uridine phosphorothiorate
  modified_base 72: mod_base = OTHER; note = 2'-Omethylcytosine
  modified_base 73: mod_base = OTHER; note = 2'-fluoroguanosine
  modified_base 75: mod_base = OTHER; note = 2'-fluorocytosine
  modified_base 76: mod_base = OTHER; note = 2'-fluoroadenosine

SEQ ID NO: 6283 - RNA, 75 nt, synthetic construct; identical to SEQ ID NO: 3306
  source 1..75: mol_type = other RNA
  modified_base 42: mod_base = OTHER; note = 2'-Omethyladenosine
  modified_base 72: mod_base = OTHER; note = 2'-Omethyladenosine

SEQ ID NO: 6284 - RNA, 76 nt, synthetic construct; identical to SEQ ID NO: 625
  source 1..76: mol_type = other RNA
  modified_base 2: mod_base = OTHER; note = 2'-Omethylguanosine
  modified_base 4: mod_base = OTHER; note = Uridine phosphorothiorate
  modified_base 5: mod_base = OTHER; note = 2'-fluorocytosine phosphorothiorate
  modified_base 6: mod_base = OTHER; note = 2'-Omethylcytosine
  modified_base 11: mod_base = OTHER; note = 2'-fluorocytosine
  modified_base 12: mod_base = OTHER; note = Guanosine phosphorothiorate
  modified_base 16: mod_base = OTHER; note = 2'-Omethyluridine
  modified_base 17: mod_base = OTHER; note = 2'-Omethylguanosine
  modified_base 23: mod_base = OTHER; note = 2'-Omethylcytosine
  modified_base 24: mod_base = OTHER; note = Guanosine phosphorothiorate
  modified_base 25: mod_base = OTHER; note = 2'-fluorocytosine
  modified_base 27: mod_base = OTHER; note = 2'-Omethyluridine
  modified_base 30: mod_base = OTHER; note = 2'-Omethylguanosine phosphorothiorate
  modified_base 31: mod_base = OTHER; note = 2'-fluoroadenosine
  modified_base 33: mod_base = OTHER; note = Uridine phosphorothiorate
  modified_base 36: mod_base = OTHER; note = Adenosine phosphorothiorate
  modified_base 40: mod_base = OTHER; note = 2'-Omethyluridine
  modified_base 41: mod_base = OTHER; note = Cytosine phosphorothiorate
  modified_base 43: mod_base = OTHER; note = 2'-fluoroadenosine phosphorothiorate
  modified_base 46: mod_base = OTHER; note = 2'-fluoroguanosine
  modified_base 48: mod_base = OTHER; note = 2'-fluorouridine
  modified_base 55: mod_base = OTHER; note = Uridine phosphorothiorate
  modified_base 56: mod_base = OTHER; note = 2'-Omethylcytosine phosphorothiorate
  modified_base 62: mod_base = OTHER; note = Cytosine phosphorothiorate
  modified_base 63: mod_base = OTHER; note = 2'-Omethylcytosine
  modified_base 65: mod_base = OTHER; note = 2'-fluoroguanosine
  modified_base 66: mod_base = OTHER; note = Cytosine phosphorothiorate
  modified_base 68: mod_base = OTHER; note = Guanosine phosphorothiorate
  modified_base 69: mod_base = OTHER; note = 2'-Omethyladenosine
  modified_base 70: mod_base = OTHER; note = 2'-fluoroguanosine
  modified_base 72: mod_base = OTHER; note = 2'-Omethylcytosine
  modified_base 73: mod_base = OTHER; note = 2'-fluoroguanosine phosphorothiorate
  modified_base 74: mod_base = OTHER; note = 2'-Omethylcytosine
  modified_base 76: mod_base = OTHER; note = 2'-Omethyladenosine

SEQ ID NO: 6285 - RNA, 76 nt, synthetic construct
  source 1..76: mol_type = other RNA
gcctccgtggcgcaatggatagcgcattggacttcaaattcaaaggttccgggttcgagtcccggcggaggcccca

SEQ ID NO: 6286 - RNA, 76 nt, synthetic construct; identical to SEQ ID NO: 625
  source 1..76: mol_type = other RNA
  modified_base 1: mod_base = OTHER; note = 2'-Omethylguanosine
  modified_base 2: mod_base = OTHER; note = 2'-Omethylguanosine
  modified_base 3: mod_base = OTHER; note = 2'-Omethylcytosine
  modified_base 4: mod_base = OTHER; note = 2'-Omethyluridine
  modified_base 5: mod_base = OTHER; note = 2'-Omethylcytosine
  modified_base 6: mod_base = OTHER; note = 2'-Omethylcytosine
  modified_base 11: mod_base = OTHER; note = 2'-Omethylcytosine
  modified_base 13: mod_base = OTHER; note = 2'-Omethylcytosine
  modified_base 16: mod_base = OTHER; note = 2'-Omethyluridine
  modified_base 17: mod_base = OTHER; note = Guanosine phosphorothiorate
  modified_base 20: mod_base = OTHER; note = Uridine phosphorothiorate
  modified_base 21: mod_base = OTHER; note = 2'-fluoroadenosine phosphorothiorate
  modified_base 22: mod_base = OTHER; note = 2'-fluoroguanosine phosphorothiorate
  modified_base 23: mod_base = OTHER; note = 2'-Omethylcytosine
  modified_base 24: mod_base = OTHER; note = 2'-Omethylguanosine
  modified_base 25: mod_base = OTHER; note = 2'-Omethylcytosine
  modified_base 26: mod_base = OTHER; note = Adenosine phosphorothiorate
  modified_base 28: mod_base = OTHER; note = 2'-Omethyluridine phosphorothiorate
  modified_base 29: mod_base = OTHER; note = 2'-Omethylguanosine
  modified_base 30: mod_base = OTHER; note = 2'-fluoroguanosine phosphorothiorate
  modified_base 31: mod_base = OTHER; note = 2'-Omethyladenosine phosphorothiorate
  modified_base 33: mod_base = OTHER; note = 2'-fluorouridine
  modified_base 35: mod_base = OTHER; note = 2'-Omethylcytosine phosphorothiorate
  modified_base 37: mod_base = OTHER; note = Adenosine phosphorothiorate
  modified_base 38: mod_base = OTHER; note = Adenosine phosphorothiorate
  modified_base 40: mod_base = OTHER; note = 2'-Omethyluridine
  modified_base 41: mod_base = OTHER; note = 2'-Omethylcytosine
  modified_base 42: mod_base = OTHER; note = Adenosine phosphorothiorate
  modified_base 43: mod_base = OTHER; note = 2'-Omethyladenosine phosphorothiorate
  modified_base 44: mod_base = OTHER; note = 2'-Omethyladenosine
  modified_base 45: mod_base = OTHER; note = 2'-fluoroguanosine
  modified_base 49: mod_base = OTHER; note = 2'-Omethylcytosine
  modified_base 50: mod_base = OTHER; note = 2'-Omethylcytosine
  modified_base 52: mod_base = OTHER; note = 2'-Omethylguanosine
  modified_base 53: mod_base = OTHER; note = 2'-fluoroguanosine
  modified_base 55: mod_base = OTHER; note = Uridine phosphorothiorate
  modified_base 57: mod_base = OTHER; note = 2'-Omethylguanosine
  modified_base 59: mod_base = OTHER; note = 2'-Omethylguanosine
  modified_base 61: mod_base = OTHER; note = 2'-Omethylcytosine
  modified_base 62: mod_base = OTHER; note = 2'-Omethylcytosine
  modified_base 63: mod_base = OTHER; note = 2'-fluorocytosine
  modified_base 64: mod_base = OTHER; note = 2'-Omethylguanosine phosphorothiorate
  modified_base 65: mod_base = OTHER; note = 2'-Omethylguanosine phosphorothiorate
  modified_base 66: mod_base = OTHER; note = Cytosine phosphorothiorate
  modified_base 67: mod_base = OTHER; note = Guanosine phosphorothiorate
  modified_base 68: mod_base = OTHER; note = 2'-Omethylguanosine
  modified_base 70: mod_base = OTHER; note = 2'-fluoroguanosine
  modified_base 73: mod_base = OTHER; note = Guanosine phosphorothiorate
  modified_base 74: mod_base = OTHER; note = Cytosine phosphorothiorate
  modified_base 75: mod_base = OTHER; note = 2'-fluorocytosine
  modified_base 76: mod_base = OTHER; note = 2'-Omethyladenosine

SEQ ID NO: 6287 - RNA, 76 nt, synthetic construct; identical to SEQ ID NO: 3675
  source 1..76: mol_type = other RNA
  modified_base 1: mod_base = OTHER; note = 2'-Omethylguanosine
  modified_base 2: mod_base = OTHER; note = 2'-Omethylcytosine
  modified_base 3: mod_base = OTHER; note = 2'-Omethylcytosine
  modified_base 4: mod_base = OTHER; note = 2'-Omethyluridine
  modified_base 5: mod_base = OTHER; note = 2'-Omethylcytosine
  modified_base 6: mod_base = OTHER; note = 2'-Omethylcytosine
  modified_base 14: mod_base = OTHER; note = 2'-Omethyladenosine
  modified_base 15: mod_base = OTHER; note = 2'-Omethyladenosine
  modified_base 16: mod_base = OTHER; note = 2'-Omethyluridine
  modified_base 17: mod_base = OTHER; note = 2'-Omethylguanosine
  modified_base 18: mod_base = OTHER; note = 2'-Omethylguanosine
  modified_base 20: mod_base = OTHER; note = 2'-Omethyluridine
  modified_base 25: mod_base = OTHER; note = 2'-Omethylcytosine
  modified_base 41: mod_base = OTHER; note = 2'-Omethylcytosine
  modified_base 42: mod_base = OTHER; note = 2'-Omethyladenosine
  modified_base 43: mod_base = OTHER; note = 2'-Omethylcytosine
  modified_base 44: mod_base = OTHER; note = 2'-Omethyladenosine
  modified_base 49: mod_base = OTHER; note = 2'-Omethylcytosine
  modified_base 50: mod_base = OTHER; note = 2'-Omethylcytosine
  modified_base 52: mod_base = OTHER; note = 2'-Omethylguanosine
  modified_base 54: mod_base = OTHER; note = 2'-Omethyluridine
  modified_base 55: mod_base = OTHER; note = Uridine phosphorothiorate
  modified_base 56: mod_base = OTHER; note = 2'-Omethylcytosine
  modified_base 57: mod_base = OTHER; note = 2'-fluoroguanosine
  modified_base 59: mod_base = OTHER; note = 2'-Omethylguanosine
  modified_base 61: mod_base = OTHER; note = 2'-Omethylcytosine
  modified_base 65: mod_base = OTHER; note = 2'-Omethylguanosine
  modified_base 73: mod_base = OTHER; note = 2'-Omethylguanosine

SEQ ID NO: 6288 - RNA, 76 nt, synthetic construct; identical to SEQ ID NO: 625
  source 1..76: mol_type = other RNA
  modified_base 1: mod_base = OTHER; note = 2'-Omethylguanosine
  modified_base 17: mod_base = OTHER; note = 2'-Omethylguanosine
  modified_base 18: mod_base = OTHER; note = 2'-Omethylguanosine
  modified_base 34: mod_base = OTHER; note = Thymine
  modified_base 50: mod_base = OTHER; note = 2'-Omethylcytosine
  modified_base 52: mod_base = OTHER; note = 2'-Omethylguanosine
  modified_base 73: mod_base = OTHER; note = 2'-Omethylguanosine

SEQ ID NO: 6289 - RNA, 75 nt, synthetic construct; identical to SEQ ID NO: 3299
  source 1..75: mol_type = other RNA
  modified_base 15: mod_base = OTHER; note = 2'-fluorouridine
  modified_base 21: mod_base = OTHER; note = 2'-fluoroguanosine
  modified_base 23: mod_base = OTHER; note = Guanosine phosphorothiorate
  modified_base 38: mod_base = OTHER; note = 2'-fluorouridine
  modified_base 46: mod_base = OTHER; note = 2'-fluorouridine
  modified_base 53: mod_base = OTHER; note = 2'-fluorouridine
  modified_base 55: mod_base = OTHER; note = 2'-fluorocytosine
  modified_base 72: mod_base = OTHER; note = 2'-Omethylguanosine
  modified_base 73: mod_base = OTHER; note = Cytosine phosphorothiorate

SEQ ID NO: 6290 - RNA, 86 nt, synthetic construct; identical to SEQ ID NO: 3290
  source 1..86: mol_type = other RNA
  modified_base 1: mod_base = OTHER; note = 2'-Omethyladenosine
  modified_base 10: mod_base = OTHER; note = 2'-Omethylguanosine
  modified_base 11: mod_base = OTHER; note = 2'-Omethylcytosine
  modified_base 12: mod_base = OTHER; note = 2'-Omethylcytosine
  modified_base 13: mod_base = OTHER; note = 2'-Omethylguanosine
  modified_base 14: mod_base = OTHER; note = 2'-Omethyladenosine
  modified_base 15: mod_base = OTHER; note = 2'-Omethylguanosine
  modified_base 16: mod_base = OTHER; note = 2'-Omethyluridine
  modified_base 17: mod_base = OTHER; note = 2'-Omethylguanosine
  modified_base 18: mod_base = OTHER; note = 2'-Omethylguanosine
  modified_base 19: mod_base = OTHER; note = Uridine phosphorothiorate
  modified_base 20: mod_base = OTHER; note = 2'-Omethyluridine
  modified_base 21: mod_base = OTHER; note = Adenosine phosphorothiorate
  modified_base 25: mod_base = OTHER; note = 2'-Omethylcytosine
  modified_base 33: mod_base = OTHER; note = 2'-fluorouridine
  modified_base 34: mod_base = OTHER; note = 2'-Omethyluridine
  modified_base 35: mod_base = OTHER; note = Cytosine phosphorothiorate
  modified_base 37: mod_base = OTHER; note = Guanosine phosphorothiorate
  modified_base 38: mod_base = OTHER; note = Adenosine phosphorothiorate
  modified_base 41: mod_base = OTHER; note = 2'-fluorocytosine
  modified_base 42: mod_base = OTHER; note = 2'-Omethyladenosine
  modified_base 43: mod_base = OTHER; note = 2'-Omethyladenosine
  modified_base 44: mod_base = OTHER; note = 2'-fluorouridine
  modified_base 59: mod_base = OTHER; note = 2'-Omethylguanosine
  modified_base 60: mod_base = OTHER; note = 2'-Omethyluridine
  modified_base 62: mod_base = OTHER; note = 2'-Omethylguanosine
  modified_base 64: mod_base = OTHER; note = Uridine phosphorothiorate
  modified_base 65: mod_base = OTHER; note = Uridine phosphorothiorate
  modified_base 71: mod_base = OTHER; note = 2'-Omethylcytosine
  modified_base 75: mod_base = OTHER; note = 2'-Omethylcytosine
  modified_base 83: mod_base = OTHER; note = 2'-Omethyladenosine

SEQ ID NO: 6291 - RNA, 76 nt, synthetic construct; identical to SEQ ID NO: 625
  source 1..76: mol_type = other RNA
  modified_base 1: mod_base = OTHER; note = 2'-fluoroguanosine
  modified_base 4: mod_base = OTHER; note = 2'-Omethyluridine
  modified_base 5: mod_base = OTHER; note = 2'-Omethylcytosine
  modified_base 8: mod_base = OTHER; note = Uridine phosphorothiorate
  modified_base 10: mod_base = OTHER; note = 2'-fluoroguanosine
  modified_base 11: mod_base = OTHER; note = Cytosine phosphorothiorate
  modified_base 14: mod_base = OTHER; note = 2'-fluoroadenosine
  modified_base 18: mod_base = OTHER; note = 2'-fluoroguanosine
  modified_base 20: mod_base = OTHER; note = 2'-Omethyluridine
  modified_base 22: mod_base = OTHER; note = 2'-Omethylguanosine phosphorothiorate
  modified_base 23: mod_base = OTHER; note = 2'-Omethylcytosine
  modified_base 26: mod_base = OTHER; note = Adenosine phosphorothiorate
  modified_base 29: mod_base = OTHER; note = 2'-Omethylguanosine
  modified_base 31: mod_base = OTHER; note = 2'-fluoroadenosine
  modified_base 34: mod_base = OTHER; note = Uridine phosphorothiorate
  modified_base 37: mod_base = OTHER; note = Adenosine phosphorothiorate
  modified_base 38: mod_base = OTHER; note = 2'-Omethyladenosine
  modified_base 39: mod_base = OTHER; note = Uridine phosphorothiorate
  modified_base 40: mod_base = OTHER; note = 2'-fluorouridine
  modified_base 41: mod_base = OTHER; note = 2'-fluorocytosine phosphorothiorate
  modified_base 43: mod_base = OTHER; note = 2'-Omethyladenosine
  modified_base 44: mod_base = OTHER; note = 2'-Omethyladenosine
  modified_base 45: mod_base = OTHER; note = Guanosine phosphorothiorate
  modified_base 47: mod_base = OTHER; note = 2'-fluorouridine
  modified_base 50: mod_base = OTHER; note = 2'-Omethylcytosine
  modified_base 53: mod_base = OTHER; note = 2'-Omethylguanosine
  modified_base 55: mod_base = OTHER; note = Uridine phosphorothiorate
  modified_base 56: mod_base = OTHER; note = 2'-fluorocytosine
  modified_base 60: mod_base = OTHER; note = Uridine phosphorothiorate
  modified_base 61: mod_base = OTHER; note = 2'-Omethylcytosine
  modified_base 62: mod_base = OTHER; note = 2'-fluorocytosine
  modified_base 64: mod_base = OTHER; note = 2'-Omethylguanosine phosphorothiorate
  modified_base 65: mod_base = OTHER; note = 2'-Omethylguanosine
  modified_base 66: mod_base = OTHER; note = Cytosine phosphorothiorate
  modified_base 67: mod_base = OTHER; note = 2'-fluoroguanosine
  modified_base 69: mod_base = OTHER; note = 2'-Omethyladenosine
  modified_base 70: mod_base = OTHER; note = 2'-Omethylguanosine

SEQ ID NO: 6292 - RNA, 76 nt, synthetic construct; identical to SEQ ID NO: 3295
  source 1..76: mol_type = other RNA
  modified_base 1: mod_base = OTHER; note = 2'-Omethylcytosine phosphorothiorate
  modified_base 2: mod_base = OTHER; note = 2'-fluorocytosine phosphorothiorate
  modified_base 3: mod_base = OTHER; note = 2'-fluorouridine
  modified_base 10: mod_base = OTHER; note = 2'-fluoroguanosine
  modified_base 17: mod_base = OTHER; note = 2'-Omethyluridine
  modified_base 20: mod_base = OTHER; note = 2'-Omethyluridine phosphorothiorate
  modified_base 22: mod_base = OTHER; note = 2'-fluoroguanosine
  modified_base 25: mod_base = OTHER; note = 2'-fluorocytosine phosphorothiorate
  modified_base 39: mod_base = OTHER; note = 2'-fluorouridine
  modified_base 75: mod_base = OTHER; note = 2'-fluorocytosine

SEQ ID NO: 6293 - RNA, 86 nt, synthetic construct; identical to SEQ ID NO: 3290
  source 1..86: mol_type = other RNA
  modified_base 22: mod_base = OTHER; note = 2'-fluoroadenosine

SEQ ID NO: 6294 - RNA, 76 nt, synthetic construct; identical to SEQ ID NO: 625
  source 1..76: mol_type = other RNA
  modified_base 5: mod_base = OTHER; note = 2'-fluorocytosine
  modified_base 14: mod_base = OTHER; note = Adenosine phosphorothiorate
  modified_base 15: mod_base = OTHER; note = 2'-fluoroadenosine
  modified_base 17: mod_base = OTHER; note = Guanosine phosphorothiorate
  modified_base 18: mod_base = OTHER; note = 2'-fluoroguanosine
  modified_base 24: mod_base = OTHER; note = 2'-Omethylguanosine phosphorothiorate
  modified_base 25: mod_base = OTHER; note = 2'-Omethylcytosine
  modified_base 29: mod_base = OTHER; note = Guanosine phosphorothiorate
  modified_base 30: mod_base = OTHER; note = 2'-Omethylguanosine
  modified_base 31: mod_base = OTHER; note = 2'-fluoroadenosine
  modified_base 32: mod_base = OTHER; note = 2'-fluorocytosine
  modified_base 34: mod_base = OTHER; note = 2'-Omethyluridine
  modified_base 36: mod_base = OTHER; note = Adenosine phosphorothiorate
  modified_base 38: mod_base = OTHER; note = 2'-fluoroadenosine phosphorothiorate
  modified_base 39: mod_base = OTHER; note = 2'-Omethyluridine phosphorothiorate
  modified_base 40: mod_base = OTHER; note = 2'-fluorouridine phosphorothiorate
  modified_base 41: mod_base = OTHER; note = 2'-Omethylcytosine
  modified_base 42: mod_base = OTHER; note = 2'-Omethyladenosine
  modified_base 43: mod_base = OTHER; note = 2'-Omethyladenosine phosphorothiorate
  modified_base 44: mod_base = OTHER; note = 2'-Omethyladenosine
  modified_base 45: mod_base = OTHER; note = 2'-Omethylguanosine
  modified_base 46: mod_base = OTHER; note = 2'-fluoroguanosine
  modified_base 47: mod_base = OTHER; note = 2'-fluorouridine
  modified_base 50: mod_base = OTHER; note = Cytosine phosphorothiorate
  modified_base 52: mod_base = OTHER; note = 2'-Omethylguanosine
  modified_base 53: mod_base = OTHER; note = 2'-fluoroguanosine
  modified_base 55: mod_base = OTHER; note = Uridine phosphorothiorate
  modified_base 56: mod_base = OTHER; note = 2'-Omethylcytosine
  modified_base 57: mod_base = OTHER; note = 2'-fluoroguanosine
  modified_base 62: mod_base = OTHER; note = Cytosine phosphorothiorate
  modified_base 63: mod_base = OTHER; note = 2'-Omethylcytosine
  modified_base 65: mod_base = OTHER; note = 2'-Omethylguanosine
  modified_base 66: mod_base = OTHER; note = 2'-fluorocytosine
  modified_base 67: mod_base = OTHER; note = 2'-fluoroguanosine
  modified_base 69: mod_base = OTHER; note = 2'-fluoroadenosine
  modified_base 71: mod_base = OTHER; note = Uridine phosphorothiorate
  modified_base 72: mod_base = OTHER; note = 2'-fluorocytosine
  modified_base 74: mod_base = OTHER; note = 2'-Omethylcytosine
  modified_base 75: mod_base = OTHER; note = Cytosine phosphorothiorate
  modified_base 76: mod_base = OTHER; note = 2'-fluoroadenosine

SEQ ID NO: 6295 - RNA, 85 nt, synthetic construct; identical to SEQ ID NO: 3297
  source 1..85: mol_type = other RNA
  modified_base 1: mod_base = OTHER; note = 2'-Omethylguanosine
  modified_base 2: mod_base = OTHER; note = 2'-Omethylcytosine
  modified_base 3: mod_base = OTHER; note = 2'-Omethyluridine
  modified_base 4: mod_base = OTHER; note = 2'-Omethylguanosine
  modified_base 5: mod_base = OTHER; note = 2'-Omethyluridine
  modified_base 6: mod_base = OTHER; note = 2'-Omethylguanosine
  modified_base 13: mod_base = OTHER; note = 2'-Omethylguanosine
  modified_base 17: mod_base = OTHER; note = 2'-Omethylguanosine
  modified_base 18: mod_base = OTHER; note = 2'-Omethylguanosine
  modified_base 25: mod_base = OTHER; note = 2'-Omethylcytosine
  modified_base 33: mod_base = OTHER; note = Uridine phosphorothiorate
  modified_base 34: mod_base = OTHER; note = 2'-Omethyluridine
  modified_base 35: mod_base = OTHER; note = Cytosine phosphorothiorate
  modified_base 37: mod_base = OTHER; note = Adenosine phosphorothiorate
  modified_base 38: mod_base = OTHER; note = Adenosine phosphorothiorate
  modified_base 41: mod_base = OTHER; note = 2'-fluorocytosine
  modified_base 42: mod_base = OTHER; note = 2'-Omethyladenosine
  modified_base 43: mod_base = OTHER; note = 2'-Omethyladenosine
  modified_base 44: mod_base = OTHER; note = 2'-fluorouridine
  modified_base 58: mod_base = OTHER; note = 2'-Omethylguanosine
  modified_base 59: mod_base = OTHER; note = 2'-Omethylcytosine
  modified_base 60: mod_base = OTHER; note = 2'-Omethyladenosine
  modified_base 61: mod_base = OTHER; note = 2'-Omethylguanosine
  modified_base 62: mod_base = OTHER; note = 2'-Omethylguanosine
  modified_base 63: mod_base = OTHER; note = Uridine phosphorothiorate
  modified_base 64: mod_base = OTHER; note = Uridine phosphorothiorate
  modified_base 70: mod_base = OTHER; note = 2'-Omethylcytosine
  modified_base 74: mod_base = OTHER; note = 2'-Omethylcytosine
  modified_base 82: mod_base = OTHER; note = 2'-Omethylguanosine

SEQ ID NO: 6296 - RNA, 76 nt, synthetic construct; identical to SEQ ID NO: 3490
  source 1..76: mol_type = other RNA
  modified_base 1: mod_base = OTHER; note = 2'-Omethylguanosine
  modified_base 2: mod_base = OTHER; note = 2'-Omethylguanosine
  modified_base 3: mod_base = OTHER; note = 2'-Omethylcytosine
  modified_base 4: mod_base = OTHER; note = 2'-Omethyluridine
  modified_base 5: mod_base = OTHER; note = 2'-Omethylcytosine
  modified_base 6: mod_base = OTHER; note = 2'-Omethylcytosine
  modified_base 16: mod_base = OTHER; note = 2'-Omethyluridine
  modified_base 17: mod_base = OTHER; note = 2'-Omethylguanosine
  modified_base 18: mod_base = OTHER; note = 2'-Omethylguanosine
  modified_base 33: mod_base = OTHER; note = 2'-fluorouridine
  modified_base 35: mod_base = OTHER; note = Cytosine phosphorothiorate
  modified_base 37: mod_base = OTHER; note = Adenosine phosphorothiorate
  modified_base 38: mod_base = OTHER; note = Adenosine phosphorothiorate
  modified_base 44: mod_base = OTHER; note = 2'-Omethyladenosine
  modified_base 45: mod_base = OTHER; note = 2'-Omethylguanosine
  modified_base 46: mod_base = OTHER; note = 2'-fluoroguanosine
  modified_base 47: mod_base = OTHER; note = 2'-fluorouridine
  modified_base 48: mod_base = OTHER; note = 2'-fluorouridine
  modified_base 56: mod_base = OTHER; note = 2'-Omethylcytosine
  modified_base 59: mod_base = OTHER; note = 2'-Omethylguanosine
  modified_base 61: mod_base = OTHER; note = 2'-Omethylcytosine
  modified_base 62: mod_base = OTHER; note = 2'-Omethylcytosine
  modified_base 63: mod_base = OTHER; note = 2'-fluorocytosine
  modified_base 64: mod_base = OTHER; note = 2'-Omethylguanosine
  modified_base 65: mod_base = OTHER; note = 2'-Omethylcytosine
  modified_base 66: mod_base = OTHER; note = 2'-Omethylcytosine
  modified_base 67: mod_base = OTHER; note = 2'-Omethylguanosine
  modified_base 68: mod_base = OTHER; note = 2'-Omethylguanosine
  modified_base 73: mod_base = OTHER; note = 2'-Omethylguanosine

SEQ ID NO: 6297 - RNA, 76 nt, synthetic construct; identical to SEQ ID NO: 625
  source 1..76: mol_type = other RNA
  modified_base 1: mod_base = OTHER; note = Guanosine phosphorothiorate
  modified_base 3: mod_base = OTHER; note = 2'-Omethylcytosine
  modified_base 6: mod_base = OTHER; note = 2'-Omethylcytosine
  modified_base 10: mod_base = OTHER; note = 2'-fluoroguanosine
  modified_base 11: mod_base = OTHER; note = 2'-Omethylcytosine
  modified_base 12: mod_base = OTHER; note = 2'-Omethylguanosine
  modified_base 14: mod_base = OTHER; note = 2'-Omethyladenosine
  modified_base 15: mod_base = OTHER; note = 2'-Omethyladenosine
  modified_base 16: mod_base = OTHER; note = 2'-fluorouridine
  modified_base 18: mod_base = OTHER; note = 2'-fluoroguanosine phosphorothiorate
  modified_base 19: mod_base = OTHER; note = Adenosine phosphorothiorate
  modified_base 20: mod_base = OTHER; note = Uridine phosphorothiorate
  modified_base 21: mod_base = OTHER; note = Adenosine phosphorothiorate
  modified_base 22: mod_base = OTHER; note = 2'-Omethylguanosine
  modified_base 24: mod_base = OTHER; note = Guanosine phosphorothiorate
  modified_base 28: mod_base = OTHER; note = 2'-fluorouridine
  modified_base 29: mod_base = OTHER; note = 2'-fluoroguanosine
  modified_base 30: mod_base = OTHER; note = 2'-fluoroguanosine
  modified_base 41: mod_base = OTHER; note = 2'-Omethylcytosine
  modified_base 43: mod_base = OTHER; note = 2'-Omethyladenosine
  modified_base 45: mod_base = OTHER; note = 2'-Omethylguanosine
  modified_base 46: mod_base = OTHER; note = 2'-fluoroguanosine
  modified_base 49: mod_base = OTHER; note = 2'-fluorocytosine
  modified_base 53: mod_base = OTHER; note = Guanosine phosphorothiorate
  modified_base 54: mod_base = OTHER; note = 2'-fluorouridine
  modified_base 58: mod_base = OTHER; note = Adenosine phosphorothiorate
  modified_base 59: mod_base = OTHER; note = 2'-fluoroguanosine
  modified_base 60: mod_base = OTHER; note = 2'-Omethyluridine
  modified_base 62: mod_base = OTHER; note = Cytosine phosphorothiorate
  modified_base 63: mod_base = OTHER; note = 2'-Omethylcytosine
  modified_base 65: mod_base = OTHER; note = 2'-fluoroguanosine
  modified_base 68: mod_base = OTHER; note = Guanosine phosphorothiorate
  modified_base 69: mod_base = OTHER; note = 2'-Omethyladenosine
  modified_base 70: mod_base = OTHER; note = Guanosine phosphorothiorate
  modified_base 71: mod_base = OTHER; note = 2'-fluorouridine
  modified_base 72: mod_base = OTHER; note = Cytosine phosphorothiorate
  modified_base 73: mod_base = OTHER; note = 2'-Omethylguanosine
  modified_base 74: mod_base = OTHER; note = 2'-fluorocytosine
  modified_base 75: mod_base = OTHER; note = 2'-fluorocytosine

SEQ ID NO: 6298 - RNA, 76 nt, synthetic construct; identical to SEQ ID NO: 625
  source 1..76: mol_type = other RNA
  modified_base 54: mod_base = OTHER; note = Thymine

SEQ ID NO: 6299 - RNA, 76 nt, synthetic construct; identical to SEQ ID NO: 3318
  source 1..76: mol_type = other RNA
  modified_base 1: mod_base = OTHER; note = 2'-Omethylcytosine phosphorothiorate
  modified_base 2: mod_base = OTHER; note = 2'-Omethylcytosine phosphorothiorate
  modified_base 3: mod_base = OTHER; note = 2'-Omethyluridine
  modified_base 4: mod_base = OTHER; note = 2'-Omethyluridine
  modified_base 5: mod_base = OTHER; note = 2'-Omethylcytosine
  modified_base 6: mod_base = OTHER; note = 2'-Omethylguanosine
  modified_base 13: mod_base = OTHER; note = 2'-Omethylcytosine
  modified_base 16: mod_base = OTHER; note = 2'-Omethyluridine
  modified_base 18: mod_base = OTHER; note = 2'-Omethylguanosine
  modified_base 19: mod_base = OTHER; note = 2'-Omethylguanosine
  modified_base 25: mod_base = OTHER; note = 2'-Omethylcytosine
  modified_base 33: mod_base = OTHER; note = 2'-fluorouridine
  modified_base 35: mod_base = OTHER; note = Uridine phosphorothiorate
  modified_base 37: mod_base = OTHER; note = Guanosine phosphorothiorate
  modified_base 38: mod_base = OTHER; note = Adenosine phosphorothiorate
  modified_base 41: mod_base = OTHER; note = 2'-fluorocytosine phosphorothiorate
  modified_base 42: mod_base = OTHER; note = 2'-Omethyluridine
  modified_base 43: mod_base = OTHER; note = 2'-Omethyluridine
  modified_base 44: mod_base = OTHER; note = 2'-fluoroadenosine
  modified_base 45: mod_base = OTHER; note = 2'-Omethylguanosine
  modified_base 46: mod_base = OTHER; note = 2'-fluoroguanosine
  modified_base 47: mod_base = OTHER; note = 2'-fluorouridine
  modified_base 48: mod_base = OTHER; note = 2'-fluorocytosine
  modified_base 56: mod_base = OTHER; note = 2'-Omethylcytosine
  modified_base 59: mod_base = OTHER; note = 2'-Omethyladenosine
  modified_base 61: mod_base = OTHER; note = 2'-Omethylcytosine
  modified_base 62: mod_base = OTHER; note = 2'-Omethylcytosine
  modified_base 63: mod_base = OTHER; note = 2'-fluoroguanosine
  modified_base 64: mod_base = OTHER; note = 2'-Omethylguanosine
  modified_base 65: mod_base = OTHER; note = 2'-Omethylcytosine
  modified_base 66: mod_base = OTHER; note = 2'-Omethyluridine
  modified_base 67: mod_base = OTHER; note = 2'-Omethylcytosine
  modified_base 68: mod_base = OTHER; note = 2'-Omethylguanosine
  modified_base 71: mod_base = OTHER; note = 2'-Omethylguanosine
  modified_base 73: mod_base = OTHER; note = 2'-Omethyladenosine

SEQ ID NO: 6300 - RNA, 76 nt, synthetic construct; identical to SEQ ID NO: 625
  source 1..76: mol_type = other RNA
  modified_base 1: mod_base = OTHER; note = 2'-Omethylguanosine
  modified_base 2: mod_base = OTHER; note = 2'-Omethylguanosine
  modified_base 3: mod_base = OTHER; note = 2'-Omethylcytosine
  modified_base 10: mod_base = OTHER; note = 2'-Omethylguanosine
  modified_base 11: mod_base = OTHER; note = 2'-Omethylcytosine
  modified_base 12: mod_base = OTHER; note = 2'-Omethylguanosine
  modified_base 13: mod_base = OTHER; note = 2'-Omethylcytosine
  modified_base 14: mod_base = OTHER; note = 2'-Omethyladenosine
  modified_base 15: mod_base = OTHER; note = 2'-fluoroadenosine
  modified_base 16: mod_base = OTHER; note = 2'-Omethyluridine
  modified_base 17: mod_base = OTHER; note = 2'-Omethylguanosine
  modified_base 18: mod_base = OTHER; note = 2'-Omethylguanosine
  modified_base 19: mod_base = OTHER; note = 2'-fluoroadenosine
  modified_base 20: mod_base = OTHER; note = 2'-Omethyluridine
  modified_base 22: mod_base = OTHER; note = 2'-Omethylguanosine
  modified_base 23: mod_base = OTHER; note = 2'-Omethylcytosine
  modified_base 24: mod_base = OTHER; note = 2'-Omethylguanosine
  modified_base 25: mod_base = OTHER; note = 2'-Omethylcytosine
  modified_base 38: mod_base = OTHER; note = Adenosine phosphorothiorate
  modified_base 39: mod_base = OTHER; note = Uridine phosphorothiorate
  modified_base 40: mod_base = OTHER; note = 2'-fluorouridine
  modified_base 43: mod_base = OTHER; note = 2'-Omethyladenosine
  modified_base 44: mod_base = OTHER; note = 2'-Omethyladenosine
  modified_base 45: mod_base = OTHER; note = 2'-Omethylguanosine
  modified_base 46: mod_base = OTHER; note = 2'-fluoroguanosine
  modified_base 48: mod_base = OTHER; note = 2'-fluorouridine
  modified_base 49: mod_base = OTHER; note = 2'-Omethylcytosine
  modified_base 50: mod_base = OTHER; note = 2'-Omethylcytosine
  modified_base 54: mod_base = OTHER; note = 2'-Omethyluridine phosphorothiorate
  modified_base 55: mod_base = OTHER; note = Uridine phosphorothiorate
  modified_base 56: mod_base = OTHER; note = 2'-Omethylcytosine
  modified_base 57: mod_base = OTHER; note = 2'-fluoroguanosine
  modified_base 61: mod_base = OTHER; note = 2'-Omethylcytosine
  modified_base 62: mod_base = OTHER; note = 2'-Omethylcytosine
  modified_base 63: mod_base = OTHER; note = 2'-fluorocytosine
  modified_base 64: mod_base = OTHER; note = 2'-Omethylguanosine
  modified_base 65: mod_base = OTHER; note = 2'-Omethylguanosine
  modified_base 66: mod_base = OTHER; note = 2'-Omethylcytosine
  modified_base 67: mod_base = OTHER; note = 2'-Omethylguanosine
  modified_base 68: mod_base = OTHER; note = 2'-Omethylguanosine

SEQ ID NO: 6301 - RNA, 86 nt, synthetic construct; identical to SEQ ID NO: 3290
  source 1..86: mol_type = other RNA
  modified_base 1: mod_base = OTHER; note = 2'-Omethyladenosine phosphorothiorate
  modified_base 85: mod_base = OTHER; note = 2'-Omethylcytosine phosphorothiorate

SEQ ID NO: 6302 - RNA, 76 nt, synthetic construct; identical to SEQ ID NO: 625
  source 1..76: mol_type = other RNA
  modified_base 2: mod_base = OTHER; note = 2'-Omethylguanosine
  modified_base 3: mod_base = OTHER; note = 2'-Omethylcytosine
  modified_base 6: mod_base = OTHER; note = 2'-fluorocytosine
  modified_base 9: mod_base = OTHER; note = Guanosine phosphorothiorate
  modified_base 10: mod_base = OTHER; note = 2'-Omethylguanosine
  modified_base 23: mod_base = OTHER; note = 2'-fluorocytosine
  modified_base 24: mod_base = OTHER; note = 2'-fluoroguanosine
  modified_base 25: mod_base = OTHER; note = 2'-fluorocytosine
  modified_base 26: mod_base = OTHER; note = 2'-fluoroadenosine
  modified_base 28: mod_base = OTHER; note = 2'-fluorouridine
  modified_base 31: mod_base = OTHER; note = 2'-Omethyladenosine
  modified_base 33: mod_base = OTHER; note = 2'-fluorouridine phosphorothiorate
  modified_base 34: mod_base = OTHER; note = 2'-Omethyluridine phosphorothiorate
  modified_base 36: mod_base = OTHER; note = Adenosine phosphorothiorate
  modified_base 37: mod_base = OTHER; note = Adenosine phosphorothiorate
  modified_base 38: mod_base = OTHER; note = 2'-fluoroadenosine
  modified_base 42: mod_base = OTHER; note = 2'-Omethyladenosine
  modified_base 43: mod_base = OTHER; note = Adenosine phosphorothiorate
  modified_base 44: mod_base = OTHER; note = 2'-fluoroadenosine
  modified_base 45: mod_base = OTHER; note = 2'-Omethylguanosine phosphorothiorate
  modified_base 46: mod_base = OTHER; note = 2'-Omethylguanosine
  modified_base 49: mod_base = OTHER; note = 2'-Omethylcytosine
  modified_base 50: mod_base = OTHER; note = Cytosine phosphorothiorate
  modified_base 51: mod_base = OTHER; note = 2'-Omethylguanosine
  modified_base 52: mod_base = OTHER; note = 2'-fluoroguanosine phosphorothiorate
  modified_base 53: mod_base = OTHER; note = 2'-Omethylguanosine phosphorothiorate
  modified_base 54: mod_base = OTHER; note = 2'-Omethyluridine phosphorothiorate
  modified_base 55: mod_base = OTHER; note = Uridine phosphorothiorate
  modified_base 56: mod_base = OTHER; note = 2'-Omethylcytosine
  modified_base 62: mod_base = OTHER; note = Cytosine phosphorothiorate
  modified_base 63: mod_base = OTHER; note = 2'-Omethylcytosine
  modified_base 73: mod_base = OTHER; note = 2'-Omethylguanosine
  modified_base 74: mod_base = OTHER; note = Cytosine phosphorothiorate
  modified_base 75: mod_base = OTHER; note = 2'-Omethylcytosine phosphorothiorate
  modified_base 76: mod_base = OTHER; note = 2'-fluoroadenosine

SEQ ID NO: 6303 - RNA, 73 nt, synthetic construct; identical to SEQ ID NO: 935
  source 1..73: mol_type = other RNA
  modified_base 1: mod_base = OTHER; note = 2'-Omethylguanosine phosphorothiorate
  modified_base 2: mod_base = OTHER; note = 2'-Omethylguanosine phosphorothiorate
  modified_base 13: mod_base = OTHER; note = 2'-fluorocytosine
  modified_base 14: mod_base = OTHER; note = 2'-fluoroadenosine
  modified_base 54: mod_base = OTHER; note = 2'-fluorouridine
  modified_base 59: mod_base = OTHER; note = 2'-Omethylguanosine
  modified_base 72: mod_base = OTHER; note = Cytosine phosphorothiorate

SEQ ID NO: 6304 - RNA, 76 nt, synthetic construct; identical to SEQ ID NO: 625
  source 1..76: mol_type = other RNA
  modified_base 1: mod_base = OTHER; note = 2'-Omethylguanosine phosphorothiorate
  modified_base 2: mod_base = OTHER; note = 2'-Omethylguanosine
  modified_base 13: mod_base = OTHER; note = 2'-fluorocytosine
  modified_base 73: mod_base = OTHER; note = 2'-Omethylguanosine phosphorothiorate
  modified_base 74: mod_base = OTHER; note = Cytosine phosphorothiorate
  modified_base 75: mod_base = OTHER; note = 2'-Omethylcytosine

SEQ ID NO: 6305 - RNA, 85 nt, synthetic construct; identical to SEQ ID NO: 3297
  source 1..85: mol_type = other RNA
  modified_base 1: mod_base = OTHER; note = 2'-Omethylguanosine
  modified_base 10: mod_base = OTHER; note = 2'-Omethylguanosine
  modified_base 11: mod_base = OTHER; note = 2'-Omethylcytosine
  modified_base 12: mod_base = OTHER; note = 2'-Omethylcytosine
  modified_base 13: mod_base = OTHER; note = 2'-Omethylguanosine
  modified_base 17: mod_base = OTHER; note = 2'-Omethylguanosine
  modified_base 18: mod_base = OTHER; note = 2'-Omethylguanosine
  modified_base 25: mod_base = OTHER; note = 2'-Omethylcytosine
  modified_base 33: mod_base = OTHER; note = Uridine phosphorothiorate
  modified_base 34: mod_base = OTHER; note = 2'-Omethyluridine
  modified_base 35: mod_base = OTHER; note = Cytosine phosphorothiorate
  modified_base 37: mod_base = OTHER; note = Adenosine phosphorothiorate
  modified_base 38: mod_base = OTHER; note = Adenosine phosphorothiorate
  modified_base 41: mod_base = OTHER; note = 2'-Omethylcytosine
  modified_base 42: mod_base = OTHER; note = 2'-Omethyladenosine
  modified_base 43: mod_base = OTHER; note = 2'-Omethyladenosine
  modified_base 44: mod_base = OTHER; note = 2'-Omethyluridine
  modified_base 58: mod_base = OTHER; note = 2'-Omethylguanosine
  modified_base 59: mod_base = OTHER; note = 2'-Omethylcytosine
  modified_base 61: mod_base = OTHER; note = 2'-Omethylguanosine
  modified_base 63: mod_base = OTHER; note = Uridine phosphorothiorate
  modified_base 64: mod_base = OTHER; note = Uridine phosphorothiorate
  modified_base 70: mod_base = OTHER; note = 2'-Omethylcytosine
  modified_base 74: mod_base = OTHER; note = 2'-Omethylcytosine
  modified_base 82: mod_base = OTHER; note = 2'-Omethylguanosine

SEQ ID NO: 6306 - RNA, 76 nt, synthetic construct; identical to SEQ ID NO: 625
  source 1..76: mol_type = other RNA
  modified_base 1: mod_base = OTHER; note = 2'-Omethylguanosine
  modified_base 2: mod_base = OTHER; note = 2'-Omethylguanosine
  modified_base 3: mod_base = OTHER; note = 2'-Omethylcytosine phosphorothiorate
  modified_base 6: mod_base = OTHER; note = Cytosine phosphorothiorate
  modified_base 11: mod_base = OTHER; note = 2'-Omethylcytosine
  modified_base 13: mod_base = OTHER; note = 2'-fluorocytosine
  modified_base 14: mod_base = OTHER; note = Adenosine phosphorothiorate
  modified_base 15: mod_base = OTHER; note = 2'-Omethyladenosine
  modified_base 16: mod_base = OTHER; note = Uridine phosphorothiorate
  modified_base 18: mod_base = OTHER; note = 2'-Omethylguanosine
  modified_base 20: mod_base = OTHER; note = Uridine phosphorothiorate
  modified_base 22: mod_base = OTHER; note = 2'-Omethylguanosine
  modified_base 23: mod_base = OTHER; note = 2'-fluorocytosine
  modified_base 24: mod_base = OTHER; note = 2'-fluoroguanosine phosphorothiorate
  modified_base 25: mod_base = OTHER; note = 2'-Omethylcytosine
  modified_base 26: mod_base = OTHER; note = Adenosine phosphorothiorate
  modified_base 27: mod_base = OTHER; note = 2'-fluorouridine
  modified_base 31: mod_base = OTHER; note = 2'-fluoroadenosine
  modified_base 32: mod_base = OTHER; note = 2'-fluorocytosine
  modified_base 33: mod_base = OTHER; note = 2'-fluorouridine
  modified_base 37: mod_base = OTHER; note = Adenosine phosphorothiorate
  modified_base 38: mod_base = OTHER; note = 2'-Omethyladenosine
  modified_base 41: mod_base = OTHER; note = 2'-fluorocytosine
  modified_base 50: mod_base = OTHER; note = 2'-Omethylcytosine
  modified_base 54: mod_base = OTHER; note = 2'-fluorouridine
  modified_base 55: mod_base = OTHER; note = Uridine phosphorothiorate
  modified_base 57: mod_base = OTHER; note = 2'-fluoroguanosine
  modified_base 59: mod_base = OTHER; note = Guanosine phosphorothiorate
  modified_base 60: mod_base = OTHER; note = 2'-Omethyluridine
  modified_base 61: mod_base = OTHER; note = 2'-fluorocytosine
  modified_base 63: mod_base = OTHER; note = 2'-fluorocytosine
  modified_base 66: mod_base = OTHER; note = 2'-fluorocytosine
  modified_base 73: mod_base = OTHER; note = 2'-fluoroguanosine
  modified_base 74: mod_base = OTHER; note = 2'-fluorocytosine
  modified_base 75: mod_base = OTHER; note = 2'-Omethylcytosine

SEQ ID NO: 6307 - RNA, 85 nt, synthetic construct; identical to SEQ ID NO: 3288
  source 1..85: mol_type = other RNA
  modified_base 1: mod_base = OTHER; note = 2'-Omethylcytosine
  modified_base 13: mod_base = OTHER; note = 2'-Omethyladenosine
  modified_base 28: mod_base = OTHER; note = 2'-fluoroguanosine
  modified_base 30: mod_base = OTHER; note = 2'-fluoroadenosine
  modified_base 44: mod_base = OTHER; note = 2'-Omethylguanosine
  modified_base 49: mod_base = OTHER; note = Uridine phosphorothiorate
  modified_base 54: mod_base = OTHER; note = 2'-fluorocytosine
  modified_base 72: mod_base = OTHER; note = 2'-fluorocytosine
  modified_base 84: mod_base = OTHER; note = 2'-fluorocytosine
  modified_base 85: mod_base = OTHER; note = 2'-Omethyladenosine

SEQ ID NO: 6308 - RNA, 76 nt, synthetic construct; identical to SEQ ID NO: 625
  source 1..76: mol_type = other RNA
  modified_base 1: mod_base = OTHER; note = 2'-Omethylguanosine phosphorothiorate
  modified_base 2: mod_base = OTHER; note = 2'-Omethylguanosine
  modified_base 3: mod_base = OTHER; note = 2'-Omethylcytosine
  modified_base 4: mod_base = OTHER; note = 2'-Omethyluridine
  modified_base 5: mod_base = OTHER; note = 2'-Omethylcytosine
  modified_base 6: mod_base = OTHER; note = 2'-Omethylcytosine
  modified_base 10: mod_base = OTHER; note = 2'-Omethylguanosine
  modified_base 11: mod_base = OTHER; note = 2'-Omethylcytosine
  modified_base 12: mod_base = OTHER; note = 2'-Omethylguanosine
  modified_base 13: mod_base = OTHER; note = 2'-Omethylcytosine
  modified_base 16: mod_base = OTHER; note = 2'-Omethyluridine
  modified_base 17: mod_base = OTHER; note = 2'-Omethylguanosine
  modified_base 18: mod_base = OTHER; note = 2'-Omethylguanosine
  modified_base 40: mod_base = OTHER; note = 2'-fluorouridine
  modified_base 41: mod_base = OTHER; note = 2'-fluorocytosine
  modified_base 42: mod_base = OTHER; note = 2'-fluoroadenosine
  modified_base 43: mod_base = OTHER; note = 2'-fluoroadenosine
  modified_base 49: mod_base = OTHER; note = 2'-Omethylcytosine
  modified_base 50: mod_base = OTHER; note = 2'-Omethylcytosine
  modified_base 51: mod_base = OTHER; note = 2'-Omethylguanosine
  modified_base 52: mod_base = OTHER; note = 2'-Omethylguanosine
  modified_base 53: mod_base = OTHER; note = 2'-Omethylguanosine
  modified_base 54: mod_base = OTHER; note = 2'-Omethyluridine phosphorothiorate
  modified_base 56: mod_base = OTHER; note = 2'-Omethylcytosine
  modified_base 57: mod_base = OTHER; note = 2'-fluoroguanosine
  modified_base 59: mod_base = OTHER; note = 2'-Omethylguanosine
  modified_base 61: mod_base = OTHER; note = 2'-Omethylcytosine
  modified_base 62: mod_base = OTHER; note = 2'-Omethylcytosine
  modified_base 63: mod_base = OTHER; note = 2'-Omethylcytosine
  modified_base 64: mod_base = OTHER; note = 2'-Omethylguanosine
  modified_base 65: mod_base = OTHER; note = 2'-Omethylguanosine
  modified_base 66: mod_base = OTHER; note = 2'-Omethylcytosine
  modified_base 67: mod_base = OTHER; note = 2'-Omethylguanosine
  modified_base 68: mod_base = OTHER; note = 2'-Omethylguanosine
  modified_base 69: mod_base = OTHER; note = 2'-Omethyladenosine
  modified_base 73: mod_base = OTHER; note = 2'-Omethylguanosine

SEQ ID NO: 6309 - RNA, 76 nt, synthetic construct; identical to SEQ ID NO: 3318
  source 1..76: mol_type = other RNA
  modified_base 1: mod_base = OTHER; note = 2'-Omethylcytosine phosphorothiorate
  modified_base 2: mod_base = OTHER; note = 2'-Omethylcytosine
  modified_base 3: mod_base = OTHER; note = 2'-Omethyluridine
  modified_base 18: mod_base = OTHER; note = Guanosine phosphorothiorate
  modified_base 19: mod_base = OTHER; note = 2'-Omethylguanosine
  modified_base 20: mod_base = OTHER; note = Uridine phosphorothiorate
  modified_base 25: mod_base = OTHER; note = 2'-Omethylcytosine
  modified_base 29: mod_base = OTHER; note = 2'-Omethylguanosine
  modified_base 35: mod_base = OTHER; note = Uridine phosphorothiorate
  modified_base 37: mod_base = OTHER; note = Guanosine phosphorothiorate
  modified_base 38: mod_base = OTHER; note = Adenosine phosphorothiorate
  modified_base 46: mod_base = OTHER; note = Guanosine phosphorothiorate
  modified_base 50: mod_base = OTHER; note = 2'-Omethylcytosine
  modified_base 52: mod_base = OTHER; note = 2'-Omethylguanosine
  modified_base 54: mod_base = OTHER; note = Uridine phosphorothiorate
  modified_base 55: mod_base = OTHER; note = Uridine phosphorothiorate
  modified_base 56: mod_base = OTHER; note = 2'-Omethylcytosine
  modified_base 57: mod_base = OTHER; note = Guanosine phosphorothiorate
  modified_base 65: mod_base = OTHER; note = 2'-Omethylcytosine
  modified_base 71: mod_base = OTHER; note = 2'-Omethylguanosine
  modified_base 73: mod_base = OTHER; note = 2'-Omethyladenosine

SEQ ID NO: 6310 - RNA, 76 nt, synthetic construct; identical to SEQ ID NO: 3289
  source 1..76: mol_type = other RNA
  modified_base 1: mod_base = OTHER; note = 2'-Omethylguanosine
  modified_base 2: mod_base = OTHER; note = 2'-Omethylcytosine
  modified_base 3: mod_base = OTHER; note = 2'-Omethylcytosine
  modified_base 4: mod_base = OTHER; note = 2'-Omethyluridine
  modified_base 5: mod_base = OTHER; note = 2'-Omethylguanosine
  modified_base 6: mod_base = OTHER; note = 2'-Omethylguanosine
  modified_base 10: mod_base = OTHER; note = 2'-Omethylguanosine
  modified_base 11: mod_base = OTHER; note = 2'-Omethylcytosine
  modified_base 12: mod_base = OTHER; note = 2'-Omethyluridine
  modified_base 13: mod_base = OTHER; note = 2'-Omethylcytosine
  modified_base 22: mod_base = OTHER; note = 2'-Omethylguanosine
  modified_base 23: mod_base = OTHER; note = 2'-Omethyladenosine
  modified_base 24: mod_base = OTHER; note = 2'-Omethylguanosine
  modified_base 25: mod_base = OTHER; note = 2'-Omethylcytosine
  modified_base 49: mod_base = OTHER; note = 2'-Omethylcytosine
  modified_base 50: mod_base = OTHER; note = 2'-Omethyladenosine
  modified_base 51: mod_base = OTHER; note = 2'-Omethylguanosine
  modified_base 52: mod_base = OTHER; note = 2'-Omethylguanosine
  modified_base 53: mod_base = OTHER; note = 2'-Omethylguanosine

SEQ ID NO: 6311 - RNA, 76 nt, synthetic construct
  source 1..76: mol_type = other RNA
gcgctcgtggcctaatggataaggcgcctgacttcaaatcaggcgattgtgggttcgagtcccaccgggcgtgcca

SEQ ID NO: 6312 - RNA, 75 nt, synthetic construct; identical to SEQ ID NO: 1045
  source 1..75: mol_type = other RNA
  modified_base 1: mod_base = OTHER; note = 2'-Omethylguanosine
  modified_base 2: mod_base = OTHER; note = 2'-Omethylguanosine
  modified_base 3: mod_base = OTHER; note = 2'-Omethyluridine
  modified_base 4: mod_base = OTHER; note = 2'-Omethyluridine
  modified_base 5: mod_base = OTHER; note = 2'-Omethylcytosine
  modified_base 6: mod_base = OTHER; note = 2'-Omethylcytosine
  modified_base 33: mod_base = OTHER; note = 2'-fluorouridine
  modified_base 41: mod_base = OTHER; note = 2'-Omethylcytosine
  modified_base 44: mod_base = OTHER; note = 2'-Omethylcytosine
  modified_base 45: mod_base = OTHER; note = 2'-Omethylguanosine
  modified_base 46: mod_base = OTHER; note = 2'-fluoroadenosine
  modified_base 47: mod_base = OTHER; note = 2'-fluorouridine
  modified_base 51: mod_base = OTHER; note = 2'-Omethyladenosine
  modified_base 54: mod_base = OTHER; note = Uridine phosphorothiorate
  modified_base 70: mod_base = OTHER; note = 2'-Omethylcytosine
  modified_base 72: mod_base = OTHER; note = 2'-Omethyluridine

SEQ ID NO: 6313 - RNA, 75 nt, synthetic construct; identical to SEQ ID NO: 1045
  source 1..75: mol_type = other RNA
  modified_base 1: mod_base = OTHER; note = 2'-fluoroguanosine phosphorothiorate
  modified_base 2: mod_base = OTHER; note = 2'-Omethylguanosine phosphorothiorate
  modified_base 13: mod_base = OTHER; note = Uridine phosphorothiorate
  modified_base 19: mod_base = OTHER; note = Uridine phosphorothiorate
  modified_base 20: mod_base = OTHER; note = 2'-fluoroadenosine
  modified_base 21: mod_base = OTHER; note = 2'-fluoroadenosine
  modified_base 40: mod_base = OTHER; note = Cytosine phosphorothiorate
  modified_base 41: mod_base = OTHER; note = 2'-fluorocytosine
  modified_base 58: mod_base = OTHER; note = 2'-fluoroguanosine
  modified_base 59: mod_base = OTHER; note = 2'-fluorouridine
  modified_base 61: mod_base = OTHER; note = Uridine phosphorothiorate
  modified_base 62: mod_base = OTHER; note = Cytosine phosphorothiorate
  modified_base 67: mod_base = OTHER; note = 2'-fluoroguanosine
  modified_base 73: mod_base = OTHER; note = Cytosine phosphorothiorate
  modified_base 74: mod_base = OTHER; note = 2'-Omethylcytosine

SEQ ID NO: 6314 - RNA, 85 nt, synthetic construct; identical to SEQ ID NO: 3288
  source 1..85: mol_type = other RNA
  modified_base 1: mod_base = OTHER; note = 2'-Omethylcytosine
  modified_base 2: mod_base = OTHER; note = 2'-Omethylcytosine phosphorothiorate
  modified_base 3: mod_base = OTHER; note = 2'-Omethyladenosine
  modified_base 13: mod_base = OTHER; note = Adenosine phosphorothiorate
  modified_base 25: mod_base = OTHER; note = Guanosine phosphorothiorate
  modified_base 26: mod_base = OTHER; note = 2'-fluorouridine
  modified_base 27: mod_base = OTHER; note = 2'-fluorouridine
  modified_base 30: mod_base = OTHER; note = 2'-fluoroadenosine
  modified_base 34: mod_base = OTHER; note = 2'-fluorocytosine
  modified_base 38: mod_base = OTHER; note = Uridine phosphorothiorate
  modified_base 39: mod_base = OTHER; note = Cytosine phosphorothiorate
  modified_base 43: mod_base = OTHER; note = 2'-Omethyluridine
  modified_base 45: mod_base = OTHER; note = Guanosine phosphorothiorate
  modified_base 48: mod_base = OTHER; note = 2'-Omethyladenosine
  modified_base 51: mod_base = OTHER; note = 2'-fluorouridine
  modified_base 55: mod_base = OTHER; note = Cytosine phosphorothiorate
  modified_base 57: mod_base = OTHER; note = 2'-Omethylcytosine
  modified_base 59: mod_base = OTHER; note = 2'-fluorouridine phosphorothiorate
  modified_base 74: mod_base = OTHER; note = Cytosine phosphorothiorate
  modified_base 79: mod_base = OTHER; note = 2'-Omethylguanosine
  modified_base 83: mod_base = OTHER; note = Cytosine phosphorothiorate
  modified_base 84: mod_base = OTHER; note = Cytosine phosphorothiorate

SEQ ID NO: 6315 - RNA, 76 nt, synthetic construct; identical to SEQ ID NO: 625
  source 1..76: mol_type = other RNA
  modified_base 1: mod_base = OTHER; note = 2'-Omethylguanosine
  modified_base 8: mod_base = OTHER; note = Thymine
  modified_base 17: mod_base = OTHER; note = 2'-Omethylguanosine
  modified_base 18: mod_base = OTHER; note = 2'-Omethylguanosine
  modified_base 50: mod_base = OTHER; note = 2'-Omethylcytosine
  modified_base 52: mod_base = OTHER; note = 2'-Omethylguanosine
  modified_base 73: mod_base = OTHER; note = 2'-Omethylguanosine

SEQ ID NO: 6316 - RNA, 76 nt, synthetic construct; identical to SEQ ID NO: 625
  source 1..76: mol_type = other RNA
  modified_base 1: mod_base = OTHER; note = 2'-Omethylguanosine phosphorothiorate
  modified_base 2: mod_base = OTHER; note = 2'-Omethylguanosine phosphorothiorate
  modified_base 3: mod_base = OTHER; note = 2'-Omethylcytosine phosphorothiorate
  modified_base 4: mod_base = OTHER; note = 2'-Omethyluridine phosphorothiorate
  modified_base 5: mod_base = OTHER; note = 2'-Omethylcytosine phosphorothiorate
  modified_base 6: mod_base = OTHER; note = 2'-Omethylcytosine phosphorothiorate
  modified_base 10: mod_base = OTHER; note = 2'-Omethylguanosine
  modified_base 11: mod_base = OTHER; note = 2'-Omethylcytosine
  modified_base 12: mod_base = OTHER; note = 2'-Omethylguanosine
  modified_base 13: mod_base = OTHER; note = 2'-Omethylcytosine
  modified_base 14: mod_base = OTHER; note = 2'-Omethyladenosine
  modified_base 15: mod_base = OTHER; note = 2'-Omethyladenosine
  modified_base 16: mod_base = OTHER; note = 2'-Omethyluridine
  modified_base 17: mod_base = OTHER; note = 2'-Omethylguanosine
  modified_base 18: mod_base = OTHER; note = 2'-Omethylguanosine
  modified_base 19: mod_base = OTHER; note = 2'-Omethyladenosine
  modified_base 20: mod_base = OTHER; note = 2'-Omethyluridine
  modified_base 40: mod_base = OTHER; note = 2'-fluorouridine
  modified_base 41: mod_base = OTHER; note = 2'-fluorocytosine
  modified_base 42: mod_base = OTHER; note = 2'-fluoroadenosine
  modified_base 43: mod_base = OTHER; note = 2'-fluoroadenosine
  modified_base 49: mod_base = OTHER; note = 2'-Omethylcytosine
  modified_base 50: mod_base = OTHER; note = 2'-Omethylcytosine
  modified_base 51: mod_base = OTHER; note = 2'-Omethylguanosine
  modified_base 52: mod_base = OTHER; note = 2'-Omethylguanosine
  modified_base 53: mod_base = OTHER; note = 2'-Omethylguanosine
  modified_base 61: mod_base = OTHER; note = 2'-Omethylcytosine
  modified_base 62: mod_base = OTHER; note = 2'-Omethylcytosine
  modified_base 63: mod_base = OTHER; note = 2'-Omethylcytosine
  modified_base 64: mod_base = OTHER; note = 2'-Omethylguanosine
  modified_base 65: mod_base = OTHER; note = 2'-Omethylguanosine
  modified_base 66: mod_base = OTHER; note = 2'-Omethylcytosine
  modified_base 67: mod_base = OTHER; note = 2'-Omethylguanosine
  modified_base 68: mod_base = OTHER; note = 2'-Omethylguanosine
  modified_base 69: mod_base = OTHER; note = 2'-Omethyladenosine

SEQ ID NO: 6317 - RNA, 74 nt, synthetic construct; identical to SEQ ID NO: 3293
  source 1..74: mol_type = other RNA
  modified_base 2: mod_base = OTHER; note = 2'-Omethylcytosine
  modified_base 12: mod_base = OTHER; note = 2'-Omethylcytosine
  modified_base 24: mod_base = OTHER; note = 2'-fluoroguanosine
  modified_base 27: mod_base = OTHER; note = 2'-Omethyluridine phosphorothiorate
  modified_base 34: mod_base = OTHER; note = Adenosine phosphorothiorate
  modified_base 43: mod_base = OTHER; note = 2'-fluoroguanosine
  modified_base 73: mod_base = OTHER; note = 2'-Omethylcytosine phosphorothiorate
  modified_base 74: mod_base = OTHER; note = 2'-fluoroadenosine

SEQ ID NO: 6318 - RNA, 76 nt, synthetic construct; identical to SEQ ID NO: 625
  source 1..76: mol_type = other RNA
  modified_base 1: mod_base = OTHER; note = 2'-Omethylguanosine
  modified_base 10: mod_base = OTHER; note = 2'-Omethylguanosine
  modified_base 13: mod_base = OTHER; note = 2'-Omethylcytosine
  modified_base 17: mod_base = OTHER; note = Guanosine phosphorothiorate
  modified_base 18: mod_base = OTHER; note = 2'-Omethylguanosine
  modified_base 19: mod_base = OTHER; note = Adenosine phosphorothiorate
  modified_base 20: mod_base = OTHER; note = 2'-Omethyluridine
  modified_base 25: mod_base = OTHER; note = 2'-Omethylcytosine
  modified_base 29: mod_base = OTHER; note = 2'-Omethylguanosine
  modified_base 33: mod_base = OTHER; note = 2'-fluorouridine
  modified_base 35: mod_base = OTHER; note = Cytosine phosphorothiorate
  modified_base 37: mod_base = OTHER; note = Adenosine phosphorothiorate
  modified_base 38: mod_base = OTHER; note = Adenosine phosphorothiorate
  modified_base 41: mod_base = OTHER; note = Cytosine phosphorothiorate
  modified_base 43: mod_base = OTHER; note = 2'-Omethyladenosine
  modified_base 44: mod_base = OTHER; note = 2'-fluoroadenosine
  modified_base 50: mod_base = OTHER; note = 2'-Omethylcytosine
  modified_base 52: mod_base = OTHER; note = 2'-Omethylguanosine
  modified_base 54: mod_base = OTHER; note = Uridine phosphorothiorate
  modified_base 55: mod_base = OTHER; note = Uridine phosphorothiorate
  modified_base 56: mod_base = OTHER; note = 2'-Omethylcytosine
  modified_base 57: mod_base = OTHER; note = Guanosine phosphorothiorate
  modified_base 62: mod_base = OTHER; note = 2'-Omethylcytosine
  modified_base 63: mod_base = OTHER; note = 2'-fluorocytosine
  modified_base 65: mod_base = OTHER; note = 2'-Omethylguanosine
  modified_base 71: mod_base = OTHER; note = 2'-Omethyluridine
  modified_base 73: mod_base = OTHER; note = 2'-Omethylguanosine

SEQ ID NO: 6319 - RNA, 76 nt, synthetic construct; identical to SEQ ID NO: 625
  source 1..76: mol_type = other RNA
  modified_base 1: mod_base = OTHER; note = Guanosine phosphorothiorate
  modified_base 5: mod_base = OTHER; note = 2'-Omethylcytosine
  modified_base 10: mod_base = OTHER; note = 2'-fluoroguanosine phosphorothiorate
  modified_base 11: mod_base = OTHER; note = 2'-fluorocytosine
  modified_base 14: mod_base = OTHER; note = 2'-fluoroadenosine
  modified_base 15: mod_base = OTHER; note = Adenosine phosphorothiorate
  modified_base 16: mod_base = OTHER; note = 2'-Omethyluridine
  modified_base 17: mod_base = OTHER; note = Guanosine phosphorothiorate
  modified_base 18: mod_base = OTHER; note = 2'-Omethylguanosine phosphorothiorate
  modified_base 20: mod_base = OTHER; note = 2'-fluorouridine
  modified_base 23: mod_base = OTHER; note = Cytosine phosphorothiorate
  modified_base 24: mod_base = OTHER; note = 2'-fluoroguanosine
  modified_base 30: mod_base = OTHER; note = 2'-fluoroguanosine
  modified_base 31: mod_base = OTHER; note = 2'-fluoroadenosine
  modified_base 32: mod_base = OTHER; note = 2'-fluorocytosine
  modified_base 40: mod_base = OTHER; note = 2'-Omethyluridine
  modified_base 41: mod_base = OTHER; note = 2'-Omethylcytosine
  modified_base 43: mod_base = OTHER; note = 2'-Omethyladenosine
  modified_base 45: mod_base = OTHER; note = 2'-Omethylguanosine phosphorothiorate
  modified_base 46: mod_base = OTHER; note = 2'-Omethylguanosine
  modified_base 49: mod_base = OTHER; note = 2'-Omethylcytosine
  modified_base 52: mod_base = OTHER; note = 2'-Omethylguanosine
  modified_base 53: mod_base = OTHER; note = 2'-Omethylguanosine
  modified_base 58: mod_base = OTHER; note = Adenosine phosphorothiorate
  modified_base 59: mod_base = OTHER; note = 2'-fluoroguanosine
  modified_base 61: mod_base = OTHER; note = 2'-fluorocytosine
  modified_base 62: mod_base = OTHER; note = 2'-fluorocytosine
  modified_base 65: mod_base = OTHER; note = Guanosine phosphorothiorate
  modified_base 66: mod_base = OTHER; note = 2'-fluorocytosine
  modified_base 67: mod_base = OTHER; note = 2'-fluoroguanosine
  modified_base 69: mod_base = OTHER; note = 2'-Omethyladenosine
  modified_base 70: mod_base = OTHER; note = 2'-Omethylguanosine
  modified_base 71: mod_base = OTHER; note = 2'-fluorouridine
  modified_base 72: mod_base = OTHER; note = 2'-Omethylcytosine phosphorothiorate
  modified_base 73: mod_base = OTHER; note = 2'-fluoroguanosine
  modified_base 74: mod_base = OTHER; note = Cytosine phosphorothiorate

SEQ ID NO: 6320 - RNA, 76 nt, synthetic construct; identical to SEQ ID NO: 625
  source 1..76: mol_type = other RNA
  modified_base 1: mod_base = OTHER; note = 2'-Omethylguanosine
  modified_base 10: mod_base = OTHER; note = 2'-Omethylguanosine
  modified_base 13: mod_base = OTHER; note = 2'-Omethylcytosine
  modified_base 17: mod_base = OTHER; note = Guanosine phosphorothiorate
  modified_base 18: mod_base = OTHER; note = 2'-Omethylguanosine
  modified_base 19: mod_base = OTHER; note = Adenosine phosphorothiorate
  modified_base 20: mod_base = OTHER; note = 2'-Omethyluridine
  modified_base 25: mod_base = OTHER; note = 2'-Omethylcytosine
  modified_base 29: mod_base = OTHER; note = 2'-Omethylguanosine
  modified_base 33: mod_base = OTHER; note = 2'-fluorouridine
  modified_base 35: mod_base = OTHER; note = Cytosine phosphorothiorate
  modified_base 37: mod_base = OTHER; note = Adenosine phosphorothiorate
  modified_base 38: mod_base = OTHER; note = Adenosine phosphorothiorate
  modified_base 41: mod_base = OTHER; note = 2'-fluorocytosine phosphorothiorate
  modified_base 43: mod_base = OTHER; note = 2'-Omethyladenosine
  modified_base 44: mod_base = OTHER; note = 2'-fluoroadenosine
  modified_base 50: mod_base = OTHER; note = 2'-Omethylcytosine
  modified_base 52: mod_base = OTHER; note = 2'-Omethylguanosine
  modified_base 54: mod_base = OTHER; note = Uridine phosphorothiorate
  modified_base 55: mod_base = OTHER; note = Uridine phosphorothiorate
  modified_base 56: mod_base = OTHER; note = 2'-Omethylcytosine
  modified_base 57: mod_base = OTHER; note = Guanosine phosphorothiorate
  modified_base 62: mod_base = OTHER; note = 2'-Omethylcytosine
  modified_base 63: mod_base = OTHER; note = 2'-fluorocytosine
  modified_base 65: mod_base = OTHER; note = 2'-Omethylguanosine
  modified_base 67: mod_base = OTHER; note = 2'-fluoroguanosine
  modified_base 71: mod_base = OTHER; note = 2'-Omethyluridine
  modified_base 73: mod_base = OTHER; note = 2'-Omethylguanosine

SEQ ID NO: 6321 - RNA, 76 nt, synthetic construct
  source 1..76: mol_type = other RNA
ggctgactggcgcaatggatagcgcattggacttcaaattcaaaggttcagggttcgagtccctggtcagtcgcca

SEQ ID NO: 6322 - RNA, 86 nt, synthetic construct; identical to SEQ ID NO: 3290
  source 1..86: mol_type = other RNA
  modified_base 55: mod_base = OTHER; note = Cytosine phosphorothiorate

SEQ ID NO: 6323 - RNA, 74 nt, synthetic construct; identical to SEQ ID NO: 766
  source 1..74: mol_type = other RNA
  modified_base 1: mod_base = OTHER; note = 2'-Omethylguanosine
  modified_base 14: mod_base = OTHER; note = 2'-Omethyladenosine
  modified_base 15: mod_base = OTHER; note = 2'-fluoroadenosine
  modified_base 16: mod_base = OTHER; note = 2'-Omethyluridine
  modified_base 17: mod_base = OTHER; note = 2'-Omethylguanosine
  modified_base 18: mod_base = OTHER; note = 2'-Omethylguanosine
  modified_base 20: mod_base = OTHER; note = 2'-Omethyluridine
  modified_base 73: mod_base = OTHER; note = 2'-Omethylguanosine

SEQ ID NO: 6324 - RNA, 76 nt, synthetic construct; identical to SEQ ID NO: 3289
  source 1..76: mol_type = other RNA
  modified_base 1: mod_base = OTHER; note = 2'-Omethylguanosine
  modified_base 18: mod_base = OTHER; note = 2'-Omethylguanosine
  modified_base 19: mod_base = OTHER; note = 2'-Omethylguanosine
  modified_base 73: mod_base = OTHER; note = 2'-Omethylguanosine

SEQ ID NO: 6325 - RNA, 76 nt, synthetic construct; identical to SEQ ID NO: 625
  source 1..76: mol_type = other RNA
  modified_base 1: mod_base = OTHER; note = 2'-Omethylguanosine
  modified_base 10: mod_base = OTHER; note = 2'-Omethylguanosine
  modified_base 13: mod_base = OTHER; note = 2'-Omethylcytosine
  modified_base 17: mod_base = OTHER; note = Guanosine phosphorothiorate
  modified_base 18: mod_base = OTHER; note = 2'-Omethylguanosine
  modified_base 19: mod_base = OTHER; note = Adenosine phosphorothiorate
  modified_base 20: mod_base = OTHER; note = 2'-Omethyluridine
  modified_base 25: mod_base = OTHER; note = 2'-Omethylcytosine
  modified_base 29: mod_base = OTHER; note = 2'-Omethylguanosine
  modified_base 33: mod_base = OTHER; note = 2'-fluorouridine
  modified_base 35: mod_base = OTHER; note = Cytosine phosphorothiorate
  modified_base 37: mod_base = OTHER; note = Adenosine phosphorothiorate
  modified_base 38: mod_base = OTHER; note = Adenosine phosphorothiorate
  modified_base 43: mod_base = OTHER; note = 2'-Omethyladenosine
  modified_base 44: mod_base = OTHER; note = 2'-fluoroadenosine
  modified_base 46: mod_base = OTHER; note = Guanosine phosphorothiorate
  modified_base 50: mod_base = OTHER; note = 2'-Omethylcytosine
  modified_base 52: mod_base = OTHER; note = 2'-Omethylguanosine
  modified_base 54: mod_base = OTHER; note = Uridine phosphorothiorate
  modified_base 55: mod_base = OTHER; note = Uridine phosphorothiorate
  modified_base 56: mod_base = OTHER; note = 2'-Omethylcytosine
  modified_base 57: mod_base = OTHER; note = 2'-fluoroguanosine
  modified_base 62: mod_base = OTHER; note = 2'-Omethylcytosine
  modified_base 63: mod_base = OTHER; note = 2'-fluorocytosine
  modified_base 65: mod_base = OTHER; note = 2'-Omethylguanosine
  modified_base 71: mod_base = OTHER; note = 2'-Omethyluridine
  modified_base 73: mod_base = OTHER; note = 2'-Omethylguanosine

SEQ ID NO: 6326 - RNA, 76 nt, synthetic construct; identical to SEQ ID NO: 625
  source 1..76: mol_type = other RNA
  modified_base 1: mod_base = OTHER; note = 2'-Omethylguanosine phosphorothiorate
  modified_base 2: mod_base = OTHER; note = 2'-Omethylguanosine
  modified_base 3: mod_base = OTHER; note = 2'-Omethylcytosine
  modified_base 4: mod_base = OTHER; note = 2'-Omethyluridine
  modified_base 5: mod_base = OTHER; note = 2'-Omethylcytosine
  modified_base 6: mod_base = OTHER; note = 2'-Omethylcytosine
  modified_base 10: mod_base = OTHER; note = 2'-Omethylguanosine
  modified_base 11: mod_base = OTHER; note = 2'-Omethylcytosine
  modified_base 12: mod_base = OTHER; note = 2'-Omethylguanosine
  modified_base 13: mod_base = OTHER; note = 2'-Omethylcytosine
  modified_base 14: mod_base = OTHER; note = 2'-Omethyladenosine
  modified_base 15: mod_base = OTHER; note = 2'-fluoroadenosine
  modified_base 16: mod_base = OTHER; note = 2'-Omethyluridine
  modified_base 17: mod_base = OTHER; note = 2'-Omethylguanosine
  modified_base 18: mod_base = OTHER; note = 2'-Omethylguanosine
  modified_base 19: mod_base = OTHER; note = 2'-fluoroadenosine
  modified_base 20: mod_base = OTHER; note = 2'-Omethyluridine
  modified_base 21: mod_base = OTHER; note = 2'-fluoroadenosine
  modified_base 22: mod_base = OTHER; note = 2'-Omethylguanosine
  modified_base 23: mod_base = OTHER; note = 2'-Omethylcytosine
  modified_base 24: mod_base = OTHER; note = 2'-Omethylguanosine
  modified_base 25: mod_base = OTHER; note = 2'-Omethylcytosine
  modified_base 33: mod_base = OTHER; note = 2'-fluorouridine
  modified_base 35: mod_base = OTHER; note = Cytosine phosphorothiorate
  modified_base 37: mod_base = OTHER; note = Adenosine phosphorothiorate
  modified_base 38: mod_base = OTHER; note = Adenosine phosphorothiorate
  modified_base 43: mod_base = OTHER; note = 2'-Omethyladenosine
  modified_base 44: mod_base = OTHER; note = 2'-Omethyladenosine
  modified_base 45: mod_base = OTHER; note = 2'-Omethylguanosine
  modified_base 46: mod_base = OTHER; note = 2'-fluoroguanosine
  modified_base 48: mod_base = OTHER; note = 2'-fluorouridine
  modified_base 49: mod_base = OTHER; note = 2'-Omethylcytosine
  modified_base 50: mod_base = OTHER; note = 2'-Omethylcytosine
  modified_base 52: mod_base = OTHER; note = 2'-fluoroguanosine
  modified_base 56: mod_base = OTHER; note = 2'-Omethylcytosine
  modified_base 57: mod_base = OTHER; note = 2'-Omethylguanosine
  modified_base 59: mod_base = OTHER; note = 2'-Omethylguanosine
  modified_base 62: mod_base = OTHER; note = 2'-Omethylcytosine
  modified_base 63: mod_base = OTHER; note = 2'-fluorocytosine
  modified_base 73: mod_base = OTHER; note = 2'-Omethylguanosine
  modified_base 75: mod_base = OTHER; note = 2'-fluorocytosine phosphorothiorate

SEQ ID NO: 6327 - RNA, 86 nt, synthetic construct; identical to SEQ ID NO: 3290
  source 1..86: mol_type = other RNA
  modified_base 43: mod_base = OTHER; note = 2'-Omethyladenosine
  modified_base 62: mod_base = OTHER; note = 2'-Omethylguanosine

SEQ ID NO: 6328 - RNA, 76 nt, synthetic construct; identical to SEQ ID NO: 3318
  source 1..76: mol_type = other RNA
  modified_base 1: mod_base = OTHER; note = 2'-Omethylcytosine phosphorothiorate
  modified_base 2: mod_base = OTHER; note = 2'-Omethylcytosine phosphorothiorate
  modified_base 12: mod_base = OTHER; note = Uridine phosphorothiorate
  modified_base 13: mod_base = OTHER; note = 2'-Omethylcytosine
  modified_base 74: mod_base = OTHER; note = Cytosine phosphorothiorate
  modified_base 75: mod_base = OTHER; note = 2'-Omethylcytosine phosphorothiorate
  modified_base 76: mod_base = OTHER; note = 2'-Omethyladenosine

SEQ ID NO: 6329 - RNA, 85 nt, synthetic construct; identical to SEQ ID NO: 3288
  source 1..85: mol_type = other RNA
  modified_base 1: mod_base = OTHER; note = 2'-fluorocytosine
  modified_base 3: mod_base = OTHER; note = 2'-fluoroadenosine phosphorothiorate
  modified_base 5: mod_base = OTHER; note = 2'-fluoroguanosine
  modified_base 9: mod_base = OTHER; note = Guanosine phosphorothiorate
  modified_base 16: mod_base = OTHER; note = Guanosine phosphorothiorate
  modified_base 26: mod_base = OTHER; note = 2'-fluorouridine
  modified_base 27: mod_base = OTHER; note = 2'-Omethyluridine phosphorothiorate
  modified_base 28: mod_base = OTHER; note = 2'-fluoroguanosine
  modified_base 33: mod_base = OTHER; note = 2'-fluorouridine
  modified_base 35: mod_base = OTHER; note = 2'-fluoroadenosine phosphorothiorate
  modified_base 36: mod_base = OTHER; note = Guanosine phosphorothiorate
  modified_base 46: mod_base = OTHER; note = 2'-Omethyladenosine
  modified_base 51: mod_base = OTHER; note = Uridine phosphorothiorate
  modified_base 54: mod_base = OTHER; note = 2'-fluorocytosine
  modified_base 60: mod_base = OTHER; note = 2'-Omethylguanosine
  modified_base 75: mod_base = OTHER; note = 2'-fluorouridine
  modified_base 83: mod_base = OTHER; note = Cytosine phosphorothiorate
  modified_base 84: mod_base = OTHER; note = 2'-Omethylcytosine

SEQ ID NO: 6330 - RNA, 76 nt, synthetic construct; identical to SEQ ID NO: 625
  source 1..76: mol_type = other RNA
  modified_base 1: mod_base = OTHER; note = 2'-Omethylguanosine
  modified_base 3: mod_base = OTHER; note = 2'-fluorocytosine phosphorothiorate
  modified_base 4: mod_base = OTHER; note = 2'-fluorouridine
  modified_base 8: mod_base = OTHER; note = Uridine phosphorothiorate
  modified_base 11: mod_base = OTHER; note = 2'-Omethylcytosine
  modified_base 12: mod_base = OTHER; note = Guanosine phosphorothiorate
  modified_base 13: mod_base = OTHER; note = 2'-Omethylcytosine phosphorothiorate
  modified_base 15: mod_base = OTHER; note = 2'-Omethyladenosine
  modified_base 20: mod_base = OTHER; note = Uridine phosphorothiorate
  modified_base 23: mod_base = OTHER; note = 2'-fluorocytosine
  modified_base 24: mod_base = OTHER; note = 2'-fluoroguanosine
  modified_base 25: mod_base = OTHER; note = 2'-fluorocytosine
  modified_base 26: mod_base = OTHER; note = 2'-Omethyladenosine
  modified_base 28: mod_base = OTHER; note = 2'-Omethyluridine
  modified_base 30: mod_base = OTHER; note = 2'-Omethylguanosine
  modified_base 33: mod_base = OTHER; note = 2'-fluorouridine
  modified_base 34: mod_base = OTHER; note = 2'-Omethyluridine
  modified_base 38: mod_base = OTHER; note = 2'-Omethyladenosine phosphorothiorate
  modified_base 39: mod_base = OTHER; note = 2'-fluorouridine
  modified_base 40: mod_base = OTHER; note = 2'-fluorouridine
  modified_base 42: mod_base = OTHER; note = 2'-Omethyladenosine
  modified_base 45: mod_base = OTHER; note = 2'-Omethylguanosine
  modified_base 46: mod_base = OTHER; note = 2'-fluoroguanosine
  modified_base 50: mod_base = OTHER; note = 2'-fluorocytosine
  modified_base 51: mod_base = OTHER; note = Guanosine phosphorothiorate
  modified_base 52: mod_base = OTHER; note = 2'-Omethylguanosine
  modified_base 56: mod_base = OTHER; note = 2'-fluorocytosine phosphorothiorate
  modified_base 57: mod_base = OTHER; note = 2'-Omethylguanosine
  modified_base 60: mod_base = OTHER; note = Uridine phosphorothiorate
  modified_base 61: mod_base = OTHER; note = 2'-Omethylcytosine
  modified_base 62: mod_base = OTHER; note = 2'-Omethylcytosine
  modified_base 65: mod_base = OTHER; note = Guanosine phosphorothiorate
  modified_base 66: mod_base = OTHER; note = 2'-Omethylcytosine phosphorothiorate
  modified_base 67: mod_base = OTHER; note = Guanosine phosphorothiorate
  modified_base 68: mod_base = OTHER; note = 2'-fluoroguanosine
  modified_base 70: mod_base = OTHER; note = Guanosine phosphorothiorate
  modified_base 71: mod_base = OTHER; note = Uridine phosphorothiorate
  modified_base 73: mod_base = OTHER; note = 2'-Omethylguanosine
  modified_base 74: mod_base = OTHER; note = Cytosine phosphorothiorate
  modified_base 75: mod_base = OTHER; note = 2'-Omethylcytosine
  modified_base 76: mod_base = OTHER; note = 2'-Omethyladenosine

SEQ ID NO: 6331 - RNA, 85 nt, synthetic construct; identical to SEQ ID NO: 3297
  source 1..85: mol_type = other RNA
  modified_base 58: mod_base = OTHER; note = 2'-Omethylguanosine
  modified_base 59: mod_base = OTHER; note = 2'-Omethylcytosine
  modified_base 60: mod_base = OTHER; note = 2'-Omethyladenosine
  modified_base 61: mod_base = OTHER; note = 2'-Omethylguanosine
  modified_base 62: mod_base = OTHER; note = 2'-Omethylguanosine
  modified_base 82: mod_base = OTHER; note = 2'-Omethylguanosine

SEQ ID NO: 6332 - DNA, 74 bp, synthetic construct; identical to SEQ ID NO: 3384
  source 1..74: mol_type = other DNA
  modified_base 1: mod_base = OTHER; note = 2'-Omethylguanosine phosphorothiorate
  modified_base 2: mod_base = OTHER; note = 2'-Omethylguanosine
  modified_base 13: mod_base = OTHER; note = 2'-fluorocytosine
  modified_base 22: mod_base = OTHER; note = Guanosine phosphorothiorate
  modified_base 68: mod_base = OTHER; note = 2'-fluoroguanosine
  modified_base 73: mod_base = OTHER; note = 2'-Omethylguanosine
  misc_feature 1..22: note = RNA
  misc_feature 23: note = DNA
  misc_feature 24..74: note = RNA

SEQ ID NO: 6333 - RNA, 76 nt, synthetic construct; identical to SEQ ID NO: 625
  source 1..76: mol_type = other RNA
  modified_base 2: mod_base = OTHER; note = 2'-Omethylguanosine phosphorothiorate
  modified_base 3: mod_base = OTHER; note = 2'-fluorocytosine
  modified_base 4: mod_base = OTHER; note = 2'-fluorouridine
  modified_base 13: mod_base = OTHER; note = Cytosine phosphorothiorate
  modified_base 14: mod_base = OTHER; note = 2'-fluoroadenosine
  modified_base 15: mod_base = OTHER; note = 2'-Omethyladenosine phosphorothiorate
  modified_base 16: mod_base = OTHER; note = 2'-fluorouridine
  modified_base 17: mod_base = OTHER; note = 2'-Omethylguanosine
  modified_base 20: mod_base = OTHER; note = 2'-Omethyluridine
  modified_base 22: mod_base = OTHER; note = 2'-fluoroguanosine
  modified_base 24: mod_base = OTHER; note = 2'-Omethylguanosine
  modified_base 30: mod_base = OTHER; note = 2'-Omethylguanosine
  modified_base 39: mod_base = OTHER; note = 2'-Omethyluridine
  modified_base 40: mod_base = OTHER; note = Uridine phosphorothiorate
  modified_base 42: mod_base = OTHER; note = 2'-fluoroadenosine
  modified_base 43: mod_base = OTHER; note = Adenosine phosphorothiorate
  modified_base 44: mod_base = OTHER; note = 2'-Omethyladenosine
  modified_base 45: mod_base = OTHER; note = 2'-fluoroguanosine phosphorothiorate
  modified_base 46: mod_base = OTHER; note = 2'-Omethylguanosine
  modified_base 47: mod_base = OTHER; note = 2'-Omethyluridine
  modified_base 48: mod_base = OTHER; note = 2'-fluorouridine
  modified_base 53: mod_base = OTHER; note = 2'-fluoroguanosine
  modified_base 55: mod_base = OTHER; note = Uridine phosphorothiorate
  modified_base 56: mod_base = OTHER; note = 2'-fluorocytosine phosphorothiorate
  modified_base 59: mod_base = OTHER; note = 2'-fluoroguanosine phosphorothiorate
  modified_base 60: mod_base = OTHER; note = 2'-Omethyluridine
  modified_base 63: mod_base = OTHER; note = 2'-Omethylcytosine
  modified_base 65: mod_base = OTHER; note = 2'-fluoroguanosine
  modified_base 67: mod_base = OTHER; note = 2'-fluoroguanosine
  modified_base 68: mod_base = OTHER; note = 2'-Omethylguanosine
  modified_base 69: mod_base = OTHER; note = 2'-fluoroadenosine
  modified_base 70: mod_base = OTHER; note = 2'-fluoroguanosine
  modified_base 71: mod_base = OTHER; note = 2'-Omethyluridine
  modified_base 74: mod_base = OTHER; note = Cytosine phosphorothiorate
  modified_base 75: mod_base = OTHER; note = 2'-fluorocytosine

SEQ ID NO: 6334 - RNA, 76 nt, synthetic construct; identical to SEQ ID NO: 625
  source 1..76: mol_type = other RNA
  modified_base 1: mod_base = OTHER; note = 2'-Omethylguanosine
  modified_base 2: mod_base = OTHER; note = 2'-Omethylguanosine
  modified_base 13: mod_base = OTHER; note = 2'-Omethylcytosine
  modified_base 18: mod_base = OTHER; note = 2'-Omethylguanosine
  modified_base 33: mod_base = OTHER; note = 2'-fluorouridine
  modified_base 35: mod_base = OTHER; note = Cytosine phosphorothiorate
  modified_base 37: mod_base = OTHER; note = Adenosine phosphorothiorate
  modified_base 38: mod_base = OTHER; note = Adenosine phosphorothiorate
  modified_base 52: mod_base = OTHER; note = 2'-Omethylguanosine
  modified_base 57: mod_base = OTHER; note = 2'-Omethylguanosine
  modified_base 62: mod_base = OTHER; note = 2'-Omethylcytosine
  modified_base 73: mod_base = OTHER; note = 2'-Omethylguanosine
  modified_base 75: mod_base = OTHER; note = 2'-fluorocytosine phosphorothiorate

SEQ ID NO: 6335 - RNA, 76 nt, synthetic construct; identical to SEQ ID NO: 625
  source 1..76: mol_type = other RNA
  modified_base 1: mod_base = OTHER; note = 2'-Omethylguanosine
  modified_base 3: mod_base = OTHER; note = 2'-Omethylcytosine
  modified_base 8: mod_base = OTHER; note = Uridine phosphorothiorate
  modified_base 11: mod_base = OTHER; note = Cytosine phosphorothiorate
  modified_base 15: mod_base = OTHER; note = 2'-Omethyladenosine
  modified_base 22: mod_base = OTHER; note = Guanosine phosphorothiorate
  modified_base 23: mod_base = OTHER; note = 2'-fluorocytosine
  modified_base 24: mod_base = OTHER; note = 2'-Omethylguanosine
  modified_base 25: mod_base = OTHER; note = 2'-Omethylcytosine
  modified_base 26: mod_base = OTHER; note = Adenosine phosphorothiorate
  modified_base 29: mod_base = OTHER; note = 2'-Omethylguanosine
  modified_base 34: mod_base = OTHER; note = 2'-fluorouridine
  modified_base 36: mod_base = OTHER; note = Adenosine phosphorothiorate
  modified_base 40: mod_base = OTHER; note = 2'-Omethyluridine phosphorothiorate
  modified_base 41: mod_base = OTHER; note = 2'-Omethylcytosine
  modified_base 46: mod_base = OTHER; note = 2'-fluoroguanosine
  modified_base 50: mod_base = OTHER; note = 2'-fluorocytosine
  modified_base 51: mod_base = OTHER; note = Guanosine phosphorothiorate
  modified_base 52: mod_base = OTHER; note = 2'-Omethylguanosine
  modified_base 53: mod_base = OTHER; note = 2'-Omethylguanosine
  modified_base 57: mod_base = OTHER; note = 2'-fluoroguanosine
  modified_base 59: mod_base = OTHER; note = 2'-fluoroguanosine
  modified_base 60: mod_base = OTHER; note = 2'-Omethyluridine phosphorothiorate
  modified_base 61: mod_base = OTHER; note = 2'-fluorocytosine
  modified_base 62: mod_base = OTHER; note = 2'-fluorocytosine
  modified_base 64: mod_base = OTHER; note = 2'-fluoroguanosine
  modified_base 65: mod_base = OTHER; note = 2'-Omethylguanosine
  modified_base 66: mod_base = OTHER; note = 2'-fluorocytosine
  modified_base 67: mod_base = OTHER; note = 2'-fluoroguanosine
  modified_base 69: mod_base = OTHER; note = 2'-Omethyladenosine phosphorothiorate
  modified_base 70: mod_base = OTHER; note = 2'-fluoroguanosine
  modified_base 71: mod_base = OTHER; note = 2'-fluorouridine
  modified_base 74: mod_base = OTHER; note = Cytosine phosphorothiorate
  modified_base 75: mod_base = OTHER; note = 2'-fluorocytosine
  modified_base 76: mod_base = OTHER; note = 2'-fluoroadenosine

SEQ ID NO: 6336 - RNA, 76 nt, synthetic construct; identical to SEQ ID NO: 3289
  source 1..76: mol_type = other RNA
  modified_base 1: mod_base = OTHER; note = 2'-Omethylguanosine
  modified_base 2: mod_base = OTHER; note = 2'-Omethylcytosine
  modified_base 3: mod_base = OTHER; note = 2'-Omethylcytosine
  modified_base 4: mod_base = OTHER; note = 2'-Omethyluridine
  modified_base 5: mod_base = OTHER; note = 2'-Omethylguanosine
  modified_base 6: mod_base = OTHER; note = 2'-Omethylguanosine
  modified_base 10: mod_base = OTHER; note = 2'-Omethylguanosine
  modified_base 11: mod_base = OTHER; note = 2'-Omethylcytosine
  modified_base 12: mod_base = OTHER; note = 2'-Omethyluridine
  modified_base 13: mod_base = OTHER; note = 2'-Omethylcytosine
  modified_base 22: mod_base = OTHER; note = 2'-Omethylguanosine
  modified_base 23: mod_base = OTHER; note = 2'-Omethyladenosine
  modified_base 24: mod_base = OTHER; note = 2'-Omethylguanosine
  modified_base 25: mod_base = OTHER; note = 2'-Omethylcytosine
  modified_base 49: mod_base = OTHER; note = 2'-Omethylcytosine
  modified_base 50: mod_base = OTHER; note = 2'-Omethyladenosine
  modified_base 51: mod_base = OTHER; note = 2'-Omethylguanosine
  modified_base 52: mod_base = OTHER; note = 2'-Omethylguanosine
  modified_base 53: mod_base = OTHER; note = 2'-Omethylguanosine
  modified_base 66: mod_base = OTHER; note = 2'-Omethyluridine
  modified_base 67: mod_base = OTHER; note = 2'-Omethylcytosine
  modified_base 68: mod_base = OTHER; note = 2'-Omethylcytosine
  modified_base 73: mod_base = OTHER; note = 2'-Omethylguanosine

SEQ ID NO: 6337 - RNA, 85 nt, synthetic construct; identical to SEQ ID NO: 3297
  source 1..85: mol_type = other RNA
  modified_base 1: mod_base = OTHER; note = 2'-Omethylguanosine phosphorothiorate
  modified_base 2: mod_base = OTHER; note = 2'-Omethylcytosine
  modified_base 10: mod_base = OTHER; note = 2'-fluoroguanosine
  modified_base 22: mod_base = OTHER; note = 2'-Omethyladenosine
  modified_base 27: mod_base = OTHER; note = 2'-fluorouridine
  modified_base 35: mod_base = OTHER; note = 2'-fluorocytosine
  modified_base 82: mod_base = OTHER; note = 2'-Omethylguanosine phosphorothiorate

SEQ ID NO: 6338 - RNA, 76 nt, synthetic construct; identical to SEQ ID NO: 3615
  source 1..76: mol_type = other RNA
  modified_base 1: mod_base = OTHER; note = 2'-Omethylguanosine
  modified_base 2: mod_base = OTHER; note = 2'-Omethylguanosine
  modified_base 3: mod_base = OTHER; note = 2'-Omethylcytosine
  modified_base 4: mod_base = OTHER; note = 2'-Omethyluridine
  modified_base 5: mod_base = OTHER; note = 2'-Omethylcytosine
  modified_base 6: mod_base = OTHER; note = 2'-Omethylcytosine
  modified_base 14: mod_base = OTHER; note = 2'-Omethyladenosine
  modified_base 15: mod_base = OTHER; note = 2'-Omethyladenosine
  modified_base 16: mod_base = OTHER; note = 2'-Omethyluridine
  modified_base 17: mod_base = OTHER; note = 2'-Omethylguanosine
  modified_base 18: mod_base = OTHER; note = 2'-Omethylguanosine
  modified_base 20: mod_base = OTHER; note = 2'-Omethyluridine
  modified_base 25: mod_base = OTHER; note = 2'-Omethylcytosine
  modified_base 33: mod_base = OTHER; note = 2'-fluorouridine
  modified_base 35: mod_base = OTHER; note = Cytosine phosphorothiorate
  modified_base 37: mod_base = OTHER; note = Adenosine phosphorothiorate
  modified_base 38: mod_base = OTHER; note = Adenosine phosphorothiorate
  modified_base 41: mod_base = OTHER; note = 2'-Omethylcytosine
  modified_base 42: mod_base = OTHER; note = 2'-Omethyladenosine
  modified_base 43: mod_base = OTHER; note = 2'-Omethyladenosine
  modified_base 44: mod_base = OTHER; note = 2'-fluoroguanosine
  modified_base 49: mod_base = OTHER; note = 2'-Omethylcytosine
  modified_base 50: mod_base = OTHER; note = 2'-Omethylcytosine
  modified_base 52: mod_base = OTHER; note = 2'-Omethylguanosine
  modified_base 54: mod_base = OTHER; note = 2'-Omethyluridine
  modified_base 55: mod_base = OTHER; note = Uridine phosphorothiorate
  modified_base 56: mod_base = OTHER; note = 2'-Omethylcytosine
  modified_base 57: mod_base = OTHER; note = 2'-fluoroguanosine
  modified_base 59: mod_base = OTHER; note = 2'-Omethylguanosine
  modified_base 61: mod_base = OTHER; note = 2'-Omethylcytosine
  modified_base 65: mod_base = OTHER; note = 2'-Omethylguanosine
  modified_base 73: mod_base = OTHER; note = 2'-Omethylguanosine

SEQ ID NO: 6339 - RNA, 76 nt, synthetic construct; identical to SEQ ID NO: 625
  source 1..76: mol_type = other RNA
  modified_base 2: mod_base = OTHER; note = 2'-fluoroguanosine
  modified_base 3: mod_base = OTHER; note = 2'-Omethylcytosine
  modified_base 5: mod_base = OTHER; note = 2'-fluorocytosine
  modified_base 9: mod_base = OTHER; note = Guanosine phosphorothiorate
  modified_base 11: mod_base = OTHER; note = 2'-Omethylcytosine
  modified_base 12: mod_base = OTHER; note = Guanosine phosphorothiorate
  modified_base 13: mod_base = OTHER; note = 2'-fluorocytosine
  modified_base 15: mod_base = OTHER; note = 2'-fluoroadenosine
  modified_base 18: mod_base = OTHER; note = 2'-fluoroguanosine
  modified_base 20: mod_base = OTHER; note = 2'-fluorouridine
  modified_base 22: mod_base = OTHER; note = 2'-Omethylguanosine
  modified_base 23: mod_base = OTHER; note = 2'-Omethylcytosine
  modified_base 24: mod_base = OTHER; note = 2'-fluoroguanosine
  modified_base 25: mod_base = OTHER; note = 2'-Omethylcytosine
  modified_base 29: mod_base = OTHER; note = 2'-fluoroguanosine
  modified_base 30: mod_base = OTHER; note = 2'-fluoroguanosine
  modified_base 34: mod_base = OTHER; note = Uridine phosphorothiorate
  modified_base 40: mod_base = OTHER; note = 2'-Omethyluridine
  modified_base 41: mod_base = OTHER; note = 2'-Omethylcytosine
  modified_base 44: mod_base = OTHER; note = 2'-Omethyladenosine
  modified_base 45: mod_base = OTHER; note = 2'-Omethylguanosine
  modified_base 46: mod_base = OTHER; note = 2'-fluoroguanosine phosphorothiorate
  modified_base 47: mod_base = OTHER; note = 2'-fluorouridine phosphorothiorate
  modified_base 48: mod_base = OTHER; note = 2'-fluorouridine
  modified_base 49: mod_base = OTHER; note = 2'-Omethylcytosine
  modified_base 56: mod_base = OTHER; note = Cytosine phosphorothiorate
  modified_base 57: mod_base = OTHER; note = 2'-Omethylguanosine
  modified_base 59: mod_base = OTHER; note = Guanosine phosphorothiorate
  modified_base 61: mod_base = OTHER; note = 2'-Omethylcytosine
  modified_base 63: mod_base = OTHER; note = 2'-fluorocytosine
  modified_base 64: mod_base = OTHER; note = 2'-fluoroguanosine
  modified_base 66: mod_base = OTHER; note = 2'-fluorocytosine
  modified_base 67: mod_base = OTHER; note = Guanosine phosphorothiorate
  modified_base 68: mod_base = OTHER; note = 2'-fluoroguanosine
  modified_base 71: mod_base = OTHER; note = Uridine phosphorothiorate
  modified_base 72: mod_base = OTHER; note = 2'-Omethylcytosine
  modified_base 73: mod_base = OTHER; note = 2'-Omethylguanosine phosphorothiorate
  modified_base 74: mod_base = OTHER; note = 2'-fluorocytosine

SEQ ID NO: 6340 - RNA, 75 nt, synthetic construct; identical to SEQ ID NO: 3306
  source 1..75: mol_type = other RNA
  modified_base 1: mod_base = OTHER; note = 2'-Omethylguanosine
  modified_base 2: mod_base = OTHER; note = 2'-Omethyladenosine
  modified_base 3: mod_base = OTHER; note = 2'-Omethylcytosine
  modified_base 4: mod_base = OTHER; note = 2'-Omethylcytosine
  modified_base 5: mod_base = OTHER; note = 2'-Omethyluridine
  modified_base 6: mod_base = OTHER; note = 2'-Omethylcytosine
  modified_base 14: mod_base = OTHER; note = 2'-Omethyladenosine
  modified_base 15: mod_base = OTHER; note = 2'-fluoroadenosine
  modified_base 16: mod_base = OTHER; note = 2'-Omethylcytosine
  modified_base 17: mod_base = OTHER; note = 2'-Omethylguanosine
  modified_base 18: mod_base = OTHER; note = 2'-Omethylguanosine
  modified_base 24: mod_base = OTHER; note = 2'-Omethylcytosine
  modified_base 32: mod_base = OTHER; note = 2'-fluorouridine
  modified_base 34: mod_base = OTHER; note = Uridine phosphorothiorate
  modified_base 36: mod_base = OTHER; note = Guanosine phosphorothiorate
  modified_base 37: mod_base = OTHER; note = Adenosine phosphorothiorate
  modified_base 40: mod_base = OTHER; note = 2'-Omethyladenosine
  modified_base 41: mod_base = OTHER; note = 2'-Omethylguanosine
  modified_base 42: mod_base = OTHER; note = 2'-Omethyladenosine
  modified_base 43: mod_base = OTHER; note = 2'-Omethyladenosine
  modified_base 48: mod_base = OTHER; note = 2'-Omethylguanosine
  modified_base 49: mod_base = OTHER; note = 2'-Omethylcytosine
  modified_base 51: mod_base = OTHER; note = 2'-Omethyluridine
  modified_base 53: mod_base = OTHER; note = 2'-Omethyluridine
  modified_base 54: mod_base = OTHER; note = Uridine phosphorothiorate
  modified_base 55: mod_base = OTHER; note = 2'-Omethylcytosine
  modified_base 56: mod_base = OTHER; note = 2'-fluoroadenosine
  modified_base 58: mod_base = OTHER; note = 2'-Omethyladenosine
  modified_base 60: mod_base = OTHER; note = 2'-Omethylcytosine
  modified_base 64: mod_base = OTHER; note = 2'-Omethyluridine
  modified_base 72: mod_base = OTHER; note = 2'-Omethyladenosine

SEQ ID NO: 6341 - RNA, 73 nt, synthetic construct; identical to SEQ ID NO: 935
  source 1..73: mol_type = other RNA
  modified_base 1: mod_base = OTHER; note = 2'-Omethylguanosine
  modified_base 17: mod_base = OTHER; note = 2'-Omethylguanosine
  modified_base 73: mod_base = OTHER; note = 2'-Omethylguanosine

SEQ ID NO: 6342 - RNA, 76 nt, synthetic construct; identical to SEQ ID NO: 625
  source 1..76: mol_type = other RNA
  modified_base 1: mod_base = OTHER; note = 2'-Omethylguanosine
  modified_base 4: mod_base = OTHER; note = 2'-Omethyluridine
  modified_base 5: mod_base = OTHER; note = 2'-fluorocytosine
  modified_base 9: mod_base = OTHER; note = Guanosine phosphorothiorate
  modified_base 10: mod_base = OTHER; note = 2'-Omethylguanosine
  modified_base 12: mod_base = OTHER; note = 2'-Omethylguanosine phosphorothiorate
  modified_base 13: mod_base = OTHER; note = 2'-Omethylcytosine
  modified_base 14: mod_base = OTHER; note = 2'-Omethyladenosine
  modified_base 15: mod_base = OTHER; note = 2'-Omethyladenosine
  modified_base 16: mod_base = OTHER; note = Uridine phosphorothiorate
  modified_base 17: mod_base = OTHER; note = 2'-Omethylguanosine
  modified_base 20: mod_base = OTHER; note = Uridine phosphorothiorate
  modified_base 22: mod_base = OTHER; note = Guanosine phosphorothiorate
  modified_base 24: mod_base = OTHER; note = 2'-Omethylguanosine
  modified_base 25: mod_base = OTHER; note = 2'-Omethylcytosine
  modified_base 27: mod_base = OTHER; note = Uridine phosphorothiorate
  modified_base 28: mod_base = OTHER; note = 2'-Omethyluridine
  modified_base 38: mod_base = OTHER; note = Adenosine phosphorothiorate
  modified_base 39: mod_base = OTHER; note = 2'-Omethyluridine phosphorothiorate
  modified_base 40: mod_base = OTHER; note = 2'-fluorouridine
  modified_base 41: mod_base = OTHER; note = 2'-Omethylcytosine
  modified_base 43: mod_base = OTHER; note = 2'-fluoroadenosine
  modified_base 46: mod_base = OTHER; note = 2'-fluoroguanosine phosphorothiorate
  modified_base 47: mod_base = OTHER; note = 2'-fluorouridine
  modified_base 48: mod_base = OTHER; note = 2'-Omethyluridine
  modified_base 51: mod_base = OTHER; note = 2'-Omethylguanosine
  modified_base 54: mod_base = OTHER; note = 2'-Omethyluridine
  modified_base 56: mod_base = OTHER; note = 2'-fluorocytosine
  modified_base 60: mod_base = OTHER; note = 2'-Omethyluridine phosphorothiorate
  modified_base 61: mod_base = OTHER; note = 2'-fluorocytosine
  modified_base 62: mod_base = OTHER; note = 2'-Omethylcytosine
  modified_base 64: mod_base = OTHER; note = Guanosine phosphorothiorate
  modified_base 65: mod_base = OTHER; note = Guanosine phosphorothiorate
  modified_base 68: mod_base = OTHER; note = 2'-fluoroguanosine

SEQ ID NO: 6343 - RNA, 76 nt, synthetic construct
  source 1..76: mol_type = other RNA
ggcgccgtggcgcaatggatagcgcattggacttcaaattcaaaggttccgagttcgagtctcggcggcgtcgcca

SEQ ID NO: 6344 - DNA, 76 bp, synthetic construct; identical to SEQ ID NO: 1924
  source 1..76: mol_type = other DNA
  modified_base 1: mod_base = OTHER; note = 2'-Omethylguanosine phosphorothiorate
  modified_base 2: mod_base = OTHER; note = 2'-Omethylguanosine phosphorothiorate
  modified_base 10: mod_base = OTHER; note = Guanosine phosphorothiorate
  modified_base 11: mod_base = OTHER; note = 2'-O-(2-Methoxyethyl) 5-methylcytosine
  modified_base 12: mod_base = OTHER; note = deoxyguanosine phosphorothiorate
  modified_base 13: mod_base = OTHER; note = 2'-fluorocytosine
  modified_base 14: mod_base = OTHER; note = Adenosine phosphorothiorate
  modified_base 15: mod_base = OTHER; note = deoxyadenosine phosphorothiorate
  modified_base 16: mod_base = OTHER; note = 2'-fluorouridine phosphorothiorate
  modified_base 17: mod_base = OTHER; note = 2'-O-(2-Methoxyethyl) guanosine
  modified_base 21: mod_base = OTHER; note = deoxyadenosine phosphorothiorate
  modified_base 22: mod_base = OTHER; note = 2'-O-(2-Methoxyethyl) guanosine
  modified_base 25: mod_base = OTHER; note = Cytosine phosphorothiorate
  modified_base 26: mod_base = OTHER; note = 2'-O-(2-Methoxyethyl) adenosine phosphorothiorate
  modified_base 27: mod_base = OTHER; note = 2'-Omethyluridine
  modified_base 33: mod_base = OTHER; note = 2'-Omethyluridine
  modified_base 38: mod_base = OTHER; note = Adenosine phosphorothiorate
  modified_base 39: mod_base = OTHER; note = 2'-fluorouridine
  modified_base 42: mod_base = OTHER; note = Adenosine phosphorothiorate
  modified_base 43: mod_base = OTHER; note = 2'-fluoroadenosine
  modified_base 45: mod_base = OTHER; note = Guanosine phosphorothiorate
  modified_base 46: mod_base = OTHER; note = Guanosine phosphorothiorate
  modified_base 47: mod_base = OTHER; note = 2'-Omethyluridine
  modified_base 51: mod_base = OTHER; note = Guanosine phosphorothiorate
  modified_base 52: mod_base = OTHER; note = 2'-Omethylguanosine
  modified_base 55: mod_base = OTHER; note = 2'-fluorouridine
  modified_base 56: mod_base = OTHER; note = 2'-Omethylcytosine
  modified_base 59: mod_base = OTHER; note = 2'-Omethylguanosine
  modified_base 63: mod_base = OTHER; note = Cytosine phosphorothiorate
  modified_base 64: mod_base = OTHER; note = 2'-fluoroguanosine
  modified_base 65: mod_base = OTHER; note = Guanosine phosphorothiorate
  modified_base 66: mod_base = OTHER; note = 2'-O-(2-Methoxyethyl) 5-methylcytosine phosphorothiorate
  modified_base 67: mod_base = OTHER; note = 2'-Omethylguanosine
  modified_base 71: mod_base = OTHER; note = Uridine phosphorothiorate
  modified_base 72: mod_base = OTHER; note = 2'-Omethylcytosine
  modified_base 73: mod_base = OTHER; note = Guanosine phosphorothiorate
  modified_base 74: mod_base = OTHER; note = 2'-Omethylcytosine
  modified_base 76: mod_base = OTHER; note = 2'-Omethyladenosine
  misc_feature 1..4: note = RNA
  misc_feature 5: note = DNA
  misc_feature 6..11: note = RNA
  misc_feature 12: note = DNA
  misc_feature 13..14: note = RNA
  misc_feature 15: note = DNA
  misc_feature 16..19: note = RNA
  misc_feature 20..21: note = DNA
  misc_feature 22..76: note = RNA

SEQ ID NO: 6345 - RNA, 76 nt, synthetic construct; identical to SEQ ID NO: 3675
  source 1..76: mol_type = other RNA
  modified_base 1: mod_base = OTHER; note = 2'-Omethylguanosine phosphorothiorate
  modified_base 2: mod_base = OTHER; note = 2'-Omethylcytosine phosphorothiorate
  modified_base 52: mod_base = OTHER; note = Guanosine phosphorothiorate
  modified_base 74: mod_base = OTHER; note = Cytosine phosphorothiorate
  modified_base 75: mod_base = OTHER; note = 2'-Omethylcytosine

SEQ ID NO: 6346 - RNA, 75 nt, synthetic construct; identical to SEQ ID NO: 3306
  source 1..75: mol_type = other RNA
  modified_base 51: mod_base = OTHER; note = 2'-Omethyluridine
  modified_base 61: mod_base = OTHER; note = 2'-Omethyladenosine

SEQ ID NO: 6347 - RNA, 76 nt, synthetic construct; identical to SEQ ID NO: 625
  source 1..76: mol_type = other RNA
  modified_base 6: mod_base = OTHER; note = 2'-fluorocytosine
  modified_base 8: mod_base = OTHER; note = Uridine phosphorothiorate
  modified_base 11: mod_base = OTHER; note = 2'-fluorocytosine
  modified_base 14: mod_base = OTHER; note = 2'-fluoroadenosine
  modified_base 23: mod_base = OTHER; note = 2'-fluorocytosine
  modified_base 24: mod_base = OTHER; note = 2'-Omethylguanosine
  modified_base 25: mod_base = OTHER; note = 2'-Omethylcytosine phosphorothiorate
  modified_base 28: mod_base = OTHER; note = 2'-Omethyluridine
  modified_base 31: mod_base = OTHER; note = 2'-Omethyladenosine
  modified_base 33: mod_base = OTHER; note = 2'-fluorouridine
  modified_base 34: mod_base = OTHER; note = 2'-Omethyluridine
  modified_base 38: mod_base = OTHER; note = 2'-Omethyladenosine
  modified_base 39: mod_base = OTHER; note = 2'-fluorouridine
  modified_base 40: mod_base = OTHER; note = 2'-fluorouridine
  modified_base 41: mod_base = OTHER; note = Cytosine phosphorothiorate
  modified_base 42: mod_base = OTHER; note = 2'-fluoroadenosine
  modified_base 44: mod_base = OTHER; note = 2'-Omethyladenosine
  modified_base 46: mod_base = OTHER; note = 2'-fluoroguanosine
  modified_base 47: mod_base = OTHER; note = 2'-fluorouridine
  modified_base 49: mod_base = OTHER; note = 2'-Omethylcytosine phosphorothiorate
  modified_base 52: mod_base = OTHER; note = 2'-Omethylguanosine phosphorothiorate
  modified_base 53: mod_base = OTHER; note = 2'-Omethylguanosine
  modified_base 57: mod_base = OTHER; note = 2'-Omethylguanosine
  modified_base 58: mod_base = OTHER; note = 2'-fluoroadenosine phosphorothiorate
  modified_base 59: mod_base = OTHER; note = 2'-Omethylguanosine
  modified_base 60: mod_base = OTHER; note = 2'-Omethyluridine
  modified_base 62: mod_base = OTHER; note = 2'-fluorocytosine
  modified_base 63: mod_base = OTHER; note = 2'-Omethylcytosine
  modified_base 64: mod_base = OTHER; note = Guanosine phosphorothiorate
  modified_base 65: mod_base = OTHER; note = 2'-fluoroguanosine
  modified_base 69: mod_base = OTHER; note = 2'-fluoroadenosine
  modified_base 71: mod_base = OTHER; note = 2'-Omethyluridine
  modified_base 72: mod_base = OTHER; note = 2'-fluorocytosine
  modified_base 74: mod_base = OTHER; note = Cytosine phosphorothiorate
  modified_base 75: mod_base = OTHER; note = 2'-fluorocytosine

SEQ ID NO: 6348 - RNA, 86 nt, synthetic construct; identical to SEQ ID NO: 3290
  source 1..86: mol_type = other RNA
  modified_base 15: mod_base = OTHER; note = Guanosine phosphorothiorate

SEQ ID NO: 6349 - RNA, 76 nt, synthetic construct; identical to SEQ ID NO: 3332
  source 1..76: mol_type = other RNA
  modified_base 1: mod_base = OTHER; note = 2'-Omethylguanosine
  modified_base 2: mod_base = OTHER; note = 2'-Omethylguanosine
  modified_base 3: mod_base = OTHER; note = 2'-Omethylcytosine
  modified_base 4: mod_base = OTHER; note = 2'-Omethylcytosine
  modified_base 5: mod_base = OTHER; note = 2'-Omethylcytosine
  modified_base 6: mod_base = OTHER; note = 2'-Omethylcytosine
  modified_base 16: mod_base = OTHER; note = 2'-Omethyluridine
  modified_base 17: mod_base = OTHER; note = 2'-Omethylguanosine
  modified_base 18: mod_base = OTHER; note = 2'-Omethylguanosine
  modified_base 20: mod_base = OTHER; note = 2'-Omethyluridine
  modified_base 25: mod_base = OTHER; note = 2'-Omethylcytosine
  modified_base 33: mod_base = OTHER; note = 2'-fluorouridine
  modified_base 35: mod_base = OTHER; note = Cytosine phosphorothiorate
  modified_base 37: mod_base = OTHER; note = Adenosine phosphorothiorate
  modified_base 38: mod_base = OTHER; note = Adenosine phosphorothiorate
  modified_base 41: mod_base = OTHER; note = 2'-Omethylcytosine
  modified_base 42: mod_base = OTHER; note = 2'-Omethyladenosine
  modified_base 43: mod_base = OTHER; note = 2'-Omethyladenosine
  modified_base 44: mod_base = OTHER; note = 2'-Omethyladenosine
  modified_base 49: mod_base = OTHER; note = 2'-Omethylguanosine
  modified_base 50: mod_base = OTHER; note = 2'-Omethylcytosine
  modified_base 52: mod_base = OTHER; note = 2'-Omethylguanosine
  modified_base 54: mod_base = OTHER; note = Uridine phosphorothiorate
  modified_base 55: mod_base = OTHER; note = Uridine phosphorothiorate
  modified_base 61: mod_base = OTHER; note = 2'-Omethylcytosine
  modified_base 65: mod_base = OTHER; note = 2'-Omethylcytosine
  modified_base 73: mod_base = OTHER; note = 2'-Omethylguanosine

SEQ ID NO: 6350 - RNA, 85 nt, synthetic construct; identical to SEQ ID NO: 3297
  source 1..85: mol_type = other RNA
  modified_base 1: mod_base = OTHER; note = 2'-Omethylguanosine phosphorothiorate
  modified_base 2: mod_base = OTHER; note = 2'-Omethylcytosine phosphorothiorate
  modified_base 83: mod_base = OTHER; note = Cytosine phosphorothiorate
  modified_base 84: mod_base = OTHER; note = 2'-Omethylcytosine phosphorothiorate

SEQ ID NO: 6351 - RNA, 85 nt, synthetic construct; identical to SEQ ID NO: 3286
  source 1..85: mol_type = other RNA
  modified_base 1: mod_base = OTHER; note = 2'-Omethylcytosine
  modified_base 12: mod_base = OTHER; note = Guanosine phosphorothiorate
  modified_base 26: mod_base = OTHER; note = 2'-fluorouridine
  modified_base 30: mod_base = OTHER; note = 2'-fluoroadenosine
  modified_base 44: mod_base = OTHER; note = 2'-Omethylguanosine
  modified_base 46: mod_base = OTHER; note = 2'-Omethyladenosine
  modified_base 54: mod_base = OTHER; note = 2'-fluorocytosine
  modified_base 56: mod_base = OTHER; note = 2'-Omethylguanosine
  modified_base 58: mod_base = OTHER; note = 2'-Omethylguanosine
  modified_base 84: mod_base = OTHER; note = 2'-fluorocytosine

SEQ ID NO: 6352 - RNA, 75 nt, synthetic construct; identical to SEQ ID NO: 3336
  source 1..75: mol_type = other RNA
  modified_base 2: mod_base = OTHER; note = 2'-Omethylcytosine phosphorothiorate
  modified_base 11: mod_base = OTHER; note = Uridine phosphorothiorate
  modified_base 19: mod_base = OTHER; note = 2'-fluorouridine
  modified_base 20: mod_base = OTHER; note = 2'-fluoroadenosine
  modified_base 36: mod_base = OTHER; note = 2'-fluoroadenosine
  modified_base 48: mod_base = OTHER; note = Cytosine phosphorothiorate
  modified_base 63: mod_base = OTHER; note = 2'-fluorouridine
  modified_base 73: mod_base = OTHER; note = Cytosine phosphorothiorate
  modified_base 74: mod_base = OTHER; note = 2'-Omethylcytosine

SEQ ID NO: 6353 - RNA, 85 nt, synthetic construct; identical to SEQ ID NO: 3297
  source 1..85: mol_type = other RNA
  modified_base 16: mod_base = OTHER; note = 2'-Omethyluridine
  modified_base 82: mod_base = OTHER; note = 2'-Omethylguanosine

SEQ ID NO: 6354 - RNA, 76 nt, synthetic construct; identical to SEQ ID NO: 625
  source 1..76: mol_type = other RNA
  modified_base 1: mod_base = OTHER; note = 2'-Omethylguanosine phosphorothiorate
  modified_base 10: mod_base = OTHER; note = 2'-Omethylguanosine
  modified_base 13: mod_base = OTHER; note = 2'-Omethylcytosine
  modified_base 17: mod_base = OTHER; note = Guanosine phosphorothiorate
  modified_base 18: mod_base = OTHER; note = 2'-Omethylguanosine
  modified_base 19: mod_base = OTHER; note = Adenosine phosphorothiorate
  modified_base 20: mod_base = OTHER; note = 2'-Omethyluridine
  modified_base 25: mod_base = OTHER; note = 2'-Omethylcytosine
  modified_base 29: mod_base = OTHER; note = 2'-Omethylguanosine
  modified_base 33: mod_base = OTHER; note = 2'-fluorouridine
  modified_base 35: mod_base = OTHER; note = Cytosine phosphorothiorate
  modified_base 37: mod_base = OTHER; note = Adenosine phosphorothiorate
  modified_base 38: mod_base = OTHER; note = Adenosine phosphorothiorate
  modified_base 43: mod_base = OTHER; note = 2'-Omethyladenosine
  modified_base 44: mod_base = OTHER; note = 2'-fluoroadenosine
  modified_base 46: mod_base = OTHER; note = Guanosine phosphorothiorate
  modified_base 50: mod_base = OTHER; note = 2'-Omethylcytosine
  modified_base 52: mod_base = OTHER; note = 2'-Omethylguanosine
  modified_base 54: mod_base = OTHER; note = Uridine phosphorothiorate
  modified_base 55: mod_base = OTHER; note = Uridine phosphorothiorate
  modified_base 56: mod_base = OTHER; note = 2'-Omethylcytosine
  modified_base 57: mod_base = OTHER; note = Guanosine phosphorothiorate
  modified_base 62: mod_base = OTHER; note = 2'-Omethylcytosine
  modified_base 63: mod_base = OTHER; note = 2'-fluorocytosine
  modified_base 65: mod_base = OTHER; note = 2'-Omethylguanosine
  modified_base 71: mod_base = OTHER; note = 2'-Omethyluridine
  modified_base 73: mod_base = OTHER; note = 2'-Omethylguanosine

SEQ ID NO: 6355 - RNA, 75 nt, synthetic construct; identical to SEQ ID NO: 1045
  source 1..75: mol_type = other RNA
  modified_base 1: mod_base = OTHER; note = 2'-Omethylguanosine
  modified_base 2: mod_base = OTHER; note = 2'-Omethylguanosine
  modified_base 3: mod_base = OTHER; note = 2'-Omethyluridine
  modified_base 4: mod_base = OTHER; note = 2'-Omethyluridine
  modified_base 5: mod_base = OTHER; note = 2'-Omethylcytosine
  modified_base 6: mod_base = OTHER; note = 2'-Omethylcytosine
  modified_base 10: mod_base = OTHER; note = 2'-Omethylguanosine
  modified_base 11: mod_base = OTHER; note = 2'-Omethyluridine
  modified_base 12: mod_base = OTHER; note = 2'-Omethylguanosine
  modified_base 13: mod_base = OTHER; note = 2'-Omethyluridine
  modified_base 14: mod_base = OTHER; note = 2'-Omethyladenosine
  modified_base 15: mod_base = OTHER; note = 2'-fluoroadenosine
  modified_base 16: mod_base = OTHER; note = 2'-Omethyluridine
  modified_base 17: mod_base = OTHER; note = 2'-Omethylguanosine
  modified_base 18: mod_base = OTHER; note = 2'-Omethylguanosine
  modified_base 20: mod_base = OTHER; note = 2'-Omethyladenosine
  modified_base 22: mod_base = OTHER; note = 2'-Omethylguanosine
  modified_base 23: mod_base = OTHER; note = 2'-Omethylcytosine
  modified_base 24: mod_base = OTHER; note = 2'-Omethyladenosine
  modified_base 25: mod_base = OTHER; note = 2'-Omethylcytosine
  modified_base 33: mod_base = OTHER; note = 2'-fluorouridine
  modified_base 35: mod_base = OTHER; note = Uridine phosphorothiorate
  modified_base 37: mod_base = OTHER; note = Adenosine phosphorothiorate
  modified_base 38: mod_base = OTHER; note = Adenosine phosphorothiorate
  modified_base 41: mod_base = OTHER; note = 2'-Omethylcytosine
  modified_base 42: mod_base = OTHER; note = 2'-Omethyladenosine
  modified_base 43: mod_base = OTHER; note = 2'-Omethylguanosine
  modified_base 44: mod_base = OTHER; note = 2'-Omethylcytosine
  modified_base 48: mod_base = OTHER; note = 2'-Omethylcytosine
  modified_base 49: mod_base = OTHER; note = 2'-Omethylcytosine
  modified_base 51: mod_base = OTHER; note = 2'-Omethyladenosine
  modified_base 53: mod_base = OTHER; note = 2'-Omethyluridine
  modified_base 54: mod_base = OTHER; note = Uridine phosphorothiorate
  modified_base 55: mod_base = OTHER; note = 2'-Omethylcytosine
  modified_base 56: mod_base = OTHER; note = 2'-fluoroguanosine
  modified_base 58: mod_base = OTHER; note = 2'-Omethylguanosine
  modified_base 60: mod_base = OTHER; note = 2'-Omethylcytosine
  modified_base 64: mod_base = OTHER; note = 2'-Omethylguanosine
  modified_base 72: mod_base = OTHER; note = 2'-Omethyluridine

SEQ ID NO: 6356 - RNA, 76 nt, synthetic construct; identical to SEQ ID NO: 3318
  source 1..76: mol_type = other RNA
  modified_base 1: mod_base = OTHER; note = 2'-Omethylcytosine
  modified_base 19: mod_base = OTHER; note = 2'-Omethylguanosine
  modified_base 50: mod_base = OTHER; note = 2'-Omethylcytosine
  modified_base 52: mod_base = OTHER; note = 2'-Omethylguanosine
  modified_base 73: mod_base = OTHER; note = 2'-Omethyladenosine

SEQ ID NO: 6357 - RNA, 85 nt, synthetic construct; identical to SEQ ID NO: 3297
  source 1..85: mol_type = other RNA
  modified_base 1: mod_base = OTHER; note = 2'-Omethylguanosine phosphorothiorate
  modified_base 2: mod_base = OTHER; note = 2'-Omethylcytosine
  modified_base 3: mod_base = OTHER; note = 2'-Omethyluridine
  modified_base 4: mod_base = OTHER; note = 2'-Omethylguanosine
  modified_base 5: mod_base = OTHER; note = 2'-Omethyluridine
  modified_base 6: mod_base = OTHER; note = 2'-Omethylguanosine
  modified_base 44: mod_base = OTHER; note = 2'-Omethyluridine
  modified_base 56: mod_base = OTHER; note = 2'-fluoroguanosine
  modified_base 57: mod_base = OTHER; note = 2'-fluorocytosine
  modified_base 58: mod_base = OTHER; note = 2'-Omethylguanosine
  modified_base 82: mod_base = OTHER; note = 2'-Omethylguanosine

SEQ ID NO: 6358 - RNA, 76 nt, synthetic construct; identical to SEQ ID NO: 625
  source 1..76: mol_type = other RNA
  modified_base 1: mod_base = OTHER; note = 2'-Omethylguanosine phosphorothiorate
  modified_base 2: mod_base = OTHER; note = 2'-Omethylguanosine
  modified_base 13: mod_base = OTHER; note = 2'-Omethylcytosine
  modified_base 33: mod_base = OTHER; note = 2'-fluorouridine
  modified_base 35: mod_base = OTHER; note = Cytosine phosphorothiorate
  modified_base 37: mod_base = OTHER; note = Adenosine phosphorothiorate
  modified_base 38: mod_base = OTHER; note = Adenosine phosphorothiorate
  modified_base 50: mod_base = OTHER; note = 2'-Omethylcytosine
  modified_base 52: mod_base = OTHER; note = 2'-fluoroguanosine
  modified_base 62: mod_base = OTHER; note = 2'-Omethylcytosine
  modified_base 65: mod_base = OTHER; note = 2'-Omethylguanosine
  modified_base 73: mod_base = OTHER; note = 2'-Omethylguanosine
  modified_base 75: mod_base = OTHER; note = 2'-fluorocytosine phosphorothiorate

SEQ ID NO: 6359 - RNA, 75 nt, synthetic construct; identical to SEQ ID NO: 1045
  source 1..75: mol_type = other RNA
  modified_base 1: mod_base = OTHER; note = 2'-Omethylguanosine
  modified_base 14: mod_base = OTHER; note = 2'-Omethyladenosine
  modified_base 15: mod_base = OTHER; note = 2'-Omethyladenosine
  modified_base 16: mod_base = OTHER; note = 2'-Omethyluridine
  modified_base 17: mod_base = OTHER; note = 2'-Omethylguanosine
  modified_base 18: mod_base = OTHER; note = 2'-Omethylguanosine
  modified_base 19: mod_base = OTHER; note = Uridine phosphorothiorate
  modified_base 20: mod_base = OTHER; note = 2'-Omethyladenosine
  modified_base 21: mod_base = OTHER; note = Adenosine phosphorothiorate
  modified_base 33: mod_base = OTHER; note = 2'-fluorouridine
  modified_base 34: mod_base = OTHER; note = 2'-Omethyluridine
  modified_base 35: mod_base = OTHER; note = Uridine phosphorothiorate
  modified_base 37: mod_base = OTHER; note = Adenosine phosphorothiorate
  modified_base 38: mod_base = OTHER; note = Adenosine phosphorothiorate
  modified_base 49: mod_base = OTHER; note = 2'-Omethylcytosine
  modified_base 51: mod_base = OTHER; note = 2'-Omethyladenosine
  modified_base 72: mod_base = OTHER; note = 2'-Omethyluridine

SEQ ID NO: 6360 - RNA, 75 nt, synthetic construct; identical to SEQ ID NO: 1045
  source 1..75: mol_type = other RNA
  modified_base 1: mod_base = OTHER; note = 2'-Omethylguanosine phosphorothiorate
  modified_base 2: mod_base = OTHER; note = 2'-Omethylguanosine phosphorothiorate
  modified_base 3: mod_base = OTHER; note = 2'-Omethyluridine
  modified_base 4: mod_base = OTHER; note = 2'-Omethyluridine
  modified_base 5: mod_base = OTHER; note = 2'-Omethylcytosine
  modified_base 6: mod_base = OTHER; note = 2'-Omethylcytosine
  modified_base 10: mod_base = OTHER; note = 2'-Omethylguanosine
  modified_base 11: mod_base = OTHER; note = 2'-Omethyluridine
  modified_base 12: mod_base = OTHER; note = 2'-Omethylguanosine
  modified_base 13: mod_base = OTHER; note = 2'-Omethyluridine
  modified_base 17: mod_base = OTHER; note = 2'-Omethylguanosine
  modified_base 18: mod_base = OTHER; note = 2'-Omethylguanosine
  modified_base 22: mod_base = OTHER; note = 2'-Omethylguanosine
  modified_base 23: mod_base = OTHER; note = 2'-Omethylcytosine
  modified_base 24: mod_base = OTHER; note = 2'-Omethyladenosine
  modified_base 25: mod_base = OTHER; note = 2'-Omethylcytosine
  modified_base 33: mod_base = OTHER; note = 2'-fluorouridine
  modified_base 34: mod_base = OTHER; note = 2'-Omethyluridine
  modified_base 35: mod_base = OTHER; note = Uridine phosphorothiorate
  modified_base 37: mod_base = OTHER; note = Adenosine phosphorothiorate
  modified_base 38: mod_base = OTHER; note = Adenosine phosphorothiorate
  modified_base 41: mod_base = OTHER; note = 2'-fluorocytosine
  modified_base 42: mod_base = OTHER; note = 2'-Omethyladenosine
  modified_base 43: mod_base = OTHER; note = 2'-Omethylguanosine
  modified_base 44: mod_base = OTHER; note = 2'-fluorocytosine
  modified_base 48: mod_base = OTHER; note = 2'-Omethylcytosine
  modified_base 49: mod_base = OTHER; note = 2'-Omethylcytosine
  modified_base 50: mod_base = OTHER; note = 2'-Omethylguanosine
  modified_base 51: mod_base = OTHER; note = 2'-Omethyladenosine
  modified_base 52: mod_base = OTHER; note = 2'-Omethylguanosine
  modified_base 53: mod_base = OTHER; note = Uridine phosphorothiorate
  modified_base 54: mod_base = OTHER; note = Uridine phosphorothiorate
  modified_base 60: mod_base = OTHER; note = 2'-Omethylcytosine
  modified_base 61: mod_base = OTHER; note = 2'-Omethyluridine
  modified_base 62: mod_base = OTHER; note = 2'-fluorocytosine
  modified_base 63: mod_base = OTHER; note = 2'-Omethylguanosine
  modified_base 64: mod_base = OTHER; note = 2'-Omethylguanosine
  modified_base 65: mod_base = OTHER; note = 2'-Omethyluridine
  modified_base 66: mod_base = OTHER; note = 2'-Omethylguanosine
  modified_base 67: mod_base = OTHER; note = 2'-Omethylguanosine
  modified_base 72: mod_base = OTHER; note = 2'-Omethyluridine

SEQ ID NO: 6361 - RNA, 76 nt, synthetic construct; identical to SEQ ID NO: 625
  source 1..76: mol_type = other RNA
  modified_base 10: mod_base = OTHER; note = 2'-Omethylguanosine
  modified_base 11: mod_base = OTHER; note = 2'-Omethylcytosine
  modified_base 12: mod_base = OTHER; note = 2'-Omethylguanosine
  modified_base 13: mod_base = OTHER; note = 2'-Omethylcytosine
  modified_base 54: mod_base = OTHER; note = Uridine phosphorothiorate
  modified_base 55: mod_base = OTHER; note = Uridine phosphorothiorate
  modified_base 56: mod_base = OTHER; note = Cytosine phosphorothiorate
  modified_base 57: mod_base = OTHER; note = Guanosine phosphorothiorate

SEQ ID NO: 6362 - RNA, 76 nt, synthetic construct; identical to SEQ ID NO: 625
  source 1..76: mol_type = other RNA
  modified_base 3: mod_base = OTHER; note = Cytosine phosphorothiorate
  modified_base 6: mod_base = OTHER; note = 2'-Omethylcytosine
  modified_base 8: mod_base = OTHER; note = Uridine phosphorothiorate
  modified_base 11: mod_base = OTHER; note = 2'-fluorocytosine
  modified_base 12: mod_base = OTHER; note = 2'-Omethylguanosine
  modified_base 13: mod_base = OTHER; note = 2'-fluorocytosine phosphorothiorate
  modified_base 14: mod_base = OTHER; note = 2'-Omethyladenosine
  modified_base 15: mod_base = OTHER; note = 2'-fluoroadenosine
  modified_base 20: mod_base = OTHER; note = 2'-Omethyluridine
  modified_base 21: mod_base = OTHER; note = Adenosine phosphorothiorate
  modified_base 22: mod_base = OTHER; note = 2'-Omethylguanosine
  modified_base 24: mod_base = OTHER; note = 2'-fluoroguanosine
  modified_base 25: mod_base = OTHER; note = Cytosine phosphorothiorate
  modified_base 26: mod_base = OTHER; note = 2'-Omethyladenosine
  modified_base 33: mod_base = OTHER; note = 2'-fluorouridine
  modified_base 34: mod_base = OTHER; note = 2'-fluorouridine
  modified_base 36: mod_base = OTHER; note = Adenosine phosphorothiorate
  modified_base 40: mod_base = OTHER; note = 2'-fluorouridine
  modified_base 42: mod_base = OTHER; note = 2'-Omethyladenosine
  modified_base 43: mod_base = OTHER; note = Adenosine phosphorothiorate
  modified_base 44: mod_base = OTHER; note = 2'-Omethyladenosine
  modified_base 46: mod_base = OTHER; note = 2'-fluoroguanosine
  modified_base 47: mod_base = OTHER; note = 2'-Omethyluridine
  modified_base 48: mod_base = OTHER; note = Uridine phosphorothiorate
  modified_base 49: mod_base = OTHER; note = Cytosine phosphorothiorate
  modified_base 50: mod_base = OTHER; note = 2'-fluorocytosine
  modified_base 53: mod_base = OTHER; note = 2'-fluoroguanosine
  modified_base 54: mod_base = OTHER; note = 2'-fluorouridine
  modified_base 56: mod_base = OTHER; note = Cytosine phosphorothiorate
  modified_base 57: mod_base = OTHER; note = 2'-Omethylguanosine phosphorothiorate
  modified_base 58: mod_base = OTHER; note = 2'-fluoroadenosine
  modified_base 60: mod_base = OTHER; note = 2'-Omethyluridine
  modified_base 61: mod_base = OTHER; note = 2'-Omethylcytosine
  modified_base 63: mod_base = OTHER; note = 2'-fluorocytosine
  modified_base 65: mod_base = OTHER; note = 2'-fluoroguanosine phosphorothiorate
  modified_base 71: mod_base = OTHER; note = Uridine phosphorothiorate
  modified_base 72: mod_base = OTHER; note = 2'-fluorocytosine
  modified_base 73: mod_base = OTHER; note = Guanosine phosphorothiorate
  modified_base 74: mod_base = OTHER; note = 2'-Omethylcytosine phosphorothiorate
  modified_base 75: mod_base = OTHER; note = 2'-Omethylcytosine

SEQ ID NO: 6363 - RNA, 85 nt, synthetic construct; identical to SEQ ID NO: 3317
  source 1..85: mol_type = other RNA
  modified_base 1: mod_base = OTHER; note = 2'-Omethylguanosine phosphorothiorate
  modified_base 2: mod_base = OTHER; note = Cytosine phosphorothiorate
  modified_base 3: mod_base = OTHER; note = 2'-Omethyluridine phosphorothiorate
  modified_base 4: mod_base = OTHER; note = 2'-Omethylguanosine phosphorothiorate
  modified_base 7: mod_base = OTHER; note = 2'-fluoroadenosine
  modified_base 15: mod_base = OTHER; note = 2'-Omethylguanosine phosphorothiorate
  modified_base 18: mod_base = OTHER; note = 2'-Omethylguanosine phosphorothiorate
  modified_base 20: mod_base = OTHER; note = 2'-Omethyluridine phosphorothiorate
  modified_base 24: mod_base = OTHER; note = 2'-Omethylguanosine phosphorothiorate
  modified_base 26: mod_base = OTHER; note = 2'-fluoroguanosine phosphorothiorate
  modified_base 27: mod_base = OTHER; note = 2'-Omethyluridine
  modified_base 33: mod_base = OTHER; note = 2'-fluorouridine phosphorothiorate
  modified_base 34: mod_base = OTHER; note = 2'-fluorocytosine
  modified_base 44: mod_base = OTHER; note = 2'-Omethyluridine
  modified_base 46: mod_base = OTHER; note = 2'-Omethylguanosine
  modified_base 52: mod_base = OTHER; note = 2'-fluorocytosine
  modified_base 56: mod_base = OTHER; note = Guanosine phosphorothiorate
  modified_base 58: mod_base = OTHER; note = Guanosine phosphorothiorate
  modified_base 59: mod_base = OTHER; note = 2'-Omethylcytosine phosphorothiorate
  modified_base 61: mod_base = OTHER; note = 2'-Omethylguanosine
  modified_base 71: mod_base = OTHER; note = 2'-fluorocytosine
  modified_base 74: mod_base = OTHER; note = 2'-Omethylcytosine phosphorothiorate
  modified_base 84: mod_base = OTHER; note = 2'-Omethylcytosine phosphorothiorate

SEQ ID NO: 6364 - RNA, 76 nt, synthetic construct; identical to SEQ ID NO: 625
  source 1..76: mol_type = other RNA
  modified_base 1: mod_base = OTHER; note = 2'-Omethylguanosine
  modified_base 10: mod_base = OTHER; note = 2'-Omethylguanosine
  modified_base 13: mod_base = OTHER; note = 2'-Omethylcytosine
  modified_base 17: mod_base = OTHER; note = Guanosine phosphorothiorate
  modified_base 18: mod_base = OTHER; note = 2'-Omethylguanosine
  modified_base 19: mod_base = OTHER; note = Adenosine phosphorothiorate
  modified_base 20: mod_base = OTHER; note = 2'-Omethyluridine
  modified_base 25: mod_base = OTHER; note = 2'-Omethylcytosine
  modified_base 29: mod_base = OTHER; note = 2'-Omethylguanosine
  modified_base 33: mod_base = OTHER; note = 2'-fluorouridine
  modified_base 35: mod_base = OTHER; note = Cytosine phosphorothiorate
  modified_base 37: mod_base = OTHER; note = Adenosine phosphorothiorate
  modified_base 41: mod_base = OTHER; note = 2'-Omethylcytosine
  modified_base 43: mod_base = OTHER; note = 2'-Omethyladenosine
  modified_base 44: mod_base = OTHER; note = 2'-fluoroadenosine
  modified_base 46: mod_base = OTHER; note = Guanosine phosphorothiorate
  modified_base 50: mod_base = OTHER; note = 2'-Omethylcytosine
  modified_base 52: mod_base = OTHER; note = 2'-Omethylguanosine
  modified_base 54: mod_base = OTHER; note = Uridine phosphorothiorate
  modified_base 55: mod_base = OTHER; note = Uridine phosphorothiorate
  modified_base 56: mod_base = OTHER; note = 2'-Omethylcytosine
  modified_base 57: mod_base = OTHER; note = Guanosine phosphorothiorate
  modified_base 62: mod_base = OTHER; note = 2'-Omethylcytosine
  modified_base 63: mod_base = OTHER; note = 2'-fluorocytosine
  modified_base 65: mod_base = OTHER; note = 2'-Omethylguanosine
  modified_base 71: mod_base = OTHER; note = 2'-Omethyluridine
  modified_base 73: mod_base = OTHER; note = 2'-Omethylguanosine

SEQ ID NO: 6365 - RNA, 85 nt, synthetic construct
  source 1..85: mol_type = other RNA
gtcatggtggccgagtggttaaggcgttggacttcaaatccaatggggtctccccgcacaggttcgaatcctgtccatgacgcca

SEQ ID NO: 6366 - RNA, 75 nt, synthetic construct; identical to SEQ ID NO: 3299
  source 1..75: mol_type = other RNA
  modified_base 2: mod_base = OTHER; note = 2'-Omethylcytosine phosphorothiorate
  modified_base 4: mod_base = OTHER; note = 2'-Omethylguanosine
  modified_base 9: mod_base = OTHER; note = 2'-Omethylguanosine phosphorothiorate
  modified_base 11: mod_base = OTHER; note = 2'-fluorouridine
  modified_base 20: mod_base = OTHER; note = 2'-fluoroadenosine
  modified_base 21: mod_base = OTHER; note = 2'-Omethylguanosine
  modified_base 22: mod_base = OTHER; note = 2'-fluoroadenosine
  modified_base 25: mod_base = OTHER; note = Adenosine phosphorothiorate
  modified_base 26: mod_base = OTHER; note = 2'-fluorouridine phosphorothiorate
  modified_base 28: mod_base = OTHER; note = 2'-Omethyladenosine phosphorothiorate
  modified_base 39: mod_base = OTHER; note = 2'-fluorocytosine phosphorothiorate
  modified_base 46: mod_base = OTHER; note = 2'-fluorouridine
  modified_base 48: mod_base = OTHER; note = 2'-fluorocytosine phosphorothiorate
  modified_base 54: mod_base = OTHER; note = 2'-Omethyluridine
  modified_base 58: mod_base = OTHER; note = Guanosine phosphorothiorate
  modified_base 62: mod_base = OTHER; note = 2'-Omethylcytosine phosphorothiorate
  modified_base 73: mod_base = OTHER; note = 2'-fluorocytosine
  modified_base 74: mod_base = OTHER; note = Cytosine phosphorothiorate

SEQ ID NO: 6367 - RNA, 76 nt, synthetic construct; identical to SEQ ID NO: 625
  source 1..76: mol_type = other RNA
  modified_base 1: mod_base = OTHER; note = 2'-Omethylguanosine phosphorothiorate
  modified_base 2: mod_base = OTHER; note = 2'-Omethylguanosine
  modified_base 33: mod_base = OTHER; note = 2'-fluorouridine
  modified_base 35: mod_base = OTHER; note = Cytosine phosphorothiorate
  modified_base 37: mod_base = OTHER; note = Adenosine phosphorothiorate
  modified_base 38: mod_base = OTHER; note = Adenosine phosphorothiorate
  modified_base 52: mod_base = OTHER; note = 2'-fluoroguanosine
  modified_base 65: mod_base = OTHER; note = 2'-Omethylguanosine
  modified_base 68: mod_base = OTHER; note = 2'-Omethylguanosine
  modified_base 73: mod_base = OTHER; note = 2'-Omethylguanosine
  modified_base 75: mod_base = OTHER; note = 2'-fluorocytosine phosphorothiorate

SEQ ID NO: 6368 - RNA, 86 nt, synthetic construct; identical to SEQ ID NO: 3290
  source 1..86: mol_type = other RNA
  modified_base 1: mod_base = OTHER; note = 2'-Omethyladenosine
  modified_base 76: mod_base = OTHER; note = 2'-Omethyluridine
  modified_base 77: mod_base = OTHER; note = 2'-Omethylcytosine
  modified_base 78: mod_base = OTHER; note = 2'-Omethylcytosine
  modified_base 79: mod_base = OTHER; note = 2'-Omethyluridine
  modified_base 81: mod_base = OTHER; note = 2'-Omethylguanosine
  modified_base 82: mod_base = OTHER; note = 2'-Omethyluridine
  modified_base 83: mod_base = OTHER; note = 2'-Omethyladenosine

SEQ ID NO: 6369 - RNA, 76 nt, synthetic construct; identical to SEQ ID NO: 625
  source 1..76: mol_type = other RNA
  modified_base 1: mod_base = OTHER; note = 2'-Omethylguanosine phosphorothiorate
  modified_base 2: mod_base = OTHER; note = 2'-Omethylguanosine
  modified_base 17: mod_base = OTHER; note = 2'-Omethylguanosine
  modified_base 33: mod_base = OTHER; note = 2'-fluorouridine
  modified_base 35: mod_base = OTHER; note = Cytosine phosphorothiorate
  modified_base 37: mod_base = OTHER; note = Adenosine phosphorothiorate
  modified_base 38: mod_base = OTHER; note = Adenosine phosphorothiorate
  modified_base 52: mod_base = OTHER; note = 2'-fluoroguanosine
  modified_base 56: mod_base = OTHER; note = 2'-Omethylcytosine
  modified_base 59: mod_base = OTHER; note = 2'-Omethylguanosine
  modified_base 62: mod_base = OTHER; note = 2'-Omethylcytosine
  modified_base 63: mod_base = OTHER; note = 2'-fluorocytosine
  modified_base 73: mod_base = OTHER; note = 2'-Omethylguanosine
  modified_base 75: mod_base = OTHER; note = 2'-fluorocytosine phosphorothiorate

SEQ ID NO: 6370 - DNA, 73 bp, synthetic construct; identical to SEQ ID NO: 3380
  source 1..73: mol_type = other DNA
  modified_base 1: mod_base = OTHER; note = 2'-Omethylguanosine phosphorothiorate
  modified_base 2: mod_base = OTHER; note = 2'-Omethylguanosine
  modified_base 13: mod_base = OTHER; note = 2'-fluorocytosine
  modified_base 22: mod_base = OTHER; note = Guanosine phosphorothiorate
  modified_base 68: mod_base = OTHER; note = 2'-fluoroguanosine
  modified_base 70: mod_base = OTHER; note = Guanosine phosphorothiorate
  modified_base 71: mod_base = OTHER; note = 2'-Omethyluridine phosphorothiorate
  modified_base 72: mod_base = OTHER; note = 2'-Omethylcytosine
  misc_feature 1..22: note = RNA
  misc_feature 23: note = DNA
  misc_feature 24..73: note = RNA

SEQ ID NO: 6371 - RNA, 76 nt, synthetic construct; identical to SEQ ID NO: 3295
  source 1..76: mol_type = other RNA
  modified_base 1: mod_base = OTHER; note = 2'-Omethylcytosine
  modified_base 3: mod_base = OTHER; note = 2'-fluorouridine phosphorothiorate
  modified_base 5: mod_base = OTHER; note = 2'-Omethylcytosine phosphorothiorate
  modified_base 20: mod_base = OTHER; note = 2'-Omethyluridine phosphorothiorate
  modified_base 27: mod_base = OTHER; note = 2'-Omethylguanosine
  modified_base 43: mod_base = OTHER; note = 2'-Omethyluridine
  modified_base 74: mod_base = OTHER; note = 2'-fluorocytosine
  modified_base 76: mod_base = OTHER; note = 2'-fluoroadenosine

SEQ ID NO: 6372 - RNA, 75 nt, synthetic construct; identical to SEQ ID NO: 3336
  source 1..75: mol_type = other RNA
  modified_base 3: mod_base = OTHER; note = Uridine phosphorothiorate
  modified_base 26: mod_base = OTHER; note = 2'-fluorouridine phosphorothiorate
  modified_base 28: mod_base = OTHER; note = 2'-fluoroadenosine
  modified_base 47: mod_base = OTHER; note = 2'-fluorocytosine
  modified_base 48: mod_base = OTHER; note = 2'-fluorocytosine
  modified_base 52: mod_base = OTHER; note = 2'-fluoroguanosine
  modified_base 73: mod_base = OTHER; note = Cytosine phosphorothiorate
  modified_base 74: mod_base = OTHER; note = 2'-Omethylcytosine
  modified_base 75: mod_base = OTHER; note = 2'-fluoroadenosine

SEQ ID NO: 6373 - RNA, 76 nt, synthetic construct; identical to SEQ ID NO: 625
  source 1..76: mol_type = other RNA
  modified_base 1: mod_base = OTHER; note = 2'-Omethylguanosine phosphorothiorate
  modified_base 2: mod_base = OTHER; note = 2'-Omethylguanosine phosphorothiorate
  modified_base 3: mod_base = OTHER; note = 2'-Omethylcytosine phosphorothiorate
  modified_base 4: mod_base = OTHER; note = 2'-Omethyluridine phosphorothiorate
  modified_base 5: mod_base = OTHER; note = 2'-Omethylcytosine phosphorothiorate
  modified_base 6: mod_base = OTHER; note = 2'-Omethylcytosine phosphorothiorate
  modified_base 10: mod_base = OTHER; note = 2'-Omethylguanosine
  modified_base 11: mod_base = OTHER; note = 2'-Omethylcytosine
  modified_base 12: mod_base = OTHER; note = 2'-Omethylguanosine
  modified_base 13: mod_base = OTHER; note = 2'-Omethylcytosine
  modified_base 14: mod_base = OTHER; note = 2'-Omethyladenosine
  modified_base 15: mod_base = OTHER; note = 2'-Omethyladenosine
  modified_base 16: mod_base = OTHER; note = 2'-Omethyluridine
  modified_base 17: mod_base = OTHER; note = 2'-Omethylguanosine
  modified_base 18: mod_base = OTHER; note = 2'-Omethylguanosine
  modified_base 19: mod_base = OTHER; note = 2'-Omethyladenosine
  modified_base 20: mod_base = OTHER; note = 2'-Omethyluridine
  modified_base 22: mod_base = OTHER; note = 2'-Omethylguanosine
  modified_base 23: mod_base = OTHER; note = 2'-Omethylcytosine
  modified_base 24: mod_base = OTHER; note = 2'-Omethylguanosine
  modified_base 25: mod_base = OTHER; note = 2'-Omethylcytosine
  modified_base 40: mod_base = OTHER; note = 2'-fluorouridine
  modified_base 41: mod_base = OTHER; note = 2'-fluorocytosine
  modified_base 42: mod_base = OTHER; note = 2'-fluoroadenosine
  modified_base 43: mod_base = OTHER; note = 2'-fluoroadenosine
  modified_base 54: mod_base = OTHER; note = Uridine phosphorothiorate
  modified_base 55: mod_base = OTHER; note = Uridine phosphorothiorate
  modified_base 56: mod_base = OTHER; note = Cytosine phosphorothiorate
  modified_base 57: mod_base = OTHER; note = Guanosine phosphorothiorate
  modified_base 61: mod_base = OTHER; note = 2'-Omethylcytosine
  modified_base 62: mod_base = OTHER; note = 2'-Omethylcytosine
  modified_base 63: mod_base = OTHER; note = 2'-Omethylcytosine
  modified_base 64: mod_base = OTHER; note = 2'-Omethylguanosine
  modified_base 65: mod_base = OTHER; note = 2'-Omethylguanosine
  modified_base 66: mod_base = OTHER; note = 2'-Omethylcytosine
  modified_base 67: mod_base = OTHER; note = 2'-Omethylguanosine
  modified_base 68: mod_base = OTHER; note = 2'-Omethylguanosine
  modified_base 69: mod_base = OTHER; note = 2'-Omethyladenosine

SEQ ID NO: 6374 - RNA, 75 nt, synthetic construct; identical to SEQ ID NO: 3336
  source 1..75: mol_type = other RNA
  modified_base 2: mod_base = OTHER; note = 2'-Omethylcytosine phosphorothiorate
  modified_base 6: mod_base = OTHER; note = 2'-fluoroguanosine phosphorothiorate
  modified_base 10: mod_base = OTHER; note = 2'-fluorocytosine
  modified_base 17: mod_base = OTHER; note = Guanosine phosphorothiorate
  modified_base 20: mod_base = OTHER; note = 2'-Omethyladenosine
  modified_base 21: mod_base = OTHER; note = 2'-fluoroguanosine
  modified_base 23: mod_base = OTHER; note = 2'-fluoroguanosine phosphorothiorate
  modified_base 26: mod_base = OTHER; note = Uridine phosphorothiorate
  modified_base 28: mod_base = OTHER; note = 2'-Omethyladenosine phosphorothiorate
  modified_base 37: mod_base = OTHER; note = 2'-fluoroadenosine
  modified_base 38: mod_base = OTHER; note = 2'-fluorouridine
  modified_base 39: mod_base = OTHER; note = 2'-fluorocytosine
  modified_base 41: mod_base = OTHER; note = 2'-Omethylguanosine phosphorothiorate
  modified_base 46: mod_base = OTHER; note = 2'-fluorouridine
  modified_base 47: mod_base = OTHER; note = 2'-fluorocytosine
  modified_base 60: mod_base = OTHER; note = 2'-fluorocytosine
  modified_base 61: mod_base = OTHER; note = 2'-fluorocytosine
  modified_base 72: mod_base = OTHER; note = Guanosine phosphorothiorate
  modified_base 73: mod_base = OTHER; note = Cytosine phosphorothiorate
  modified_base 74: mod_base = OTHER; note = Cytosine phosphorothiorate

SEQ ID NO: 6375 - RNA, 76 nt, synthetic construct; identical to SEQ ID NO: 625
  source 1..76: mol_type = other RNA
  modified_base 2: mod_base = OTHER; note = 2'-Omethylguanosine
  modified_base 4: mod_base = OTHER; note = 2'-fluorouridine
  modified_base 6: mod_base = OTHER; note = 2'-Omethylcytosine
  modified_base 10: mod_base = OTHER; note = 2'-Omethylguanosine
  modified_base 12: mod_base = OTHER; note = 2'-fluoroguanosine
  modified_base 15: mod_base = OTHER; note = Adenosine phosphorothiorate
  modified_base 16: mod_base = OTHER; note = 2'-fluorouridine
  modified_base 18: mod_base = OTHER; note = 2'-fluoroguanosine phosphorothiorate
  modified_base 20: mod_base = OTHER; note = Uridine phosphorothiorate
  modified_base 21: mod_base = OTHER; note = Adenosine phosphorothiorate
  modified_base 25: mod_base = OTHER; note = 2'-Omethylcytosine phosphorothiorate
  modified_base 26: mod_base = OTHER; note = Adenosine phosphorothiorate
  modified_base 27: mod_base = OTHER; note = Uridine phosphorothiorate
  modified_base 28: mod_base = OTHER; note = 2'-fluorouridine
  modified_base 30: mod_base = OTHER; note = 2'-fluoroguanosine phosphorothiorate
  modified_base 31: mod_base = OTHER; note = 2'-fluoroadenosine
  modified_base 37: mod_base = OTHER; note = Adenosine phosphorothiorate
  modified_base 38: mod_base = OTHER; note = 2'-fluoroadenosine
  modified_base 39: mod_base = OTHER; note = Uridine phosphorothiorate
  modified_base 40: mod_base = OTHER; note = 2'-Omethyluridine phosphorothiorate
  modified_base 43: mod_base = OTHER; note = 2'-fluoroadenosine
  modified_base 44: mod_base = OTHER; note = 2'-fluoroadenosine
  modified_base 45: mod_base = OTHER; note = 2'-fluoroguanosine
  modified_base 49: mod_base = OTHER; note = Cytosine phosphorothiorate
  modified_base 50: mod_base = OTHER; note = 2'-Omethylcytosine
  modified_base 51: mod_base = OTHER; note = Guanosine phosphorothiorate
  modified_base 52: mod_base = OTHER; note = 2'-Omethylguanosine
  modified_base 54: mod_base = OTHER; note = 2'-fluorouridine phosphorothiorate
  modified_base 55: mod_base = OTHER; note = Uridine phosphorothiorate
  modified_base 59: mod_base = OTHER; note = Guanosine phosphorothiorate
  modified_base 60: mod_base = OTHER; note = 2'-fluorouridine
  modified_base 62: mod_base = OTHER; note = 2'-Omethylcytosine
  modified_base 64: mod_base = OTHER; note = 2'-fluoroguanosine
  modified_base 66: mod_base = OTHER; note = 2'-fluorocytosine
  modified_base 67: mod_base = OTHER; note = 2'-Omethylguanosine
  modified_base 71: mod_base = OTHER; note = 2'-Omethyluridine
  modified_base 72: mod_base = OTHER; note = 2'-Omethylcytosine
  modified_base 74: mod_base = OTHER; note = 2'-Omethylcytosine

SEQ ID NO: 6376 - RNA, 75 nt, synthetic construct; identical to SEQ ID NO: 3306
  source 1..75: mol_type = other RNA
  modified_base 1: mod_base = OTHER; note = 2'-Omethylguanosine phosphorothiorate
  modified_base 2: mod_base = OTHER; note = 2'-Omethyladenosine phosphorothiorate
  modified_base 31: mod_base = OTHER; note = Cytosine phosphorothiorate
  modified_base 32: mod_base = OTHER; note = 2'-Omethyluridine
  modified_base 73: mod_base = OTHER; note = Cytosine phosphorothiorate
  modified_base 74: mod_base = OTHER; note = 2'-Omethylcytosine phosphorothiorate
  modified_base 75: mod_base = OTHER; note = 2'-Omethyladenosine

SEQ ID NO: 6377 - RNA, 75 nt, synthetic construct; identical to SEQ ID NO: 3336
  source 1..75: mol_type = other RNA
  modified_base 13: mod_base = OTHER; note = 2'-fluoroadenosine phosphorothiorate
  modified_base 20: mod_base = OTHER; note = 2'-fluoroadenosine
  modified_base 22: mod_base = OTHER; note = 2'-fluoroadenosine
  modified_base 27: mod_base = OTHER; note = Cytosine phosphorothiorate
  modified_base 39: mod_base = OTHER; note = 2'-fluorocytosine
  modified_base 45: mod_base = OTHER; note = 2'-fluoroguanosine
  modified_base 48: mod_base = OTHER; note = 2'-fluorocytosine phosphorothiorate
  modified_base 52: mod_base = OTHER; note = 2'-fluoroguanosine
  modified_base 58: mod_base = OTHER; note = 2'-Omethylguanosine phosphorothiorate
  modified_base 74: mod_base = OTHER; note = Cytosine phosphorothiorate

SEQ ID NO: 6378 - RNA, 75 nt, synthetic construct; identical to SEQ ID NO: 3306
  source 1..75: mol_type = other RNA
  modified_base 1: mod_base = OTHER; note = 2'-Omethylguanosine phosphorothiorate
  modified_base 2: mod_base = OTHER; note = 2'-Omethyladenosine phosphorothiorate
  modified_base 73: mod_base = OTHER; note = Cytosine phosphorothiorate
  modified_base 74: mod_base = OTHER; note = Cytosine phosphorothiorate

SEQ ID NO: 6379 - RNA, 76 nt, synthetic construct; identical to SEQ ID NO: 625
  source 1..76: mol_type = other RNA
  modified_base 1: mod_base = OTHER; note = 2'-Omethylguanosine
  modified_base 2: mod_base = OTHER; note = 2'-fluoroguanosine
  modified_base 4: mod_base = OTHER; note = 2'-fluorouridine phosphorothiorate
  modified_base 5: mod_base = OTHER; note = 2'-Omethylcytosine
  modified_base 10: mod_base = OTHER; note = 2'-fluoroguanosine
  modified_base 13: mod_base = OTHER; note = 2'-Omethylcytosine
  modified_base 15: mod_base = OTHER; note = 2'-Omethyladenosine
  modified_base 19: mod_base = OTHER; note = Adenosine phosphorothiorate
  modified_base 20: mod_base = OTHER; note = 2'-fluorouridine phosphorothiorate
  modified_base 22: mod_base = OTHER; note = 2'-Omethylguanosine
  modified_base 23: mod_base = OTHER; note = 2'-Omethylcytosine phosphorothiorate
  modified_base 24: mod_base = OTHER; note = 2'-fluoroguanosine
  modified_base 25: mod_base = OTHER; note = Cytosine phosphorothiorate
  modified_base 26: mod_base = OTHER; note = 2'-fluoroadenosine
  modified_base 30: mod_base = OTHER; note = 2'-Omethylguanosine phosphorothiorate
  modified_base 31: mod_base = OTHER; note = 2'-fluoroadenosine
  modified_base 34: mod_base = OTHER; note = 2'-fluorouridine
  modified_base 39: mod_base = OTHER; note = 2'-fluorouridine phosphorothiorate
  modified_base 40: mod_base = OTHER; note = 2'-fluorouridine
  modified_base 43: mod_base = OTHER; note = 2'-fluoroadenosine
  modified_base 44: mod_base = OTHER; note = Adenosine phosphorothiorate
  modified_base 45: mod_base = OTHER; note = 2'-Omethylguanosine phosphorothiorate
  modified_base 47: mod_base = OTHER; note = Uridine phosphorothiorate
  modified_base 48: mod_base = OTHER; note = 2'-Omethyluridine
  modified_base 50: mod_base = OTHER; note = Cytosine phosphorothiorate
  modified_base 56: mod_base = OTHER; note = 2'-Omethylcytosine
  modified_base 57: mod_base = OTHER; note = 2'-fluoroguanosine phosphorothiorate
  modified_base 58: mod_base = OTHER; note = Adenosine phosphorothiorate
  modified_base 59: mod_base = OTHER; note = 2'-fluoroguanosine phosphorothiorate
  modified_base 60: mod_base = OTHER; note = Uridine phosphorothiorate
  modified_base 61: mod_base = OTHER; note = 2'-Omethylcytosine
  modified_base 63: mod_base = OTHER; note = 2'-Omethylcytosine
  modified_base 67: mod_base = OTHER; note = 2'-fluoroguanosine
  modified_base 72: mod_base = OTHER; note = 2'-Omethylcytosine
  modified_base 73: mod_base = OTHER; note = Guanosine phosphorothiorate
  modified_base 75: mod_base = OTHER; note = 2'-fluorocytosine
  modified_base 76: mod_base = OTHER; note = 2'-Omethyladenosine

SEQ ID NO: 6380 - DNA, 76 bp, synthetic construct; identical to SEQ ID NO: 1924
  source 1..76: mol_type = other DNA
  modified_base 1: mod_base = OTHER; note = 2'-Omethylguanosine
  modified_base 2: mod_base = OTHER; note = 2'-Omethylguanosine phosphorothiorate
  modified_base 4: mod_base = OTHER; note = 2'-O-(2-Methoxyethyl) thymine phosphorothiorate
  modified_base 6: mod_base = OTHER; note = Cytosine phosphorothiorate
  modified_base 7: mod_base = OTHER; note = 2'-fluoroguanosine phosphorothiorate
  modified_base 8: mod_base = OTHER; note = 2'-fluorouridine
  modified_base 11: mod_base = OTHER; note = Cytosine phosphorothiorate
  modified_base 13: mod_base = OTHER; note = Cytosine phosphorothiorate
  modified_base 14: mod_base = OTHER; note = deoxyadenosine phosphorothiorate
  modified_base 15: mod_base = OTHER; note = Adenosine phosphorothiorate
  modified_base 16: mod_base = OTHER; note = 2'-fluorouridine
  modified_base 17: mod_base = OTHER; note = Guanosine phosphorothiorate
  modified_base 18: mod_base = OTHER; note = 2'-Omethylguanosine
  modified_base 19: mod_base = OTHER; note = 2'-O-(2-Methoxyethyl) adenosine
  modified_base 20: mod_base = OTHER; note = Uridine phosphorothiorate
  modified_base 21: mod_base = OTHER; note = 2'-Omethyladenosine
  modified_base 22: mod_base = OTHER; note = 2'-O-(2-Methoxyethyl) guanosine
  modified_base 25: mod_base = OTHER; note = 2'-fluorocytosine phosphorothiorate
  modified_base 26: mod_base = OTHER; note = 2'-fluoroadenosine
  modified_base 28: mod_base = OTHER; note = 2'-Omethyluridine phosphorothiorate
  modified_base 29: mod_base = OTHER; note = 2'-fluoroguanosine phosphorothiorate
  modified_base 30: mod_base = OTHER; note = 2'-O-(2-Methoxyethyl) guanosine
  modified_base 31: mod_base = OTHER; note = 2'-O-(2-Methoxyethyl) adenosine
  modified_base 33: mod_base = OTHER; note = Uridine phosphorothiorate
  modified_base 38: mod_base = OTHER; note = 2'-fluoroadenosine
  modified_base 43: mod_base = OTHER; note = Adenosine phosphorothiorate
  modified_base 45: mod_base = OTHER; note = 2'-Omethylguanosine
  modified_base 46: mod_base = OTHER; note = 2'-O-(2-Methoxyethyl) guanosine
  modified_base 49: mod_base = OTHER; note = 2'-fluorocytosine phosphorothiorate
  modified_base 50: mod_base = OTHER; note = 2'-O-(2-Methoxyethyl) 5-methylcytosine
  modified_base 52: mod_base = OTHER; note = 2'-Omethylguanosine
  modified_base 53: mod_base = OTHER; note = 2'-O-(2-Methoxyethyl) guanosine
  modified_base 58: mod_base = OTHER; note = Adenosine phosphorothiorate
  modified_base 61: mod_base = OTHER; note = Cytosine phosphorothiorate
  modified_base 63: mod_base = OTHER; note = 2'-fluorocytosine
  modified_base 68: mod_base = OTHER; note = Guanosine phosphorothiorate
  modified_base 72: mod_base = OTHER; note = Cytosine phosphorothiorate
  modified_base 73: mod_base = OTHER; note = 2'-fluoroguanosine
  modified_base 74: mod_base = OTHER; note = 2'-O-(2-Methoxyethyl) 5-methylcytosine
  misc_feature 1..13: note = RNA
  misc_feature 14: note = DNA
  misc_feature 15..43: note = RNA
  misc_feature 44: note = DNA
  misc_feature 45..46: note = RNA
  misc_feature 47: note = DNA
  misc_feature 48..58: note = RNA
  misc_feature 59: note = DNA
  misc_feature 60..68: note = RNA
  misc_feature 69: note = DNA
  misc_feature 70..76: note = RNA

SEQ ID NO: 6381 - RNA, 86 nt, synthetic construct; identical to SEQ ID NO: 3290
  source 1..86: mol_type = other RNA
  modified_base 1: mod_base = OTHER; note = 2'-Omethyladenosine
  modified_base 10: mod_base = OTHER; note = 2'-Omethylguanosine
  modified_base 11: mod_base = OTHER; note = 2'-Omethylcytosine
  modified_base 12: mod_base = OTHER; note = 2'-Omethylcytosine
  modified_base 13: mod_base = OTHER; note = 2'-Omethylguanosine
  modified_base 14: mod_base = OTHER; note = 2'-Omethyladenosine
  modified_base 15: mod_base = OTHER; note = 2'-Omethylguanosine
  modified_base 16: mod_base = OTHER; note = 2'-Omethyluridine
  modified_base 17: mod_base = OTHER; note = 2'-Omethylguanosine
  modified_base 18: mod_base = OTHER; note = 2'-Omethylguanosine
  modified_base 19: mod_base = OTHER; note = Uridine phosphorothiorate
  modified_base 20: mod_base = OTHER; note = 2'-Omethyluridine
  modified_base 21: mod_base = OTHER; note = Adenosine phosphorothiorate
  modified_base 25: mod_base = OTHER; note = 2'-Omethylcytosine
  modified_base 41: mod_base = OTHER; note = 2'-Omethylcytosine
  modified_base 42: mod_base = OTHER; note = 2'-Omethyladenosine
  modified_base 43: mod_base = OTHER; note = 2'-Omethyladenosine
  modified_base 44: mod_base = OTHER; note = 2'-Omethyluridine
  modified_base 59: mod_base = OTHER; note = 2'-Omethylguanosine
  modified_base 60: mod_base = OTHER; note = 2'-Omethyluridine
  modified_base 62: mod_base = OTHER; note = 2'-Omethylguanosine
  modified_base 64: mod_base = OTHER; note = Uridine phosphorothiorate
  modified_base 65: mod_base = OTHER; note = Uridine phosphorothiorate
  modified_base 71: mod_base = OTHER; note = 2'-Omethylcytosine
  modified_base 75: mod_base = OTHER; note = 2'-Omethylcytosine
  modified_base 83: mod_base = OTHER; note = 2'-Omethyladenosine

SEQ ID NO: 6382 - RNA, 75 nt, synthetic construct; identical to SEQ ID NO: 3306
  source 1..75: mol_type = other RNA
  modified_base 38: mod_base = OTHER; note = 2'-Omethyluridine
  modified_base 39: mod_base = OTHER; note = 2'-Omethylcytosine
  modified_base 40: mod_base = OTHER; note = 2'-Omethyladenosine
  modified_base 41: mod_base = OTHER; note = 2'-Omethylguanosine
  modified_base 42: mod_base = OTHER; note = 2'-Omethyladenosine

SEQ ID NO: 6383 - RNA, 76 nt, synthetic construct; identical to SEQ ID NO: 3318
  source 1..76: mol_type = other RNA
  modified_base 1: mod_base = OTHER; note = 2'-Omethylcytosine phosphorothiorate
  modified_base 2: mod_base = OTHER; note = 2'-Omethylcytosine phosphorothiorate
  modified_base 3: mod_base = OTHER; note = 2'-Omethyluridine
  modified_base 4: mod_base = OTHER; note = 2'-Omethyluridine
  modified_base 5: mod_base = OTHER; note = 2'-Omethylcytosine
  modified_base 6: mod_base = OTHER; note = 2'-Omethylguanosine
  modified_base 10: mod_base = OTHER; note = 2'-Omethylguanosine
  modified_base 11: mod_base = OTHER; note = 2'-Omethylcytosine
  modified_base 12: mod_base = OTHER; note = 2'-Omethyluridine
  modified_base 13: mod_base = OTHER; note = 2'-Omethylcytosine
  modified_base 14: mod_base = OTHER; note = 2'-Omethyladenosine
  modified_base 15: mod_base = OTHER; note = 2'-fluoroguanosine
  modified_base 16: mod_base = OTHER; note = 2'-Omethyluridine
  modified_base 18: mod_base = OTHER; note = 2'-Omethylguanosine
  modified_base 19: mod_base = OTHER; note = 2'-Omethylguanosine
  modified_base 20: mod_base = OTHER; note = 2'-fluorouridine
  modified_base 22: mod_base = OTHER; note = 2'-Omethylguanosine
  modified_base 23: mod_base = OTHER; note = 2'-Omethyladenosine
  modified_base 24: mod_base = OTHER; note = 2'-Omethylguanosine
  modified_base 25: mod_base = OTHER; note = 2'-Omethylcytosine
  modified_base 33: mod_base = OTHER; note = 2'-fluorouridine
  modified_base 35: mod_base = OTHER; note = Uridine phosphorothiorate
  modified_base 37: mod_base = OTHER; note = Guanosine phosphorothiorate
  modified_base 38: mod_base = OTHER; note = Adenosine phosphorothiorate
  modified_base 49: mod_base = OTHER; note = 2'-Omethylguanosine
  modified_base 50: mod_base = OTHER; note = 2'-Omethylcytosine
  modified_base 51: mod_base = OTHER; note = 2'-Omethyluridine
  modified_base 52: mod_base = OTHER; note = 2'-Omethylguanosine
  modified_base 53: mod_base = OTHER; note = 2'-Omethylguanosine
  modified_base 54: mod_base = OTHER; note = 2'-Omethyluridine
  modified_base 56: mod_base = OTHER; note = 2'-Omethylcytosine
  modified_base 59: mod_base = OTHER; note = 2'-Omethyladenosine
  modified_base 61: mod_base = OTHER; note = 2'-Omethylcytosine
  modified_base 62: mod_base = OTHER; note = 2'-Omethylcytosine
  modified_base 63: mod_base = OTHER; note = 2'-fluoroguanosine
  modified_base 64: mod_base = OTHER; note = 2'-Omethylguanosine
  modified_base 65: mod_base = OTHER; note = 2'-Omethylcytosine
  modified_base 66: mod_base = OTHER; note = 2'-Omethyluridine
  modified_base 67: mod_base = OTHER; note = 2'-Omethylcytosine
  modified_base 68: mod_base = OTHER; note = 2'-Omethylguanosine
  modified_base 73: mod_base = OTHER; note = 2'-Omethyladenosine

SEQ ID NO: 6384 - RNA, 85 nt, synthetic construct; identical to SEQ ID NO: 3317
  source 1..85: mol_type = other RNA
  modified_base 1: mod_base = OTHER; note = 2'-Omethylguanosine phosphorothiorate
  modified_base 2: mod_base = OTHER; note = Cytosine phosphorothiorate
  modified_base 18: mod_base = OTHER; note = 2'-Omethylguanosine
  modified_base 30: mod_base = OTHER; note = Guanosine phosphorothiorate
  modified_base 37: mod_base = OTHER; note = Adenosine phosphorothiorate
  modified_base 48: mod_base = OTHER; note = 2'-Omethylguanosine phosphorothiorate
  modified_base 52: mod_base = OTHER; note = 2'-Omethylcytosine phosphorothiorate
  modified_base 62: mod_base = OTHER; note = 2'-Omethylguanosine
  modified_base 82: mod_base = OTHER; note = 2'-fluoroguanosine

SEQ ID NO: 6385 - RNA, 76 nt, synthetic construct; identical to SEQ ID NO: 625
  source 1..76: mol_type = other RNA
  modified_base 1: mod_base = OTHER; note = 2'-fluoroguanosine
  modified_base 3: mod_base = OTHER; note = 2'-Omethylcytosine
  modified_base 6: mod_base = OTHER; note = 2'-fluorocytosine phosphorothiorate
  modified_base 7: mod_base = OTHER; note = Guanosine phosphorothiorate
  modified_base 10: mod_base = OTHER; note = 2'-Omethylguanosine
  modified_base 11: mod_base = OTHER; note = 2'-fluorocytosine phosphorothiorate
  modified_base 21: mod_base = OTHER; note = Adenosine phosphorothiorate
  modified_base 23: mod_base = OTHER; note = 2'-Omethylcytosine
  modified_base 24: mod_base = OTHER; note = 2'-Omethylguanosine
  modified_base 27: mod_base = OTHER; note = 2'-Omethyluridine
  modified_base 31: mod_base = OTHER; note = 2'-fluoroadenosine
  modified_base 38: mod_base = OTHER; note = 2'-fluoroadenosine
  modified_base 39: mod_base = OTHER; note = 2'-Omethyluridine
  modified_base 40: mod_base = OTHER; note = Uridine phosphorothiorate
  modified_base 44: mod_base = OTHER; note = 2'-fluoroadenosine phosphorothiorate
  modified_base 45: mod_base = OTHER; note = 2'-Omethylguanosine
  modified_base 49: mod_base = OTHER; note = 2'-fluorocytosine
  modified_base 52: mod_base = OTHER; note = Guanosine phosphorothiorate
  modified_base 53: mod_base = OTHER; note = 2'-fluoroguanosine
  modified_base 54: mod_base = OTHER; note = 2'-Omethyluridine
  modified_base 58: mod_base = OTHER; note = 2'-fluoroadenosine phosphorothiorate
  modified_base 59: mod_base = OTHER; note = 2'-fluoroguanosine
  modified_base 62: mod_base = OTHER; note = 2'-Omethylcytosine
  modified_base 63: mod_base = OTHER; note = 2'-Omethylcytosine
  modified_base 64: mod_base = OTHER; note = Guanosine phosphorothiorate
  modified_base 67: mod_base = OTHER; note = 2'-fluoroguanosine
  modified_base 68: mod_base = OTHER; note = 2'-fluoroguanosine phosphorothiorate
  modified_base 69: mod_base = OTHER; note = 2'-Omethyladenosine
  modified_base 71: mod_base = OTHER; note = 2'-Omethyluridine phosphorothiorate
  modified_base 72: mod_base = OTHER; note = 2'-Omethylcytosine
  modified_base 76: mod_base = OTHER; note = 2'-fluoroadenosine

SEQ ID NO: 6386 - RNA, 76 nt, synthetic construct; identical to SEQ ID NO: 625
  source 1..76: mol_type = other RNA
  modified_base 1: mod_base = OTHER; note = 2'-Omethylguanosine
  modified_base 17: mod_base = OTHER; note = 2'-Omethylguanosine
  modified_base 18: mod_base = OTHER; note = 2'-Omethylguanosine
  modified_base 33: mod_base = OTHER; note = Thymine
  modified_base 50: mod_base = OTHER; note = 2'-Omethylcytosine
  modified_base 52: mod_base = OTHER; note = 2'-Omethylguanosine
  modified_base 73: mod_base = OTHER; note = 2'-Omethylguanosine

SEQ ID NO: 6387 - RNA, 75 nt, synthetic construct; identical to SEQ ID NO: 3336
  source 1..75: mol_type = other RNA
  modified_base 1: mod_base = OTHER; note = 2'-fluorocytosine phosphorothiorate
  modified_base 3: mod_base = OTHER; note = 2'-Omethyluridine
  modified_base 14: mod_base = OTHER; note = 2'-fluoroguanosine
  modified_base 21: mod_base = OTHER; note = 2'-fluoroguanosine phosphorothiorate
  modified_base 25: mod_base = OTHER; note = 2'-fluoroadenosine
  modified_base 26: mod_base = OTHER; note = 2'-fluorouridine
  modified_base 42: mod_base = OTHER; note = 2'-fluoroadenosine phosphorothiorate
  modified_base 46: mod_base = OTHER; note = 2'-fluorouridine
  modified_base 48: mod_base = OTHER; note = Cytosine phosphorothiorate
  modified_base 52: mod_base = OTHER; note = Guanosine phosphorothiorate
  modified_base 58: mod_base = OTHER; note = 2'-fluoroguanosine phosphorothiorate
  modified_base 59: mod_base = OTHER; note = 2'-fluorouridine phosphorothiorate
  modified_base 60: mod_base = OTHER; note = 2'-fluorocytosine phosphorothiorate
  modified_base 68: mod_base = OTHER; note = 2'-fluoroadenosine phosphorothiorate
  modified_base 71: mod_base = OTHER; note = Cytosine phosphorothiorate
  modified_base 74: mod_base = OTHER; note = Cytosine phosphorothiorate

SEQ ID NO: 6388 - RNA, 85 nt, synthetic construct; identical to SEQ ID NO: 3288
  source 1..85: mol_type = other RNA
  modified_base 1: mod_base = OTHER; note = 2'-Omethylcytosine
  modified_base 3: mod_base = OTHER; note = 2'-fluoroadenosine phosphorothiorate
  modified_base 12: mod_base = OTHER; note = Guanosine phosphorothiorate
  modified_base 14: mod_base = OTHER; note = 2'-fluoroguanosine phosphorothiorate
  modified_base 30: mod_base = OTHER; note = 2'-fluoroadenosine
  modified_base 34: mod_base = OTHER; note = 2'-fluorocytosine
  modified_base 36: mod_base = OTHER; note = Guanosine phosphorothiorate
  modified_base 47: mod_base = OTHER; note = 2'-fluorocytosine phosphorothiorate
  modified_base 52: mod_base = OTHER; note = 2'-Omethylguanosine
  modified_base 54: mod_base = OTHER; note = 2'-Omethylcytosine
  modified_base 58: mod_base = OTHER; note = 2'-Omethylguanosine
  modified_base 69: mod_base = OTHER; note = 2'-Omethylcytosine
  modified_base 76: mod_base = OTHER; note = 2'-fluorocytosine
  modified_base 84: mod_base = OTHER; note = 2'-fluorocytosine

SEQ ID NO: 6389 - RNA, 85 nt, synthetic construct; identical to SEQ ID NO: 3288
  source 1..85: mol_type = other RNA
  modified_base 1: mod_base = OTHER; note = 2'-Omethylcytosine
  modified_base 11: mod_base = OTHER; note = Cytosine phosphorothiorate
  modified_base 27: mod_base = OTHER; note = Uridine phosphorothiorate
  modified_base 43: mod_base = OTHER; note = Uridine phosphorothiorate
  modified_base 49: mod_base = OTHER; note = 2'-Omethyluridine
  modified_base 51: mod_base = OTHER; note = 2'-Omethyluridine
  modified_base 58: mod_base = OTHER; note = 2'-fluoroguanosine
  modified_base 72: mod_base = OTHER; note = 2'-fluorocytosine

SEQ ID NO: 6390 - RNA, 75 nt, synthetic construct; identical to SEQ ID NO: 3311
  source 1..75: mol_type = other RNA
  modified_base 1: mod_base = OTHER; note = 2'-Omethylguanosine phosphorothiorate
  modified_base 2: mod_base = OTHER; note = 2'-Omethylguanosine phosphorothiorate
  modified_base 11: mod_base = OTHER; note = 2'-fluorouridine
  modified_base 12: mod_base = OTHER; note = Guanosine phosphorothiorate
  modified_base 13: mod_base = OTHER; note = Uridine phosphorothiorate
  modified_base 19: mod_base = OTHER; note = 2'-fluorouridine
  modified_base 23: mod_base = OTHER; note = 2'-fluorocytosine
  modified_base 39: mod_base = OTHER; note = 2'-fluorouridine
  modified_base 45: mod_base = OTHER; note = 2'-fluoroguanosine
  modified_base 66: mod_base = OTHER; note = 2'-fluoroguanosine
  modified_base 67: mod_base = OTHER; note = 2'-fluoroguanosine
  modified_base 72: mod_base = OTHER; note = Uridine phosphorothiorate
  modified_base 73: mod_base = OTHER; note = Cytosine phosphorothiorate

SEQ ID NO: 6391 - RNA, 76 nt, synthetic construct; identical to SEQ ID NO: 625
  source 1..76: mol_type = other RNA
  modified_base 1: mod_base = OTHER; note = 2'-Omethylguanosine phosphorothiorate
  modified_base 2: mod_base = OTHER; note = 2'-Omethylguanosine phosphorothiorate
  modified_base 3: mod_base = OTHER; note = 2'-Omethylcytosine
  modified_base 4: mod_base = OTHER; note = 2'-Omethyluridine
  modified_base 5: mod_base = OTHER; note = 2'-Omethylcytosine
  modified_base 6: mod_base = OTHER; note = 2'-Omethylcytosine
  modified_base 14: mod_base = OTHER; note = 2'-Omethyladenosine
  modified_base 15: mod_base = OTHER; note = 2'-Omethyladenosine
  modified_base 16: mod_base = OTHER; note = 2'-Omethyluridine
  modified_base 17: mod_base = OTHER; note = 2'-Omethylguanosine
  modified_base 18: mod_base = OTHER; note = 2'-Omethylguanosine
  modified_base 20: mod_base = OTHER; note = 2'-Omethyluridine
  modified_base 22: mod_base = OTHER; note = 2'-Omethylguanosine
  modified_base 23: mod_base = OTHER; note = 2'-Omethylcytosine
  modified_base 24: mod_base = OTHER; note = 2'-Omethylguanosine
  modified_base 25: mod_base = OTHER; note = 2'-Omethylcytosine
  modified_base 33: mod_base = OTHER; note = 2'-fluorouridine
  modified_base 35: mod_base = OTHER; note = Cytosine phosphorothiorate
  modified_base 37: mod_base = OTHER; note = Adenosine phosphorothiorate
  modified_base 38: mod_base = OTHER; note = Adenosine phosphorothiorate
  modified_base 41: mod_base = OTHER; note = 2'-Omethylcytosine
  modified_base 42: mod_base = OTHER; note = 2'-Omethyladenosine
  modified_base 43: mod_base = OTHER; note = 2'-Omethyladenosine
  modified_base 44: mod_base = OTHER; note = 2'-Omethyladenosine
  modified_base 49: mod_base = OTHER; note = 2'-Omethylcytosine
  modified_base 50: mod_base = OTHER; note = 2'-Omethylcytosine
  modified_base 52: mod_base = OTHER; note = 2'-Omethylguanosine
  modified_base 54: mod_base = OTHER; note = 2'-Omethyluridine
  modified_base 55: mod_base = OTHER; note = Uridine phosphorothiorate
  modified_base 56: mod_base = OTHER; note = 2'-Omethylcytosine
  modified_base 57: mod_base = OTHER; note = 2'-fluoroguanosine
  modified_base 59: mod_base = OTHER; note = 2'-Omethylguanosine
  modified_base 61: mod_base = OTHER; note = 2'-Omethylcytosine
  modified_base 62: mod_base = OTHER; note = 2'-Omethylcytosine
  modified_base 63: mod_base = OTHER; note = 2'-fluorocytosine
  modified_base 64: mod_base = OTHER; note = 2'-Omethylguanosine
  modified_base 65: mod_base = OTHER; note = 2'-Omethylguanosine
  modified_base 74: mod_base = OTHER; note = Cytosine phosphorothiorate
  modified_base 75: mod_base = OTHER; note = 2'-Omethylcytosine phosphorothiorate
  modified_base 76: mod_base = OTHER; note = 2'-Omethyladenosine

SEQ ID NO: 6392 - RNA, 85 nt, synthetic construct; identical to SEQ ID NO: 3286
  source 1..85: mol_type = other RNA
  modified_base 1: mod_base = OTHER; note = Cytosine phosphorothiorate
  modified_base 3: mod_base = OTHER; note = 2'-fluoroadenosine
  modified_base 6: mod_base = OTHER; note = 2'-fluoroadenosine phosphorothiorate
  modified_base 20: mod_base = OTHER; note = 2'-fluoroadenosine
  modified_base 26: mod_base = OTHER; note = 2'-fluorouridine phosphorothiorate
  modified_base 28: mod_base = OTHER; note = 2'-fluoroguanosine
  modified_base 33: mod_base = OTHER; note = 2'-fluorouridine
  modified_base 34: mod_base = OTHER; note = Uridine phosphorothiorate
  modified_base 37: mod_base = OTHER; note = 2'-fluoroadenosine phosphorothiorate
  modified_base 42: mod_base = OTHER; note = Adenosine phosphorothiorate
  modified_base 51: mod_base = OTHER; note = 2'-Omethyluridine
  modified_base 55: mod_base = OTHER; note = 2'-Omethylcytosine
  modified_base 57: mod_base = OTHER; note = 2'-Omethylcytosine
  modified_base 65: mod_base = OTHER; note = Cytosine phosphorothiorate
  modified_base 71: mod_base = OTHER; note = 2'-fluorocytosine
  modified_base 73: mod_base = OTHER; note = 2'-fluoroadenosine
  modified_base 75: mod_base = OTHER; note = Uridine phosphorothiorate
  modified_base 77: mod_base = OTHER; note = 2'-fluorocytosine
  modified_base 83: mod_base = OTHER; note = Cytosine phosphorothiorate
  modified_base 84: mod_base = OTHER; note = 2'-Omethylcytosine

SEQ ID NO: 6393 - RNA, 85 nt, synthetic construct; identical to SEQ ID NO: 3301
  source 1..85: mol_type = other RNA
  modified_base 1: mod_base = OTHER; note = 2'-Omethylguanosine phosphorothiorate
  modified_base 2: mod_base = OTHER; note = 2'-Omethylcytosine
  modified_base 3: mod_base = OTHER; note = 2'-Omethyluridine phosphorothiorate
  modified_base 4: mod_base = OTHER; note = 2'-Omethylguanosine phosphorothiorate
  modified_base 8: mod_base = OTHER; note = 2'-fluorouridine
  modified_base 9: mod_base = OTHER; note = 2'-fluoroguanosine
  modified_base 16: mod_base = OTHER; note = 2'-Omethyluridine phosphorothiorate
  modified_base 23: mod_base = OTHER; note = 2'-fluoroguanosine
  modified_base 24: mod_base = OTHER; note = Guanosine phosphorothiorate
  modified_base 26: mod_base = OTHER; note = 2'-fluoroguanosine
  modified_base 39: mod_base = OTHER; note = Uridine phosphorothiorate
  modified_base 48: mod_base = OTHER; note = Guanosine phosphorothiorate
  modified_base 54: mod_base = OTHER; note = 2'-Omethylcytosine
  modified_base 56: mod_base = OTHER; note = 2'-Omethylguanosine
  modified_base 58: mod_base = OTHER; note = 2'-Omethylguanosine phosphorothiorate
  modified_base 61: mod_base = OTHER; note = 2'-fluoroguanosine phosphorothiorate
  modified_base 68: mod_base = OTHER; note = 2'-fluoroadenosine
  modified_base 72: mod_base = OTHER; note = 2'-fluorouridine
  modified_base 82: mod_base = OTHER; note = Guanosine phosphorothiorate

SEQ ID NO: 6394 - RNA, 76 nt, synthetic construct; identical to SEQ ID NO: 3329
  source 1..76: mol_type = other RNA
  modified_base 1: mod_base = OTHER; note = 2'-Omethylguanosine phosphorothiorate
  modified_base 2: mod_base = OTHER; note = 2'-Omethylguanosine phosphorothiorate
  modified_base 3: mod_base = OTHER; note = 2'-Omethylcytosine
  modified_base 4: mod_base = OTHER; note = 2'-Omethylcytosine
  modified_base 5: mod_base = OTHER; note = 2'-Omethylcytosine
  modified_base 6: mod_base = OTHER; note = 2'-Omethylcytosine
  modified_base 10: mod_base = OTHER; note = 2'-Omethylguanosine
  modified_base 11: mod_base = OTHER; note = 2'-Omethylcytosine
  modified_base 12: mod_base = OTHER; note = 2'-Omethylguanosine
  modified_base 13: mod_base = OTHER; note = 2'-Omethylcytosine
  modified_base 22: mod_base = OTHER; note = 2'-Omethylguanosine
  modified_base 23: mod_base = OTHER; note = 2'-Omethylcytosine
  modified_base 24: mod_base = OTHER; note = 2'-Omethylguanosine
  modified_base 25: mod_base = OTHER; note = 2'-Omethylcytosine
  modified_base 49: mod_base = OTHER; note = 2'-Omethylcytosine
  modified_base 50: mod_base = OTHER; note = 2'-Omethylcytosine
  modified_base 51: mod_base = OTHER; note = 2'-Omethylguanosine
  modified_base 52: mod_base = OTHER; note = 2'-Omethylguanosine
  modified_base 53: mod_base = OTHER; note = 2'-Omethylguanosine
  modified_base 54: mod_base = OTHER; note = 2'-Omethyluridine
  modified_base 61: mod_base = OTHER; note = 2'-Omethylcytosine
  modified_base 62: mod_base = OTHER; note = 2'-Omethylcytosine
  modified_base 63: mod_base = OTHER; note = 2'-fluorocytosine
  modified_base 64: mod_base = OTHER; note = 2'-Omethylguanosine
  modified_base 65: mod_base = OTHER; note = 2'-Omethylguanosine
  modified_base 66: mod_base = OTHER; note = 2'-Omethyluridine
  modified_base 67: mod_base = OTHER; note = 2'-Omethylguanosine
  modified_base 68: mod_base = OTHER; note = 2'-Omethylguanosine
  modified_base 73: mod_base = OTHER; note = 2'-Omethylguanosine

SEQ ID NO: 6395 - RNA, 74 nt, synthetic construct; identical to SEQ ID NO: 3293
  source 1..74: mol_type = other RNA
  modified_base 1: mod_base = OTHER; note = 2'-fluoroadenosine phosphorothiorate
  modified_base 2: mod_base = OTHER; note = 2'-Omethylcytosine
  modified_base 7: mod_base = OTHER; note = Uridine phosphorothiorate
  modified_base 9: mod_base = OTHER; note = 2'-Omethylguanosine phosphorothiorate
  modified_base 15: mod_base = OTHER; note = 2'-fluorocytosine
  modified_base 25: mod_base = OTHER; note = Uridine phosphorothiorate
  modified_base 34: mod_base = OTHER; note = 2'-fluoroadenosine
  modified_base 44: mod_base = OTHER; note = Guanosine phosphorothiorate
  modified_base 48: mod_base = OTHER; note = 2'-fluorocytosine
  modified_base 60: mod_base = OTHER; note = 2'-fluoroadenosine
  modified_base 73: mod_base = OTHER; note = 2'-Omethylcytosine phosphorothiorate

SEQ ID NO: 6396 - RNA, 75 nt, synthetic construct; identical to SEQ ID NO: 1045
  source 1..75: mol_type = other RNA
  modified_base 1: mod_base = OTHER; note = 2'-Omethylguanosine
  modified_base 11: mod_base = OTHER; note = Uridine phosphorothiorate
  modified_base 14: mod_base = OTHER; note = 2'-Omethyladenosine
  modified_base 16: mod_base = OTHER; note = 2'-Omethyluridine phosphorothiorate
  modified_base 17: mod_base = OTHER; note = 2'-Omethylguanosine phosphorothiorate
  modified_base 27: mod_base = OTHER; note = 2'-Omethylcytosine
  modified_base 40: mod_base = OTHER; note = 2'-fluorocytosine phosphorothiorate
  modified_base 43: mod_base = OTHER; note = 2'-fluoroguanosine phosphorothiorate
  modified_base 44: mod_base = OTHER; note = 2'-fluorocytosine phosphorothiorate
  modified_base 45: mod_base = OTHER; note = 2'-Omethylguanosine
  modified_base 62: mod_base = OTHER; note = 2'-Omethylcytosine phosphorothiorate
  modified_base 66: mod_base = OTHER; note = 2'-fluoroguanosine phosphorothiorate
  modified_base 72: mod_base = OTHER; note = 2'-Omethyluridine
  modified_base 74: mod_base = OTHER; note = 2'-Omethylcytosine phosphorothiorate

SEQ ID NO: 6397 - RNA, 85 nt, synthetic construct; identical to SEQ ID NO: 3317
  source 1..85: mol_type = other RNA
  modified_base 1: mod_base = OTHER; note = 2'-Omethylguanosine phosphorothiorate
  modified_base 2: mod_base = OTHER; note = 2'-Omethylcytosine
  modified_base 10: mod_base = OTHER; note = 2'-fluoroguanosine
  modified_base 22: mod_base = OTHER; note = 2'-Omethyladenosine
  modified_base 27: mod_base = OTHER; note = 2'-fluorouridine
  modified_base 35: mod_base = OTHER; note = 2'-fluorouridine
  modified_base 82: mod_base = OTHER; note = 2'-Omethylguanosine phosphorothiorate

SEQ ID NO: 6398 - RNA, 76 nt, synthetic construct; identical to SEQ ID NO: 625
  source 1..76: mol_type = other RNA
  modified_base 47: mod_base = OTHER; note = Thymine
  modified_base 48: mod_base = OTHER; note = Thymine

SEQ ID NO: 6399 - RNA, 75 nt, synthetic construct; identical to SEQ ID NO: 3306
  source 1..75: mol_type = other RNA
  modified_base 1: mod_base = OTHER; note = 2'-Omethylguanosine phosphorothiorate
  modified_base 2: mod_base = OTHER; note = 2'-Omethyladenosine phosphorothiorate
  modified_base 73: mod_base = OTHER; note = 2'-Omethylcytosine phosphorothiorate
  modified_base 74: mod_base = OTHER; note = 2'-Omethylcytosine phosphorothiorate
  modified_base 75: mod_base = OTHER; note = 2'-Omethyladenosine

SEQ ID NO: 6400 - RNA, 74 nt, synthetic construct; identical to SEQ ID NO: 3293
  source 1..74: mol_type = other RNA
  modified_base 1: mod_base = OTHER; note = 2'-fluoroadenosine
  modified_base 2: mod_base = OTHER; note = 2'-fluorocytosine
  modified_base 4: mod_base = OTHER; note = 2'-fluorouridine
  modified_base 6: mod_base = OTHER; note = 2'-fluoroguanosine
  modified_base 9: mod_base = OTHER; note = 2'-fluoroguanosine
  modified_base 24: mod_base = OTHER; note = Guanosine phosphorothiorate
  modified_base 27: mod_base = OTHER; note = 2'-fluorouridine phosphorothiorate
  modified_base 33: mod_base = OTHER; note = 2'-Omethyluridine phosphorothiorate
  modified_base 43: mod_base = OTHER; note = 2'-fluoroguanosine phosphorothiorate
  modified_base 44: mod_base = OTHER; note = Guanosine phosphorothiorate
  modified_base 48: mod_base = OTHER; note = Cytosine phosphorothiorate
  modified_base 50: mod_base = OTHER; note = Uridine phosphorothiorate
  modified_base 52: mod_base = OTHER; note = 2'-fluorouridine
  modified_base 57: mod_base = OTHER; note = 2'-fluoroadenosine phosphorothiorate
  modified_base 62: mod_base = OTHER; note = Guanosine phosphorothiorate
  modified_base 73: mod_base = OTHER; note = 2'-Omethylcytosine phosphorothiorate

SEQ ID NO: 6401 - RNA, 76 nt, synthetic construct; identical to SEQ ID NO: 3342
  source 1..76: mol_type = other RNA

SEQ ID NO: 6402 - RNA, 75 nt, synthetic construct; identical to SEQ ID NO: 1045
  source 1..75: mol_type = other RNA
  modified_base 1: mod_base = OTHER; note = 2'-Omethylguanosine phosphorothiorate
  modified_base 4: mod_base = OTHER; note = 2'-Omethyluridine phosphorothiorate
  modified_base 5: mod_base = OTHER; note = 2'-Omethylcytosine
  modified_base 22: mod_base = OTHER; note = Guanosine phosphorothiorate
  modified_base 23: mod_base = OTHER; note = 2'-fluorocytosine
  modified_base 24: mod_base = OTHER; note = 2'-fluoroadenosine
  modified_base 26: mod_base = OTHER; note = Uridine phosphorothiorate
  modified_base 35: mod_base = OTHER; note = 2'-fluorouridine
  modified_base 45: mod_base = OTHER; note = 2'-Omethylguanosine phosphorothiorate
  modified_base 48: mod_base = OTHER; note = 2'-fluorocytosine
  modified_base 52: mod_base = OTHER; note = Guanosine phosphorothiorate
  modified_base 54: mod_base = OTHER; note = 2'-fluorouridine phosphorothiorate
  modified_base 66: mod_base = OTHER; note = 2'-fluoroguanosine
  modified_base 67: mod_base = OTHER; note = 2'-fluoroguanosine
  modified_base 74: mod_base = OTHER; note = Cytosine phosphorothiorate

SEQ ID NO: 6403 - RNA, 75 nt, synthetic construct; identical to SEQ ID NO: 3299
  source 1..75: mol_type = other RNA
  modified_base 1: mod_base = OTHER; note = Cytosine phosphorothiorate
  modified_base 8: mod_base = OTHER; note = Adenosine phosphorothiorate
  modified_base 13: mod_base = OTHER; note = Adenosine phosphorothiorate
  modified_base 14: mod_base = OTHER; note = 2'-Omethylguanosine phosphorothiorate
  modified_base 16: mod_base = OTHER; note = 2'-Omethylcytosine
  modified_base 20: mod_base = OTHER; note = 2'-fluoroadenosine
  modified_base 25: mod_base = OTHER; note = 2'-fluoroadenosine
  modified_base 27: mod_base = OTHER; note = 2'-Omethylcytosine
  modified_base 28: mod_base = OTHER; note = 2'-fluoroadenosine
  modified_base 35: mod_base = OTHER; note = 2'-fluoroadenosine phosphorothiorate
  modified_base 37: mod_base = OTHER; note = 2'-fluoroadenosine
  modified_base 39: mod_base = OTHER; note = 2'-fluorocytosine
  modified_base 46: mod_base = OTHER; note = 2'-fluorouridine
  modified_base 47: mod_base = OTHER; note = Cytosine phosphorothiorate
  modified_base 48: mod_base = OTHER; note = Cytosine phosphorothiorate
  modified_base 54: mod_base = OTHER; note = Uridine phosphorothiorate
  modified_base 64: mod_base = OTHER; note = 2'-fluoroguanosine phosphorothiorate
  modified_base 70: mod_base = OTHER; note = 2'-fluoroguanosine
  modified_base 73: mod_base = OTHER; note = Cytosine phosphorothiorate
  modified_base 74: mod_base = OTHER; note = 2'-Omethylcytosine

SEQ ID NO: 6404 - RNA, 76 nt, synthetic construct; identical to SEQ ID NO: 625
  source 1..76: mol_type = other RNA
  modified_base 1: mod_base = OTHER; note = 2'-Omethylguanosine phosphorothiorate
  modified_base 2: mod_base = OTHER; note = 2'-Omethylguanosine
  modified_base 33: mod_base = OTHER; note = 2'-fluorouridine
  modified_base 35: mod_base = OTHER; note = Cytosine phosphorothiorate
  modified_base 37: mod_base = OTHER; note = Adenosine phosphorothiorate
  modified_base 52: mod_base = OTHER; note = 2'-Omethylguanosine
  modified_base 57: mod_base = OTHER; note = 2'-Omethylguanosine
  modified_base 62: mod_base = OTHER; note = 2'-Omethylcytosine
  modified_base 73: mod_base = OTHER; note = 2'-Omethylguanosine
  modified_base 75: mod_base = OTHER; note = 2'-fluorocytosine phosphorothiorate
  modified_base 76: mod_base = OTHER; note = 2'-Omethyladenosine

SEQ ID NO: 6405 - RNA, 76 nt, synthetic construct; identical to SEQ ID NO: 3289
  source 1..76: mol_type = other RNA
  modified_base 1: mod_base = OTHER; note = 2'-Omethylguanosine phosphorothiorate
  modified_base 2: mod_base = OTHER; note = 2'-Omethylcytosine phosphorothiorate
  modified_base 8: mod_base = OTHER; note = Uridine phosphorothiorate
  modified_base 14: mod_base = OTHER; note = 2'-Omethyladenosine
  modified_base 18: mod_base = OTHER; note = 2'-Omethylguanosine
  modified_base 19: mod_base = OTHER; note = 2'-Omethylguanosine
  modified_base 22: mod_base = OTHER; note = 2'-Omethylguanosine
  modified_base 25: mod_base = OTHER; note = 2'-Omethylcytosine
  modified_base 27: mod_base = OTHER; note = 2'-Omethyluridine
  modified_base 33: mod_base = OTHER; note = 2'-fluorouridine
  modified_base 41: mod_base = OTHER; note = 2'-Omethyluridine phosphorothiorate
  modified_base 44: mod_base = OTHER; note = 2'-Omethylguanosine phosphorothiorate
  modified_base 45: mod_base = OTHER; note = 2'-Omethylguanosine
  modified_base 46: mod_base = OTHER; note = 2'-fluoroguanosine
  modified_base 47: mod_base = OTHER; note = 2'-fluorouridine
  modified_base 48: mod_base = OTHER; note = 2'-fluorocytosine
  modified_base 55: mod_base = OTHER; note = Uridine phosphorothiorate
  modified_base 71: mod_base = OTHER; note = 2'-Omethylguanosine
  modified_base 73: mod_base = OTHER; note = 2'-Omethylguanosine

SEQ ID NO: 6406 - RNA, 85 nt, synthetic construct; identical to SEQ ID NO: 3288
  source 1..85: mol_type = other RNA
  modified_base 1: mod_base = OTHER; note = 2'-fluorocytosine
  modified_base 3: mod_base = OTHER; note = 2'-fluoroadenosine
  modified_base 25: mod_base = OTHER; note = Guanosine phosphorothiorate
  modified_base 26: mod_base = OTHER; note = 2'-fluorouridine
  modified_base 33: mod_base = OTHER; note = 2'-fluorouridine
  modified_base 43: mod_base = OTHER; note = 2'-Omethyluridine
  modified_base 46: mod_base = OTHER; note = Adenosine phosphorothiorate
  modified_base 47: mod_base = OTHER; note = 2'-fluorocytosine
  modified_base 50: mod_base = OTHER; note = 2'-Omethyladenosine
  modified_base 53: mod_base = OTHER; note = 2'-Omethyluridine
  modified_base 56: mod_base = OTHER; note = 2'-fluoroguanosine
  modified_base 57: mod_base = OTHER; note = 2'-Omethylcytosine
  modified_base 61: mod_base = OTHER; note = Guanosine phosphorothiorate
  modified_base 66: mod_base = OTHER; note = Guanosine phosphorothiorate
  modified_base 73: mod_base = OTHER; note = 2'-fluoroadenosine
  modified_base 77: mod_base = OTHER; note = 2'-Omethylcytosine phosphorothiorate
  modified_base 85: mod_base = OTHER; note = 2'-fluoroadenosine

SEQ ID NO: 6407 - RNA, 76 nt, synthetic construct
  source 1..76: mol_type = other RNA
ggctccgtggcgcaatggacagcgcataggacttcaaattctaaggttccgggttcgagtcccggcggagtcgcca

SEQ ID NO: 6408 - RNA, 76 nt, synthetic construct; identical to SEQ ID NO: 625
  source 1..76: mol_type = other RNA
  modified_base 1: mod_base = OTHER; note = 2'-Omethylguanosine phosphorothiorate
  modified_base 2: mod_base = OTHER; note = 2'-Omethylguanosine phosphorothiorate
  modified_base 3: mod_base = OTHER; note = 2'-Omethylcytosine
  modified_base 4: mod_base = OTHER; note = 2'-Omethyluridine
  modified_base 5: mod_base = OTHER; note = 2'-Omethylcytosine
  modified_base 6: mod_base = OTHER; note = 2'-Omethylcytosine
  modified_base 10: mod_base = OTHER; note = 2'-Omethylguanosine
  modified_base 11: mod_base = OTHER; note = 2'-Omethylcytosine
  modified_base 12: mod_base = OTHER; note = 2'-Omethylguanosine
  modified_base 13: mod_base = OTHER; note = 2'-Omethylcytosine
  modified_base 14: mod_base = OTHER; note = 2'-Omethyladenosine
  modified_base 15: mod_base = OTHER; note = 2'-Omethyladenosine
  modified_base 16: mod_base = OTHER; note = 2'-Omethyluridine
  modified_base 17: mod_base = OTHER; note = 2'-Omethylguanosine
  modified_base 18: mod_base = OTHER; note = 2'-Omethylguanosine
  modified_base 20: mod_base = OTHER; note = 2'-Omethyluridine
  modified_base 22: mod_base = OTHER; note = 2'-Omethylguanosine
  modified_base 23: mod_base = OTHER; note = 2'-Omethylcytosine
  modified_base 24: mod_base = OTHER; note = 2'-Omethylguanosine
  modified_base 25: mod_base = OTHER; note = 2'-Omethylcytosine
  modified_base 33: mod_base = OTHER; note = 2'-fluorouridine
  modified_base 35: mod_base = OTHER; note = Cytosine phosphorothiorate
  modified_base 37: mod_base = OTHER; note = Adenosine phosphorothiorate
  modified_base 38: mod_base = OTHER; note = Adenosine phosphorothiorate
  modified_base 49: mod_base = OTHER; note = 2'-Omethylcytosine
  modified_base 50: mod_base = OTHER; note = 2'-Omethylcytosine
  modified_base 52: mod_base = OTHER; note = 2'-Omethylguanosine
  modified_base 54: mod_base = OTHER; note = 2'-Omethyluridine
  modified_base 55: mod_base = OTHER; note = Uridine phosphorothiorate
  modified_base 56: mod_base = OTHER; note = 2'-Omethylcytosine
  modified_base 57: mod_base = OTHER; note = 2'-fluoroguanosine
  modified_base 59: mod_base = OTHER; note = 2'-Omethylguanosine
  modified_base 61: mod_base = OTHER; note = 2'-Omethylcytosine
  modified_base 65: mod_base = OTHER; note = 2'-Omethylguanosine
  modified_base 73: mod_base = OTHER; note = 2'-Omethylguanosine

SEQ ID NO: 6409 - RNA, 73 nt, synthetic construct; identical to SEQ ID NO: 935
  source 1..73: mol_type = other RNA
  modified_base 1: mod_base = OTHER; note = 2'-Omethylguanosine
  modified_base 14: mod_base = OTHER; note = 2'-Omethyladenosine
  modified_base 15: mod_base = OTHER; note = 2'-fluoroadenosine
  modified_base 16: mod_base = OTHER; note = 2'-Omethyluridine
  modified_base 17: mod_base = OTHER; note = 2'-Omethylguanosine
  modified_base 18: mod_base = OTHER; note = 2'-Omethylguanosine
  modified_base 19: mod_base = OTHER; note = 2'-fluoroadenosine
  modified_base 20: mod_base = OTHER; note = 2'-Omethyluridine
  modified_base 73: mod_base = OTHER; note = 2'-Omethylguanosine

SEQ ID NO: 6410 - RNA, 76 nt, synthetic construct; identical to SEQ ID NO: 3289
  source 1..76: mol_type = other RNA
  modified_base 1: mod_base = OTHER; note = 2'-Omethylguanosine phosphorothiorate
  modified_base 2: mod_base = OTHER; note = 2'-Omethylcytosine phosphorothiorate
  modified_base 41: mod_base = OTHER; note = Uridine phosphorothiorate
  modified_base 42: mod_base = OTHER; note = 2'-fluoroguanosine
  modified_base 54: mod_base = OTHER; note = 2'-fluorouridine
  modified_base 69: mod_base = OTHER; note = 2'-fluoroadenosine
  modified_base 74: mod_base = OTHER; note = Cytosine phosphorothiorate
  modified_base 75: mod_base = OTHER; note = 2'-Omethylcytosine

SEQ ID NO: 6411 - RNA, 76 nt, synthetic construct; identical to SEQ ID NO: 3316
  source 1..76: mol_type = other RNA
  modified_base 1: mod_base = OTHER; note = 2'-Omethyladenosine
  modified_base 10: mod_base = OTHER; note = 2'-Omethylguanosine
  modified_base 13: mod_base = OTHER; note = 2'-Omethylcytosine
  modified_base 17: mod_base = OTHER; note = Guanosine phosphorothiorate
  modified_base 18: mod_base = OTHER; note = 2'-Omethylguanosine
  modified_base 19: mod_base = OTHER; note = Adenosine phosphorothiorate
  modified_base 20: mod_base = OTHER; note = 2'-Omethyluridine
  modified_base 25: mod_base = OTHER; note = 2'-Omethylcytosine
  modified_base 29: mod_base = OTHER; note = 2'-Omethylguanosine
  modified_base 33: mod_base = OTHER; note = 2'-fluorouridine
  modified_base 35: mod_base = OTHER; note = Cytosine phosphorothiorate
  modified_base 37: mod_base = OTHER; note = Adenosine phosphorothiorate
  modified_base 38: mod_base = OTHER; note = Adenosine phosphorothiorate
  modified_base 41: mod_base = OTHER; note = 2'-fluorocytosine phosphorothiorate
  modified_base 43: mod_base = OTHER; note = 2'-Omethyladenosine
  modified_base 44: mod_base = OTHER; note = 2'-fluoroadenosine
  modified_base 46: mod_base = OTHER; note = Guanosine phosphorothiorate
  modified_base 50: mod_base = OTHER; note = 2'-Omethylcytosine
  modified_base 52: mod_base = OTHER; note = 2'-Omethylguanosine
  modified_base 54: mod_base = OTHER; note = Uridine phosphorothiorate
  modified_base 55: mod_base = OTHER; note = Uridine phosphorothiorate
  modified_base 56: mod_base = OTHER; note = 2'-Omethylcytosine
  modified_base 57: mod_base = OTHER; note = Guanosine phosphorothiorate
  modified_base 62: mod_base = OTHER; note = 2'-Omethylcytosine
  modified_base 63: mod_base = OTHER; note = 2'-fluorocytosine
  modified_base 65: mod_base = OTHER; note = 2'-Omethylguanosine
  modified_base 71: mod_base = OTHER; note = 2'-Omethylguanosine
  modified_base 73: mod_base = OTHER; note = 2'-Omethylguanosine

SEQ ID NO: 6412 - RNA, 76 nt, synthetic construct; identical to SEQ ID NO: 625
  source 1..76: mol_type = other RNA
  modified_base 1: mod_base = OTHER; note = 2'-fluoroguanosine phosphorothiorate
  modified_base 3: mod_base = OTHER; note = 2'-fluorocytosine
  modified_base 6: mod_base = OTHER; note = 2'-fluorocytosine phosphorothiorate
  modified_base 11: mod_base = OTHER; note = 2'-Omethylcytosine phosphorothiorate
  modified_base 13: mod_base = OTHER; note = 2'-fluorocytosine
  modified_base 16: mod_base = OTHER; note = 2'-fluorouridine phosphorothiorate
  modified_base 24: mod_base = OTHER; note = 2'-fluoroguanosine
  modified_base 26: mod_base = OTHER; note = Adenosine phosphorothiorate
  modified_base 27: mod_base = OTHER; note = 2'-fluorouridine
  modified_base 28: mod_base = OTHER; note = 2'-Omethyluridine
  modified_base 30: mod_base = OTHER; note = 2'-fluoroguanosine phosphorothiorate
  modified_base 31: mod_base = OTHER; note = 2'-fluoroadenosine
  modified_base 33: mod_base = OTHER; note = 2'-fluorouridine
  modified_base 38: mod_base = OTHER; note = 2'-fluoroadenosine
  modified_base 42: mod_base = OTHER; note = Adenosine phosphorothiorate
  modified_base 43: mod_base = OTHER; note = 2'-fluoroadenosine
  modified_base 44: mod_base = OTHER; note = Adenosine phosphorothiorate
  modified_base 45: mod_base = OTHER; note = Guanosine phosphorothiorate
  modified_base 46: mod_base = OTHER; note = 2'-Omethylguanosine
  modified_base 47: mod_base = OTHER; note = 2'-fluorouridine
  modified_base 52: mod_base = OTHER; note = Guanosine phosphorothiorate
  modified_base 53: mod_base = OTHER; note = 2'-Omethylguanosine phosphorothiorate
  modified_base 56: mod_base = OTHER; note = 2'-Omethylcytosine
  modified_base 60: mod_base = OTHER; note = Uridine phosphorothiorate
  modified_base 61: mod_base = OTHER; note = 2'-Omethylcytosine
  modified_base 62: mod_base = OTHER; note = 2'-Omethylcytosine
  modified_base 64: mod_base = OTHER; note = 2'-Omethylguanosine
  modified_base 66: mod_base = OTHER; note = Cytosine phosphorothiorate
  modified_base 70: mod_base = OTHER; note = 2'-fluoroguanosine phosphorothiorate
  modified_base 71: mod_base = OTHER; note = 2'-Omethyluridine
  modified_base 72: mod_base = OTHER; note = 2'-fluorocytosine phosphorothiorate
  modified_base 74: mod_base = OTHER; note = 2'-Omethylcytosine
  modified_base 75: mod_base = OTHER; note = Cytosine phosphorothiorate
  modified_base 76: mod_base = OTHER; note = 2'-Omethyladenosine

SEQ ID NO: 6413 - RNA, 76 nt, synthetic construct; identical to SEQ ID NO: 625
  source 1..76: mol_type = other RNA
  modified_base 10: mod_base = OTHER; note = Guanosine phosphorothiorate
  modified_base 11: mod_base = OTHER; note = Cytosine phosphorothiorate
  modified_base 12: mod_base = OTHER; note = Guanosine phosphorothiorate
  modified_base 13: mod_base = OTHER; note = Cytosine phosphorothiorate

SEQ ID NO: 6414 - RNA, 76 nt, synthetic construct; identical to SEQ ID NO: 625
  source 1..76: mol_type = other RNA
  modified_base 1: mod_base = OTHER; note = 2'-Omethylguanosine phosphorothiorate
  modified_base 2: mod_base = OTHER; note = 2'-Omethylguanosine
  modified_base 3: mod_base = OTHER; note = 2'-Omethylcytosine
  modified_base 4: mod_base = OTHER; note = 2'-Omethyluridine
  modified_base 5: mod_base = OTHER; note = 2'-Omethylcytosine
  modified_base 6: mod_base = OTHER; note = 2'-Omethylcytosine
  modified_base 10: mod_base = OTHER; note = 2'-Omethylguanosine
  modified_base 11: mod_base = OTHER; note = 2'-Omethylcytosine
  modified_base 12: mod_base = OTHER; note = 2'-Omethylguanosine
  modified_base 13: mod_base = OTHER; note = 2'-Omethylcytosine
  modified_base 14: mod_base = OTHER; note = 2'-Omethyladenosine
  modified_base 15: mod_base = OTHER; note = 2'-Omethyladenosine
  modified_base 16: mod_base = OTHER; note = 2'-Omethyluridine
  modified_base 17: mod_base = OTHER; note = 2'-Omethylguanosine
  modified_base 18: mod_base = OTHER; note = 2'-Omethylguanosine
  modified_base 19: mod_base = OTHER; note = 2'-Omethyladenosine
  modified_base 20: mod_base = OTHER; note = 2'-Omethyluridine
  modified_base 22: mod_base = OTHER; note = 2'-Omethylguanosine
  modified_base 23: mod_base = OTHER; note = 2'-Omethylcytosine
  modified_base 24: mod_base = OTHER; note = 2'-Omethylguanosine
  modified_base 25: mod_base = OTHER; note = 2'-Omethylcytosine
  modified_base 40: mod_base = OTHER; note = 2'-fluorouridine
  modified_base 41: mod_base = OTHER; note = 2'-fluorocytosine
  modified_base 42: mod_base = OTHER; note = 2'-fluoroadenosine
  modified_base 43: mod_base = OTHER; note = 2'-fluoroadenosine
  modified_base 44: mod_base = OTHER; note = 2'-Omethyladenosine
  modified_base 45: mod_base = OTHER; note = 2'-Omethylguanosine
  modified_base 46: mod_base = OTHER; note = 2'-Omethylguanosine
  modified_base 49: mod_base = OTHER; note = 2'-Omethylcytosine
  modified_base 50: mod_base = OTHER; note = 2'-Omethylcytosine
  modified_base 51: mod_base = OTHER; note = 2'-Omethylguanosine
  modified_base 52: mod_base = OTHER; note = 2'-Omethylguanosine
  modified_base 53: mod_base = OTHER; note = 2'-Omethylguanosine
  modified_base 54: mod_base = OTHER; note = Uridine phosphorothiorate
  modified_base 55: mod_base = OTHER; note = Uridine phosphorothiorate
  modified_base 56: mod_base = OTHER; note = Cytosine phosphorothiorate
  modified_base 57: mod_base = OTHER; note = Guanosine phosphorothiorate
  modified_base 61: mod_base = OTHER; note = 2'-Omethylcytosine
  modified_base 62: mod_base = OTHER; note = 2'-Omethylcytosine
  modified_base 63: mod_base = OTHER; note = 2'-fluorocytosine
  modified_base 64: mod_base = OTHER; note = 2'-Omethylguanosine
  modified_base 65: mod_base = OTHER; note = 2'-Omethylguanosine
  modified_base 66: mod_base = OTHER; note = 2'-Omethylcytosine
  modified_base 67: mod_base = OTHER; note = 2'-Omethylguanosine
  modified_base 68: mod_base = OTHER; note = 2'-Omethylguanosine
  modified_base 69: mod_base = OTHER; note = 2'-fluoroadenosine
  modified_base 71: mod_base = OTHER; note = 2'-Omethyluridine

SEQ ID NO: 6415 - RNA, 76 nt, synthetic construct; identical to SEQ ID NO: 3289
  source 1..76: mol_type = other RNA
  modified_base 1: mod_base = OTHER; note = 2'-Omethylguanosine
  modified_base 18: mod_base = OTHER; note = 2'-Omethylguanosine
  modified_base 19: mod_base = OTHER; note = 2'-Omethylguanosine
  modified_base 50: mod_base = OTHER; note = 2'-Omethyladenosine
  modified_base 52: mod_base = OTHER; note = 2'-Omethylguanosine
  modified_base 73: mod_base = OTHER; note = 2'-Omethylguanosine

SEQ ID NO: 6416 - RNA, 85 nt, synthetic construct; identical to SEQ ID NO: 3297
  source 1..85: mol_type = other RNA
  modified_base 1: mod_base = OTHER; note = 2'-Omethylguanosine phosphorothiorate
  modified_base 2: mod_base = OTHER; note = 2'-Omethylcytosine
  modified_base 14: mod_base = OTHER; note = 2'-fluoroadenosine
  modified_base 27: mod_base = OTHER; note = 2'-fluorouridine phosphorothiorate
  modified_base 49: mod_base = OTHER; note = 2'-Omethyluridine phosphorothiorate
  modified_base 54: mod_base = OTHER; note = Cytosine phosphorothiorate
  modified_base 59: mod_base = OTHER; note = Cytosine phosphorothiorate
  modified_base 82: mod_base = OTHER; note = 2'-Omethylguanosine

SEQ ID NO: 6417 - RNA, 76 nt, synthetic construct; identical to SEQ ID NO: 625
  source 1..76: mol_type = other RNA
  modified_base 1: mod_base = OTHER; note = 2'-Omethylguanosine phosphorothiorate
  modified_base 2: mod_base = OTHER; note = 2'-Omethylguanosine phosphorothiorate
  modified_base 3: mod_base = OTHER; note = 2'-Omethylcytosine phosphorothiorate
  modified_base 4: mod_base = OTHER; note = 2'-Omethyluridine phosphorothiorate
  modified_base 5: mod_base = OTHER; note = 2'-Omethylcytosine phosphorothiorate
  modified_base 6: mod_base = OTHER; note = 2'-Omethylcytosine phosphorothiorate
  modified_base 22: mod_base = OTHER; note = 2'-Omethylguanosine
  modified_base 23: mod_base = OTHER; note = 2'-Omethylcytosine
  modified_base 24: mod_base = OTHER; note = 2'-Omethylguanosine
  modified_base 25: mod_base = OTHER; note = 2'-Omethylcytosine
  modified_base 40: mod_base = OTHER; note = 2'-fluorouridine
  modified_base 41: mod_base = OTHER; note = 2'-fluorocytosine
  modified_base 42: mod_base = OTHER; note = 2'-fluoroadenosine
  modified_base 43: mod_base = OTHER; note = 2'-fluoroadenosine
  modified_base 54: mod_base = OTHER; note = Uridine phosphorothiorate
  modified_base 55: mod_base = OTHER; note = Uridine phosphorothiorate
  modified_base 56: mod_base = OTHER; note = Cytosine phosphorothiorate
  modified_base 57: mod_base = OTHER; note = Guanosine phosphorothiorate
  modified_base 61: mod_base = OTHER; note = 2'-Omethylcytosine
  modified_base 62: mod_base = OTHER; note = 2'-Omethylcytosine
  modified_base 63: mod_base = OTHER; note = 2'-Omethylcytosine
  modified_base 64: mod_base = OTHER; note = 2'-Omethylguanosine
  modified_base 65: mod_base = OTHER; note = 2'-Omethylguanosine
  modified_base 66: mod_base = OTHER; note = 2'-Omethylcytosine
  modified_base 67: mod_base = OTHER; note = 2'-Omethylguanosine
  modified_base 68: mod_base = OTHER; note = 2'-Omethylguanosine
  modified_base 69: mod_base = OTHER; note = 2'-Omethyladenosine

SEQ ID NO: 6418 - RNA, 76 nt, synthetic construct; identical to SEQ ID NO: 625
  source 1..76: mol_type = other RNA
  modified_base 3: mod_base = OTHER; note = 2'-fluorocytosine
  modified_base 4: mod_base = OTHER; note = 2'-fluorouridine
  modified_base 5: mod_base = OTHER; note = 2'-fluorocytosine
  modified_base 6: mod_base = OTHER; note = 2'-fluorocytosine
  modified_base 13: mod_base = OTHER; note = 2'-fluorocytosine
  modified_base 15: mod_base = OTHER; note = 2'-fluoroadenosine
  modified_base 16: mod_base = OTHER; note = 2'-Omethyluridine
  modified_base 20: mod_base = OTHER; note = Uridine phosphorothiorate
  modified_base 22: mod_base = OTHER; note = 2'-Omethylguanosine
  modified_base 23: mod_base = OTHER; note = 2'-fluorocytosine
  modified_base 27: mod_base = OTHER; note = 2'-Omethyluridine
  modified_base 30: mod_base = OTHER; note = 2'-fluoroguanosine
  modified_base 31: mod_base = OTHER; note = 2'-fluoroadenosine
  modified_base 32: mod_base = OTHER; note = 2'-fluorocytosine
  modified_base 33: mod_base = OTHER; note = 2'-fluorouridine
  modified_base 34: mod_base = OTHER; note = 2'-fluorouridine
  modified_base 38: mod_base = OTHER; note = Adenosine phosphorothiorate
  modified_base 39: mod_base = OTHER; note = 2'-Omethyluridine phosphorothiorate
  modified_base 40: mod_base = OTHER; note = 2'-Omethyluridine
  modified_base 41: mod_base = OTHER; note = 2'-fluorocytosine
  modified_base 42: mod_base = OTHER; note = 2'-fluoroadenosine
  modified_base 44: mod_base = OTHER; note = 2'-Omethyladenosine
  modified_base 46: mod_base = OTHER; note = 2'-fluoroguanosine
  modified_base 48: mod_base = OTHER; note = Uridine phosphorothiorate
  modified_base 49: mod_base = OTHER; note = 2'-fluorocytosine
  modified_base 52: mod_base = OTHER; note = 2'-fluoroguanosine
  modified_base 53: mod_base = OTHER; note = 2'-Omethylguanosine phosphorothiorate
  modified_base 54: mod_base = OTHER; note = 2'-Omethyluridine
  modified_base 60: mod_base = OTHER; note = 2'-fluorouridine
  modified_base 62: mod_base = OTHER; note = 2'-fluorocytosine phosphorothiorate
  modified_base 64: mod_base = OTHER; note = 2'-Omethylguanosine
  modified_base 69: mod_base = OTHER; note = 2'-fluoroadenosine
  modified_base 70: mod_base = OTHER; note = 2'-fluoroguanosine
  modified_base 72: mod_base = OTHER; note = Cytosine phosphorothiorate
  modified_base 73: mod_base = OTHER; note = 2'-fluoroguanosine
  modified_base 75: mod_base = OTHER; note = Cytosine phosphorothiorate
  modified_base 76: mod_base = OTHER; note = 2'-fluoroadenosine

SEQ ID NO: 6419 - RNA, 86 nt, synthetic construct; identical to SEQ ID NO: 3290
  source 1..86: mol_type = other RNA
  modified_base 81: mod_base = OTHER; note = Guanosine phosphorothiorate

SEQ ID NO: 6420 - RNA, 85 nt, synthetic construct; identical to SEQ ID NO: 3317
  source 1..85: mol_type = other RNA
  modified_base 1: mod_base = OTHER; note = 2'-Omethylguanosine phosphorothiorate
  modified_base 2: mod_base = OTHER; note = 2'-Omethylcytosine phosphorothiorate
  modified_base 3: mod_base = OTHER; note = Uridine phosphorothiorate
  modified_base 12: mod_base = OTHER; note = 2'-Omethylcytosine
  modified_base 18: mod_base = OTHER; note = 2'-Omethylguanosine phosphorothiorate
  modified_base 21: mod_base = OTHER; note = 2'-Omethyladenosine phosphorothiorate
  modified_base 27: mod_base = OTHER; note = Uridine phosphorothiorate
  modified_base 30: mod_base = OTHER; note = 2'-fluoroguanosine
  modified_base 37: mod_base = OTHER; note = 2'-fluoroadenosine
  modified_base 41: mod_base = OTHER; note = 2'-Omethylcytosine phosphorothiorate
  modified_base 45: mod_base = OTHER; note = 2'-Omethylguanosine
  modified_base 46: mod_base = OTHER; note = 2'-fluoroguanosine phosphorothiorate
  modified_base 48: mod_base = OTHER; note = Guanosine phosphorothiorate
  modified_base 57: mod_base = OTHER; note = 2'-fluorocytosine
  modified_base 58: mod_base = OTHER; note = 2'-fluoroguanosine
  modified_base 71: mod_base = OTHER; note = 2'-Omethylcytosine phosphorothiorate
  modified_base 72: mod_base = OTHER; note = 2'-fluorouridine
  modified_base 73: mod_base = OTHER; note = 2'-fluoroguanosine
  modified_base 82: mod_base = OTHER; note = 2'-Omethylguanosine
  modified_base 85: mod_base = OTHER; note = 2'-fluoroadenosine

SEQ ID NO: 6421 - RNA, 76 nt, synthetic construct; identical to SEQ ID NO: 625
  source 1..76: mol_type = other RNA
  modified_base 4: mod_base = OTHER; note = Uridine phosphorothiorate
  modified_base 5: mod_base = OTHER; note = 2'-fluorocytosine
  modified_base 8: mod_base = OTHER; note = Uridine phosphorothiorate
  modified_base 13: mod_base = OTHER; note = 2'-fluorocytosine
  modified_base 16: mod_base = OTHER; note = Uridine phosphorothiorate
  modified_base 18: mod_base = OTHER; note = Guanosine phosphorothiorate
  modified_base 19: mod_base = OTHER; note = Adenosine phosphorothiorate
  modified_base 20: mod_base = OTHER; note = 2'-Omethyluridine
  modified_base 21: mod_base = OTHER; note = Adenosine phosphorothiorate
  modified_base 22: mod_base = OTHER; note = 2'-fluoroguanosine
  modified_base 23: mod_base = OTHER; note = 2'-Omethylcytosine
  modified_base 24: mod_base = OTHER; note = 2'-Omethylguanosine
  modified_base 25: mod_base = OTHER; note = 2'-Omethylcytosine phosphorothiorate
  modified_base 26: mod_base = OTHER; note = 2'-Omethyladenosine
  modified_base 27: mod_base = OTHER; note = 2'-fluorouridine
  modified_base 28: mod_base = OTHER; note = 2'-fluorouridine
  modified_base 31: mod_base = OTHER; note = 2'-Omethyladenosine
  modified_base 39: mod_base = OTHER; note = 2'-fluorouridine phosphorothiorate
  modified_base 40: mod_base = OTHER; note = 2'-fluorouridine
  modified_base 41: mod_base = OTHER; note = 2'-fluorocytosine
  modified_base 42: mod_base = OTHER; note = Adenosine phosphorothiorate
  modified_base 43: mod_base = OTHER; note = 2'-Omethyladenosine
  modified_base 44: mod_base = OTHER; note = 2'-Omethyladenosine
  modified_base 45: mod_base = OTHER; note = 2'-Omethylguanosine phosphorothiorate
  modified_base 51: mod_base = OTHER; note = 2'-Omethylguanosine
  modified_base 53: mod_base = OTHER; note = Guanosine phosphorothiorate
  modified_base 54: mod_base = OTHER; note = 2'-fluorouridine phosphorothiorate
  modified_base 58: mod_base = OTHER; note = 2'-fluoroadenosine
  modified_base 60: mod_base = OTHER; note = 2'-fluorouridine
  modified_base 66: mod_base = OTHER; note = 2'-fluorocytosine phosphorothiorate
  modified_base 67: mod_base = OTHER; note = 2'-Omethylguanosine
  modified_base 68: mod_base = OTHER; note = 2'-Omethylguanosine
  modified_base 69: mod_base = OTHER; note = 2'-fluoroadenosine
  modified_base 74: mod_base = OTHER; note = Cytosine phosphorothiorate
  modified_base 75: mod_base = OTHER; note = 2'-Omethylcytosine

SEQ ID NO: 6422 - RNA, 76 nt, synthetic construct; identical to SEQ ID NO: 3342
  source 1..76: mol_type = other RNA
  modified_base 1: mod_base = OTHER; note = 2'-Omethylguanosine
  modified_base 2: mod_base = OTHER; note = 2'-Omethylguanosine
  modified_base 3: mod_base = OTHER; note = 2'-Omethylcytosine
  modified_base 4: mod_base = OTHER; note = 2'-Omethyluridine
  modified_base 5: mod_base = OTHER; note = 2'-Omethylcytosine
  modified_base 6: mod_base = OTHER; note = 2'-Omethylcytosine
  modified_base 14: mod_base = OTHER; note = 2'-Omethyladenosine
  modified_base 15: mod_base = OTHER; note = 2'-Omethyladenosine
  modified_base 16: mod_base = OTHER; note = 2'-Omethyluridine
  modified_base 17: mod_base = OTHER; note = 2'-Omethylguanosine
  modified_base 18: mod_base = OTHER; note = 2'-Omethylguanosine
  modified_base 20: mod_base = OTHER; note = 2'-Omethyluridine
  modified_base 25: mod_base = OTHER; note = 2'-Omethylcytosine
  modified_base 33: mod_base = OTHER; note = 2'-fluorouridine
  modified_base 35: mod_base = OTHER; note = Cytosine phosphorothiorate
  modified_base 37: mod_base = OTHER; note = Adenosine phosphorothiorate
  modified_base 38: mod_base = OTHER; note = Adenosine phosphorothiorate
  modified_base 41: mod_base = OTHER; note = 2'-Omethylcytosine
  modified_base 42: mod_base = OTHER; note = 2'-Omethylguanosine
  modified_base 43: mod_base = OTHER; note = 2'-Omethyladenosine
  modified_base 44: mod_base = OTHER; note = 2'-fluoroadenosine
  modified_base 49: mod_base = OTHER; note = 2'-Omethylcytosine
  modified_base 50: mod_base = OTHER; note = 2'-Omethylcytosine
  modified_base 52: mod_base = OTHER; note = 2'-Omethylguanosine
  modified_base 54: mod_base = OTHER; note = 2'-Omethyluridine
  modified_base 55: mod_base = OTHER; note = Uridine phosphorothiorate
  modified_base 56: mod_base = OTHER; note = 2'-Omethylcytosine
  modified_base 57: mod_base = OTHER; note = 2'-fluoroguanosine
  modified_base 59: mod_base = OTHER; note = 2'-Omethylguanosine
  modified_base 61: mod_base = OTHER; note = 2'-Omethylcytosine
  modified_base 65: mod_base = OTHER; note = 2'-Omethylguanosine
  modified_base 73: mod_base = OTHER; note = 2'-Omethylguanosine

SEQ ID NO: 6423 - RNA, 86 nt, synthetic construct; identical to SEQ ID NO: 3290
  source 1..86: mol_type = other RNA
  modified_base 31: mod_base = OTHER; note = 2'-Omethyladenosine

SEQ ID NO: 6424 - RNA, 85 nt, synthetic construct; identical to SEQ ID NO: 3286
  source 1..85: mol_type = other RNA
  modified_base 1: mod_base = OTHER; note = 2'-Omethylcytosine
  modified_base 22: mod_base = OTHER; note = 2'-fluoroguanosine
  modified_base 30: mod_base = OTHER; note = 2'-fluoroadenosine
  modified_base 34: mod_base = OTHER; note = 2'-fluorouridine
  modified_base 38: mod_base = OTHER; note = Uridine phosphorothiorate
  modified_base 54: mod_base = OTHER; note = Cytosine phosphorothiorate
  modified_base 56: mod_base = OTHER; note = 2'-fluoroguanosine
  modified_base 61: mod_base = OTHER; note = 2'-fluoroguanosine
  modified_base 73: mod_base = OTHER; note = 2'-fluoroadenosine
  modified_base 83: mod_base = OTHER; note = 2'-fluorocytosine
  modified_base 84: mod_base = OTHER; note = Cytosine phosphorothiorate

SEQ ID NO: 6425 - RNA, 76 nt, synthetic construct; identical to SEQ ID NO: 625
  source 1..76: mol_type = other RNA
  modified_base 1: mod_base = OTHER; note = 2'-Omethylguanosine phosphorothiorate
  modified_base 2: mod_base = OTHER; note = 2'-Omethylguanosine
  modified_base 33: mod_base = OTHER; note = 2'-fluorouridine
  modified_base 35: mod_base = OTHER; note = Cytosine phosphorothiorate
  modified_base 37: mod_base = OTHER; note = Adenosine phosphorothiorate
  modified_base 52: mod_base = OTHER; note = 2'-Omethylguanosine
  modified_base 62: mod_base = OTHER; note = 2'-Omethylcytosine
  modified_base 73: mod_base = OTHER; note = 2'-Omethylguanosine
  modified_base 75: mod_base = OTHER; note = 2'-fluorocytosine phosphorothiorate

SEQ ID NO: 6426 - RNA, 75 nt, synthetic construct; identical to SEQ ID NO: 3306
  source 1..75: mol_type = other RNA
  modified_base 1: mod_base = OTHER; note = 2'-Omethylguanosine
  modified_base 43: mod_base = OTHER; note = 2'-Omethyladenosine
  modified_base 44: mod_base = OTHER; note = 2'-Omethylguanosine
  modified_base 45: mod_base = OTHER; note = 2'-fluoroguanosine
  modified_base 46: mod_base = OTHER; note = 2'-fluorouridine
  modified_base 47: mod_base = OTHER; note = 2'-fluorouridine
  modified_base 48: mod_base = OTHER; note = 2'-Omethylguanosine
  modified_base 49: mod_base = OTHER; note = 2'-Omethylcytosine
  modified_base 50: mod_base = OTHER; note = 2'-Omethylguanosine
  modified_base 51: mod_base = OTHER; note = 2'-Omethyluridine
  modified_base 52: mod_base = OTHER; note = 2'-Omethylguanosine
  modified_base 60: mod_base = OTHER; note = 2'-Omethylcytosine
  modified_base 61: mod_base = OTHER; note = 2'-Omethyladenosine
  modified_base 62: mod_base = OTHER; note = 2'-fluorocytosine
  modified_base 63: mod_base = OTHER; note = 2'-Omethylguanosine
  modified_base 64: mod_base = OTHER; note = 2'-Omethyluridine
  modified_base 72: mod_base = OTHER; note = 2'-Omethyladenosine

SEQ ID NO: 6427 - RNA, 76 nt, synthetic construct; identical to SEQ ID NO: 3795
  source 1..76: mol_type = other RNA
  modified_base 1: mod_base = OTHER; note = 2'-Omethylguanosine phosphorothiorate
  modified_base 2: mod_base = OTHER; note = 2'-Omethylcytosine phosphorothiorate
  modified_base 13: mod_base = OTHER; note = 2'-fluorouridine
  modified_base 14: mod_base = OTHER; note = 2'-fluoroadenosine
  modified_base 54: mod_base = OTHER; note = 2'-fluorouridine
  modified_base 59: mod_base = OTHER; note = 2'-Omethylguanosine
  modified_base 75: mod_base = OTHER; note = Cytosine phosphorothiorate
  modified_base 76: mod_base = OTHER; note = 2'-Omethyladenosine

SEQ ID NO: 6428 - RNA, 74 nt, synthetic construct; identical to SEQ ID NO: 3293
  source 1..74: mol_type = other RNA
  modified_base 1: mod_base = OTHER; note = 2'-fluoroadenosine
  modified_base 2: mod_base = OTHER; note = Cytosine phosphorothiorate
  modified_base 6: mod_base = OTHER; note = 2'-fluoroguanosine
  modified_base 8: mod_base = OTHER; note = Guanosine phosphorothiorate
  modified_base 9: mod_base = OTHER; note = 2'-fluoroguanosine
  modified_base 12: mod_base = OTHER; note = 2'-Omethylcytosine phosphorothiorate
  modified_base 24: mod_base = OTHER; note = Guanosine phosphorothiorate
  modified_base 27: mod_base = OTHER; note = 2'-Omethyluridine
  modified_base 42: mod_base = OTHER; note = Adenosine phosphorothiorate
  modified_base 45: mod_base = OTHER; note = Uridine phosphorothiorate
  modified_base 48: mod_base = OTHER; note = 2'-fluorocytosine
  modified_base 50: mod_base = OTHER; note = Uridine phosphorothiorate
  modified_base 52: mod_base = OTHER; note = 2'-fluorouridine phosphorothiorate
  modified_base 62: mod_base = OTHER; note = Guanosine phosphorothiorate
  modified_base 73: mod_base = OTHER; note = 2'-Omethylcytosine phosphorothiorate
  modified_base 74: mod_base = OTHER; note = 2'-Omethyladenosine

SEQ ID NO: 6429 - RNA, 75 nt, synthetic construct; identical to SEQ ID NO: 3336
  source 1..75: mol_type = other RNA
  modified_base 1: mod_base = OTHER; note = 2'-Omethylcytosine phosphorothiorate
  modified_base 3: mod_base = OTHER; note = Uridine phosphorothiorate
  modified_base 6: mod_base = OTHER; note = 2'-Omethylguanosine phosphorothiorate
  modified_base 10: mod_base = OTHER; note = 2'-Omethylcytosine phosphorothiorate
  modified_base 20: mod_base = OTHER; note = 2'-fluoroadenosine
  modified_base 21: mod_base = OTHER; note = 2'-fluoroguanosine
  modified_base 26: mod_base = OTHER; note = Uridine phosphorothiorate
  modified_base 27: mod_base = OTHER; note = 2'-Omethylcytosine phosphorothiorate
  modified_base 35: mod_base = OTHER; note = 2'-fluoroadenosine
  modified_base 39: mod_base = OTHER; note = 2'-fluorocytosine phosphorothiorate
  modified_base 40: mod_base = OTHER; note = Uridine phosphorothiorate
  modified_base 48: mod_base = OTHER; note = 2'-fluorocytosine
  modified_base 49: mod_base = OTHER; note = 2'-fluoroadenosine
  modified_base 50: mod_base = OTHER; note = 2'-Omethylguanosine phosphorothiorate
  modified_base 60: mod_base = OTHER; note = 2'-Omethylcytosine phosphorothiorate
  modified_base 62: mod_base = OTHER; note = 2'-fluorocytosine
  modified_base 63: mod_base = OTHER; note = 2'-Omethyluridine phosphorothiorate
  modified_base 69: mod_base = OTHER; note = Guanosine phosphorothiorate
  modified_base 73: mod_base = OTHER; note = Cytosine phosphorothiorate
  modified_base 74: mod_base = OTHER; note = Cytosine phosphorothiorate

SEQ ID NO: 6430 - RNA, 86 nt, synthetic construct; identical to SEQ ID NO: 3290
  source 1..86: mol_type = other RNA
  modified_base 1: mod_base = OTHER; note = 2'-Omethyladenosine phosphorothiorate
  modified_base 2: mod_base = OTHER; note = Cytosine phosphorothiorate
  modified_base 85: mod_base = OTHER; note = 2'-Omethylcytosine phosphorothiorate
  modified_base 86: mod_base = OTHER; note = 2'-Omethyladenosine

SEQ ID NO: 6431 - RNA, 75 nt, synthetic construct; identical to SEQ ID NO: 3299
  source 1..75: mol_type = other RNA
  modified_base 19: mod_base = OTHER; note = 2'-fluorouridine
  modified_base 37: mod_base = OTHER; note = Adenosine phosphorothiorate
  modified_base 40: mod_base = OTHER; note = 2'-fluorouridine
  modified_base 46: mod_base = OTHER; note = 2'-fluorouridine
  modified_base 47: mod_base = OTHER; note = 2'-fluorocytosine
  modified_base 57: mod_base = OTHER; note = 2'-Omethyladenosine
  modified_base 62: mod_base = OTHER; note = 2'-fluorocytosine
  modified_base 73: mod_base = OTHER; note = Cytosine phosphorothiorate
  modified_base 74: mod_base = OTHER; note = Cytosine phosphorothiorate

SEQ ID NO: 6432 - RNA, 86 nt, synthetic construct; identical to SEQ ID NO: 3290
  source 1..86: mol_type = other RNA
  modified_base 1: mod_base = OTHER; note = 2'-Omethyladenosine phosphorothiorate
  modified_base 2: mod_base = OTHER; note = 2'-Omethylcytosine
  modified_base 3: mod_base = OTHER; note = 2'-Omethylcytosine
  modified_base 4: mod_base = OTHER; note = 2'-Omethyladenosine
  modified_base 5: mod_base = OTHER; note = 2'-Omethylguanosine
  modified_base 6: mod_base = OTHER; note = 2'-Omethylguanosine
  modified_base 16: mod_base = OTHER; note = 2'-Omethyluridine
  modified_base 17: mod_base = OTHER; note = 2'-Omethylguanosine
  modified_base 18: mod_base = OTHER; note = 2'-Omethylguanosine
  modified_base 64: mod_base = OTHER; note = 2'-Omethyluridine phosphorothiorate
  modified_base 65: mod_base = OTHER; note = Uridine phosphorothiorate
  modified_base 66: mod_base = OTHER; note = 2'-Omethylcytosine
  modified_base 67: mod_base = OTHER; note = 2'-fluoroguanosine
  modified_base 69: mod_base = OTHER; note = 2'-Omethyladenosine
  modified_base 83: mod_base = OTHER; note = 2'-Omethyladenosine

SEQ ID NO: 6433 - RNA, 86 nt, synthetic construct; identical to SEQ ID NO: 3290
  source 1..86: mol_type = other RNA
  modified_base 1: mod_base = OTHER; note = 2'-Omethyladenosine
  modified_base 4: mod_base = OTHER; note = 2'-Omethyladenosine
  modified_base 13: mod_base = OTHER; note = 2'-Omethylguanosine
  modified_base 17: mod_base = OTHER; note = 2'-Omethylguanosine
  modified_base 18: mod_base = OTHER; note = 2'-Omethylguanosine
  modified_base 20: mod_base = OTHER; note = 2'-Omethyluridine
  modified_base 25: mod_base = OTHER; note = 2'-Omethylcytosine
  modified_base 29: mod_base = OTHER; note = 2'-Omethylguanosine
  modified_base 30: mod_base = OTHER; note = 2'-Omethylguanosine
  modified_base 59: mod_base = OTHER; note = 2'-Omethylguanosine
  modified_base 60: mod_base = OTHER; note = 2'-Omethyluridine
  modified_base 62: mod_base = OTHER; note = 2'-Omethylguanosine
  modified_base 66: mod_base = OTHER; note = 2'-Omethylcytosine
  modified_base 69: mod_base = OTHER; note = 2'-Omethyladenosine
  modified_base 75: mod_base = OTHER; note = 2'-Omethylcytosine
  modified_base 79: mod_base = OTHER; note = 2'-Omethyluridine
  modified_base 81: mod_base = OTHER; note = 2'-Omethylguanosine
  modified_base 82: mod_base = OTHER; note = 2'-Omethyluridine
  modified_base 83: mod_base = OTHER; note = 2'-Omethyladenosine

SEQ ID NO: 6434 - RNA, 86 nt, synthetic construct; identical to SEQ ID NO: 3290
  source 1..86: mol_type = other RNA
  modified_base 1: mod_base = OTHER; note = 2'-Omethyladenosine phosphorothiorate
  modified_base 2: mod_base = OTHER; note = 2'-Omethylcytosine phosphorothiorate
  modified_base 3: mod_base = OTHER; note = 2'-Omethylcytosine
  modified_base 4: mod_base = OTHER; note = 2'-Omethyladenosine
  modified_base 5: mod_base = OTHER; note = 2'-Omethylguanosine
  modified_base 6: mod_base = OTHER; note = 2'-Omethylguanosine
  modified_base 10: mod_base = OTHER; note = 2'-Omethylguanosine
  modified_base 11: mod_base = OTHER; note = 2'-Omethylcytosine
  modified_base 12: mod_base = OTHER; note = 2'-Omethylcytosine
  modified_base 13: mod_base = OTHER; note = 2'-Omethylguanosine
  modified_base 22: mod_base = OTHER; note = 2'-Omethyladenosine
  modified_base 23: mod_base = OTHER; note = 2'-Omethylguanosine
  modified_base 24: mod_base = OTHER; note = 2'-Omethylguanosine
  modified_base 25: mod_base = OTHER; note = 2'-Omethylcytosine
  modified_base 59: mod_base = OTHER; note = 2'-Omethylguanosine
  modified_base 60: mod_base = OTHER; note = 2'-Omethyluridine
  modified_base 61: mod_base = OTHER; note = 2'-Omethylguanosine
  modified_base 62: mod_base = OTHER; note = 2'-Omethylguanosine
  modified_base 63: mod_base = OTHER; note = 2'-Omethylguanosine
  modified_base 64: mod_base = OTHER; note = 2'-Omethyluridine
  modified_base 71: mod_base = OTHER; note = 2'-Omethylcytosine
  modified_base 72: mod_base = OTHER; note = 2'-Omethylcytosine
  modified_base 73: mod_base = OTHER; note = 2'-fluorocytosine
  modified_base 74: mod_base = OTHER; note = 2'-Omethyladenosine
  modified_base 75: mod_base = OTHER; note = 2'-Omethylcytosine
  modified_base 76: mod_base = OTHER; note = 2'-Omethyluridine
  modified_base 77: mod_base = OTHER; note = 2'-Omethylcytosine
  modified_base 78: mod_base = OTHER; note = 2'-Omethylcytosine
  modified_base 83: mod_base = OTHER; note = 2'-Omethyladenosine

SEQ ID NO: 6435 - RNA, 76 nt, synthetic construct; identical to SEQ ID NO: 625
  source 1..76: mol_type = other RNA
  modified_base 28: mod_base = OTHER; note = Thymine

SEQ ID NO: 6436 - RNA, 74 nt, synthetic construct; identical to SEQ ID NO: 3293
  source 1..74: mol_type = other RNA
  modified_base 2: mod_base = OTHER; note = Cytosine phosphorothiorate
  modified_base 4: mod_base = OTHER; note = 2'-Omethyluridine
  modified_base 17: mod_base = OTHER; note = Guanosine phosphorothiorate
  modified_base 64: mod_base = OTHER; note = 2'-fluorocytosine
  modified_base 73: mod_base = OTHER; note = Cytosine phosphorothiorate
  modified_base 74: mod_base = OTHER; note = 2'-fluoroadenosine

SEQ ID NO: 6437 - RNA, 76 nt, synthetic construct
  source 1..76: mol_type = other RNA
ggcttcgtggcgcaatggatagcgccttggacttcaaattcaaaggttccgggttcgagtcccggcggagtcgcca

SEQ ID NO: 6438 - RNA, 85 nt, synthetic construct; identical to SEQ ID NO: 3286
  source 1..85: mol_type = other RNA
  modified_base 23: mod_base = OTHER; note = 2'-Omethylguanosine
  modified_base 25: mod_base = OTHER; note = 2'-fluoroguanosine
  modified_base 29: mod_base = OTHER; note = 2'-fluoroguanosine
  modified_base 33: mod_base = OTHER; note = Uridine phosphorothiorate
  modified_base 43: mod_base = OTHER; note = 2'-Omethyluridine
  modified_base 46: mod_base = OTHER; note = 2'-Omethyladenosine
  modified_base 54: mod_base = OTHER; note = 2'-fluorocytosine
  modified_base 55: mod_base = OTHER; note = 2'-Omethylcytosine
  modified_base 65: mod_base = OTHER; note = Cytosine phosphorothiorate
  modified_base 84: mod_base = OTHER; note = 2'-fluorocytosine

SEQ ID NO: 6439 - RNA, 76 nt, synthetic construct
  source 1..76: mol_type = other RNA
ggctccgtggcgcaatggatagcgcattggacttcaaattcaaagtccgggggttcgagtccccccggagtcgcca

SEQ ID NO: 6440 - RNA, 85 nt, synthetic construct; identical to SEQ ID NO: 3301
  source 1..85: mol_type = other RNA
  modified_base 1: mod_base = OTHER; note = 2'-Omethylguanosine phosphorothiorate
  modified_base 2: mod_base = OTHER; note = 2'-Omethylcytosine
  modified_base 11: mod_base = OTHER; note = 2'-fluorocytosine
  modified_base 12: mod_base = OTHER; note = 2'-Omethylcytosine
  modified_base 17: mod_base = OTHER; note = 2'-Omethylguanosine
  modified_base 26: mod_base = OTHER; note = Guanosine phosphorothiorate
  modified_base 27: mod_base = OTHER; note = 2'-fluorouridine
  modified_base 29: mod_base = OTHER; note = Guanosine phosphorothiorate
  modified_base 36: mod_base = OTHER; note = 2'-fluoroadenosine
  modified_base 47: mod_base = OTHER; note = 2'-Omethylguanosine phosphorothiorate
  modified_base 48: mod_base = OTHER; note = 2'-fluoroguanosine phosphorothiorate
  modified_base 49: mod_base = OTHER; note = 2'-fluorouridine
  modified_base 55: mod_base = OTHER; note = 2'-Omethylcytosine phosphorothiorate
  modified_base 59: mod_base = OTHER; note = 2'-Omethylcytosine
  modified_base 61: mod_base = OTHER; note = 2'-Omethylguanosine
  modified_base 71: mod_base = OTHER; note = Cytosine phosphorothiorate
  modified_base 73: mod_base = OTHER; note = 2'-fluoroguanosine
  modified_base 77: mod_base = OTHER; note = 2'-fluoroadenosine
  modified_base 82: mod_base = OTHER; note = 2'-Omethylguanosine

SEQ ID NO: 6441 - RNA, 74 nt, synthetic construct; identical to SEQ ID NO: 3293
  source 1..74: mol_type = other RNA
  modified_base 1: mod_base = OTHER; note = 2'-fluoroadenosine phosphorothiorate
  modified_base 17: mod_base = OTHER; note = 2'-fluoroguanosine
  modified_base 27: mod_base = OTHER; note = 2'-fluorouridine
  modified_base 34: mod_base = OTHER; note = 2'-fluoroadenosine
  modified_base 50: mod_base = OTHER; note = Uridine phosphorothiorate
  modified_base 73: mod_base = OTHER; note = 2'-Omethylcytosine phosphorothiorate
  modified_base 74: mod_base = OTHER; note = 2'-fluoroadenosine

SEQ ID NO: 6442 - DNA, 76 bp, synthetic construct; identical to SEQ ID NO: 1924
  source 1..76: mol_type = other DNA
  modified_base 1: mod_base = OTHER; note = 2'-Omethylguanosine phosphorothiorate
  modified_base 2: mod_base = OTHER; note = 2'-Omethylguanosine phosphorothiorate
  modified_base 4: mod_base = OTHER; note = Uridine phosphorothiorate
  modified_base 5: mod_base = OTHER; note = 2'-O-(2-Methoxyethyl) 5-methylcytosine
  modified_base 6: mod_base = OTHER; note = Cytosine phosphorothiorate
  modified_base 7: mod_base = OTHER; note = 2'-fluoroguanosine
  modified_base 8: mod_base = OTHER; note = Uridine phosphorothiorate
  modified_base 9: mod_base = OTHER; note = 2'-Omethylguanosine phosphorothiorate
  modified_base 10: mod_base = OTHER; note = 2'-O-(2-Methoxyethyl) guanosine
  modified_base 16: mod_base = OTHER; note = Uridine phosphorothiorate
  modified_base 19: mod_base = OTHER; note = 2'-O-(2-Methoxyethyl) adenosine phosphorothiorate
  modified_base 21: mod_base = OTHER; note = Adenosine phosphorothiorate
  modified_base 22: mod_base = OTHER; note = deoxyguanosine phosphorothiorate
  modified_base 30: mod_base = OTHER; note = Guanosine phosphorothiorate
  modified_base 33: mod_base = OTHER; note = Uridine phosphorothiorate
  modified_base 34: mod_base = OTHER; note = 2'-O-(2-Methoxyethyl) thymine
  modified_base 36: mod_base = OTHER; note = Adenosine phosphorothiorate
  modified_base 38: mod_base = OTHER; note = Adenosine phosphorothiorate
  modified_base 39: mod_base = OTHER; note = Uridine phosphorothiorate
  modified_base 40: mod_base = OTHER; note = 2'-Omethyluridine
  modified_base 42: mod_base = OTHER; note = 2'-Omethyladenosine phosphorothiorate
  modified_base 43: mod_base = OTHER; note = 2'-Omethyladenosine
  modified_base 45: mod_base = OTHER; note = 2'-Omethylguanosine
  modified_base 46: mod_base = OTHER; note = 2'-fluoroguanosine
  modified_base 47: mod_base = OTHER; note = Uridine phosphorothiorate
  modified_base 48: mod_base = OTHER; note = 2'-Omethyluridine
  modified_base 51: mod_base = OTHER; note = Guanosine phosphorothiorate
  modified_base 52: mod_base = OTHER; note = 2'-fluoroguanosine
  modified_base 56: mod_base = OTHER; note = Cytosine phosphorothiorate
  modified_base 60: mod_base = OTHER; note = Uridine phosphorothiorate
  modified_base 61: mod_base = OTHER; note = 2'-O-(2-Methoxyethyl) 5-methylcytosine
  modified_base 64: mod_base = OTHER; note = Guanosine phosphorothiorate
  modified_base 65: mod_base = OTHER; note = 2'-Omethylguanosine phosphorothiorate
  modified_base 66: mod_base = OTHER; note = deoxycytosine phosphorothiorate
  modified_base 67: mod_base = OTHER; note = 2'-Omethylguanosine
  modified_base 68: mod_base = OTHER; note = 2'-fluoroguanosine
  modified_base 69: mod_base = OTHER; note = Adenosine phosphorothiorate
  modified_base 70: mod_base = OTHER; note = 2'-Omethylguanosine
  modified_base 72: mod_base = OTHER; note = 2'-O-(2-Methoxyethyl) 5-methylcytosine
  modified_base 73: mod_base = OTHER; note = Guanosine phosphorothiorate
  modified_base 74: mod_base = OTHER; note = 2'-O-(2-Methoxyethyl) 5-methylcytosine phosphorothiorate
  modified_base 75: mod_base = OTHER; note = 2'-fluorocytosine
  modified_base 76: mod_base = OTHER; note = 2'-O-(2-Methoxyethyl) adenosine
  misc_feature 1..11: note = RNA
  misc_feature 12: note = DNA
  misc_feature 13..16: note = RNA
  misc_feature 17: note = DNA
  misc_feature 18..21: note = RNA
  misc_feature 22..23: note = DNA
  misc_feature 24..30: note = RNA
  misc_feature 31: note = DNA
  misc_feature 32..36: note = RNA
  misc_feature 37: note = DNA
  misc_feature 38..58: note = RNA
  misc_feature 59: note = DNA
  misc_feature 60..65: note = RNA
  misc_feature 66: note = DNA
  misc_feature 67..76: note = RNA

SEQ ID NO: 6443 - RNA, 85 nt, synthetic construct; identical to SEQ ID NO: 3317
  source 1..85: mol_type = other RNA
  modified_base 1: mod_base = OTHER; note = 2'-Omethylguanosine phosphorothiorate
  modified_base 2: mod_base = OTHER; note = 2'-Omethylcytosine
  modified_base 3: mod_base = OTHER; note = 2'-Omethyluridine phosphorothiorate
  modified_base 4: mod_base = OTHER; note = 2'-Omethylguanosine phosphorothiorate
  modified_base 15: mod_base = OTHER; note = 2'-Omethylguanosine phosphorothiorate
  modified_base 18: mod_base = OTHER; note = 2'-Omethylguanosine phosphorothiorate
  modified_base 21: mod_base = OTHER; note = Adenosine phosphorothiorate
  modified_base 26: mod_base = OTHER; note = 2'-Omethylguanosine
  modified_base 31: mod_base = OTHER; note = Adenosine phosphorothiorate
  modified_base 37: mod_base = OTHER; note = Adenosine phosphorothiorate
  modified_base 46: mod_base = OTHER; note = 2'-fluoroguanosine phosphorothiorate
  modified_base 54: mod_base = OTHER; note = 2'-Omethylcytosine
  modified_base 57: mod_base = OTHER; note = 2'-Omethylcytosine
  modified_base 58: mod_base = OTHER; note = 2'-fluoroguanosine
  modified_base 66: mod_base = OTHER; note = 2'-fluoroguanosine
  modified_base 70: mod_base = OTHER; note = 2'-fluorocytosine phosphorothiorate
  modified_base 72: mod_base = OTHER; note = Uridine phosphorothiorate
  modified_base 78: mod_base = OTHER; note = 2'-fluorocytosine
  modified_base 80: mod_base = OTHER; note = 2'-Omethylguanosine

SEQ ID NO: 6444 - RNA, 86 nt, synthetic construct
  source 1..86: mol_type = other RNA
gctggtttgcccgagtggttaagggggaagacttcagatcttctgcactgtagtgcgcgtgggttcgaaccccacagccagcacca

SEQ ID NO: 6445 - RNA, 75 nt, synthetic construct; identical to SEQ ID NO: 3311
  source 1..75: mol_type = other RNA
  modified_base 1: mod_base = OTHER; note = 2'-Omethylguanosine
  modified_base 3: mod_base = OTHER; note = 2'-fluorouridine phosphorothiorate
  modified_base 4: mod_base = OTHER; note = 2'-Omethyluridine
  modified_base 8: mod_base = OTHER; note = Uridine phosphorothiorate
  modified_base 14: mod_base = OTHER; note = 2'-fluoroadenosine
  modified_base 21: mod_base = OTHER; note = Adenosine phosphorothiorate
  modified_base 22: mod_base = OTHER; note = 2'-fluoroguanosine
  modified_base 25: mod_base = OTHER; note = 2'-fluorocytosine
  modified_base 28: mod_base = OTHER; note = 2'-fluorouridine
  modified_base 41: mod_base = OTHER; note = 2'-fluorocytosine phosphorothiorate
  modified_base 44: mod_base = OTHER; note = 2'-fluorocytosine
  modified_base 45: mod_base = OTHER; note = 2'-fluoroguanosine
  modified_base 54: mod_base = OTHER; note = 2'-Omethyluridine
  modified_base 60: mod_base = OTHER; note = 2'-fluorocytosine
  modified_base 62: mod_base = OTHER; note = 2'-fluorocytosine
  modified_base 65: mod_base = OTHER; note = 2'-fluorouridine
  modified_base 68: mod_base = OTHER; note = Adenosine phosphorothiorate
  modified_base 74: mod_base = OTHER; note = 2'-fluorocytosine phosphorothiorate

SEQ ID NO: 6446 - RNA, 85 nt, synthetic construct; identical to SEQ ID NO: 3288
  source 1..85: mol_type = other RNA
  modified_base 1: mod_base = OTHER; note = 2'-fluorocytosine
  modified_base 12: mod_base = OTHER; note = Guanosine phosphorothiorate
  modified_base 26: mod_base = OTHER; note = 2'-fluorouridine
  modified_base 42: mod_base = OTHER; note = Adenosine phosphorothiorate
  modified_base 45: mod_base = OTHER; note = 2'-Omethylguanosine
  modified_base 84: mod_base = OTHER; note = Cytosine phosphorothiorate

SEQ ID NO: 6447 - RNA, 75 nt, synthetic construct; identical to SEQ ID NO: 3306
  source 1..75: mol_type = other RNA
  modified_base 1: mod_base = OTHER; note = 2'-Omethylguanosine phosphorothiorate
  modified_base 2: mod_base = OTHER; note = 2'-Omethyladenosine phosphorothiorate
  modified_base 73: mod_base = OTHER; note = 2'-Omethylcytosine phosphorothiorate
  modified_base 74: mod_base = OTHER; note = 2'-Omethylcytosine phosphorothiorate

SEQ ID NO: 6448 - RNA, 75 nt, synthetic construct; identical to SEQ ID NO: 3336
  source 1..75: mol_type = other RNA
  modified_base 1: mod_base = OTHER; note = 2'-Omethylcytosine phosphorothiorate
  modified_base 2: mod_base = OTHER; note = 2'-Omethylcytosine phosphorothiorate
  modified_base 3: mod_base = OTHER; note = 2'-Omethyluridine
  modified_base 7: mod_base = OTHER; note = 2'-fluorouridine phosphorothiorate
  modified_base 13: mod_base = OTHER; note = 2'-fluoroadenosine phosphorothiorate
  modified_base 18: mod_base = OTHER; note = 2'-Omethylguanosine phosphorothiorate
  modified_base 19: mod_base = OTHER; note = 2'-fluorouridine
  modified_base 22: mod_base = OTHER; note = 2'-fluoroadenosine
  modified_base 25: mod_base = OTHER; note = Adenosine phosphorothiorate
  modified_base 27: mod_base = OTHER; note = 2'-fluorocytosine
  modified_base 28: mod_base = OTHER; note = Adenosine phosphorothiorate
  modified_base 39: mod_base = OTHER; note = 2'-fluorocytosine
  modified_base 40: mod_base = OTHER; note = 2'-fluorouridine
  modified_base 46: mod_base = OTHER; note = 2'-fluorouridine
  modified_base 52: mod_base = OTHER; note = 2'-fluoroguanosine
  modified_base 58: mod_base = OTHER; note = Guanosine phosphorothiorate
  modified_base 60: mod_base = OTHER; note = Cytosine phosphorothiorate
  modified_base 62: mod_base = OTHER; note = 2'-fluorocytosine phosphorothiorate
  modified_base 71: mod_base = OTHER; note = Cytosine phosphorothiorate
  modified_base 73: mod_base = OTHER; note = Cytosine phosphorothiorate
  modified_base 74: mod_base = OTHER; note = 2'-Omethylcytosine

SEQ ID NO: 6449 - RNA, 76 nt, synthetic construct; identical to SEQ ID NO: 625
  source 1..76: mol_type = other RNA
  modified_base 1: mod_base = OTHER; note = 2'-Omethylguanosine phosphorothiorate
  modified_base 2: mod_base = OTHER; note = 2'-Omethylguanosine
  modified_base 3: mod_base = OTHER; note = 2'-Omethylcytosine
  modified_base 4: mod_base = OTHER; note = 2'-Omethyluridine
  modified_base 5: mod_base = OTHER; note = 2'-Omethylcytosine
  modified_base 6: mod_base = OTHER; note = 2'-Omethylcytosine
  modified_base 10: mod_base = OTHER; note = 2'-Omethylguanosine
  modified_base 11: mod_base = OTHER; note = 2'-Omethylcytosine
  modified_base 12: mod_base = OTHER; note = 2'-Omethylguanosine
  modified_base 13: mod_base = OTHER; note = 2'-Omethylcytosine
  modified_base 14: mod_base = OTHER; note = 2'-Omethyladenosine
  modified_base 15: mod_base = OTHER; note = 2'-fluoroadenosine
  modified_base 16: mod_base = OTHER; note = 2'-Omethyluridine
  modified_base 17: mod_base = OTHER; note = 2'-Omethylguanosine
  modified_base 18: mod_base = OTHER; note = 2'-Omethylguanosine
  modified_base 19: mod_base = OTHER; note = 2'-fluoroadenosine
  modified_base 20: mod_base = OTHER; note = 2'-Omethyluridine
  modified_base 22: mod_base = OTHER; note = 2'-Omethylguanosine
  modified_base 23: mod_base = OTHER; note = 2'-Omethylcytosine
  modified_base 24: mod_base = OTHER; note = 2'-Omethylguanosine
  modified_base 25: mod_base = OTHER; note = 2'-Omethylcytosine
  modified_base 38: mod_base = OTHER; note = Adenosine phosphorothiorate
  modified_base 39: mod_base = OTHER; note = Uridine phosphorothiorate
  modified_base 40: mod_base = OTHER; note = 2'-fluorouridine
  modified_base 43: mod_base = OTHER; note = 2'-Omethyladenosine
  modified_base 44: mod_base = OTHER; note = 2'-Omethyladenosine
  modified_base 45: mod_base = OTHER; note = 2'-Omethylguanosine
  modified_base 46: mod_base = OTHER; note = 2'-fluoroguanosine
  modified_base 48: mod_base = OTHER; note = 2'-fluorouridine
  modified_base 49: mod_base = OTHER; note = 2'-Omethylcytosine
  modified_base 50: mod_base = OTHER; note = 2'-Omethylcytosine
  modified_base 51: mod_base = OTHER; note = 2'-Omethylguanosine
  modified_base 52: mod_base = OTHER; note = 2'-Omethylguanosine
  modified_base 53: mod_base = OTHER; note = 2'-Omethylguanosine
  modified_base 54: mod_base = OTHER; note = 2'-Omethyluridine
  modified_base 61: mod_base = OTHER; note = 2'-Omethylcytosine
  modified_base 62: mod_base = OTHER; note = 2'-Omethylcytosine
  modified_base 63: mod_base = OTHER; note = 2'-fluorocytosine
  modified_base 64: mod_base = OTHER; note = 2'-Omethylguanosine
  modified_base 65: mod_base = OTHER; note = 2'-Omethylguanosine
  modified_base 66: mod_base = OTHER; note = 2'-Omethylcytosine
  modified_base 67: mod_base = OTHER; note = 2'-Omethylguanosine
  modified_base 68: mod_base = OTHER; note = 2'-Omethylguanosine

SEQ ID NO: 6450 - RNA, 76 nt, synthetic construct; identical to SEQ ID NO: 625
  source 1..76: mol_type = other RNA
  modified_base 1: mod_base = OTHER; note = Guanosine phosphorothiorate
  modified_base 4: mod_base = OTHER; note = Uridine phosphorothiorate
  modified_base 10: mod_base = OTHER; note = 2'-Omethylguanosine
  modified_base 11: mod_base = OTHER; note = 2'-fluorocytosine
  modified_base 12: mod_base = OTHER; note = Guanosine phosphorothiorate
  modified_base 13: mod_base = OTHER; note = 2'-fluorocytosine
  modified_base 14: mod_base = OTHER; note = 2'-fluoroadenosine
  modified_base 16: mod_base = OTHER; note = 2'-Omethyluridine
  modified_base 21: mod_base = OTHER; note = Adenosine phosphorothiorate
  modified_base 23: mod_base = OTHER; note = 2'-Omethylcytosine
  modified_base 24: mod_base = OTHER; note = 2'-fluoroguanosine
  modified_base 27: mod_base = OTHER; note = 2'-Omethyluridine
  modified_base 29: mod_base = OTHER; note = 2'-Omethylguanosine
  modified_base 30: mod_base = OTHER; note = 2'-Omethylguanosine
  modified_base 36: mod_base = OTHER; note = Adenosine phosphorothiorate
  modified_base 40: mod_base = OTHER; note = 2'-fluorouridine phosphorothiorate
  modified_base 41: mod_base = OTHER; note = 2'-fluorocytosine
  modified_base 42: mod_base = OTHER; note = Adenosine phosphorothiorate
  modified_base 44: mod_base = OTHER; note = Adenosine phosphorothiorate
  modified_base 45: mod_base = OTHER; note = 2'-Omethylguanosine
  modified_base 47: mod_base = OTHER; note = 2'-Omethyluridine phosphorothiorate
  modified_base 48: mod_base = OTHER; note = 2'-fluorouridine
  modified_base 49: mod_base = OTHER; note = 2'-Omethylcytosine phosphorothiorate
  modified_base 52: mod_base = OTHER; note = 2'-fluoroguanosine phosphorothiorate
  modified_base 53: mod_base = OTHER; note = 2'-fluoroguanosine
  modified_base 56: mod_base = OTHER; note = 2'-fluorocytosine
  modified_base 59: mod_base = OTHER; note = 2'-fluoroguanosine
  modified_base 60: mod_base = OTHER; note = 2'-fluorouridine
  modified_base 61: mod_base = OTHER; note = 2'-fluorocytosine
  modified_base 65: mod_base = OTHER; note = 2'-fluoroguanosine
  modified_base 67: mod_base = OTHER; note = 2'-Omethylguanosine
  modified_base 68: mod_base = OTHER; note = 2'-Omethylguanosine
  modified_base 70: mod_base = OTHER; note = Guanosine phosphorothiorate
  modified_base 75: mod_base = OTHER; note = 2'-Omethylcytosine
  modified_base 76: mod_base = OTHER; note = 2'-Omethyladenosine

SEQ ID NO: 6451 - RNA, 75 nt, synthetic construct; identical to SEQ ID NO: 3336
  source 1..75: mol_type = other RNA
  modified_base 1: mod_base = OTHER; note = 2'-Omethylcytosine phosphorothiorate
  modified_base 3: mod_base = OTHER; note = Uridine phosphorothiorate
  modified_base 14: mod_base = OTHER; note = Guanosine phosphorothiorate
  modified_base 26: mod_base = OTHER; note = 2'-Omethyluridine phosphorothiorate
  modified_base 27: mod_base = OTHER; note = 2'-fluorocytosine
  modified_base 37: mod_base = OTHER; note = 2'-Omethyladenosine phosphorothiorate
  modified_base 73: mod_base = OTHER; note = Cytosine phosphorothiorate
  modified_base 74: mod_base = OTHER; note = Cytosine phosphorothiorate

SEQ ID NO: 6452 - RNA, 75 nt, synthetic construct; identical to SEQ ID NO: 3311
  source 1..75: mol_type = other RNA
  modified_base 1: mod_base = OTHER; note = Guanosine phosphorothiorate
  modified_base 10: mod_base = OTHER; note = Guanosine phosphorothiorate
  modified_base 26: mod_base = OTHER; note = 2'-Omethyluridine
  modified_base 27: mod_base = OTHER; note = Cytosine phosphorothiorate
  modified_base 40: mod_base = OTHER; note = 2'-Omethylcytosine
  modified_base 48: mod_base = OTHER; note = 2'-fluorocytosine
  modified_base 65: mod_base = OTHER; note = Uridine phosphorothiorate
  modified_base 66: mod_base = OTHER; note = 2'-fluoroguanosine
  modified_base 73: mod_base = OTHER; note = 2'-fluorocytosine phosphorothiorate
  modified_base 74: mod_base = OTHER; note = Cytosine phosphorothiorate

SEQ ID NO: 6453 - RNA, 74 nt, synthetic construct; identical to SEQ ID NO: 3293
  source 1..74: mol_type = other RNA
  modified_base 2: mod_base = OTHER; note = 2'-fluorocytosine phosphorothiorate
  modified_base 4: mod_base = OTHER; note = Uridine phosphorothiorate
  modified_base 9: mod_base = OTHER; note = 2'-fluoroguanosine phosphorothiorate
  modified_base 10: mod_base = OTHER; note = 2'-fluorocytosine phosphorothiorate
  modified_base 26: mod_base = OTHER; note = 2'-Omethylcytosine phosphorothiorate
  modified_base 27: mod_base = OTHER; note = 2'-fluorouridine
  modified_base 36: mod_base = OTHER; note = 2'-Omethyladenosine phosphorothiorate
  modified_base 44: mod_base = OTHER; note = Guanosine phosphorothiorate
  modified_base 56: mod_base = OTHER; note = Adenosine phosphorothiorate
  modified_base 62: mod_base = OTHER; note = 2'-fluoroguanosine
  modified_base 67: mod_base = OTHER; note = Guanosine phosphorothiorate
  modified_base 73: mod_base = OTHER; note = 2'-Omethylcytosine phosphorothiorate

SEQ ID NO: 6454 - RNA, 85 nt, synthetic construct; identical to SEQ ID NO: 3317
  source 1..85: mol_type = other RNA
  modified_base 1: mod_base = OTHER; note = 2'-Omethylguanosine phosphorothiorate
  modified_base 2: mod_base = OTHER; note = 2'-Omethylcytosine phosphorothiorate
  modified_base 15: mod_base = OTHER; note = 2'-fluoroguanosine phosphorothiorate
  modified_base 36: mod_base = OTHER; note = 2'-Omethyladenosine phosphorothiorate
  modified_base 46: mod_base = OTHER; note = 2'-Omethylguanosine phosphorothiorate
  modified_base 60: mod_base = OTHER; note = 2'-fluoroadenosine
  modified_base 71: mod_base = OTHER; note = 2'-fluorocytosine

SEQ ID NO: 6455 - RNA, 75 nt, synthetic construct; identical to SEQ ID NO: 3336
  source 1..75: mol_type = other RNA
  modified_base 15: mod_base = OTHER; note = Uridine phosphorothiorate
  modified_base 28: mod_base = OTHER; note = 2'-fluoroadenosine
  modified_base 45: mod_base = OTHER; note = 2'-fluoroguanosine
  modified_base 49: mod_base = OTHER; note = 2'-fluoroadenosine
  modified_base 58: mod_base = OTHER; note = Guanosine phosphorothiorate
  modified_base 70: mod_base = OTHER; note = Guanosine phosphorothiorate
  modified_base 74: mod_base = OTHER; note = 2'-Omethylcytosine

SEQ ID NO: 6456 - RNA, 76 nt, synthetic construct; identical to SEQ ID NO: 3289
  source 1..76: mol_type = other RNA
  modified_base 1: mod_base = OTHER; note = 2'-Omethylguanosine phosphorothiorate
  modified_base 2: mod_base = OTHER; note = 2'-Omethylcytosine phosphorothiorate
  modified_base 3: mod_base = OTHER; note = 2'-Omethylcytosine
  modified_base 4: mod_base = OTHER; note = 2'-Omethyluridine
  modified_base 5: mod_base = OTHER; note = 2'-Omethylguanosine
  modified_base 6: mod_base = OTHER; note = 2'-Omethylguanosine
  modified_base 10: mod_base = OTHER; note = 2'-Omethylguanosine
  modified_base 11: mod_base = OTHER; note = 2'-Omethylcytosine
  modified_base 12: mod_base = OTHER; note = 2'-Omethyluridine
  modified_base 13: mod_base = OTHER; note = 2'-Omethylcytosine
  modified_base 18: mod_base = OTHER; note = 2'-Omethylguanosine
  modified_base 19: mod_base = OTHER; note = 2'-Omethylguanosine
  modified_base 22: mod_base = OTHER; note = 2'-Omethylguanosine
  modified_base 23: mod_base = OTHER; note = 2'-Omethyladenosine
  modified_base 24: mod_base = OTHER; note = 2'-Omethylguanosine
  modified_base 25: mod_base = OTHER; note = 2'-Omethylcytosine
  modified_base 33: mod_base = OTHER; note = 2'-fluorouridine
  modified_base 35: mod_base = OTHER; note = Uridine phosphorothiorate
  modified_base 37: mod_base = OTHER; note = Adenosine phosphorothiorate
  modified_base 38: mod_base = OTHER; note = Adenosine phosphorothiorate
  modified_base 41: mod_base = OTHER; note = 2'-fluorouridine
  modified_base 42: mod_base = OTHER; note = 2'-Omethylguanosine
  modified_base 43: mod_base = OTHER; note = 2'-Omethyladenosine
  modified_base 44: mod_base = OTHER; note = 2'-fluoroguanosine
  modified_base 49: mod_base = OTHER; note = 2'-Omethylcytosine
  modified_base 50: mod_base = OTHER; note = 2'-Omethyladenosine
  modified_base 51: mod_base = OTHER; note = 2'-Omethylguanosine
  modified_base 52: mod_base = OTHER; note = 2'-Omethylguanosine
  modified_base 53: mod_base = OTHER; note = 2'-Omethylguanosine
  modified_base 54: mod_base = OTHER; note = Uridine phosphorothiorate
  modified_base 55: mod_base = OTHER; note = Uridine phosphorothiorate
  modified_base 61: mod_base = OTHER; note = 2'-Omethylcytosine
  modified_base 62: mod_base = OTHER; note = 2'-Omethylcytosine
  modified_base 63: mod_base = OTHER; note = 2'-fluorocytosine
  modified_base 64: mod_base = OTHER; note = 2'-Omethyluridine
  modified_base 65: mod_base = OTHER; note = 2'-Omethylguanosine
  modified_base 66: mod_base = OTHER; note = 2'-Omethyluridine
  modified_base 67: mod_base = OTHER; note = 2'-Omethylcytosine
  modified_base 68: mod_base = OTHER; note = 2'-Omethylcytosine
  modified_base 73: mod_base = OTHER; note = 2'-Omethylguanosine

SEQ ID NO: 6457 - RNA, 76 nt, synthetic construct; identical to SEQ ID NO: 3289
  source 1..76: mol_type = other RNA
  modified_base 1: mod_base = OTHER; note = 2'-Omethylguanosine
  modified_base 2: mod_base = OTHER; note = 2'-Omethylcytosine
  modified_base 3: mod_base = OTHER; note = 2'-Omethylcytosine
  modified_base 4: mod_base = OTHER; note = 2'-Omethyluridine
  modified_base 5: mod_base = OTHER; note = 2'-Omethylguanosine
  modified_base 6: mod_base = OTHER; note = 2'-Omethylguanosine
  modified_base 13: mod_base = OTHER; note = 2'-Omethylcytosine
  modified_base 14: mod_base = OTHER; note = 2'-Omethyladenosine
  modified_base 15: mod_base = OTHER; note = 2'-Omethylguanosine
  modified_base 16: mod_base = OTHER; note = 2'-Omethyluridine
  modified_base 18: mod_base = OTHER; note = 2'-Omethylguanosine
  modified_base 19: mod_base = OTHER; note = 2'-Omethylguanosine
  modified_base 20: mod_base = OTHER; note = Uridine phosphorothiorate
  modified_base 21: mod_base = OTHER; note = Adenosine phosphorothiorate
  modified_base 25: mod_base = OTHER; note = 2'-Omethylcytosine
  modified_base 33: mod_base = OTHER; note = 2'-fluorouridine
  modified_base 34: mod_base = OTHER; note = 2'-Omethyluridine
  modified_base 35: mod_base = OTHER; note = Uridine phosphorothiorate
  modified_base 37: mod_base = OTHER; note = Adenosine phosphorothiorate
  modified_base 38: mod_base = OTHER; note = Adenosine phosphorothiorate
  modified_base 49: mod_base = OTHER; note = 2'-Omethylcytosine
  modified_base 50: mod_base = OTHER; note = 2'-Omethyladenosine
  modified_base 52: mod_base = OTHER; note = 2'-Omethylguanosine
  modified_base 54: mod_base = OTHER; note = Uridine phosphorothiorate
  modified_base 55: mod_base = OTHER; note = Uridine phosphorothiorate
  modified_base 61: mod_base = OTHER; note = 2'-Omethylcytosine
  modified_base 65: mod_base = OTHER; note = 2'-Omethylguanosine
  modified_base 73: mod_base = OTHER; note = 2'-Omethylguanosine

SEQ ID NO: 6458 - RNA, 76 nt, synthetic construct; identical to SEQ ID NO: 3295
  source 1..76: mol_type = other RNA
  modified_base 1: mod_base = OTHER; note = 2'-Omethylcytosine phosphorothiorate
  modified_base 2: mod_base = OTHER; note = 2'-Omethylcytosine phosphorothiorate
  modified_base 3: mod_base = OTHER; note = 2'-Omethyluridine
  modified_base 4: mod_base = OTHER; note = 2'-Omethyluridine
  modified_base 5: mod_base = OTHER; note = Cytosine phosphorothiorate
  modified_base 6: mod_base = OTHER; note = 2'-fluoroguanosine phosphorothiorate
  modified_base 8: mod_base = OTHER; note = 2'-fluorouridine
  modified_base 10: mod_base = OTHER; note = 2'-Omethylguanosine phosphorothiorate
  modified_base 11: mod_base = OTHER; note = 2'-fluorocytosine
  modified_base 17: mod_base = OTHER; note = 2'-Omethyluridine
  modified_base 23: mod_base = OTHER; note = Adenosine phosphorothiorate
  modified_base 25: mod_base = OTHER; note = 2'-Omethylcytosine phosphorothiorate
  modified_base 26: mod_base = OTHER; note = 2'-fluoroguanosine
  modified_base 38: mod_base = OTHER; note = Adenosine phosphorothiorate
  modified_base 39: mod_base = OTHER; note = 2'-Omethyluridine phosphorothiorate
  modified_base 52: mod_base = OTHER; note = 2'-Omethylguanosine
  modified_base 74: mod_base = OTHER; note = 2'-fluorocytosine
  modified_base 75: mod_base = OTHER; note = Cytosine phosphorothiorate
  modified_base 76: mod_base = OTHER; note = 2'-Omethyladenosine

SEQ ID NO: 6459 - RNA, 76 nt, synthetic construct; identical to SEQ ID NO: 3289
  source 1..76: mol_type = other RNA
  modified_base 1: mod_base = OTHER; note = 2'-Omethylguanosine
  modified_base 13: mod_base = OTHER; note = 2'-Omethylcytosine
  modified_base 18: mod_base = OTHER; note = 2'-Omethylguanosine
  modified_base 19: mod_base = OTHER; note = 2'-Omethylguanosine
  modified_base 25: mod_base = OTHER; note = 2'-Omethylcytosine
  modified_base 33: mod_base = OTHER; note = 2'-fluorouridine
  modified_base 34: mod_base = OTHER; note = 2'-Omethyluridine
  modified_base 35: mod_base = OTHER; note = Uridine phosphorothiorate
  modified_base 37: mod_base = OTHER; note = Adenosine phosphorothiorate
  modified_base 38: mod_base = OTHER; note = Adenosine phosphorothiorate
  modified_base 41: mod_base = OTHER; note = 2'-fluorouridine
  modified_base 42: mod_base = OTHER; note = 2'-Omethylguanosine
  modified_base 43: mod_base = OTHER; note = 2'-Omethyladenosine
  modified_base 44: mod_base = OTHER; note = 2'-fluoroguanosine
  modified_base 49: mod_base = OTHER; note = 2'-Omethylcytosine
  modified_base 50: mod_base = OTHER; note = 2'-Omethyladenosine
  modified_base 51: mod_base = OTHER; note = 2'-Omethylguanosine
  modified_base 52: mod_base = OTHER; note = 2'-Omethylguanosine
  modified_base 53: mod_base = OTHER; note = 2'-Omethylguanosine
  modified_base 54: mod_base = OTHER; note = Uridine phosphorothiorate
  modified_base 55: mod_base = OTHER; note = Uridine phosphorothiorate
  modified_base 61: mod_base = OTHER; note = 2'-Omethylcytosine
  modified_base 65: mod_base = OTHER; note = 2'-Omethylguanosine
  modified_base 73: mod_base = OTHER; note = 2'-Omethylguanosine

SEQ ID NO: 6460 - RNA, 86 nt, synthetic construct; identical to SEQ ID NO: 3290
  source 1..86: mol_type = other RNA
  modified_base 1: mod_base = OTHER; note = 2'-Omethyladenosine
  modified_base 9: mod_base = OTHER; note = Guanosine phosphorothiorate
  modified_base 10: mod_base = OTHER; note = 2'-Omethylguanosine
  modified_base 13: mod_base = OTHER; note = 2'-Omethylguanosine
  modified_base 17: mod_base = OTHER; note = Guanosine phosphorothiorate
  modified_base 18: mod_base = OTHER; note = 2'-Omethylguanosine
  modified_base 19: mod_base = OTHER; note = Uridine phosphorothiorate
  modified_base 20: mod_base = OTHER; note = 2'-Omethyluridine
  modified_base 25: mod_base = OTHER; note = 2'-Omethylcytosine
  modified_base 29: mod_base = OTHER; note = 2'-Omethylguanosine
  modified_base 33: mod_base = OTHER; note = 2'-fluorouridine
  modified_base 35: mod_base = OTHER; note = Cytosine phosphorothiorate
  modified_base 37: mod_base = OTHER; note = Guanosine phosphorothiorate
  modified_base 38: mod_base = OTHER; note = Adenosine phosphorothiorate
  modified_base 41: mod_base = OTHER; note = 2'-fluorocytosine
  modified_base 43: mod_base = OTHER; note = 2'-Omethyladenosine
  modified_base 44: mod_base = OTHER; note = 2'-fluorouridine
  modified_base 57: mod_base = OTHER; note = Guanosine phosphorothiorate
  modified_base 60: mod_base = OTHER; note = 2'-Omethyluridine
  modified_base 62: mod_base = OTHER; note = 2'-Omethylguanosine
  modified_base 64: mod_base = OTHER; note = Uridine phosphorothiorate
  modified_base 65: mod_base = OTHER; note = Uridine phosphorothiorate
  modified_base 66: mod_base = OTHER; note = 2'-Omethylcytosine
  modified_base 67: mod_base = OTHER; note = Guanosine phosphorothiorate
  modified_base 72: mod_base = OTHER; note = 2'-Omethylcytosine
  modified_base 73: mod_base = OTHER; note = 2'-fluorocytosine
  modified_base 75: mod_base = OTHER; note = 2'-Omethylcytosine
  modified_base 81: mod_base = OTHER; note = 2'-Omethylguanosine
  modified_base 83: mod_base = OTHER; note = 2'-Omethyladenosine

SEQ ID NO: 6461 - RNA, 85 nt, synthetic construct; identical to SEQ ID NO: 3310
  source 1..85: mol_type = other RNA
  modified_base 1: mod_base = OTHER; note = 2'-Omethylcytosine
  modified_base 5: mod_base = OTHER; note = 2'-fluoroguanosine
  modified_base 33: mod_base = OTHER; note = 2'-fluorocytosine
  modified_base 43: mod_base = OTHER; note = 2'-Omethyluridine
  modified_base 46: mod_base = OTHER; note = Adenosine phosphorothiorate
  modified_base 65: mod_base = OTHER; note = Cytosine phosphorothiorate
  modified_base 72: mod_base = OTHER; note = 2'-fluorocytosine
  modified_base 85: mod_base = OTHER; note = 2'-fluoroadenosine

SEQ ID NO: 6462 - RNA, 85 nt, synthetic construct; identical to SEQ ID NO: 3286
  source 1..85: mol_type = other RNA
  modified_base 1: mod_base = OTHER; note = 2'-fluorocytosine
  modified_base 11: mod_base = OTHER; note = Cytosine phosphorothiorate
  modified_base 52: mod_base = OTHER; note = Guanosine phosphorothiorate
  modified_base 58: mod_base = OTHER; note = 2'-Omethylguanosine
  modified_base 71: mod_base = OTHER; note = 2'-fluorocytosine
  modified_base 79: mod_base = OTHER; note = Guanosine phosphorothiorate

SEQ ID NO: 6463 - RNA, 75 nt, synthetic construct; identical to SEQ ID NO: 3299
  source 1..75: mol_type = other RNA
  modified_base 1: mod_base = OTHER; note = Cytosine phosphorothiorate
  modified_base 13: mod_base = OTHER; note = 2'-fluoroadenosine phosphorothiorate
  modified_base 21: mod_base = OTHER; note = 2'-fluoroguanosine phosphorothiorate
  modified_base 29: mod_base = OTHER; note = Guanosine phosphorothiorate
  modified_base 40: mod_base = OTHER; note = 2'-Omethyluridine
  modified_base 46: mod_base = OTHER; note = 2'-fluorouridine phosphorothiorate
  modified_base 75: mod_base = OTHER; note = 2'-Omethyladenosine

SEQ ID NO: 6464 - RNA, 76 nt, synthetic construct; identical to SEQ ID NO: 625
  source 1..76: mol_type = other RNA
  modified_base 10: mod_base = OTHER; note = 2'-fluoroguanosine
  modified_base 11: mod_base = OTHER; note = 2'-fluorocytosine
  modified_base 12: mod_base = OTHER; note = 2'-fluoroguanosine
  modified_base 13: mod_base = OTHER; note = 2'-fluorocytosine
  modified_base 22: mod_base = OTHER; note = 2'-fluoroguanosine
  modified_base 23: mod_base = OTHER; note = 2'-fluorocytosine
  modified_base 24: mod_base = OTHER; note = 2'-fluoroguanosine
  modified_base 25: mod_base = OTHER; note = 2'-fluorocytosine

SEQ ID NO: 6465 - RNA, 76 nt, synthetic construct; identical to SEQ ID NO: 625
  source 1..76: mol_type = other RNA
  modified_base 1: mod_base = OTHER; note = 2'-Omethylguanosine
  modified_base 18: mod_base = OTHER; note = 2'-Omethylguanosine
  modified_base 33: mod_base = OTHER; note = 2'-O-(2-Methoxyethyl) thymine

SEQ ID NO: 6466 - RNA, 85 nt, synthetic construct; identical to SEQ ID NO: 3288
  source 1..85: mol_type = other RNA
  modified_base 1: mod_base = OTHER; note = 2'-Omethylcytosine phosphorothiorate
  modified_base 40: mod_base = OTHER; note = Cytosine phosphorothiorate
  modified_base 49: mod_base = OTHER; note = 2'-fluorouridine
  modified_base 70: mod_base = OTHER; note = 2'-fluorocytosine
  modified_base 85: mod_base = OTHER; note = 2'-fluoroadenosine

SEQ ID NO: 6467 - RNA, 86 nt, synthetic construct; identical to SEQ ID NO: 3290
  source 1..86: mol_type = other RNA
  modified_base 13: mod_base = OTHER; note = 2'-Omethylguanosine

SEQ ID NO: 6468 - RNA, 75 nt, synthetic construct; identical to SEQ ID NO: 3306
  source 1..75: mol_type = other RNA
  modified_base 10: mod_base = OTHER; note = 2'-Omethylguanosine
  modified_base 11: mod_base = OTHER; note = 2'-Omethylcytosine
  modified_base 12: mod_base = OTHER; note = 2'-Omethylguanosine
  modified_base 13: mod_base = OTHER; note = 2'-Omethylcytosine
  modified_base 48: mod_base = OTHER; note = 2'-Omethylguanosine
  modified_base 49: mod_base = OTHER; note = 2'-Omethylcytosine
  modified_base 50: mod_base = OTHER; note = 2'-Omethylguanosine
  modified_base 51: mod_base = OTHER; note = 2'-Omethyluridine
  modified_base 52: mod_base = OTHER; note = 2'-Omethylguanosine
  modified_base 72: mod_base = OTHER; note = 2'-Omethyladenosine

SEQ ID NO: 6469 - RNA, 76 nt, synthetic construct; identical to SEQ ID NO: 3318
  source 1..76: mol_type = other RNA
  modified_base 1: mod_base = OTHER; note = 2'-Omethylcytosine
  modified_base 13: mod_base = OTHER; note = 2'-Omethylcytosine
  modified_base 14: mod_base = OTHER; note = 2'-Omethyladenosine
  modified_base 15: mod_base = OTHER; note = 2'-Omethylguanosine
  modified_base 16: mod_base = OTHER; note = 2'-Omethyluridine
  modified_base 18: mod_base = OTHER; note = 2'-Omethylguanosine
  modified_base 19: mod_base = OTHER; note = 2'-Omethylguanosine
  modified_base 20: mod_base = OTHER; note = Uridine phosphorothiorate
  modified_base 21: mod_base = OTHER; note = Adenosine phosphorothiorate
  modified_base 25: mod_base = OTHER; note = 2'-Omethylcytosine
  modified_base 33: mod_base = OTHER; note = 2'-fluorouridine
  modified_base 34: mod_base = OTHER; note = 2'-Omethylcytosine
  modified_base 35: mod_base = OTHER; note = Uridine phosphorothiorate
  modified_base 37: mod_base = OTHER; note = Guanosine phosphorothiorate
  modified_base 38: mod_base = OTHER; note = Adenosine phosphorothiorate
  modified_base 49: mod_base = OTHER; note = 2'-Omethylguanosine
  modified_base 50: mod_base = OTHER; note = 2'-Omethylcytosine
  modified_base 52: mod_base = OTHER; note = 2'-Omethylguanosine
  modified_base 54: mod_base = OTHER; note = Uridine phosphorothiorate
  modified_base 55: mod_base = OTHER; note = Uridine phosphorothiorate
  modified_base 56: mod_base = OTHER; note = 2'-Omethylcytosine
  modified_base 57: mod_base = OTHER; note = Guanosine phosphorothiorate
  modified_base 58: mod_base = OTHER; note = Adenosine phosphorothiorate
  modified_base 59: mod_base = OTHER; note = 2'-Omethyladenosine
  modified_base 61: mod_base = OTHER; note = 2'-Omethylcytosine
  modified_base 65: mod_base = OTHER; note = 2'-Omethylcytosine
  modified_base 73: mod_base = OTHER; note = 2'-Omethyladenosine

SEQ ID NO: 6470 - RNA, 76 nt, synthetic construct; identical to SEQ ID NO: 625
  source 1..76: mol_type = other RNA
  modified_base 1: mod_base = OTHER; note = 2'-Omethylguanosine phosphorothiorate
  modified_base 2: mod_base = OTHER; note = 2'-Omethylguanosine
  modified_base 17: mod_base = OTHER; note = 2'-Omethylguanosine
  modified_base 25: mod_base = OTHER; note = 2'-Omethylcytosine
  modified_base 33: mod_base = OTHER; note = 2'-fluorouridine
  modified_base 35: mod_base = OTHER; note = Cytosine phosphorothiorate
  modified_base 37: mod_base = OTHER; note = Adenosine phosphorothiorate
  modified_base 52: mod_base = OTHER; note = 2'-fluoroguanosine
  modified_base 56: mod_base = OTHER; note = 2'-Omethylcytosine
  modified_base 62: mod_base = OTHER; note = 2'-Omethylcytosine
  modified_base 73: mod_base = OTHER; note = 2'-Omethylguanosine
  modified_base 75: mod_base = OTHER; note = 2'-fluorocytosine phosphorothiorate

SEQ ID NO: 6471 - DNA, 76 bp, synthetic construct; identical to SEQ ID NO: 1924
  source 1..76: mol_type = other DNA
  modified_base 1: mod_base = OTHER; note = 2'-Omethylguanosine phosphorothiorate
  modified_base 2: mod_base = OTHER; note = 2'-Omethylguanosine phosphorothiorate
  modified_base 3: mod_base = OTHER; note = 2'-O-(2-Methoxyethyl) 5-methylcytosine phosphorothiorate
  modified_base 8: mod_base = OTHER; note = Uridine phosphorothiorate
  modified_base 11: mod_base = OTHER; note = 2'-O-(2-Methoxyethyl) 5-methylcytosine
  modified_base 18: mod_base = OTHER; note = 2'-O-(2-Methoxyethyl) guanosine
  modified_base 21: mod_base = OTHER; note = 2'-fluoroadenosine phosphorothiorate
  modified_base 22: mod_base = OTHER; note = 2'-O-(2-Methoxyethyl) guanosine
  modified_base 23: mod_base = OTHER; note = 2'-Omethylcytosine
  modified_base 24: mod_base = OTHER; note = Guanosine phosphorothiorate
  modified_base 25: mod_base = OTHER; note = 2'-Omethylcytosine
  modified_base 26: mod_base = OTHER; note = Adenosine phosphorothiorate
  modified_base 27: mod_base = OTHER; note = Uridine phosphorothiorate
  modified_base 28: mod_base = OTHER; note = 2'-fluorouridine
  modified_base 34: mod_base = OTHER; note = Uridine phosphorothiorate
  modified_base 38: mod_base = OTHER; note = Adenosine phosphorothiorate
  modified_base 39: mod_base = OTHER; note = 2'-O-(2-Methoxyethyl) thymine
  modified_base 41: mod_base = OTHER; note = Cytosine phosphorothiorate
  modified_base 42: mod_base = OTHER; note = 2'-Omethyladenosine
  modified_base 45: mod_base = OTHER; note = Guanosine phosphorothiorate
  modified_base 48: mod_base = OTHER; note = Uridine phosphorothiorate
  modified_base 49: mod_base = OTHER; note = 2'-fluorocytosine
  modified_base 51: mod_base = OTHER; note = Guanosine phosphorothiorate
  modified_base 53: mod_base = OTHER; note = 2'-O-(2-Methoxyethyl) guanosine phosphorothiorate
  modified_base 54: mod_base = OTHER; note = 2'-O-(2-Methoxyethyl) thymine
  modified_base 59: mod_base = OTHER; note = deoxyguanosine phosphorothiorate
  modified_base 60: mod_base = OTHER; note = 2'-fluorouridine
  modified_base 65: mod_base = OTHER; note = 2'-fluoroguanosine phosphorothiorate
  modified_base 70: mod_base = OTHER; note = Guanosine phosphorothiorate
  modified_base 71: mod_base = OTHER; note = 2'-O-(2-Methoxyethyl) thymine
  modified_base 73: mod_base = OTHER; note = 2'-Omethylguanosine
  modified_base 75: mod_base = OTHER; note = Cytosine phosphorothiorate
  modified_base 76: mod_base = OTHER; note = 2'-O-(2-Methoxyethyl) adenosine
  misc_feature 1..12: note = RNA
  misc_feature 13: note = DNA
  misc_feature 14..42: note = RNA
  misc_feature 43: note = DNA
  misc_feature 44..46: note = RNA
  misc_feature 47: note = DNA
  misc_feature 48..51: note = RNA
  misc_feature 52: note = DNA
  misc_feature 53..58: note = RNA
  misc_feature 59: note = DNA
  misc_feature 60..65: note = RNA
  misc_feature 66: note = DNA
  misc_feature 67..76: note = RNA

SEQ ID NO: 6472 - RNA, 86 nt, synthetic construct; identical to SEQ ID NO: 3290
  source 1..86: mol_type = other RNA
  modified_base 1: mod_base = OTHER; note = 2'-Omethyladenosine
  modified_base 16: mod_base = OTHER; note = 2'-Omethyluridine

SEQ ID NO: 6473 - RNA, 75 nt, synthetic construct; identical to SEQ ID NO: 3299
  source 1..75: mol_type = other RNA
  modified_base 19: mod_base = OTHER; note = 2'-fluorouridine
  modified_base 20: mod_base = OTHER; note = Adenosine phosphorothiorate
  modified_base 25: mod_base = OTHER; note = 2'-fluoroadenosine
  modified_base 27: mod_base = OTHER; note = 2'-Omethylcytosine
  modified_base 46: mod_base = OTHER; note = 2'-fluorouridine
  modified_base 73: mod_base = OTHER; note = 2'-Omethylcytosine
  modified_base 75: mod_base = OTHER; note = 2'-fluoroadenosine

SEQ ID NO: 6474 - RNA, 76 nt, synthetic construct; identical to SEQ ID NO: 625
  source 1..76: mol_type = other RNA
  modified_base 3: mod_base = OTHER; note = 2'-Omethylcytosine
  modified_base 4: mod_base = OTHER; note = 2'-Omethyluridine phosphorothiorate
  modified_base 5: mod_base = OTHER; note = 2'-Omethylcytosine
  modified_base 6: mod_base = OTHER; note = 2'-Omethylcytosine
  modified_base 9: mod_base = OTHER; note = Guanosine phosphorothiorate
  modified_base 10: mod_base = OTHER; note = Guanosine phosphorothiorate
  modified_base 11: mod_base = OTHER; note = 2'-Omethylcytosine
  modified_base 13: mod_base = OTHER; note = 2'-fluorocytosine
  modified_base 15: mod_base = OTHER; note = 2'-Omethyladenosine
  modified_base 22: mod_base = OTHER; note = 2'-Omethylguanosine
  modified_base 23: mod_base = OTHER; note = 2'-fluorocytosine
  modified_base 24: mod_base = OTHER; note = Guanosine phosphorothiorate
  modified_base 25: mod_base = OTHER; note = 2'-fluorocytosine
  modified_base 26: mod_base = OTHER; note = 2'-fluoroadenosine
  modified_base 28: mod_base = OTHER; note = 2'-fluorouridine
  modified_base 30: mod_base = OTHER; note = Guanosine phosphorothiorate
  modified_base 38: mod_base = OTHER; note = Adenosine phosphorothiorate
  modified_base 41: mod_base = OTHER; note = 2'-Omethylcytosine
  modified_base 42: mod_base = OTHER; note = 2'-Omethyladenosine
  modified_base 45: mod_base = OTHER; note = 2'-fluoroguanosine
  modified_base 48: mod_base = OTHER; note = 2'-fluorouridine
  modified_base 49: mod_base = OTHER; note = 2'-fluorocytosine
  modified_base 53: mod_base = OTHER; note = 2'-Omethylguanosine
  modified_base 57: mod_base = OTHER; note = 2'-fluoroguanosine phosphorothiorate
  modified_base 59: mod_base = OTHER; note = 2'-Omethylguanosine
  modified_base 61: mod_base = OTHER; note = 2'-fluorocytosine
  modified_base 62: mod_base = OTHER; note = 2'-Omethylcytosine
  modified_base 63: mod_base = OTHER; note = Cytosine phosphorothiorate
  modified_base 65: mod_base = OTHER; note = 2'-fluoroguanosine phosphorothiorate
  modified_base 66: mod_base = OTHER; note = 2'-fluorocytosine
  modified_base 72: mod_base = OTHER; note = Cytosine phosphorothiorate
  modified_base 73: mod_base = OTHER; note = 2'-fluoroguanosine
  modified_base 74: mod_base = OTHER; note = Cytosine phosphorothiorate
  modified_base 75: mod_base = OTHER; note = 2'-Omethylcytosine phosphorothiorate
  modified_base 76: mod_base = OTHER; note = 2'-fluoroadenosine

SEQ ID NO: 6475 - RNA, 76 nt, synthetic construct
  source 1..76: mol_type = other RNA
ggctccctggcgcaatggagagcgcattggacttcaaattcaaaggttccgggttcgagtcccgggggagtcgcca

SEQ ID NO: 6476 - RNA, 76 nt, synthetic construct; identical to SEQ ID NO: 3289
  source 1..76: mol_type = other RNA
  modified_base 1: mod_base = OTHER; note = 2'-Omethylguanosine phosphorothiorate
  modified_base 2: mod_base = OTHER; note = 2'-Omethylcytosine phosphorothiorate
  modified_base 3: mod_base = OTHER; note = 2'-Omethylcytosine
  modified_base 4: mod_base = OTHER; note = 2'-Omethyluridine
  modified_base 5: mod_base = OTHER; note = 2'-Omethylguanosine
  modified_base 6: mod_base = OTHER; note = 2'-Omethylguanosine
  modified_base 10: mod_base = OTHER; note = 2'-Omethylguanosine
  modified_base 11: mod_base = OTHER; note = 2'-Omethylcytosine
  modified_base 12: mod_base = OTHER; note = 2'-Omethyluridine
  modified_base 13: mod_base = OTHER; note = 2'-Omethylcytosine
  modified_base 22: mod_base = OTHER; note = 2'-Omethylguanosine
  modified_base 23: mod_base = OTHER; note = 2'-Omethyladenosine
  modified_base 24: mod_base = OTHER; note = 2'-Omethylguanosine
  modified_base 25: mod_base = OTHER; note = 2'-Omethylcytosine
  modified_base 33: mod_base = OTHER; note = 2'-fluorouridine
  modified_base 35: mod_base = OTHER; note = Uridine phosphorothiorate
  modified_base 37: mod_base = OTHER; note = Adenosine phosphorothiorate
  modified_base 38: mod_base = OTHER; note = Adenosine phosphorothiorate
  modified_base 49: mod_base = OTHER; note = 2'-Omethylcytosine
  modified_base 50: mod_base = OTHER; note = 2'-Omethyladenosine
  modified_base 51: mod_base = OTHER; note = 2'-Omethylguanosine
  modified_base 52: mod_base = OTHER; note = 2'-Omethylguanosine
  modified_base 53: mod_base = OTHER; note = 2'-Omethylguanosine
  modified_base 54: mod_base = OTHER; note = 2'-Omethyluridine
  modified_base 56: mod_base = OTHER; note = 2'-Omethylcytosine
  modified_base 59: mod_base = OTHER; note = 2'-Omethylguanosine
  modified_base 61: mod_base = OTHER; note = 2'-Omethylcytosine
  modified_base 62: mod_base = OTHER; note = 2'-Omethylcytosine
  modified_base 63: mod_base = OTHER; note = 2'-fluorocytosine
  modified_base 64: mod_base = OTHER; note = 2'-Omethyluridine
  modified_base 65: mod_base = OTHER; note = 2'-Omethylguanosine
  modified_base 66: mod_base = OTHER; note = 2'-Omethyluridine
  modified_base 67: mod_base = OTHER; note = 2'-Omethylcytosine
  modified_base 68: mod_base = OTHER; note = 2'-Omethylcytosine
  modified_base 73: mod_base = OTHER; note = 2'-Omethylguanosine

SEQ ID NO: 6477 - RNA, 76 nt, synthetic construct; identical to SEQ ID NO: 3295
  source 1..76: mol_type = other RNA
  modified_base 1: mod_base = OTHER; note = 2'-fluorocytosine
  modified_base 2: mod_base = OTHER; note = 2'-Omethylcytosine
  modified_base 3: mod_base = OTHER; note = 2'-Omethyluridine phosphorothiorate
  modified_base 4: mod_base = OTHER; note = 2'-Omethyluridine phosphorothiorate
  modified_base 6: mod_base = OTHER; note = 2'-fluoroguanosine phosphorothiorate
  modified_base 7: mod_base = OTHER; note = 2'-Omethyladenosine
  modified_base 9: mod_base = OTHER; note = 2'-fluoroadenosine phosphorothiorate
  modified_base 12: mod_base = OTHER; note = 2'-fluorouridine phosphorothiorate
  modified_base 14: mod_base = OTHER; note = Adenosine phosphorothiorate
  modified_base 16: mod_base = OTHER; note = 2'-fluorouridine
  modified_base 24: mod_base = OTHER; note = 2'-Omethylguanosine
  modified_base 37: mod_base = OTHER; note = 2'-Omethylguanosine phosphorothiorate
  modified_base 38: mod_base = OTHER; note = 2'-Omethyladenosine phosphorothiorate
  modified_base 42: mod_base = OTHER; note = 2'-fluorouridine
  modified_base 45: mod_base = OTHER; note = 2'-fluoroguanosine phosphorothiorate
  modified_base 51: mod_base = OTHER; note = 2'-Omethyluridine
  modified_base 53: mod_base = OTHER; note = Guanosine phosphorothiorate
  modified_base 69: mod_base = OTHER; note = 2'-fluoroadenosine
  modified_base 75: mod_base = OTHER; note = 2'-fluorocytosine
  modified_base 76: mod_base = OTHER; note = 2'-fluoroadenosine

SEQ ID NO: 6478 - RNA, 85 nt, synthetic construct; identical to SEQ ID NO: 3286
  source 1..85: mol_type = other RNA
  modified_base 1: mod_base = OTHER; note = 2'-Omethylcytosine
  modified_base 11: mod_base = OTHER; note = Cytosine phosphorothiorate
  modified_base 20: mod_base = OTHER; note = 2'-fluoroadenosine
  modified_base 26: mod_base = OTHER; note = 2'-fluorouridine
  modified_base 27: mod_base = OTHER; note = 2'-Omethyluridine phosphorothiorate
  modified_base 30: mod_base = OTHER; note = 2'-fluoroadenosine
  modified_base 32: mod_base = OTHER; note = 2'-fluorouridine
  modified_base 34: mod_base = OTHER; note = Uridine phosphorothiorate
  modified_base 40: mod_base = OTHER; note = Cytosine phosphorothiorate
  modified_base 43: mod_base = OTHER; note = 2'-Omethyluridine
  modified_base 45: mod_base = OTHER; note = Guanosine phosphorothiorate
  modified_base 46: mod_base = OTHER; note = 2'-Omethyladenosine
  modified_base 48: mod_base = OTHER; note = 2'-Omethyladenosine
  modified_base 54: mod_base = OTHER; note = 2'-fluorocytosine
  modified_base 55: mod_base = OTHER; note = Cytosine phosphorothiorate
  modified_base 57: mod_base = OTHER; note = 2'-Omethylcytosine
  modified_base 62: mod_base = OTHER; note = 2'-Omethylguanosine phosphorothiorate
  modified_base 71: mod_base = OTHER; note = Cytosine phosphorothiorate
  modified_base 75: mod_base = OTHER; note = 2'-fluorouridine
  modified_base 77: mod_base = OTHER; note = 2'-fluorocytosine
  modified_base 84: mod_base = OTHER; note = 2'-Omethylcytosine

SEQ ID NO: 6479 - RNA, 76 nt, synthetic construct; identical to SEQ ID NO: 625
  source 1..76: mol_type = other RNA
  modified_base 3: mod_base = OTHER; note = 2'-fluorocytosine
  modified_base 4: mod_base = OTHER; note = 2'-Omethyluridine
  modified_base 7: mod_base = OTHER; note = Guanosine phosphorothiorate
  modified_base 8: mod_base = OTHER; note = Uridine phosphorothiorate
  modified_base 11: mod_base = OTHER; note = 2'-fluorocytosine phosphorothiorate
  modified_base 12: mod_base = OTHER; note = 2'-fluoroguanosine
  modified_base 17: mod_base = OTHER; note = 2'-Omethylguanosine
  modified_base 22: mod_base = OTHER; note = Guanosine phosphorothiorate
  modified_base 26: mod_base = OTHER; note = 2'-Omethyladenosine phosphorothiorate
  modified_base 27: mod_base = OTHER; note = 2'-Omethyluridine
  modified_base 28: mod_base = OTHER; note = 2'-fluorouridine phosphorothiorate
  modified_base 29: mod_base = OTHER; note = 2'-Omethylguanosine
  modified_base 32: mod_base = OTHER; note = 2'-fluorocytosine
  modified_base 33: mod_base = OTHER; note = 2'-fluorouridine
  modified_base 34: mod_base = OTHER; note = 2'-Omethyluridine
  modified_base 40: mod_base = OTHER; note = Uridine phosphorothiorate
  modified_base 41: mod_base = OTHER; note = 2'-fluorocytosine
  modified_base 42: mod_base = OTHER; note = 2'-fluoroadenosine
  modified_base 44: mod_base = OTHER; note = 2'-fluoroadenosine
  modified_base 47: mod_base = OTHER; note = 2'-Omethyluridine
  modified_base 54: mod_base = OTHER; note = Uridine phosphorothiorate
  modified_base 56: mod_base = OTHER; note = 2'-fluorocytosine
  modified_base 60: mod_base = OTHER; note = 2'-fluorouridine
  modified_base 62: mod_base = OTHER; note = 2'-Omethylcytosine
  modified_base 64: mod_base = OTHER; note = 2'-Omethylguanosine
  modified_base 66: mod_base = OTHER; note = Cytosine phosphorothiorate
  modified_base 67: mod_base = OTHER; note = 2'-Omethylguanosine
  modified_base 68: mod_base = OTHER; note = Guanosine phosphorothiorate
  modified_base 73: mod_base = OTHER; note = 2'-Omethylguanosine phosphorothiorate
  modified_base 75: mod_base = OTHER; note = 2'-Omethylcytosine

SEQ ID NO: 6480 - RNA, 75 nt, synthetic construct; identical to SEQ ID NO: 1045
  source 1..75: mol_type = other RNA
  modified_base 1: mod_base = OTHER; note = 2'-fluoroguanosine
  modified_base 3: mod_base = OTHER; note = Uridine phosphorothiorate
  modified_base 8: mod_base = OTHER; note = Uridine phosphorothiorate
  modified_base 14: mod_base = OTHER; note = 2'-fluoroadenosine
  modified_base 15: mod_base = OTHER; note = Adenosine phosphorothiorate
  modified_base 21: mod_base = OTHER; note = Adenosine phosphorothiorate
  modified_base 22: mod_base = OTHER; note = 2'-fluoroguanosine
  modified_base 23: mod_base = OTHER; note = 2'-fluorocytosine
  modified_base 27: mod_base = OTHER; note = 2'-fluorocytosine
  modified_base 38: mod_base = OTHER; note = 2'-fluoroadenosine phosphorothiorate
  modified_base 39: mod_base = OTHER; note = Uridine phosphorothiorate
  modified_base 42: mod_base = OTHER; note = 2'-fluoroadenosine
  modified_base 43: mod_base = OTHER; note = 2'-Omethylguanosine
  modified_base 57: mod_base = OTHER; note = 2'-Omethyladenosine
  modified_base 58: mod_base = OTHER; note = 2'-Omethylguanosine
  modified_base 62: mod_base = OTHER; note = 2'-fluorocytosine
  modified_base 65: mod_base = OTHER; note = Uridine phosphorothiorate
  modified_base 67: mod_base = OTHER; note = Guanosine phosphorothiorate
  modified_base 68: mod_base = OTHER; note = Adenosine phosphorothiorate
  modified_base 74: mod_base = OTHER; note = Cytosine phosphorothiorate

SEQ ID NO: 6481 - RNA, 76 nt, synthetic construct; identical to SEQ ID NO: 3318
  source 1..76: mol_type = other RNA
  modified_base 1: mod_base = OTHER; note = 2'-Omethylcytosine
  modified_base 10: mod_base = OTHER; note = 2'-Omethylguanosine
  modified_base 13: mod_base = OTHER; note = 2'-Omethylcytosine
  modified_base 16: mod_base = OTHER; note = Uridine phosphorothiorate
  modified_base 18: mod_base = OTHER; note = Guanosine phosphorothiorate
  modified_base 19: mod_base = OTHER; note = 2'-Omethylguanosine phosphorothiorate
  modified_base 20: mod_base = OTHER; note = Uridine phosphorothiorate
  modified_base 25: mod_base = OTHER; note = 2'-Omethylcytosine
  modified_base 29: mod_base = OTHER; note = 2'-Omethylguanosine
  modified_base 33: mod_base = OTHER; note = 2'-fluorouridine
  modified_base 35: mod_base = OTHER; note = Uridine phosphorothiorate
  modified_base 37: mod_base = OTHER; note = Guanosine phosphorothiorate
  modified_base 38: mod_base = OTHER; note = Adenosine phosphorothiorate
  modified_base 41: mod_base = OTHER; note = 2'-fluorocytosine
  modified_base 42: mod_base = OTHER; note = Uridine phosphorothiorate
  modified_base 43: mod_base = OTHER; note = 2'-Omethyluridine
  modified_base 44: mod_base = OTHER; note = 2'-fluoroadenosine
  modified_base 46: mod_base = OTHER; note = Guanosine phosphorothiorate
  modified_base 50: mod_base = OTHER; note = 2'-Omethylcytosine
  modified_base 52: mod_base = OTHER; note = 2'-Omethylguanosine
  modified_base 54: mod_base = OTHER; note = Uridine phosphorothiorate
  modified_base 55: mod_base = OTHER; note = Uridine phosphorothiorate
  modified_base 56: mod_base = OTHER; note = 2'-Omethylcytosine
  modified_base 57: mod_base = OTHER; note = Guanosine phosphorothiorate
  modified_base 58: mod_base = OTHER; note = Adenosine phosphorothiorate
  modified_base 62: mod_base = OTHER; note = 2'-Omethylcytosine
  modified_base 63: mod_base = OTHER; note = 2'-fluoroguanosine
  modified_base 65: mod_base = OTHER; note = 2'-Omethylcytosine
  modified_base 71: mod_base = OTHER; note = 2'-Omethylguanosine
  modified_base 73: mod_base = OTHER; note = 2'-Omethyladenosine

SEQ ID NO: 6482 - RNA, 85 nt, synthetic construct; identical to SEQ ID NO: 3301
  source 1..85: mol_type = other RNA
  modified_base 1: mod_base = OTHER; note = 2'-Omethylguanosine phosphorothiorate
  modified_base 2: mod_base = OTHER; note = 2'-fluorocytosine phosphorothiorate
  modified_base 3: mod_base = OTHER; note = 2'-Omethyluridine phosphorothiorate
  modified_base 4: mod_base = OTHER; note = 2'-Omethylguanosine phosphorothiorate
  modified_base 15: mod_base = OTHER; note = Guanosine phosphorothiorate
  modified_base 17: mod_base = OTHER; note = 2'-fluoroguanosine
  modified_base 20: mod_base = OTHER; note = 2'-fluorouridine
  modified_base 23: mod_base = OTHER; note = Guanosine phosphorothiorate
  modified_base 28: mod_base = OTHER; note = Uridine phosphorothiorate
  modified_base 29: mod_base = OTHER; note = Guanosine phosphorothiorate
  modified_base 45: mod_base = OTHER; note = 2'-Omethylguanosine phosphorothiorate
  modified_base 47: mod_base = OTHER; note = 2'-Omethylguanosine
  modified_base 52: mod_base = OTHER; note = 2'-Omethylcytosine
  modified_base 54: mod_base = OTHER; note = 2'-Omethylcytosine
  modified_base 57: mod_base = OTHER; note = 2'-Omethylcytosine phosphorothiorate
  modified_base 60: mod_base = OTHER; note = 2'-fluoroadenosine
  modified_base 62: mod_base = OTHER; note = Guanosine phosphorothiorate
  modified_base 72: mod_base = OTHER; note = 2'-fluorouridine
  modified_base 82: mod_base = OTHER; note = 2'-Omethylguanosine

SEQ ID NO: 6483 - RNA, 73 nt, synthetic construct; identical to SEQ ID NO: 935
  source 1..73: mol_type = other RNA
  modified_base 1: mod_base = OTHER; note = 2'-Omethylguanosine phosphorothiorate
  modified_base 2: mod_base = OTHER; note = 2'-Omethylguanosine phosphorothiorate
  modified_base 72: mod_base = OTHER; note = 2'-Omethylcytosine phosphorothiorate

SEQ ID NO: 6484 - RNA, 74 nt, synthetic construct; identical to SEQ ID NO: 766
  source 1..74: mol_type = other RNA
  modified_base 1: mod_base = OTHER; note = 2'-Omethylguanosine phosphorothiorate
  modified_base 2: mod_base = OTHER; note = 2'-Omethylguanosine phosphorothiorate
  modified_base 3: mod_base = OTHER; note = 2'-Omethylcytosine
  modified_base 4: mod_base = OTHER; note = 2'-Omethyluridine
  modified_base 5: mod_base = OTHER; note = 2'-Omethylcytosine
  modified_base 6: mod_base = OTHER; note = 2'-Omethylcytosine
  modified_base 10: mod_base = OTHER; note = 2'-Omethylguanosine
  modified_base 11: mod_base = OTHER; note = 2'-Omethylcytosine
  modified_base 12: mod_base = OTHER; note = 2'-Omethylguanosine
  modified_base 13: mod_base = OTHER; note = 2'-Omethylcytosine
  modified_base 16: mod_base = OTHER; note = 2'-Omethyluridine
  modified_base 17: mod_base = OTHER; note = 2'-Omethylguanosine
  modified_base 18: mod_base = OTHER; note = 2'-Omethylguanosine
  modified_base 20: mod_base = OTHER; note = 2'-Omethyluridine
  modified_base 22: mod_base = OTHER; note = 2'-Omethylguanosine
  modified_base 23: mod_base = OTHER; note = 2'-Omethylcytosine
  modified_base 24: mod_base = OTHER; note = 2'-Omethylguanosine
  modified_base 25: mod_base = OTHER; note = 2'-Omethylcytosine
  modified_base 33: mod_base = OTHER; note = 2'-fluorouridine
  modified_base 35: mod_base = OTHER; note = Cytosine phosphorothiorate
  modified_base 37: mod_base = OTHER; note = Adenosine phosphorothiorate
  modified_base 38: mod_base = OTHER; note = Adenosine phosphorothiorate
  modified_base 41: mod_base = OTHER; note = 2'-fluorocytosine
  modified_base 42: mod_base = OTHER; note = 2'-Omethyladenosine
  modified_base 43: mod_base = OTHER; note = 2'-Omethyladenosine
  modified_base 44: mod_base = OTHER; note = 2'-fluoroadenosine
  modified_base 49: mod_base = OTHER; note = 2'-Omethylcytosine
  modified_base 50: mod_base = OTHER; note = 2'-Omethylcytosine
  modified_base 52: mod_base = OTHER; note = 2'-Omethylguanosine
  modified_base 54: mod_base = OTHER; note = 2'-Omethyluridine
  modified_base 55: mod_base = OTHER; note = Uridine phosphorothiorate
  modified_base 56: mod_base = OTHER; note = 2'-Omethylcytosine
  modified_base 57: mod_base = OTHER; note = 2'-fluoroguanosine
  modified_base 59: mod_base = OTHER; note = 2'-Omethylguanosine
  modified_base 61: mod_base = OTHER; note = 2'-Omethylcytosine
  modified_base 65: mod_base = OTHER; note = 2'-Omethylguanosine
  modified_base 73: mod_base = OTHER; note = 2'-Omethylguanosine

SEQ ID NO: 6485 - RNA, 85 nt, synthetic construct; identical to SEQ ID NO: 3286
  source 1..85: mol_type = other RNA
  modified_base 1: mod_base = OTHER; note = 2'-fluorocytosine phosphorothiorate
  modified_base 11: mod_base = OTHER; note = Cytosine phosphorothiorate
  modified_base 22: mod_base = OTHER; note = 2'-fluoroguanosine
  modified_base 42: mod_base = OTHER; note = 2'-Omethyladenosine
  modified_base 50: mod_base = OTHER; note = Adenosine phosphorothiorate
  modified_base 55: mod_base = OTHER; note = 2'-Omethylcytosine
  modified_base 58: mod_base = OTHER; note = Guanosine phosphorothiorate
  modified_base 84: mod_base = OTHER; note = 2'-fluorocytosine

SEQ ID NO: 6486 - RNA, 74 nt, synthetic construct; identical to SEQ ID NO: 3293
  source 1..74: mol_type = other RNA
  modified_base 1: mod_base = OTHER; note = 2'-fluoroadenosine
  modified_base 2: mod_base = OTHER; note = 2'-fluorocytosine phosphorothiorate
  modified_base 10: mod_base = OTHER; note = 2'-Omethylcytosine phosphorothiorate
  modified_base 12: mod_base = OTHER; note = 2'-fluorocytosine
  modified_base 24: mod_base = OTHER; note = 2'-Omethylguanosine phosphorothiorate
  modified_base 27: mod_base = OTHER; note = 2'-fluorouridine
  modified_base 40: mod_base = OTHER; note = 2'-Omethylguanosine
  modified_base 44: mod_base = OTHER; note = Guanosine phosphorothiorate
  modified_base 48: mod_base = OTHER; note = Cytosine phosphorothiorate
  modified_base 51: mod_base = OTHER; note = Guanosine phosphorothiorate
  modified_base 57: mod_base = OTHER; note = 2'-fluoroadenosine phosphorothiorate
  modified_base 62: mod_base = OTHER; note = Guanosine phosphorothiorate
  modified_base 73: mod_base = OTHER; note = 2'-Omethylcytosine phosphorothiorate

SEQ ID NO: 6487 - RNA, 86 nt, synthetic construct; identical to SEQ ID NO: 3290
  source 1..86: mol_type = other RNA
  modified_base 1: mod_base = OTHER; note = 2'-Omethyladenosine phosphorothiorate
  modified_base 2: mod_base = OTHER; note = 2'-Omethylcytosine phosphorothiorate
  modified_base 3: mod_base = OTHER; note = 2'-Omethylcytosine
  modified_base 4: mod_base = OTHER; note = 2'-Omethyladenosine
  modified_base 5: mod_base = OTHER; note = 2'-Omethylguanosine
  modified_base 6: mod_base = OTHER; note = 2'-Omethylguanosine
  modified_base 13: mod_base = OTHER; note = 2'-Omethylguanosine
  modified_base 16: mod_base = OTHER; note = 2'-Omethyluridine
  modified_base 17: mod_base = OTHER; note = 2'-Omethylguanosine
  modified_base 18: mod_base = OTHER; note = 2'-Omethylguanosine
  modified_base 20: mod_base = OTHER; note = 2'-Omethyluridine phosphorothiorate
  modified_base 25: mod_base = OTHER; note = 2'-Omethylcytosine
  modified_base 33: mod_base = OTHER; note = 2'-fluorouridine
  modified_base 35: mod_base = OTHER; note = Cytosine phosphorothiorate
  modified_base 37: mod_base = OTHER; note = Guanosine phosphorothiorate
  modified_base 38: mod_base = OTHER; note = Adenosine phosphorothiorate
  modified_base 41: mod_base = OTHER; note = 2'-fluorocytosine phosphorothiorate
  modified_base 42: mod_base = OTHER; note = 2'-Omethyladenosine
  modified_base 43: mod_base = OTHER; note = 2'-Omethyladenosine
  modified_base 44: mod_base = OTHER; note = 2'-fluorouridine
  modified_base 57: mod_base = OTHER; note = 2'-fluoroguanosine
  modified_base 58: mod_base = OTHER; note = 2'-fluorocytosine
  modified_base 66: mod_base = OTHER; note = 2'-Omethylcytosine
  modified_base 69: mod_base = OTHER; note = 2'-Omethyladenosine
  modified_base 71: mod_base = OTHER; note = 2'-Omethylcytosine
  modified_base 72: mod_base = OTHER; note = 2'-Omethylcytosine
  modified_base 73: mod_base = OTHER; note = 2'-fluorocytosine
  modified_base 74: mod_base = OTHER; note = 2'-Omethyladenosine
  modified_base 75: mod_base = OTHER; note = 2'-Omethylcytosine
  modified_base 76: mod_base = OTHER; note = 2'-Omethyluridine
  modified_base 77: mod_base = OTHER; note = 2'-Omethylcytosine
  modified_base 78: mod_base = OTHER; note = 2'-Omethylcytosine
  modified_base 81: mod_base = OTHER; note = 2'-Omethylguanosine
  modified_base 83: mod_base = OTHER; note = 2'-Omethyladenosine

SEQ ID NO: 6488 - RNA, 76 nt, synthetic construct; identical to SEQ ID NO: 3329
  source 1..76: mol_type = other RNA
  modified_base 1: mod_base = OTHER; note = 2'-Omethylguanosine phosphorothiorate
  modified_base 2: mod_base = OTHER; note = 2'-Omethylguanosine
  modified_base 3: mod_base = OTHER; note = 2'-Omethylcytosine
  modified_base 4: mod_base = OTHER; note = 2'-Omethylcytosine
  modified_base 5: mod_base = OTHER; note = 2'-Omethylcytosine
  modified_base 6: mod_base = OTHER; note = 2'-Omethylcytosine
  modified_base 27: mod_base = OTHER; note = 2'-Omethyluridine
  modified_base 28: mod_base = OTHER; note = 2'-Omethyluridine
  modified_base 29: mod_base = OTHER; note = 2'-fluoroguanosine
  modified_base 30: mod_base = OTHER; note = 2'-Omethylguanosine
  modified_base 40: mod_base = OTHER; note = 2'-fluorouridine
  modified_base 41: mod_base = OTHER; note = 2'-Omethylcytosine
  modified_base 42: mod_base = OTHER; note = 2'-Omethyladenosine
  modified_base 43: mod_base = OTHER; note = 2'-Omethyladenosine
  modified_base 73: mod_base = OTHER; note = 2'-Omethylguanosine

SEQ ID NO: 6489 - RNA, 85 nt, synthetic construct; identical to SEQ ID NO: 3288
  source 1..85: mol_type = other RNA
  modified_base 1: mod_base = OTHER; note = 2'-Omethylcytosine
  modified_base 3: mod_base = OTHER; note = Adenosine phosphorothiorate
  modified_base 10: mod_base = OTHER; note = Cytosine phosphorothiorate
  modified_base 27: mod_base = OTHER; note = 2'-fluorouridine
  modified_base 29: mod_base = OTHER; note = 2'-fluoroguanosine
  modified_base 35: mod_base = OTHER; note = 2'-fluoroadenosine
  modified_base 36: mod_base = OTHER; note = Guanosine phosphorothiorate
  modified_base 42: mod_base = OTHER; note = Adenosine phosphorothiorate
  modified_base 50: mod_base = OTHER; note = Adenosine phosphorothiorate
  modified_base 53: mod_base = OTHER; note = 2'-Omethyluridine
  modified_base 56: mod_base = OTHER; note = 2'-fluoroguanosine
  modified_base 60: mod_base = OTHER; note = 2'-fluoroguanosine
  modified_base 74: mod_base = OTHER; note = 2'-fluorocytosine
  modified_base 80: mod_base = OTHER; note = 2'-Omethylguanosine phosphorothiorate
  modified_base 84: mod_base = OTHER; note = Cytosine phosphorothiorate

SEQ ID NO: 6490 - RNA, 76 nt, synthetic construct; identical to SEQ ID NO: 3295
  source 1..76: mol_type = other RNA
  modified_base 1: mod_base = OTHER; note = 2'-Omethylcytosine
  modified_base 2: mod_base = OTHER; note = 2'-fluorocytosine
  modified_base 5: mod_base = OTHER; note = 2'-fluorocytosine phosphorothiorate
  modified_base 10: mod_base = OTHER; note = 2'-Omethylguanosine phosphorothiorate
  modified_base 17: mod_base = OTHER; note = 2'-Omethyluridine
  modified_base 24: mod_base = OTHER; note = 2'-Omethylguanosine
  modified_base 31: mod_base = OTHER; note = Adenosine phosphorothiorate
  modified_base 42: mod_base = OTHER; note = 2'-fluorouridine
  modified_base 43: mod_base = OTHER; note = 2'-Omethyluridine phosphorothiorate
  modified_base 52: mod_base = OTHER; note = 2'-Omethylguanosine
  modified_base 74: mod_base = OTHER; note = Cytosine phosphorothiorate

SEQ ID NO: 6491 - RNA, 85 nt, synthetic construct; identical to SEQ ID NO: 3301
  source 1..85: mol_type = other RNA
  modified_base 1: mod_base = OTHER; note = 2'-Omethylguanosine phosphorothiorate
  modified_base 2: mod_base = OTHER; note = Cytosine phosphorothiorate
  modified_base 3: mod_base = OTHER; note = 2'-Omethyluridine phosphorothiorate
  modified_base 4: mod_base = OTHER; note = 2'-Omethylguanosine phosphorothiorate
  modified_base 11: mod_base = OTHER; note = 2'-fluorocytosine
  modified_base 13: mod_base = OTHER; note = 2'-fluoroguanosine
  modified_base 14: mod_base = OTHER; note = Adenosine phosphorothiorate
  modified_base 23: mod_base = OTHER; note = 2'-Omethylguanosine phosphorothiorate
  modified_base 27: mod_base = OTHER; note = 2'-fluorouridine
  modified_base 28: mod_base = OTHER; note = Uridine phosphorothiorate
  modified_base 33: mod_base = OTHER; note = 2'-fluorouridine
  modified_base 35: mod_base = OTHER; note = 2'-fluorouridine
  modified_base 36: mod_base = OTHER; note = 2'-fluoroadenosine
  modified_base 40: mod_base = OTHER; note = 2'-Omethylcytosine
  modified_base 46: mod_base = OTHER; note = 2'-Omethylguanosine phosphorothiorate
  modified_base 54: mod_base = OTHER; note = 2'-Omethylcytosine
  modified_base 56: mod_base = OTHER; note = 2'-Omethylguanosine
  modified_base 71: mod_base = OTHER; note = Cytosine phosphorothiorate
  modified_base 73: mod_base = OTHER; note = 2'-fluoroguanosine
  modified_base 82: mod_base = OTHER; note = 2'-Omethylguanosine
  modified_base 84: mod_base = OTHER; note = 2'-Omethylcytosine

SEQ ID NO: 6492 - RNA, 76 nt, synthetic construct; identical to SEQ ID NO: 3318
  source 1..76: mol_type = other RNA
  modified_base 1: mod_base = OTHER; note = 2'-Omethylcytosine phosphorothiorate
  modified_base 2: mod_base = OTHER; note = 2'-Omethylcytosine phosphorothiorate
  modified_base 3: mod_base = OTHER; note = 2'-Omethyluridine
  modified_base 4: mod_base = OTHER; note = 2'-Omethyluridine
  modified_base 5: mod_base = OTHER; note = 2'-Omethylcytosine
  modified_base 6: mod_base = OTHER; note = 2'-Omethylguanosine
  modified_base 16: mod_base = OTHER; note = 2'-Omethyluridine
  modified_base 18: mod_base = OTHER; note = 2'-Omethylguanosine
  modified_base 19: mod_base = OTHER; note = 2'-Omethylguanosine
  modified_base 33: mod_base = OTHER; note = 2'-fluorouridine
  modified_base 35: mod_base = OTHER; note = Uridine phosphorothiorate
  modified_base 37: mod_base = OTHER; note = Guanosine phosphorothiorate
  modified_base 38: mod_base = OTHER; note = Adenosine phosphorothiorate
  modified_base 44: mod_base = OTHER; note = 2'-Omethyladenosine
  modified_base 45: mod_base = OTHER; note = 2'-Omethylguanosine
  modified_base 46: mod_base = OTHER; note = 2'-fluoroguanosine
  modified_base 47: mod_base = OTHER; note = 2'-fluorouridine
  modified_base 48: mod_base = OTHER; note = 2'-fluorocytosine
  modified_base 54: mod_base = OTHER; note = 2'-Omethyluridine
  modified_base 56: mod_base = OTHER; note = 2'-Omethylcytosine
  modified_base 59: mod_base = OTHER; note = 2'-Omethyladenosine
  modified_base 61: mod_base = OTHER; note = 2'-Omethylcytosine
  modified_base 62: mod_base = OTHER; note = 2'-Omethylcytosine
  modified_base 63: mod_base = OTHER; note = 2'-fluoroguanosine
  modified_base 64: mod_base = OTHER; note = 2'-Omethylguanosine
  modified_base 65: mod_base = OTHER; note = 2'-Omethylcytosine
  modified_base 66: mod_base = OTHER; note = 2'-Omethyluridine
  modified_base 67: mod_base = OTHER; note = 2'-Omethylcytosine
  modified_base 68: mod_base = OTHER; note = 2'-Omethylguanosine
  modified_base 73: mod_base = OTHER; note = 2'-Omethyladenosine

SEQ ID NO: 6493 - RNA, 75 nt, synthetic construct; identical to SEQ ID NO: 3311
  source 1..75: mol_type = other RNA
  modified_base 1: mod_base = OTHER; note = 2'-Omethylguanosine phosphorothiorate
  modified_base 2: mod_base = OTHER; note = 2'-fluoroguanosine phosphorothiorate
  modified_base 19: mod_base = OTHER; note = 2'-Omethyluridine phosphorothiorate
  modified_base 21: mod_base = OTHER; note = 2'-fluoroadenosine
  modified_base 31: mod_base = OTHER; note = 2'-Omethyladenosine
  modified_base 32: mod_base = OTHER; note = 2'-fluorocytosine
  modified_base 38: mod_base = OTHER; note = 2'-fluoroadenosine phosphorothiorate
  modified_base 41: mod_base = OTHER; note = Cytosine phosphorothiorate
  modified_base 44: mod_base = OTHER; note = 2'-fluorocytosine
  modified_base 49: mod_base = OTHER; note = Cytosine phosphorothiorate
  modified_base 56: mod_base = OTHER; note = 2'-Omethylguanosine phosphorothiorate
  modified_base 60: mod_base = OTHER; note = 2'-fluorocytosine phosphorothiorate
  modified_base 62: mod_base = OTHER; note = Cytosine phosphorothiorate
  modified_base 63: mod_base = OTHER; note = 2'-fluoroguanosine
  modified_base 64: mod_base = OTHER; note = 2'-fluoroguanosine
  modified_base 65: mod_base = OTHER; note = Uridine phosphorothiorate

SEQ ID NO: 6494 - RNA, 86 nt, synthetic construct; identical to SEQ ID NO: 3290
  source 1..86: mol_type = other RNA
  modified_base 42: mod_base = OTHER; note = 2'-Omethyladenosine

SEQ ID NO: 6495 - RNA, 75 nt, synthetic construct; identical to SEQ ID NO: 3336
  source 1..75: mol_type = other RNA
  modified_base 1: mod_base = OTHER; note = 2'-Omethylcytosine phosphorothiorate
  modified_base 9: mod_base = OTHER; note = Guanosine phosphorothiorate
  modified_base 11: mod_base = OTHER; note = 2'-Omethyluridine
  modified_base 23: mod_base = OTHER; note = 2'-fluoroguanosine
  modified_base 30: mod_base = OTHER; note = 2'-fluoroadenosine phosphorothiorate
  modified_base 49: mod_base = OTHER; note = Adenosine phosphorothiorate
  modified_base 69: mod_base = OTHER; note = 2'-fluoroguanosine phosphorothiorate
  modified_base 73: mod_base = OTHER; note = Cytosine phosphorothiorate
  modified_base 74: mod_base = OTHER; note = Cytosine phosphorothiorate

SEQ ID NO: 6496 - RNA, 76 nt, synthetic construct; identical to SEQ ID NO: 625
  source 1..76: mol_type = other RNA
  modified_base 1: mod_base = OTHER; note = 2'-Omethylguanosine
  modified_base 10: mod_base = OTHER; note = 2'-Omethylguanosine
  modified_base 13: mod_base = OTHER; note = 2'-Omethylcytosine
  modified_base 17: mod_base = OTHER; note = Guanosine phosphorothiorate
  modified_base 18: mod_base = OTHER; note = 2'-Omethylguanosine
  modified_base 19: mod_base = OTHER; note = Adenosine phosphorothiorate
  modified_base 20: mod_base = OTHER; note = 2'-Omethyluridine
  modified_base 25: mod_base = OTHER; note = 2'-Omethylcytosine
  modified_base 29: mod_base = OTHER; note = 2'-Omethylguanosine
  modified_base 33: mod_base = OTHER; note = 2'-fluorouridine
  modified_base 35: mod_base = OTHER; note = Cytosine phosphorothiorate
  modified_base 37: mod_base = OTHER; note = Adenosine phosphorothiorate
  modified_base 38: mod_base = OTHER; note = Adenosine phosphorothiorate
  modified_base 41: mod_base = OTHER; note = 2'-fluorocytosine
  modified_base 43: mod_base = OTHER; note = 2'-Omethyladenosine
  modified_base 44: mod_base = OTHER; note = 2'-fluoroadenosine
  modified_base 46: mod_base = OTHER; note = Guanosine phosphorothiorate
  modified_base 50: mod_base = OTHER; note = 2'-Omethylcytosine
  modified_base 52: mod_base = OTHER; note = 2'-Omethylguanosine
  modified_base 54: mod_base = OTHER; note = Uridine phosphorothiorate
  modified_base 55: mod_base = OTHER; note = Uridine phosphorothiorate
  modified_base 56: mod_base = OTHER; note = 2'-Omethylcytosine
  modified_base 57: mod_base = OTHER; note = Guanosine phosphorothiorate
  modified_base 62: mod_base = OTHER; note = 2'-Omethylcytosine
  modified_base 63: mod_base = OTHER; note = 2'-fluorocytosine
  modified_base 65: mod_base = OTHER; note = 2'-Omethylguanosine
  modified_base 68: mod_base = OTHER; note = 2'-fluoroguanosine
  modified_base 71: mod_base = OTHER; note = 2'-Omethyluridine
  modified_base 73: mod_base = OTHER; note = 2'-Omethylguanosine

SEQ ID NO: 6497 - RNA, 76 nt, synthetic construct; identical to SEQ ID NO: 625
  source 1..76: mol_type = other RNA
  modified_base 1: mod_base = OTHER; note = 2'-Omethylguanosine phosphorothiorate
  modified_base 2: mod_base = OTHER; note = 2'-Omethylguanosine
  modified_base 33: mod_base = OTHER; note = 2'-O-(2-Methoxyethyl) thymine
  modified_base 42: mod_base = OTHER; note = 2'-fluoroadenosine
  modified_base 45: mod_base = OTHER; note = Guanosine phosphorothiorate
  modified_base 46: mod_base = OTHER; note = 2'-fluoroguanosine
  modified_base 52: mod_base = OTHER; note = Guanosine phosphorothiorate
  modified_base 74: mod_base = OTHER; note = Cytosine phosphorothiorate
  modified_base 75: mod_base = OTHER; note = 2'-Omethylcytosine

SEQ ID NO: 6498 - RNA, 75 nt, synthetic construct; identical to SEQ ID NO: 3299
  source 1..75: mol_type = other RNA
  modified_base 1: mod_base = OTHER; note = 2'-fluorocytosine phosphorothiorate
  modified_base 2: mod_base = OTHER; note = 2'-Omethylcytosine phosphorothiorate
  modified_base 3: mod_base = OTHER; note = Uridine phosphorothiorate
  modified_base 10: mod_base = OTHER; note = 2'-Omethylcytosine phosphorothiorate
  modified_base 17: mod_base = OTHER; note = 2'-fluoroguanosine
  modified_base 18: mod_base = OTHER; note = 2'-fluoroguanosine
  modified_base 22: mod_base = OTHER; note = 2'-Omethyladenosine
  modified_base 26: mod_base = OTHER; note = Uridine phosphorothiorate
  modified_base 27: mod_base = OTHER; note = 2'-Omethylcytosine phosphorothiorate
  modified_base 34: mod_base = OTHER; note = Uridine phosphorothiorate
  modified_base 39: mod_base = OTHER; note = 2'-fluorocytosine
  modified_base 40: mod_base = OTHER; note = 2'-fluorouridine
  modified_base 46: mod_base = OTHER; note = 2'-fluorouridine
  modified_base 47: mod_base = OTHER; note = 2'-fluorocytosine
  modified_base 56: mod_base = OTHER; note = 2'-fluoroadenosine
  modified_base 57: mod_base = OTHER; note = 2'-Omethyladenosine phosphorothiorate
  modified_base 62: mod_base = OTHER; note = 2'-fluorocytosine phosphorothiorate
  modified_base 63: mod_base = OTHER; note = Uridine phosphorothiorate
  modified_base 72: mod_base = OTHER; note = 2'-Omethylguanosine
  modified_base 73: mod_base = OTHER; note = Cytosine phosphorothiorate
  modified_base 74: mod_base = OTHER; note = Cytosine phosphorothiorate

SEQ ID NO: 6499 - RNA, 76 nt, synthetic construct; identical to SEQ ID NO: 3295
  source 1..76: mol_type = other RNA
  modified_base 1: mod_base = OTHER; note = 2'-Omethylcytosine
  modified_base 2: mod_base = OTHER; note = 2'-Omethylcytosine
  modified_base 3: mod_base = OTHER; note = 2'-fluorouridine
  modified_base 6: mod_base = OTHER; note = 2'-fluoroguanosine phosphorothiorate
  modified_base 7: mod_base = OTHER; note = 2'-fluoroadenosine phosphorothiorate
  modified_base 8: mod_base = OTHER; note = 2'-fluorouridine
  modified_base 9: mod_base = OTHER; note = 2'-Omethyladenosine
  modified_base 14: mod_base = OTHER; note = 2'-Omethyladenosine
  modified_base 24: mod_base = OTHER; note = 2'-Omethylguanosine
  modified_base 26: mod_base = OTHER; note = 2'-fluoroguanosine phosphorothiorate
  modified_base 31: mod_base = OTHER; note = 2'-Omethyladenosine
  modified_base 38: mod_base = OTHER; note = 2'-fluoroadenosine
  modified_base 39: mod_base = OTHER; note = Uridine phosphorothiorate
  modified_base 47: mod_base = OTHER; note = 2'-fluorouridine phosphorothiorate
  modified_base 50: mod_base = OTHER; note = 2'-Omethylcytosine
  modified_base 52: mod_base = OTHER; note = 2'-fluoroguanosine phosphorothiorate
  modified_base 57: mod_base = OTHER; note = Guanosine phosphorothiorate
  modified_base 69: mod_base = OTHER; note = 2'-fluoroadenosine
  modified_base 75: mod_base = OTHER; note = 2'-fluorocytosine phosphorothiorate
  modified_base 76: mod_base = OTHER; note = 2'-fluoroadenosine

SEQ ID NO: 6500 - RNA, 76 nt, synthetic construct; identical to SEQ ID NO: 625
  source 1..76: mol_type = other RNA
  modified_base 1: mod_base = OTHER; note = 2'-Omethylguanosine
  modified_base 10: mod_base = OTHER; note = 2'-Omethylguanosine
  modified_base 13: mod_base = OTHER; note = 2'-Omethylcytosine
  modified_base 17: mod_base = OTHER; note = Guanosine phosphorothiorate
  modified_base 18: mod_base = OTHER; note = 2'-Omethylguanosine
  modified_base 19: mod_base = OTHER; note = Adenosine phosphorothiorate
  modified_base 20: mod_base = OTHER; note = 2'-Omethyluridine
  modified_base 25: mod_base = OTHER; note = 2'-Omethylcytosine
  modified_base 29: mod_base = OTHER; note = 2'-Omethylguanosine
  modified_base 33: mod_base = OTHER; note = 2'-fluorouridine
  modified_base 35: mod_base = OTHER; note = Cytosine phosphorothiorate
  modified_base 37: mod_base = OTHER; note = Adenosine phosphorothiorate
  modified_base 38: mod_base = OTHER; note = Adenosine phosphorothiorate
  modified_base 44: mod_base = OTHER; note = 2'-fluoroadenosine
  modified_base 46: mod_base = OTHER; note = Guanosine phosphorothiorate
  modified_base 50: mod_base = OTHER; note = 2'-Omethylcytosine
  modified_base 52: mod_base = OTHER; note = 2'-Omethylguanosine
  modified_base 54: mod_base = OTHER; note = Uridine phosphorothiorate
  modified_base 55: mod_base = OTHER; note = Uridine phosphorothiorate
  modified_base 56: mod_base = OTHER; note = 2'-Omethylcytosine
  modified_base 57: mod_base = OTHER; note = Guanosine phosphorothiorate
  modified_base 62: mod_base = OTHER; note = 2'-Omethylcytosine
  modified_base 63: mod_base = OTHER; note = 2'-fluorocytosine
  modified_base 65: mod_base = OTHER; note = 2'-Omethylguanosine
  modified_base 71: mod_base = OTHER; note = 2'-Omethyluridine
  modified_base 73: mod_base = OTHER; note = 2'-Omethylguanosine

SEQ ID NO: 6501 - DNA, 76 bp, synthetic construct; identical to SEQ ID NO: 1924
  source 1..76: mol_type = other DNA
  modified_base 1: mod_base = OTHER; note = 2'-Omethylguanosine phosphorothiorate
  modified_base 2: mod_base = OTHER; note = 2'-Omethylguanosine phosphorothiorate
  modified_base 3: mod_base = OTHER; note = Cytosine phosphorothiorate
  modified_base 5: mod_base = OTHER; note = 2'-Omethylcytosine
  modified_base 7: mod_base = OTHER; note = 2'-Omethylguanosine
  modified_base 21: mod_base = OTHER; note = Adenosine phosphorothiorate
  modified_base 22: mod_base = OTHER; note = deoxyguanosine phosphorothiorate
  modified_base 24: mod_base = OTHER; note = 2'-O-(2-Methoxyethyl) guanosine
  modified_base 28: mod_base = OTHER; note = 2'-O-(2-Methoxyethyl) thymine
  modified_base 29: mod_base = OTHER; note = Guanosine phosphorothiorate
  modified_base 31: mod_base = OTHER; note = 2'-Omethyladenosine
  modified_base 32: mod_base = OTHER; note = Cytosine phosphorothiorate
  modified_base 33: mod_base = OTHER; note = 2'-fluorouridine
  modified_base 39: mod_base = OTHER; note = 2'-fluorouridine phosphorothiorate
  modified_base 40: mod_base = OTHER; note = 2'-O-(2-Methoxyethyl) thymine
  modified_base 41: mod_base = OTHER; note = 2'-O-(2-Methoxyethyl) 5-methylcytosine
  modified_base 45: mod_base = OTHER; note = 2'-fluoroguanosine
  modified_base 47: mod_base = OTHER; note = Uridine phosphorothiorate
  modified_base 48: mod_base = OTHER; note = 2'-fluorouridine
  modified_base 57: mod_base = OTHER; note = 2'-Omethylguanosine
  modified_base 59: mod_base = OTHER; note = Guanosine phosphorothiorate
  modified_base 60: mod_base = OTHER; note = 2'-fluorouridine
  modified_base 61: mod_base = OTHER; note = Cytosine phosphorothiorate
  modified_base 62: mod_base = OTHER; note = 2'-Omethylcytosine phosphorothiorate
  modified_base 63: mod_base = OTHER; note = 2'-O-(2-Methoxyethyl) 5-methylcytosine
  modified_base 64: mod_base = OTHER; note = Guanosine phosphorothiorate
  modified_base 65: mod_base = OTHER; note = Guanosine phosphorothiorate
  modified_base 68: mod_base = OTHER; note = Guanosine phosphorothiorate
  modified_base 71: mod_base = OTHER; note = Uridine phosphorothiorate
  modified_base 74: mod_base = OTHER; note = Cytosine phosphorothiorate
  modified_base 75: mod_base = OTHER; note = 2'-O-(2-Methoxyethyl) 5-methylcytosine phosphorothiorate
  misc_feature 1..3: note = RNA
  misc_feature 4: note = DNA
  misc_feature 5..21: note = RNA
  misc_feature 22: note = DNA
  misc_feature 23..37: note = RNA
  misc_feature 38: note = DNA
  misc_feature 39..48: note = RNA
  misc_feature 49: note = DNA
  misc_feature 50..68: note = RNA
  misc_feature 69: note = DNA
  misc_feature 70..75: note = RNA
  misc_feature 76: note = DNA

SEQ ID NO: 6502 - RNA, 85 nt, synthetic construct; identical to SEQ ID NO: 3317
  source 1..85: mol_type = other RNA
  modified_base 1: mod_base = OTHER; note = 2'-Omethylguanosine phosphorothiorate
  modified_base 2: mod_base = OTHER; note = 2'-Omethylcytosine
  modified_base 3: mod_base = OTHER; note = 2'-Omethyluridine phosphorothiorate
  modified_base 4: mod_base = OTHER; note = 2'-fluoroguanosine phosphorothiorate
  modified_base 7: mod_base = OTHER; note = 2'-fluoroadenosine
  modified_base 12: mod_base = OTHER; note = Cytosine phosphorothiorate
  modified_base 17: mod_base = OTHER; note = 2'-Omethylguanosine
  modified_base 22: mod_base = OTHER; note = 2'-Omethyladenosine phosphorothiorate
  modified_base 30: mod_base = OTHER; note = 2'-fluoroguanosine
  modified_base 35: mod_base = OTHER; note = 2'-fluorouridine
  modified_base 36: mod_base = OTHER; note = 2'-fluoroadenosine
  modified_base 41: mod_base = OTHER; note = 2'-fluorocytosine
  modified_base 46: mod_base = OTHER; note = 2'-Omethylguanosine phosphorothiorate
  modified_base 50: mod_base = OTHER; note = 2'-Omethylcytosine phosphorothiorate
  modified_base 52: mod_base = OTHER; note = Cytosine phosphorothiorate
  modified_base 59: mod_base = OTHER; note = 2'-Omethylcytosine
  modified_base 61: mod_base = OTHER; note = 2'-Omethylguanosine
  modified_base 72: mod_base = OTHER; note = 2'-fluorouridine
  modified_base 83: mod_base = OTHER; note = Cytosine phosphorothiorate

SEQ ID NO: 6503 - RNA, 75 nt, synthetic construct; identical to SEQ ID NO: 1045
  source 1..75: mol_type = other RNA
  modified_base 1: mod_base = OTHER; note = 2'-Omethylguanosine phosphorothiorate
  modified_base 2: mod_base = OTHER; note = 2'-Omethylguanosine phosphorothiorate
  modified_base 3: mod_base = OTHER; note = 2'-Omethyluridine
  modified_base 4: mod_base = OTHER; note = 2'-Omethyluridine
  modified_base 5: mod_base = OTHER; note = 2'-Omethylcytosine
  modified_base 6: mod_base = OTHER; note = 2'-Omethylcytosine
  modified_base 10: mod_base = OTHER; note = 2'-Omethylguanosine
  modified_base 11: mod_base = OTHER; note = 2'-Omethyluridine
  modified_base 12: mod_base = OTHER; note = 2'-Omethylguanosine
  modified_base 13: mod_base = OTHER; note = 2'-Omethyluridine
  modified_base 22: mod_base = OTHER; note = 2'-Omethylguanosine
  modified_base 23: mod_base = OTHER; note = 2'-Omethylcytosine
  modified_base 24: mod_base = OTHER; note = 2'-Omethyladenosine
  modified_base 25: mod_base = OTHER; note = 2'-Omethylcytosine
  modified_base 33: mod_base = OTHER; note = 2'-fluorouridine
  modified_base 35: mod_base = OTHER; note = Uridine phosphorothiorate
  modified_base 37: mod_base = OTHER; note = Adenosine phosphorothiorate
  modified_base 38: mod_base = OTHER; note = Adenosine phosphorothiorate
  modified_base 48: mod_base = OTHER; note = 2'-Omethylcytosine
  modified_base 49: mod_base = OTHER; note = 2'-Omethylcytosine
  modified_base 50: mod_base = OTHER; note = 2'-Omethylguanosine
  modified_base 51: mod_base = OTHER; note = 2'-Omethyladenosine
  modified_base 52: mod_base = OTHER; note = 2'-Omethylguanosine
  modified_base 53: mod_base = OTHER; note = 2'-Omethyluridine
  modified_base 55: mod_base = OTHER; note = 2'-Omethylcytosine
  modified_base 58: mod_base = OTHER; note = 2'-Omethylguanosine
  modified_base 60: mod_base = OTHER; note = 2'-Omethylcytosine
  modified_base 61: mod_base = OTHER; note = 2'-Omethyluridine
  modified_base 62: mod_base = OTHER; note = 2'-fluorocytosine
  modified_base 63: mod_base = OTHER; note = 2'-Omethylguanosine
  modified_base 64: mod_base = OTHER; note = 2'-Omethylguanosine
  modified_base 65: mod_base = OTHER; note = 2'-Omethyluridine
  modified_base 66: mod_base = OTHER; note = 2'-Omethylguanosine
  modified_base 67: mod_base = OTHER; note = 2'-Omethylguanosine
  modified_base 72: mod_base = OTHER; note = 2'-Omethyluridine

SEQ ID NO: 6504 - RNA, 83 nt, synthetic construct
  source 1..83: mol_type = other RNA
  modified_base 1: mod_base = OTHER; note = 2'-Omethyladenosine
  modified_base 17: mod_base = OTHER; note = 2'-Omethylguanosine
  modified_base 18: mod_base = OTHER; note = 2'-Omethylguanosine
  modified_base 60: mod_base = OTHER; note = 2'-Omethyluridine
  modified_base 62: mod_base = OTHER; note = 2'-Omethylguanosine
accaggatggccgagtggttaaggcgttggacttcagatccaatggacatatgtccgcgtgggttcgaaccccactcctggta

SEQ ID NO: 6505 - RNA, 76 nt, synthetic construct; identical to SEQ ID NO: 625
  source 1..76: mol_type = other RNA
  modified_base 1: mod_base = OTHER; note = 2'-Omethylguanosine phosphorothiorate
  modified_base 2: mod_base = OTHER; note = 2'-Omethylguanosine phosphorothiorate
  modified_base 3: mod_base = OTHER; note = 2'-Omethylcytosine phosphorothiorate
  modified_base 4: mod_base = OTHER; note = 2'-Omethyluridine phosphorothiorate
  modified_base 5: mod_base = OTHER; note = 2'-Omethylcytosine phosphorothiorate
  modified_base 6: mod_base = OTHER; note = 2'-Omethylcytosine phosphorothiorate
  modified_base 10: mod_base = OTHER; note = 2'-Omethylguanosine
  modified_base 11: mod_base = OTHER; note = 2'-Omethylcytosine
  modified_base 12: mod_base = OTHER; note = 2'-Omethylguanosine
  modified_base 13: mod_base = OTHER; note = 2'-Omethylcytosine
  modified_base 22: mod_base = OTHER; note = 2'-Omethylguanosine
  modified_base 23: mod_base = OTHER; note = 2'-Omethylcytosine
  modified_base 24: mod_base = OTHER; note = 2'-Omethylguanosine
  modified_base 25: mod_base = OTHER; note = 2'-Omethylcytosine
  modified_base 40: mod_base = OTHER; note = 2'-fluorouridine
  modified_base 41: mod_base = OTHER; note = 2'-fluorocytosine
  modified_base 42: mod_base = OTHER; note = 2'-fluoroadenosine
  modified_base 43: mod_base = OTHER; note = 2'-fluoroadenosine
  modified_base 49: mod_base = OTHER; note = 2'-Omethylcytosine
  modified_base 50: mod_base = OTHER; note = 2'-Omethylcytosine
  modified_base 51: mod_base = OTHER; note = 2'-Omethylguanosine
  modified_base 52: mod_base = OTHER; note = 2'-Omethylguanosine
  modified_base 53: mod_base = OTHER; note = 2'-Omethylguanosine
  modified_base 61: mod_base = OTHER; note = 2'-Omethylcytosine
  modified_base 62: mod_base = OTHER; note = 2'-Omethylcytosine
  modified_base 63: mod_base = OTHER; note = 2'-Omethylcytosine
  modified_base 64: mod_base = OTHER; note = 2'-Omethylguanosine
  modified_base 65: mod_base = OTHER; note = 2'-Omethylguanosine
  modified_base 66: mod_base = OTHER; note = 2'-Omethylcytosine
  modified_base 67: mod_base = OTHER; note = 2'-Omethylguanosine
  modified_base 68: mod_base = OTHER; note = 2'-Omethylguanosine
  modified_base 69: mod_base = OTHER; note = 2'-Omethyladenosine

SEQ ID NO: 6506 - RNA, 86 nt, synthetic construct; identical to SEQ ID NO: 3290
  source 1..86: mol_type = other RNA
  modified_base 1: mod_base = OTHER; note = 2'-Omethyladenosine phosphorothiorate
  modified_base 2: mod_base = OTHER; note = 2'-Omethylcytosine phosphorothiorate
  modified_base 85: mod_base = OTHER; note = Cytosine phosphorothiorate
  modified_base 86: mod_base = OTHER; note = 2'-Omethyladenosine

SEQ ID NO: 6507 - RNA, 86 nt, synthetic construct; identical to SEQ ID NO: 3290
  source 1..86: mol_type = other RNA
  modified_base 1: mod_base = OTHER; note = 2'-Omethyladenosine
  modified_base 10: mod_base = OTHER; note = 2'-Omethylguanosine
  modified_base 11: mod_base = OTHER; note = 2'-Omethylcytosine
  modified_base 12: mod_base = OTHER; note = 2'-Omethylcytosine
  modified_base 13: mod_base = OTHER; note = 2'-Omethylguanosine
  modified_base 17: mod_base = OTHER; note = 2'-Omethylguanosine
  modified_base 18: mod_base = OTHER; note = 2'-Omethylguanosine
  modified_base 25: mod_base = OTHER; note = 2'-Omethylcytosine
  modified_base 33: mod_base = OTHER; note = Uridine phosphorothiorate
  modified_base 34: mod_base = OTHER; note = 2'-Omethyluridine
  modified_base 35: mod_base = OTHER; note = Cytosine phosphorothiorate
  modified_base 37: mod_base = OTHER; note = Guanosine phosphorothiorate
  modified_base 38: mod_base = OTHER; note = Adenosine phosphorothiorate
  modified_base 41: mod_base = OTHER; note = 2'-Omethylcytosine
  modified_base 42: mod_base = OTHER; note = 2'-Omethyladenosine
  modified_base 43: mod_base = OTHER; note = 2'-Omethyladenosine
  modified_base 44: mod_base = OTHER; note = 2'-Omethyluridine
  modified_base 59: mod_base = OTHER; note = 2'-Omethylguanosine
  modified_base 60: mod_base = OTHER; note = 2'-Omethyluridine
  modified_base 62: mod_base = OTHER; note = 2'-Omethylguanosine
  modified_base 64: mod_base = OTHER; note = Uridine phosphorothiorate
  modified_base 65: mod_base = OTHER; note = Uridine phosphorothiorate
  modified_base 71: mod_base = OTHER; note = 2'-Omethylcytosine
  modified_base 75: mod_base = OTHER; note = 2'-Omethylcytosine
  modified_base 83: mod_base = OTHER; note = 2'-Omethyladenosine

SEQ ID NO: 6508 - RNA, 85 nt, synthetic construct; identical to SEQ ID NO: 3297
  source 1..85: mol_type = other RNA
  modified_base 1: mod_base = OTHER; note = 2'-Omethylguanosine phosphorothiorate
  modified_base 2: mod_base = OTHER; note = 2'-Omethylcytosine phosphorothiorate
  modified_base 12: mod_base = OTHER; note = Cytosine phosphorothiorate
  modified_base 13: mod_base = OTHER; note = 2'-Omethylguanosine
  modified_base 83: mod_base = OTHER; note = Cytosine phosphorothiorate
  modified_base 84: mod_base = OTHER; note = 2'-Omethylcytosine phosphorothiorate
  modified_base 85: mod_base = OTHER; note = 2'-Omethyladenosine

SEQ ID NO: 6509 - RNA, 76 nt, synthetic construct; identical to SEQ ID NO: 625
  source 1..76: mol_type = other RNA
  modified_base 1: mod_base = OTHER; note = 2'-Omethylguanosine phosphorothiorate
  modified_base 2: mod_base = OTHER; note = 2'-Omethylguanosine phosphorothiorate
  modified_base 3: mod_base = OTHER; note = 2'-Omethylcytosine
  modified_base 4: mod_base = OTHER; note = 2'-Omethyluridine
  modified_base 5: mod_base = OTHER; note = 2'-Omethylcytosine
  modified_base 6: mod_base = OTHER; note = 2'-Omethylcytosine
  modified_base 10: mod_base = OTHER; note = 2'-Omethylguanosine
  modified_base 11: mod_base = OTHER; note = 2'-Omethylcytosine
  modified_base 12: mod_base = OTHER; note = 2'-Omethylguanosine
  modified_base 13: mod_base = OTHER; note = 2'-Omethylcytosine
  modified_base 14: mod_base = OTHER; note = 2'-Omethyladenosine
  modified_base 15: mod_base = OTHER; note = 2'-fluoroadenosine
  modified_base 16: mod_base = OTHER; note = 2'-Omethyluridine
  modified_base 17: mod_base = OTHER; note = 2'-Omethylguanosine
  modified_base 18: mod_base = OTHER; note = 2'-Omethylguanosine
  modified_base 19: mod_base = OTHER; note = 2'-fluoroadenosine
  modified_base 20: mod_base = OTHER; note = 2'-Omethyluridine
  modified_base 22: mod_base = OTHER; note = 2'-Omethylguanosine
  modified_base 23: mod_base = OTHER; note = 2'-Omethylcytosine
  modified_base 24: mod_base = OTHER; note = 2'-Omethylguanosine
  modified_base 25: mod_base = OTHER; note = 2'-Omethylcytosine
  modified_base 33: mod_base = OTHER; note = 2'-fluorouridine
  modified_base 35: mod_base = OTHER; note = Cytosine phosphorothiorate
  modified_base 37: mod_base = OTHER; note = Adenosine phosphorothiorate
  modified_base 38: mod_base = OTHER; note = Adenosine phosphorothiorate
  modified_base 44: mod_base = OTHER; note = 2'-Omethyladenosine
  modified_base 45: mod_base = OTHER; note = 2'-Omethylguanosine
  modified_base 46: mod_base = OTHER; note = 2'-fluoroguanosine
  modified_base 47: mod_base = OTHER; note = 2'-fluorouridine
  modified_base 48: mod_base = OTHER; note = 2'-fluorouridine
  modified_base 52: mod_base = OTHER; note = 2'-O-(2-Methoxyethyl) guanosine
  modified_base 54: mod_base = OTHER; note = Uridine phosphorothiorate
  modified_base 55: mod_base = OTHER; note = Uridine phosphorothiorate
  modified_base 56: mod_base = OTHER; note = 2'-Omethylcytosine
  modified_base 59: mod_base = OTHER; note = 2'-Omethylguanosine
  modified_base 61: mod_base = OTHER; note = 2'-Omethylcytosine
  modified_base 62: mod_base = OTHER; note = 2'-Omethylcytosine
  modified_base 63: mod_base = OTHER; note = 2'-fluorocytosine
  modified_base 64: mod_base = OTHER; note = 2'-Omethylguanosine
  modified_base 65: mod_base = OTHER; note = 2'-Omethylguanosine
  modified_base 66: mod_base = OTHER; note = 2'-Omethylcytosine
  modified_base 67: mod_base = OTHER; note = 2'-Omethylguanosine
  modified_base 68: mod_base = OTHER; note = 2'-Omethylguanosine
  modified_base 73: mod_base = OTHER; note = 2'-Omethylguanosine

SEQ ID NO: 6510 - RNA, 75 nt, synthetic construct; identical to SEQ ID NO: 3299
  source 1..75: mol_type = other RNA
  modified_base 9: mod_base = OTHER; note = 2'-Omethylguanosine phosphorothiorate
  modified_base 13: mod_base = OTHER; note = Adenosine phosphorothiorate
  modified_base 18: mod_base = OTHER; note = 2'-fluoroguanosine
  modified_base 23: mod_base = OTHER; note = 2'-fluoroguanosine phosphorothiorate
  modified_base 25: mod_base = OTHER; note = Adenosine phosphorothiorate
  modified_base 28: mod_base = OTHER; note = Adenosine phosphorothiorate
  modified_base 29: mod_base = OTHER; note = Guanosine phosphorothiorate
  modified_base 34: mod_base = OTHER; note = 2'-fluorouridine
  modified_base 35: mod_base = OTHER; note = 2'-Omethyladenosine phosphorothiorate
  modified_base 40: mod_base = OTHER; note = 2'-fluorouridine
  modified_base 41: mod_base = OTHER; note = 2'-Omethylguanosine phosphorothiorate
  modified_base 47: mod_base = OTHER; note = 2'-fluorocytosine
  modified_base 48: mod_base = OTHER; note = 2'-fluorocytosine
  modified_base 49: mod_base = OTHER; note = 2'-fluoroadenosine
  modified_base 61: mod_base = OTHER; note = 2'-fluorocytosine
  modified_base 62: mod_base = OTHER; note = 2'-fluorocytosine phosphorothiorate
  modified_base 71: mod_base = OTHER; note = 2'-fluorocytosine
  modified_base 73: mod_base = OTHER; note = Cytosine phosphorothiorate
  modified_base 74: mod_base = OTHER; note = Cytosine phosphorothiorate

SEQ ID NO: 6511 - RNA, 75 nt, synthetic construct; identical to SEQ ID NO: 3336
  source 1..75: mol_type = other RNA
  modified_base 2: mod_base = OTHER; note = 2'-Omethylcytosine phosphorothiorate
  modified_base 4: mod_base = OTHER; note = 2'-Omethylguanosine phosphorothiorate
  modified_base 5: mod_base = OTHER; note = 2'-Omethylguanosine phosphorothiorate
  modified_base 40: mod_base = OTHER; note = 2'-fluorouridine
  modified_base 49: mod_base = OTHER; note = 2'-fluoroadenosine
  modified_base 50: mod_base = OTHER; note = 2'-fluoroguanosine
  modified_base 60: mod_base = OTHER; note = 2'-fluorocytosine phosphorothiorate
  modified_base 74: mod_base = OTHER; note = Cytosine phosphorothiorate

SEQ ID NO: 6512 - RNA, 85 nt, synthetic construct; identical to SEQ ID NO: 3317
  source 1..85: mol_type = other RNA
  modified_base 1: mod_base = OTHER; note = 2'-Omethylguanosine phosphorothiorate
  modified_base 3: mod_base = OTHER; note = 2'-Omethyluridine
  modified_base 11: mod_base = OTHER; note = Cytosine phosphorothiorate
  modified_base 23: mod_base = OTHER; note = 2'-fluoroguanosine
  modified_base 24: mod_base = OTHER; note = Guanosine phosphorothiorate
  modified_base 47: mod_base = OTHER; note = 2'-Omethylguanosine
  modified_base 62: mod_base = OTHER; note = 2'-Omethylguanosine
  modified_base 80: mod_base = OTHER; note = 2'-fluoroguanosine phosphorothiorate

SEQ ID NO: 6513 - RNA, 75 nt, synthetic construct; identical to SEQ ID NO: 3336
  source 1..75: mol_type = other RNA
  modified_base 1: mod_base = OTHER; note = 2'-Omethylcytosine
  modified_base 2: mod_base = OTHER; note = 2'-Omethylcytosine phosphorothiorate
  modified_base 11: mod_base = OTHER; note = Uridine phosphorothiorate
  modified_base 19: mod_base = OTHER; note = 2'-fluorouridine
  modified_base 21: mod_base = OTHER; note = 2'-fluoroguanosine
  modified_base 26: mod_base = OTHER; note = 2'-fluorouridine
  modified_base 27: mod_base = OTHER; note = Cytosine phosphorothiorate
  modified_base 46: mod_base = OTHER; note = 2'-fluorouridine
  modified_base 47: mod_base = OTHER; note = 2'-fluorocytosine
  modified_base 62: mod_base = OTHER; note = 2'-fluorocytosine
  modified_base 73: mod_base = OTHER; note = Cytosine phosphorothiorate
  modified_base 74: mod_base = OTHER; note = 2'-Omethylcytosine

SEQ ID NO: 6514 - RNA, 76 nt, synthetic construct
  source 1..76: mol_type = other RNA
ggcgccgtggcgcaatggatagcgcattggacttcaaattcaaaggatccgggttcgagtcccggcggcgtcgcca

SEQ ID NO: 6515 - RNA, 76 nt, synthetic construct; identical to SEQ ID NO: 625
  source 1..76: mol_type = other RNA
  modified_base 2: mod_base = OTHER; note = Guanosine phosphorothiorate
  modified_base 3: mod_base = OTHER; note = 2'-fluorocytosine phosphorothiorate
  modified_base 5: mod_base = OTHER; note = 2'-fluorocytosine
  modified_base 6: mod_base = OTHER; note = 2'-Omethylcytosine
  modified_base 7: mod_base = OTHER; note = Guanosine phosphorothiorate
  modified_base 11: mod_base = OTHER; note = 2'-Omethylcytosine
  modified_base 12: mod_base = OTHER; note = 2'-fluoroguanosine
  modified_base 13: mod_base = OTHER; note = 2'-Omethylcytosine
  modified_base 14: mod_base = OTHER; note = 2'-Omethyladenosine
  modified_base 15: mod_base = OTHER; note = 2'-fluoroadenosine
  modified_base 17: mod_base = OTHER; note = 2'-Omethylguanosine
  modified_base 20: mod_base = OTHER; note = 2'-fluorouridine
  modified_base 27: mod_base = OTHER; note = 2'-Omethyluridine
  modified_base 28: mod_base = OTHER; note = 2'-Omethyluridine
  modified_base 29: mod_base = OTHER; note = 2'-fluoroguanosine
  modified_base 30: mod_base = OTHER; note = 2'-Omethylguanosine
  modified_base 33: mod_base = OTHER; note = Uridine phosphorothiorate
  modified_base 40: mod_base = OTHER; note = Uridine phosphorothiorate
  modified_base 41: mod_base = OTHER; note = 2'-fluorocytosine
  modified_base 42: mod_base = OTHER; note = 2'-fluoroadenosine
  modified_base 44: mod_base = OTHER; note = 2'-fluoroadenosine
  modified_base 45: mod_base = OTHER; note = 2'-Omethylguanosine
  modified_base 48: mod_base = OTHER; note = 2'-Omethyluridine
  modified_base 49: mod_base = OTHER; note = Cytosine phosphorothiorate
  modified_base 51: mod_base = OTHER; note = 2'-Omethylguanosine
  modified_base 53: mod_base = OTHER; note = Guanosine phosphorothiorate
  modified_base 54: mod_base = OTHER; note = 2'-Omethyluridine phosphorothiorate
  modified_base 56: mod_base = OTHER; note = 2'-Omethylcytosine
  modified_base 57: mod_base = OTHER; note = 2'-Omethylguanosine
  modified_base 58: mod_base = OTHER; note = 2'-fluoroadenosine phosphorothiorate
  modified_base 59: mod_base = OTHER; note = 2'-Omethylguanosine
  modified_base 63: mod_base = OTHER; note = 2'-fluorocytosine
  modified_base 69: mod_base = OTHER; note = 2'-fluoroadenosine
  modified_base 72: mod_base = OTHER; note = 2'-fluorocytosine
  modified_base 73: mod_base = OTHER; note = 2'-Omethylguanosine
  modified_base 75: mod_base = OTHER; note = 2'-Omethylcytosine

SEQ ID NO: 6516 - RNA, 85 nt, synthetic construct; identical to SEQ ID NO: 3286
  source 1..85: mol_type = other RNA
  modified_base 1: mod_base = OTHER; note = 2'-fluorocytosine phosphorothiorate
  modified_base 3: mod_base = OTHER; note = 2'-fluoroadenosine
  modified_base 8: mod_base = OTHER; note = 2'-fluoroguanosine
  modified_base 13: mod_base = OTHER; note = 2'-fluoroadenosine phosphorothiorate
  modified_base 15: mod_base = OTHER; note = Uridine phosphorothiorate
  modified_base 20: mod_base = OTHER; note = 2'-fluoroadenosine
  modified_base 26: mod_base = OTHER; note = 2'-fluorouridine
  modified_base 30: mod_base = OTHER; note = 2'-fluoroadenosine
  modified_base 32: mod_base = OTHER; note = 2'-fluorouridine
  modified_base 48: mod_base = OTHER; note = 2'-fluoroadenosine phosphorothiorate
  modified_base 54: mod_base = OTHER; note = 2'-fluorocytosine
  modified_base 56: mod_base = OTHER; note = 2'-fluoroguanosine
  modified_base 57: mod_base = OTHER; note = 2'-Omethylcytosine
  modified_base 79: mod_base = OTHER; note = 2'-Omethylguanosine
  modified_base 84: mod_base = OTHER; note = 2'-fluorocytosine phosphorothiorate

SEQ ID NO: 6517 - RNA, 76 nt, synthetic construct; identical to SEQ ID NO: 625
  source 1..76: mol_type = other RNA
  modified_base 8: mod_base = OTHER; note = 2'-O-(2-Methoxyethyl) thymine
  modified_base 9: mod_base = OTHER; note = 2'-O-(2-Methoxyethyl) guanosine

SEQ ID NO: 6518 - DNA, 74 bp, synthetic construct; identical to SEQ ID NO: 3384
  source 1..74: mol_type = other DNA
  modified_base 1: mod_base = OTHER; note = 2'-Omethylguanosine phosphorothiorate
  modified_base 2: mod_base = OTHER; note = 2'-Omethylguanosine phosphorothiorate
  modified_base 9: mod_base = OTHER; note = Guanosine phosphorothiorate
  modified_base 52: mod_base = OTHER; note = 2'-Omethylguanosine
  modified_base 59: mod_base = OTHER; note = 2'-O-(2-Methoxyethyl) guanosine
  modified_base 73: mod_base = OTHER; note = 2'-Omethylguanosine
  misc_feature 1..9: note = RNA
  misc_feature 10: note = DNA
  misc_feature 11..74: note = RNA

SEQ ID NO: 6519 - RNA, 75 nt, synthetic construct; identical to SEQ ID NO: 1045
  source 1..75: mol_type = other RNA
  modified_base 1: mod_base = OTHER; note = 2'-fluoroguanosine phosphorothiorate
  modified_base 2: mod_base = OTHER; note = 2'-Omethylguanosine phosphorothiorate
  modified_base 16: mod_base = OTHER; note = Uridine phosphorothiorate
  modified_base 23: mod_base = OTHER; note = 2'-fluorocytosine
  modified_base 40: mod_base = OTHER; note = 2'-fluorocytosine
  modified_base 52: mod_base = OTHER; note = 2'-fluoroguanosine phosphorothiorate
  modified_base 61: mod_base = OTHER; note = 2'-Omethyluridine
  modified_base 74: mod_base = OTHER; note = Cytosine phosphorothiorate

SEQ ID NO: 6520 - RNA, 73 nt, synthetic construct; identical to SEQ ID NO: 935
  source 1..73: mol_type = other RNA
  modified_base 1: mod_base = OTHER; note = 2'-Omethylguanosine
  modified_base 18: mod_base = OTHER; note = 2'-Omethylguanosine
  modified_base 73: mod_base = OTHER; note = 2'-Omethylguanosine

SEQ ID NO: 6521 - RNA, 76 nt, synthetic construct
  source 1..76: mol_type = other RNA
ggccctgtggcgcaatggatagcgcattggacttcaaattcaaaggttccgggttcgagtcccggcggggtcgcca

SEQ ID NO: 6522 - RNA, 75 nt, synthetic construct; identical to SEQ ID NO: 3311
  source 1..75: mol_type = other RNA
  modified_base 1: mod_base = OTHER; note = Guanosine phosphorothiorate
  modified_base 10: mod_base = OTHER; note = Guanosine phosphorothiorate
  modified_base 11: mod_base = OTHER; note = 2'-fluorouridine
  modified_base 27: mod_base = OTHER; note = 2'-Omethylcytosine phosphorothiorate
  modified_base 43: mod_base = OTHER; note = 2'-fluoroguanosine
  modified_base 67: mod_base = OTHER; note = 2'-fluoroguanosine
  modified_base 73: mod_base = OTHER; note = Cytosine phosphorothiorate
  modified_base 75: mod_base = OTHER; note = 2'-fluoroadenosine

SEQ ID NO: 6523 - RNA, 76 nt, synthetic construct; identical to SEQ ID NO: 625
  source 1..76: mol_type = other RNA
  modified_base 14: mod_base = OTHER; note = 2'-fluoroadenosine
  modified_base 15: mod_base = OTHER; note = 2'-fluoroadenosine
  modified_base 16: mod_base = OTHER; note = 2'-fluorouridine
  modified_base 17: mod_base = OTHER; note = 2'-fluoroguanosine
  modified_base 18: mod_base = OTHER; note = 2'-fluoroguanosine
  modified_base 19: mod_base = OTHER; note = 2'-fluoroadenosine
  modified_base 20: mod_base = OTHER; note = 2'-fluorouridine
  modified_base 21: mod_base = OTHER; note = 2'-fluoroadenosine

SEQ ID NO: 6524 - DNA, 76 bp, synthetic construct; identical to SEQ ID NO: 1924
  source 1..76: mol_type = other DNA
  modified_base 1: mod_base = OTHER; note = 2'-Omethylguanosine phosphorothiorate
  modified_base 2: mod_base = OTHER; note = 2'-O-(2-Methoxyethyl) guanosine phosphorothiorate
  modified_base 4: mod_base = OTHER; note = 2'-Omethyluridine phosphorothiorate
  modified_base 9: mod_base = OTHER; note = 2'-fluoroguanosine
  modified_base 10: mod_base = OTHER; note = Guanosine phosphorothiorate
  modified_base 11: mod_base = OTHER; note = 2'-Omethylcytosine
  modified_base 13: mod_base = OTHER; note = 2'-fluorocytosine phosphorothiorate
  modified_base 14: mod_base = OTHER; note = 2'-fluoroadenosine phosphorothiorate
  modified_base 22: mod_base = OTHER; note = 2'-Omethylguanosine
  modified_base 24: mod_base = OTHER; note = Guanosine phosphorothiorate
  modified_base 25: mod_base = OTHER; note = 2'-Omethylcytosine
  modified_base 29: mod_base = OTHER; note = 2'-Omethylguanosine phosphorothiorate
  modified_base 30: mod_base = OTHER; note = 2'-Omethylguanosine
  modified_base 31: mod_base = OTHER; note = 2'-Omethyladenosine
  modified_base 33: mod_base = OTHER; note = Uridine phosphorothiorate
  modified_base 34: mod_base = OTHER; note = 2'-Omethyluridine
  modified_base 36: mod_base = OTHER; note = Adenosine phosphorothiorate
  modified_base 37: mod_base = OTHER; note = deoxyadenosine phosphorothiorate
  modified_base 39: mod_base = OTHER; note = Uridine phosphorothiorate
  modified_base 41: mod_base = OTHER; note = Cytosine phosphorothiorate
  modified_base 42: mod_base = OTHER; note = 2'-Omethyladenosine
  modified_base 50: mod_base = OTHER; note = Cytosine phosphorothiorate
  modified_base 51: mod_base = OTHER; note = 2'-Omethylguanosine
  modified_base 52: mod_base = OTHER; note = Guanosine phosphorothiorate
  modified_base 55: mod_base = OTHER; note = Uridine phosphorothiorate
  modified_base 59: mod_base = OTHER; note = 2'-O-(2-Methoxyethyl) guanosine phosphorothiorate
  modified_base 60: mod_base = OTHER; note = 2'-fluorouridine phosphorothiorate
  modified_base 61: mod_base = OTHER; note = 2'-O-(2-Methoxyethyl) 5-methylcytosine
  modified_base 62: mod_base = OTHER; note = Cytosine phosphorothiorate
  modified_base 65: mod_base = OTHER; note = Guanosine phosphorothiorate
  modified_base 66: mod_base = OTHER; note = Cytosine phosphorothiorate
  modified_base 67: mod_base = OTHER; note = Guanosine phosphorothiorate
  modified_base 69: mod_base = OTHER; note = Adenosine phosphorothiorate
  modified_base 70: mod_base = OTHER; note = 2'-fluoroguanosine
  modified_base 71: mod_base = OTHER; note = Uridine phosphorothiorate
  modified_base 74: mod_base = OTHER; note = Cytosine phosphorothiorate
  modified_base 75: mod_base = OTHER; note = 2'-Omethylcytosine phosphorothiorate
  misc_feature 1..4: note = RNA
  misc_feature 5: note = DNA
  misc_feature 6..36: note = RNA
  misc_feature 37..38: note = DNA
  misc_feature 39..46: note = RNA
  misc_feature 47: note = DNA
  misc_feature 48..67: note = RNA
  misc_feature 68: note = DNA
  misc_feature 69..71: note = RNA
  misc_feature 72: note = DNA
  misc_feature 73..76: note = RNA

SEQ ID NO: 6525 - RNA, 75 nt, synthetic construct; identical to SEQ ID NO: 3306
  source 1..75: mol_type = other RNA
  modified_base 1: mod_base = OTHER; note = 2'-Omethylguanosine
  modified_base 43: mod_base = OTHER; note = 2'-Omethyladenosine
  modified_base 44: mod_base = OTHER; note = 2'-Omethylguanosine
  modified_base 72: mod_base = OTHER; note = 2'-Omethyladenosine

SEQ ID NO: 6526 - RNA, 86 nt, synthetic construct; identical to SEQ ID NO: 3290
  source 1..86: mol_type = other RNA
  modified_base 75: mod_base = OTHER; note = 2'-fluorocytosine

SEQ ID NO: 6527 - DNA, 76 bp, synthetic construct; identical to SEQ ID NO: 1924
  source 1..76: mol_type = other DNA
  modified_base 1: mod_base = OTHER; note = 2'-Omethylguanosine phosphorothiorate
  modified_base 2: mod_base = OTHER; note = 2'-Omethylguanosine
  modified_base 11: mod_base = OTHER; note = 2'-Omethylcytosine
  modified_base 14: mod_base = OTHER; note = Adenosine phosphorothiorate
  modified_base 15: mod_base = OTHER; note = 2'-fluoroadenosine
  modified_base 16: mod_base = OTHER; note = Uridine phosphorothiorate
  modified_base 17: mod_base = OTHER; note = 2'-Omethylguanosine phosphorothiorate
  modified_base 20: mod_base = OTHER; note = 2'-Omethyluridine
  modified_base 21: mod_base = OTHER; note = 2'-fluoroadenosine phosphorothiorate
  modified_base 22: mod_base = OTHER; note = 2'-O-(2-Methoxyethyl) guanosine
  modified_base 26: mod_base = OTHER; note = 2'-O-(2-Methoxyethyl) adenosine phosphorothiorate
  modified_base 27: mod_base = OTHER; note = 2'-fluorouridine phosphorothiorate
  modified_base 28: mod_base = OTHER; note = 2'-O-(2-Methoxyethyl) thymine
  modified_base 30: mod_base = OTHER; note = 2'-Omethylguanosine phosphorothiorate
  modified_base 31: mod_base = OTHER; note = 2'-O-(2-Methoxyethyl) adenosine
  modified_base 35: mod_base = OTHER; note = Cytosine phosphorothiorate
  modified_base 37: mod_base = OTHER; note = Adenosine phosphorothiorate
  modified_base 38: mod_base = OTHER; note = 2'-Omethyladenosine
  modified_base 39: mod_base = OTHER; note = Uridine phosphorothiorate
  modified_base 40: mod_base = OTHER; note = 2'-O-(2-Methoxyethyl) thymine
  modified_base 41: mod_base = OTHER; note = Cytosine phosphorothiorate
  modified_base 42: mod_base = OTHER; note = deoxyadenosine phosphorothiorate
  modified_base 43: mod_base = OTHER; note = 2'-O-(2-Methoxyethyl) adenosine
  modified_base 46: mod_base = OTHER; note = Guanosine phosphorothiorate
  modified_base 55: mod_base = OTHER; note = 2'-O-(2-Methoxyethyl) thymine phosphorothiorate
  modified_base 56: mod_base = OTHER; note = 2'-O-(2-Methoxyethyl) 5-methylcytosine
  modified_base 57: mod_base = OTHER; note = 2'-O-(2-Methoxyethyl) guanosine
  modified_base 59: mod_base = OTHER; note = 2'-fluoroguanosine
  modified_base 62: mod_base = OTHER; note = Cytosine phosphorothiorate
  modified_base 63: mod_base = OTHER; note = Cytosine phosphorothiorate
  modified_base 64: mod_base = OTHER; note = 2'-Omethylguanosine
  modified_base 66: mod_base = OTHER; note = 2'-O-(2-Methoxyethyl) 5-methylcytosine phosphorothiorate
  modified_base 68: mod_base = OTHER; note = 2'-fluoroguanosine
  modified_base 71: mod_base = OTHER; note = Uridine phosphorothiorate
  modified_base 73: mod_base = OTHER; note = Guanosine phosphorothiorate
  modified_base 75: mod_base = OTHER; note = Cytosine phosphorothiorate
  modified_base 76: mod_base = OTHER; note = 2'-Omethyladenosine
  misc_feature 1..3: note = RNA
  misc_feature 4: note = DNA
  misc_feature 5..28: note = RNA
  misc_feature 29: note = DNA
  misc_feature 30..41: note = RNA
  misc_feature 42: note = DNA
  misc_feature 43..47: note = RNA
  misc_feature 48: note = DNA
  misc_feature 49..66: note = RNA
  misc_feature 67: note = DNA
  misc_feature 68..69: note = RNA
  misc_feature 70: note = DNA
  misc_feature 71..76: note = RNA

SEQ ID NO: 6528 - RNA, 85 nt, synthetic construct; identical to SEQ ID NO: 3301
  source 1..85: mol_type = other RNA
  modified_base 1: mod_base = OTHER; note = 2'-Omethylguanosine phosphorothiorate
  modified_base 2: mod_base = OTHER; note = 2'-Omethylcytosine phosphorothiorate
  modified_base 14: mod_base = OTHER; note = 2'-Omethyladenosine
  modified_base 20: mod_base = OTHER; note = Uridine phosphorothiorate
  modified_base 23: mod_base = OTHER; note = 2'-Omethylguanosine
  modified_base 30: mod_base = OTHER; note = Guanosine phosphorothiorate
  modified_base 35: mod_base = OTHER; note = 2'-Omethyluridine phosphorothiorate
  modified_base 38: mod_base = OTHER; note = 2'-Omethyladenosine phosphorothiorate
  modified_base 45: mod_base = OTHER; note = 2'-fluoroguanosine phosphorothiorate
  modified_base 53: mod_base = OTHER; note = 2'-fluorocytosine
  modified_base 54: mod_base = OTHER; note = 2'-fluorocytosine
  modified_base 56: mod_base = OTHER; note = 2'-fluoroguanosine phosphorothiorate
  modified_base 59: mod_base = OTHER; note = 2'-Omethylcytosine
  modified_base 62: mod_base = OTHER; note = 2'-Omethylguanosine phosphorothiorate
  modified_base 71: mod_base = OTHER; note = 2'-fluorocytosine
  modified_base 78: mod_base = OTHER; note = Cytosine phosphorothiorate
  modified_base 83: mod_base = OTHER; note = Cytosine phosphorothiorate

SEQ ID NO: 6529 - RNA, 85 nt, synthetic construct; identical to SEQ ID NO: 3317
  source 1..85: mol_type = other RNA
  modified_base 1: mod_base = OTHER; note = 2'-Omethylguanosine phosphorothiorate
  modified_base 2: mod_base = OTHER; note = Cytosine phosphorothiorate
  modified_base 4: mod_base = OTHER; note = 2'-Omethylguanosine phosphorothiorate
  modified_base 9: mod_base = OTHER; note = Guanosine phosphorothiorate
  modified_base 15: mod_base = OTHER; note = 2'-fluoroguanosine
  modified_base 26: mod_base = OTHER; note = Guanosine phosphorothiorate
  modified_base 30: mod_base = OTHER; note = 2'-Omethylguanosine
  modified_base 31: mod_base = OTHER; note = 2'-fluoroadenosine
  modified_base 37: mod_base = OTHER; note = 2'-fluoroadenosine
  modified_base 44: mod_base = OTHER; note = 2'-Omethyluridine phosphorothiorate
  modified_base 58: mod_base = OTHER; note = 2'-fluoroguanosine phosphorothiorate
  modified_base 59: mod_base = OTHER; note = 2'-fluorocytosine phosphorothiorate
  modified_base 62: mod_base = OTHER; note = Guanosine phosphorothiorate
  modified_base 82: mod_base = OTHER; note = 2'-Omethylguanosine
  modified_base 84: mod_base = OTHER; note = Cytosine phosphorothiorate

SEQ ID NO: 6530 - RNA, 76 nt, synthetic construct; identical to SEQ ID NO: 3318
  source 1..76: mol_type = other RNA
  modified_base 1: mod_base = OTHER; note = 2'-Omethylcytosine
  modified_base 14: mod_base = OTHER; note = 2'-Omethyladenosine phosphorothiorate
  modified_base 15: mod_base = OTHER; note = 2'-Omethylguanosine phosphorothiorate
  modified_base 16: mod_base = OTHER; note = 2'-Omethyluridine phosphorothiorate
  modified_base 18: mod_base = OTHER; note = 2'-Omethylguanosine phosphorothiorate
  modified_base 19: mod_base = OTHER; note = 2'-Omethylguanosine phosphorothiorate
  modified_base 20: mod_base = OTHER; note = Uridine phosphorothiorate
  modified_base 21: mod_base = OTHER; note = Adenosine phosphorothiorate
  modified_base 50: mod_base = OTHER; note = 2'-Omethylcytosine
  modified_base 52: mod_base = OTHER; note = 2'-Omethylguanosine
  modified_base 73: mod_base = OTHER; note = 2'-Omethyladenosine

SEQ ID NO: 6531 - RNA, 76 nt, synthetic construct; identical to SEQ ID NO: 625
  source 1..76: mol_type = other RNA
  modified_base 1: mod_base = OTHER; note = 2'-Omethylguanosine phosphorothiorate
  modified_base 2: mod_base = OTHER; note = 2'-Omethylguanosine phosphorothiorate
  modified_base 3: mod_base = OTHER; note = 2'-Omethylcytosine
  modified_base 4: mod_base = OTHER; note = 2'-Omethyluridine
  modified_base 5: mod_base = OTHER; note = 2'-Omethylcytosine
  modified_base 6: mod_base = OTHER; note = 2'-Omethylcytosine
  modified_base 16: mod_base = OTHER; note = 2'-Omethyluridine
  modified_base 17: mod_base = OTHER; note = 2'-Omethylguanosine
  modified_base 18: mod_base = OTHER; note = 2'-Omethylguanosine
  modified_base 20: mod_base = OTHER; note = 2'-Omethyluridine
  modified_base 25: mod_base = OTHER; note = 2'-Omethylcytosine
  modified_base 33: mod_base = OTHER; note = 2'-fluorouridine
  modified_base 35: mod_base = OTHER; note = Cytosine phosphorothiorate
  modified_base 37: mod_base = OTHER; note = Adenosine phosphorothiorate
  modified_base 38: mod_base = OTHER; note = Adenosine phosphorothiorate
  modified_base 41: mod_base = OTHER; note = 2'-fluorocytosine
  modified_base 42: mod_base = OTHER; note = 2'-Omethyladenosine
  modified_base 43: mod_base = OTHER; note = 2'-Omethyladenosine
  modified_base 44: mod_base = OTHER; note = 2'-fluoroadenosine
  modified_base 49: mod_base = OTHER; note = 2'-Omethylcytosine
  modified_base 50: mod_base = OTHER; note = 2'-Omethylcytosine
  modified_base 52: mod_base = OTHER; note = 2'-Omethylguanosine
  modified_base 54: mod_base = OTHER; note = 2'-Omethyluridine
  modified_base 55: mod_base = OTHER; note = Uridine phosphorothiorate
  modified_base 56: mod_base = OTHER; note = 2'-Omethylcytosine
  modified_base 57: mod_base = OTHER; note = 2'-fluoroguanosine
  modified_base 59: mod_base = OTHER; note = 2'-Omethylguanosine
  modified_base 61: mod_base = OTHER; note = 2'-Omethylcytosine
  modified_base 62: mod_base = OTHER; note = 2'-Omethylcytosine
  modified_base 63: mod_base = OTHER; note = 2'-fluorocytosine
  modified_base 64: mod_base = OTHER; note = 2'-Omethylguanosine
  modified_base 65: mod_base = OTHER; note = 2'-Omethylguanosine
  modified_base 75: mod_base = OTHER; note = Cytosine phosphorothiorate
  modified_base 76: mod_base = OTHER; note = 2'-Omethyladenosine

SEQ ID NO: 6532 - RNA, 76 nt, synthetic construct; identical to SEQ ID NO: 625
  source 1..76: mol_type = other RNA
  modified_base 2: mod_base = OTHER; note = 2'-Omethylguanosine
  modified_base 3: mod_base = OTHER; note = Cytosine phosphorothiorate
  modified_base 4: mod_base = OTHER; note = 2'-Omethyluridine phosphorothiorate
  modified_base 5: mod_base = OTHER; note = 2'-Omethylcytosine phosphorothiorate
  modified_base 6: mod_base = OTHER; note = 2'-fluorocytosine phosphorothiorate
  modified_base 7: mod_base = OTHER; note = Guanosine phosphorothiorate
  modified_base 11: mod_base = OTHER; note = Cytosine phosphorothiorate
  modified_base 12: mod_base = OTHER; note = 2'-fluoroguanosine
  modified_base 13: mod_base = OTHER; note = 2'-Omethylcytosine
  modified_base 19: mod_base = OTHER; note = Adenosine phosphorothiorate
  modified_base 20: mod_base = OTHER; note = 2'-Omethyluridine
  modified_base 21: mod_base = OTHER; note = Adenosine phosphorothiorate
  modified_base 22: mod_base = OTHER; note = 2'-fluoroguanosine
  modified_base 26: mod_base = OTHER; note = Adenosine phosphorothiorate
  modified_base 27: mod_base = OTHER; note = 2'-Omethyluridine
  modified_base 29: mod_base = OTHER; note = 2'-Omethylguanosine
  modified_base 31: mod_base = OTHER; note = 2'-Omethyladenosine
  modified_base 38: mod_base = OTHER; note = 2'-Omethyladenosine
  modified_base 39: mod_base = OTHER; note = 2'-Omethyluridine
  modified_base 43: mod_base = OTHER; note = 2'-Omethyladenosine
  modified_base 46: mod_base = OTHER; note = Guanosine phosphorothiorate
  modified_base 47: mod_base = OTHER; note = 2'-fluorouridine
  modified_base 48: mod_base = OTHER; note = 2'-fluorouridine
  modified_base 52: mod_base = OTHER; note = 2'-fluoroguanosine
  modified_base 54: mod_base = OTHER; note = Uridine phosphorothiorate
  modified_base 57: mod_base = OTHER; note = Guanosine phosphorothiorate
  modified_base 58: mod_base = OTHER; note = 2'-fluoroadenosine
  modified_base 63: mod_base = OTHER; note = 2'-Omethylcytosine
  modified_base 64: mod_base = OTHER; note = 2'-fluoroguanosine
  modified_base 66: mod_base = OTHER; note = 2'-Omethylcytosine
  modified_base 67: mod_base = OTHER; note = 2'-Omethylguanosine
  modified_base 68: mod_base = OTHER; note = 2'-Omethylguanosine
  modified_base 71: mod_base = OTHER; note = Uridine phosphorothiorate
  modified_base 72: mod_base = OTHER; note = 2'-fluorocytosine
  modified_base 74: mod_base = OTHER; note = 2'-Omethylcytosine
  modified_base 75: mod_base = OTHER; note = 2'-fluorocytosine
  modified_base 76: mod_base = OTHER; note = 2'-fluoroadenosine

SEQ ID NO: 6533 - RNA, 76 nt, synthetic construct; identical to SEQ ID NO: 625
  source 1..76: mol_type = other RNA
  modified_base 3: mod_base = OTHER; note = 2'-Omethylcytosine
  modified_base 11: mod_base = OTHER; note = Cytosine phosphorothiorate
  modified_base 12: mod_base = OTHER; note = 2'-Omethylguanosine
  modified_base 14: mod_base = OTHER; note = Adenosine phosphorothiorate
  modified_base 15: mod_base = OTHER; note = 2'-Omethyladenosine
  modified_base 18: mod_base = OTHER; note = 2'-Omethylguanosine
  modified_base 20: mod_base = OTHER; note = Uridine phosphorothiorate
  modified_base 25: mod_base = OTHER; note = 2'-fluorocytosine phosphorothiorate
  modified_base 26: mod_base = OTHER; note = 2'-Omethyladenosine
  modified_base 27: mod_base = OTHER; note = 2'-Omethyluridine
  modified_base 28: mod_base = OTHER; note = Uridine phosphorothiorate
  modified_base 29: mod_base = OTHER; note = 2'-Omethylguanosine phosphorothiorate
  modified_base 31: mod_base = OTHER; note = 2'-fluoroadenosine
  modified_base 33: mod_base = OTHER; note = 2'-fluorouridine
  modified_base 36: mod_base = OTHER; note = Adenosine phosphorothiorate
  modified_base 38: mod_base = OTHER; note = Adenosine phosphorothiorate
  modified_base 39: mod_base = OTHER; note = 2'-fluorouridine
  modified_base 41: mod_base = OTHER; note = 2'-fluorocytosine
  modified_base 46: mod_base = OTHER; note = 2'-fluoroguanosine
  modified_base 47: mod_base = OTHER; note = 2'-fluorouridine
  modified_base 49: mod_base = OTHER; note = 2'-Omethylcytosine
  modified_base 53: mod_base = OTHER; note = Guanosine phosphorothiorate
  modified_base 56: mod_base = OTHER; note = 2'-fluorocytosine
  modified_base 60: mod_base = OTHER; note = 2'-Omethyluridine
  modified_base 63: mod_base = OTHER; note = Cytosine phosphorothiorate
  modified_base 64: mod_base = OTHER; note = 2'-fluoroguanosine
  modified_base 65: mod_base = OTHER; note = 2'-fluoroguanosine
  modified_base 69: mod_base = OTHER; note = 2'-Omethyladenosine
  modified_base 70: mod_base = OTHER; note = 2'-fluoroguanosine
  modified_base 73: mod_base = OTHER; note = Guanosine phosphorothiorate
  modified_base 74: mod_base = OTHER; note = 2'-fluorocytosine
  modified_base 75: mod_base = OTHER; note = 2'-fluorocytosine phosphorothiorate

SEQ ID NO: 6534 - RNA, 76 nt, synthetic construct; identical to SEQ ID NO: 625
  source 1..76: mol_type = other RNA
  modified_base 1: mod_base = OTHER; note = 2'-fluoroguanosine
  modified_base 2: mod_base = OTHER; note = 2'-Omethylguanosine
  modified_base 5: mod_base = OTHER; note = 2'-Omethylcytosine
  modified_base 12: mod_base = OTHER; note = Guanosine phosphorothiorate
  modified_base 13: mod_base = OTHER; note = 2'-Omethylcytosine phosphorothiorate
  modified_base 14: mod_base = OTHER; note = 2'-fluoroadenosine
  modified_base 18: mod_base = OTHER; note = 2'-Omethylguanosine
  modified_base 23: mod_base = OTHER; note = 2'-fluorocytosine
  modified_base 24: mod_base = OTHER; note = 2'-fluoroguanosine
  modified_base 25: mod_base = OTHER; note = 2'-fluorocytosine phosphorothiorate
  modified_base 26: mod_base = OTHER; note = 2'-Omethyladenosine
  modified_base 27: mod_base = OTHER; note = Uridine phosphorothiorate
  modified_base 31: mod_base = OTHER; note = 2'-Omethyladenosine
  modified_base 33: mod_base = OTHER; note = 2'-fluorouridine
  modified_base 34: mod_base = OTHER; note = 2'-fluorouridine phosphorothiorate
  modified_base 38: mod_base = OTHER; note = 2'-Omethyladenosine
  modified_base 40: mod_base = OTHER; note = Uridine phosphorothiorate
  modified_base 41: mod_base = OTHER; note = 2'-fluorocytosine
  modified_base 44: mod_base = OTHER; note = Adenosine phosphorothiorate
  modified_base 45: mod_base = OTHER; note = Guanosine phosphorothiorate
  modified_base 46: mod_base = OTHER; note = 2'-fluoroguanosine
  modified_base 47: mod_base = OTHER; note = Uridine phosphorothiorate
  modified_base 48: mod_base = OTHER; note = 2'-fluorouridine
  modified_base 51: mod_base = OTHER; note = Guanosine phosphorothiorate
  modified_base 52: mod_base = OTHER; note = 2'-fluoroguanosine
  modified_base 53: mod_base = OTHER; note = Guanosine phosphorothiorate
  modified_base 55: mod_base = OTHER; note = Uridine phosphorothiorate
  modified_base 56: mod_base = OTHER; note = Cytosine phosphorothiorate
  modified_base 57: mod_base = OTHER; note = 2'-fluoroguanosine
  modified_base 58: mod_base = OTHER; note = 2'-fluoroadenosine phosphorothiorate
  modified_base 59: mod_base = OTHER; note = 2'-fluoroguanosine
  modified_base 61: mod_base = OTHER; note = 2'-Omethylcytosine
  modified_base 62: mod_base = OTHER; note = 2'-Omethylcytosine
  modified_base 65: mod_base = OTHER; note = 2'-fluoroguanosine
  modified_base 68: mod_base = OTHER; note = Guanosine phosphorothiorate
  modified_base 69: mod_base = OTHER; note = 2'-fluoroadenosine
  modified_base 70: mod_base = OTHER; note = 2'-Omethylguanosine

SEQ ID NO: 6535 - RNA, 75 nt, synthetic construct; identical to SEQ ID NO: 1045
  source 1..75: mol_type = other RNA
  modified_base 1: mod_base = OTHER; note = 2'-Omethylguanosine
  modified_base 2: mod_base = OTHER; note = 2'-Omethylguanosine
  modified_base 3: mod_base = OTHER; note = 2'-Omethyluridine
  modified_base 4: mod_base = OTHER; note = 2'-Omethyluridine
  modified_base 5: mod_base = OTHER; note = 2'-Omethylcytosine
  modified_base 6: mod_base = OTHER; note = 2'-Omethylcytosine
  modified_base 13: mod_base = OTHER; note = 2'-Omethyluridine
  modified_base 14: mod_base = OTHER; note = 2'-Omethyladenosine
  modified_base 15: mod_base = OTHER; note = 2'-Omethyladenosine
  modified_base 16: mod_base = OTHER; note = 2'-Omethyluridine
  modified_base 17: mod_base = OTHER; note = 2'-Omethylguanosine
  modified_base 18: mod_base = OTHER; note = 2'-Omethylguanosine
  modified_base 19: mod_base = OTHER; note = Uridine phosphorothiorate
  modified_base 20: mod_base = OTHER; note = 2'-Omethyladenosine
  modified_base 21: mod_base = OTHER; note = Adenosine phosphorothiorate
  modified_base 25: mod_base = OTHER; note = 2'-Omethylcytosine
  modified_base 33: mod_base = OTHER; note = Uridine phosphorothiorate
  modified_base 34: mod_base = OTHER; note = 2'-Omethyluridine
  modified_base 35: mod_base = OTHER; note = Uridine phosphorothiorate
  modified_base 37: mod_base = OTHER; note = Adenosine phosphorothiorate
  modified_base 38: mod_base = OTHER; note = Adenosine phosphorothiorate
  modified_base 48: mod_base = OTHER; note = 2'-Omethylcytosine
  modified_base 49: mod_base = OTHER; note = 2'-Omethylcytosine
  modified_base 51: mod_base = OTHER; note = 2'-Omethyladenosine
  modified_base 53: mod_base = OTHER; note = Uridine phosphorothiorate
  modified_base 54: mod_base = OTHER; note = Uridine phosphorothiorate
  modified_base 60: mod_base = OTHER; note = 2'-Omethylcytosine
  modified_base 64: mod_base = OTHER; note = 2'-Omethylguanosine
  modified_base 72: mod_base = OTHER; note = 2'-Omethyluridine

SEQ ID NO: 6536 - RNA, 75 nt, synthetic construct; identical to SEQ ID NO: 1045
  source 1..75: mol_type = other RNA
  modified_base 39: mod_base = OTHER; note = 2'-Omethyluridine
  modified_base 40: mod_base = OTHER; note = 2'-Omethylcytosine
  modified_base 41: mod_base = OTHER; note = 2'-Omethylcytosine
  modified_base 42: mod_base = OTHER; note = 2'-Omethyladenosine
  modified_base 43: mod_base = OTHER; note = 2'-Omethylguanosine

SEQ ID NO: 6537 - RNA, 76 nt, synthetic construct; identical to SEQ ID NO: 625
  source 1..76: mol_type = other RNA
  modified_base 1: mod_base = OTHER; note = 2'-Omethylguanosine phosphorothiorate
  modified_base 4: mod_base = OTHER; note = 2'-Omethyluridine
  modified_base 10: mod_base = OTHER; note = 2'-Omethylguanosine
  modified_base 11: mod_base = OTHER; note = 2'-Omethylcytosine
  modified_base 12: mod_base = OTHER; note = 2'-fluoroguanosine
  modified_base 18: mod_base = OTHER; note = 2'-fluoroguanosine
  modified_base 20: mod_base = OTHER; note = 2'-fluorouridine
  modified_base 21: mod_base = OTHER; note = Adenosine phosphorothiorate
  modified_base 22: mod_base = OTHER; note = 2'-Omethylguanosine
  modified_base 23: mod_base = OTHER; note = 2'-fluorocytosine phosphorothiorate
  modified_base 24: mod_base = OTHER; note = 2'-Omethylguanosine
  modified_base 26: mod_base = OTHER; note = 2'-fluoroadenosine phosphorothiorate
  modified_base 30: mod_base = OTHER; note = 2'-fluoroguanosine
  modified_base 34: mod_base = OTHER; note = 2'-fluorouridine phosphorothiorate
  modified_base 40: mod_base = OTHER; note = 2'-fluorouridine
  modified_base 41: mod_base = OTHER; note = 2'-Omethylcytosine
  modified_base 44: mod_base = OTHER; note = Adenosine phosphorothiorate
  modified_base 45: mod_base = OTHER; note = 2'-Omethylguanosine
  modified_base 46: mod_base = OTHER; note = 2'-Omethylguanosine
  modified_base 47: mod_base = OTHER; note = 2'-fluorouridine phosphorothiorate
  modified_base 50: mod_base = OTHER; note = 2'-fluorocytosine
  modified_base 54: mod_base = OTHER; note = 2'-Omethyluridine phosphorothiorate
  modified_base 55: mod_base = OTHER; note = Uridine phosphorothiorate
  modified_base 60: mod_base = OTHER; note = 2'-fluorouridine
  modified_base 61: mod_base = OTHER; note = Cytosine phosphorothiorate
  modified_base 62: mod_base = OTHER; note = 2'-Omethylcytosine
  modified_base 64: mod_base = OTHER; note = Guanosine phosphorothiorate
  modified_base 65: mod_base = OTHER; note = 2'-Omethylguanosine
  modified_base 66: mod_base = OTHER; note = 2'-fluorocytosine
  modified_base 70: mod_base = OTHER; note = 2'-Omethylguanosine
  modified_base 71: mod_base = OTHER; note = 2'-fluorouridine phosphorothiorate
  modified_base 72: mod_base = OTHER; note = 2'-Omethylcytosine
  modified_base 75: mod_base = OTHER; note = 2'-fluorocytosine
  modified_base 76: mod_base = OTHER; note = 2'-fluoroadenosine

SEQ ID NO: 6538 - RNA, 76 nt, synthetic construct; identical to SEQ ID NO: 625
  source 1..76: mol_type = other RNA
  modified_base 1: mod_base = OTHER; note = 2'-Omethylguanosine phosphorothiorate
  modified_base 2: mod_base = OTHER; note = 2'-Omethylguanosine
  modified_base 12: mod_base = OTHER; note = 2'-Omethylguanosine
  modified_base 13: mod_base = OTHER; note = 2'-Omethylcytosine
  modified_base 33: mod_base = OTHER; note = 2'-fluorouridine
  modified_base 35: mod_base = OTHER; note = Cytosine phosphorothiorate
  modified_base 37: mod_base = OTHER; note = Adenosine phosphorothiorate
  modified_base 51: mod_base = OTHER; note = 2'-Omethylguanosine
  modified_base 52: mod_base = OTHER; note = 2'-Omethylguanosine
  modified_base 62: mod_base = OTHER; note = 2'-Omethylcytosine
  modified_base 73: mod_base = OTHER; note = 2'-Omethylguanosine
  modified_base 75: mod_base = OTHER; note = 2'-fluorocytosine phosphorothiorate

SEQ ID NO: 6539 - RNA, 76 nt, synthetic construct; identical to SEQ ID NO: 3316
  source 1..76: mol_type = other RNA
  modified_base 1: mod_base = OTHER; note = 2'-Omethyladenosine
  modified_base 13: mod_base = OTHER; note = 2'-Omethylcytosine
  modified_base 14: mod_base = OTHER; note = 2'-Omethyladenosine
  modified_base 15: mod_base = OTHER; note = 2'-Omethyladenosine
  modified_base 16: mod_base = OTHER; note = 2'-Omethyluridine
  modified_base 17: mod_base = OTHER; note = 2'-Omethylguanosine
  modified_base 18: mod_base = OTHER; note = 2'-Omethylguanosine
  modified_base 19: mod_base = OTHER; note = Adenosine phosphorothiorate
  modified_base 20: mod_base = OTHER; note = 2'-Omethyluridine
  modified_base 21: mod_base = OTHER; note = Adenosine phosphorothiorate
  modified_base 25: mod_base = OTHER; note = 2'-Omethylcytosine
  modified_base 41: mod_base = OTHER; note = 2'-fluorocytosine
  modified_base 42: mod_base = OTHER; note = 2'-Omethyladenosine
  modified_base 43: mod_base = OTHER; note = 2'-Omethyladenosine
  modified_base 44: mod_base = OTHER; note = 2'-fluoroadenosine
  modified_base 49: mod_base = OTHER; note = 2'-Omethylcytosine
  modified_base 50: mod_base = OTHER; note = 2'-Omethylcytosine
  modified_base 51: mod_base = OTHER; note = 2'-Omethylguanosine
  modified_base 52: mod_base = OTHER; note = 2'-Omethylguanosine
  modified_base 53: mod_base = OTHER; note = 2'-Omethylguanosine
  modified_base 54: mod_base = OTHER; note = Uridine phosphorothiorate
  modified_base 55: mod_base = OTHER; note = Uridine phosphorothiorate
  modified_base 61: mod_base = OTHER; note = 2'-Omethylcytosine
  modified_base 65: mod_base = OTHER; note = 2'-Omethylguanosine
  modified_base 73: mod_base = OTHER; note = 2'-Omethylguanosine

SEQ ID NO: 6540 - RNA, 75 nt, synthetic construct; identical to SEQ ID NO: 3299
  source 1..75: mol_type = other RNA
  modified_base 1: mod_base = OTHER; note = 2'-fluorocytosine phosphorothiorate
  modified_base 3: mod_base = OTHER; note = 2'-Omethyluridine phosphorothiorate
  modified_base 11: mod_base = OTHER; note = Uridine phosphorothiorate
  modified_base 19: mod_base = OTHER; note = Uridine phosphorothiorate
  modified_base 21: mod_base = OTHER; note = 2'-fluoroguanosine
  modified_base 23: mod_base = OTHER; note = 2'-fluoroguanosine
  modified_base 27: mod_base = OTHER; note = 2'-fluorocytosine
  modified_base 46: mod_base = OTHER; note = 2'-fluorouridine
  modified_base 47: mod_base = OTHER; note = 2'-fluorocytosine
  modified_base 62: mod_base = OTHER; note = Cytosine phosphorothiorate
  modified_base 72: mod_base = OTHER; note = Guanosine phosphorothiorate
  modified_base 74: mod_base = OTHER; note = 2'-Omethylcytosine

SEQ ID NO: 6541 - RNA, 86 nt, synthetic construct; identical to SEQ ID NO: 3290
  source 1..86: mol_type = other RNA
  modified_base 1: mod_base = OTHER; note = 2'-Omethyladenosine
  modified_base 16: mod_base = OTHER; note = 2'-Omethyluridine
  modified_base 17: mod_base = OTHER; note = 2'-Omethylguanosine
  modified_base 18: mod_base = OTHER; note = 2'-Omethylguanosine
  modified_base 64: mod_base = OTHER; note = 2'-Omethyluridine phosphorothiorate
  modified_base 66: mod_base = OTHER; note = 2'-Omethylcytosine
  modified_base 69: mod_base = OTHER; note = 2'-Omethyladenosine
  modified_base 83: mod_base = OTHER; note = 2'-Omethyladenosine

SEQ ID NO: 6542 - RNA, 76 nt, synthetic construct; identical to SEQ ID NO: 625
  source 1..76: mol_type = other RNA
  modified_base 1: mod_base = OTHER; note = 2'-Omethylguanosine
  modified_base 10: mod_base = OTHER; note = 2'-Omethylguanosine
  modified_base 13: mod_base = OTHER; note = 2'-Omethylcytosine
  modified_base 17: mod_base = OTHER; note = Guanosine phosphorothiorate
  modified_base 18: mod_base = OTHER; note = 2'-Omethylguanosine
  modified_base 20: mod_base = OTHER; note = 2'-Omethyluridine
  modified_base 25: mod_base = OTHER; note = 2'-Omethylcytosine
  modified_base 29: mod_base = OTHER; note = 2'-Omethylguanosine
  modified_base 33: mod_base = OTHER; note = 2'-fluorouridine
  modified_base 35: mod_base = OTHER; note = Cytosine phosphorothiorate
  modified_base 37: mod_base = OTHER; note = Adenosine phosphorothiorate
  modified_base 38: mod_base = OTHER; note = Adenosine phosphorothiorate
  modified_base 41: mod_base = OTHER; note = 2'-fluorocytosine
  modified_base 43: mod_base = OTHER; note = 2'-Omethyladenosine
  modified_base 44: mod_base = OTHER; note = 2'-fluoroadenosine
  modified_base 46: mod_base = OTHER; note = Guanosine phosphorothiorate
  modified_base 50: mod_base = OTHER; note = 2'-Omethylcytosine
  modified_base 52: mod_base = OTHER; note = 2'-Omethylguanosine
  modified_base 54: mod_base = OTHER; note = Uridine phosphorothiorate
  modified_base 55: mod_base = OTHER; note = Uridine phosphorothiorate
  modified_base 56: mod_base = OTHER; note = 2'-Omethylcytosine
  modified_base 57: mod_base = OTHER; note = Guanosine phosphorothiorate
  modified_base 62: mod_base = OTHER; note = 2'-Omethylcytosine
  modified_base 63: mod_base = OTHER; note = 2'-fluorocytosine
  modified_base 65: mod_base = OTHER; note = 2'-Omethylguanosine
  modified_base 71: mod_base = OTHER; note = 2'-Omethyluridine
  modified_base 73: mod_base = OTHER; note = 2'-Omethylguanosine

SEQ ID NO: 6543 - RNA, 75 nt, synthetic construct; identical to SEQ ID NO: 1045
  source 1..75: mol_type = other RNA
  modified_base 1: mod_base = OTHER; note = 2'-Omethylguanosine phosphorothiorate
  modified_base 2: mod_base = OTHER; note = 2'-Omethylguanosine
  modified_base 14: mod_base = OTHER; note = Adenosine phosphorothiorate
  modified_base 21: mod_base = OTHER; note = 2'-fluoroadenosine
  modified_base 36: mod_base = OTHER; note = 2'-fluoroadenosine
  modified_base 37: mod_base = OTHER; note = 2'-Omethyladenosine
  modified_base 47: mod_base = OTHER; note = 2'-fluorouridine
  modified_base 50: mod_base = OTHER; note = Guanosine phosphorothiorate
  modified_base 60: mod_base = OTHER; note = Cytosine phosphorothiorate
  modified_base 64: mod_base = OTHER; note = 2'-fluoroguanosine
  modified_base 67: mod_base = OTHER; note = Guanosine phosphorothiorate
  modified_base 71: mod_base = OTHER; note = 2'-fluorocytosine phosphorothiorate
  modified_base 72: mod_base = OTHER; note = Uridine phosphorothiorate
  modified_base 73: mod_base = OTHER; note = Cytosine phosphorothiorate
  modified_base 74: mod_base = OTHER; note = 2'-fluorocytosine phosphorothiorate
  modified_base 75: mod_base = OTHER; note = 2'-Omethyladenosine

SEQ ID NO: 6544 - RNA, 85 nt, synthetic construct; identical to SEQ ID NO: 3317
  source 1..85: mol_type = other RNA
  modified_base 1: mod_base = OTHER; note = 2'-Omethylguanosine phosphorothiorate
  modified_base 2: mod_base = OTHER; note = Cytosine phosphorothiorate
  modified_base 13: mod_base = OTHER; note = 2'-fluoroguanosine phosphorothiorate
  modified_base 14: mod_base = OTHER; note = 2'-fluoroadenosine
  modified_base 16: mod_base = OTHER; note = 2'-Omethyluridine
  modified_base 18: mod_base = OTHER; note = 2'-Omethylguanosine
  modified_base 26: mod_base = OTHER; note = Guanosine phosphorothiorate
  modified_base 27: mod_base = OTHER; note = 2'-Omethyluridine
  modified_base 40: mod_base = OTHER; note = 2'-fluorocytosine
  modified_base 41: mod_base = OTHER; note = 2'-fluorocytosine
  modified_base 42: mod_base = OTHER; note = Adenosine phosphorothiorate
  modified_base 48: mod_base = OTHER; note = 2'-Omethylguanosine phosphorothiorate
  modified_base 53: mod_base = OTHER; note = 2'-fluorocytosine
  modified_base 55: mod_base = OTHER; note = Cytosine phosphorothiorate
  modified_base 57: mod_base = OTHER; note = 2'-fluorocytosine phosphorothiorate
  modified_base 60: mod_base = OTHER; note = 2'-fluoroadenosine
  modified_base 72: mod_base = OTHER; note = 2'-fluorouridine
  modified_base 73: mod_base = OTHER; note = 2'-fluoroguanosine
  modified_base 80: mod_base = OTHER; note = 2'-Omethylguanosine phosphorothiorate
  modified_base 82: mod_base = OTHER; note = 2'-fluoroguanosine phosphorothiorate
  modified_base 83: mod_base = OTHER; note = 2'-fluorocytosine

SEQ ID NO: 6545 - RNA, 76 nt, synthetic construct; identical to SEQ ID NO: 625
  source 1..76: mol_type = other RNA
  modified_base 1: mod_base = OTHER; note = Guanosine phosphorothiorate
  modified_base 2: mod_base = OTHER; note = 2'-fluoroguanosine phosphorothiorate
  modified_base 3: mod_base = OTHER; note = Cytosine phosphorothiorate
  modified_base 4: mod_base = OTHER; note = 2'-fluorouridine
  modified_base 6: mod_base = OTHER; note = 2'-fluorocytosine
  modified_base 7: mod_base = OTHER; note = Guanosine phosphorothiorate
  modified_base 14: mod_base = OTHER; note = Adenosine phosphorothiorate
  modified_base 15: mod_base = OTHER; note = 2'-Omethyladenosine
  modified_base 16: mod_base = OTHER; note = 2'-fluorouridine
  modified_base 20: mod_base = OTHER; note = Uridine phosphorothiorate
  modified_base 21: mod_base = OTHER; note = Adenosine phosphorothiorate
  modified_base 22: mod_base = OTHER; note = 2'-fluoroguanosine
  modified_base 24: mod_base = OTHER; note = 2'-Omethylguanosine
  modified_base 25: mod_base = OTHER; note = 2'-fluorocytosine phosphorothiorate
  modified_base 26: mod_base = OTHER; note = 2'-fluoroadenosine
  modified_base 28: mod_base = OTHER; note = 2'-fluorouridine
  modified_base 30: mod_base = OTHER; note = 2'-fluoroguanosine
  modified_base 31: mod_base = OTHER; note = 2'-fluoroadenosine
  modified_base 33: mod_base = OTHER; note = Uridine phosphorothiorate
  modified_base 34: mod_base = OTHER; note = Uridine phosphorothiorate
  modified_base 43: mod_base = OTHER; note = 2'-fluoroadenosine
  modified_base 44: mod_base = OTHER; note = 2'-Omethyladenosine
  modified_base 48: mod_base = OTHER; note = 2'-fluorouridine
  modified_base 51: mod_base = OTHER; note = Guanosine phosphorothiorate
  modified_base 52: mod_base = OTHER; note = 2'-Omethylguanosine
  modified_base 53: mod_base = OTHER; note = Guanosine phosphorothiorate
  modified_base 54: mod_base = OTHER; note = 2'-fluorouridine
  modified_base 58: mod_base = OTHER; note = Adenosine phosphorothiorate
  modified_base 59: mod_base = OTHER; note = 2'-fluoroguanosine phosphorothiorate
  modified_base 60: mod_base = OTHER; note = 2'-fluorouridine
  modified_base 61: mod_base = OTHER; note = 2'-fluorocytosine
  modified_base 65: mod_base = OTHER; note = 2'-fluoroguanosine
  modified_base 67: mod_base = OTHER; note = 2'-Omethylguanosine phosphorothiorate
  modified_base 70: mod_base = OTHER; note = Guanosine phosphorothiorate
  modified_base 71: mod_base = OTHER; note = 2'-Omethyluridine
  modified_base 72: mod_base = OTHER; note = 2'-Omethylcytosine
  modified_base 73: mod_base = OTHER; note = 2'-fluoroguanosine

SEQ ID NO: 6546 - RNA, 76 nt, synthetic construct; identical to SEQ ID NO: 625
  source 1..76: mol_type = other RNA
  modified_base 1: mod_base = OTHER; note = 2'-Omethylguanosine phosphorothiorate
  modified_base 2: mod_base = OTHER; note = 2'-Omethylguanosine phosphorothiorate
  modified_base 33: mod_base = OTHER; note = 2'-O-(2-Methoxyethyl) thymine
  modified_base 53: mod_base = OTHER; note = 2'-Omethylguanosine
  modified_base 74: mod_base = OTHER; note = Cytosine phosphorothiorate
  modified_base 75: mod_base = OTHER; note = 2'-Omethylcytosine phosphorothiorate
  modified_base 76: mod_base = OTHER; note = 2'-Omethyladenosine

SEQ ID NO: 6547 - RNA, 85 nt, synthetic construct; identical to SEQ ID NO: 3297
  source 1..85: mol_type = other RNA
  modified_base 1: mod_base = OTHER; note = 2'-Omethylguanosine phosphorothiorate
  modified_base 2: mod_base = OTHER; note = 2'-Omethylcytosine phosphorothiorate
  modified_base 84: mod_base = OTHER; note = 2'-Omethylcytosine phosphorothiorate

SEQ ID NO: 6548 - RNA, 76 nt, synthetic construct; identical to SEQ ID NO: 3318
  source 1..76: mol_type = other RNA
  modified_base 1: mod_base = OTHER; note = 2'-Omethylcytosine phosphorothiorate
  modified_base 2: mod_base = OTHER; note = 2'-Omethylcytosine phosphorothiorate
  modified_base 3: mod_base = OTHER; note = 2'-Omethyluridine
  modified_base 4: mod_base = OTHER; note = 2'-Omethyluridine
  modified_base 5: mod_base = OTHER; note = 2'-Omethylcytosine
  modified_base 6: mod_base = OTHER; note = 2'-Omethylguanosine
  modified_base 66: mod_base = OTHER; note = 2'-Omethyluridine
  modified_base 67: mod_base = OTHER; note = 2'-Omethylcytosine
  modified_base 68: mod_base = OTHER; note = 2'-Omethylguanosine
  modified_base 69: mod_base = OTHER; note = 2'-Omethyladenosine
  modified_base 71: mod_base = OTHER; note = 2'-Omethylguanosine
  modified_base 72: mod_base = OTHER; note = 2'-fluoroguanosine
  modified_base 73: mod_base = OTHER; note = 2'-Omethyladenosine

SEQ ID NO: 6549 - RNA, 76 nt, synthetic construct; identical to SEQ ID NO: 625
  source 1..76: mol_type = other RNA
  modified_base 1: mod_base = OTHER; note = 2'-Omethylguanosine phosphorothiorate
  modified_base 2: mod_base = OTHER; note = 2'-Omethylguanosine
  modified_base 3: mod_base = OTHER; note = 2'-Omethylcytosine
  modified_base 4: mod_base = OTHER; note = 2'-Omethyluridine
  modified_base 5: mod_base = OTHER; note = 2'-Omethylcytosine
  modified_base 6: mod_base = OTHER; note = 2'-Omethylcytosine
  modified_base 12: mod_base = OTHER; note = 2'-Omethylguanosine
  modified_base 13: mod_base = OTHER; note = 2'-Omethylcytosine
  modified_base 14: mod_base = OTHER; note = 2'-Omethyladenosine
  modified_base 15: mod_base = OTHER; note = 2'-fluoroadenosine
  modified_base 16: mod_base = OTHER; note = 2'-Omethyluridine
  modified_base 17: mod_base = OTHER; note = 2'-Omethylguanosine
  modified_base 18: mod_base = OTHER; note = 2'-Omethylguanosine
  modified_base 19: mod_base = OTHER; note = 2'-fluoroadenosine
  modified_base 20: mod_base = OTHER; note = 2'-Omethyluridine
  modified_base 21: mod_base = OTHER; note = 2'-fluoroadenosine
  modified_base 25: mod_base = OTHER; note = 2'-Omethylcytosine
  modified_base 33: mod_base = OTHER; note = 2'-fluorouridine
  modified_base 35: mod_base = OTHER; note = Cytosine phosphorothiorate
  modified_base 37: mod_base = OTHER; note = Adenosine phosphorothiorate
  modified_base 38: mod_base = OTHER; note = Adenosine phosphorothiorate
  modified_base 49: mod_base = OTHER; note = 2'-Omethylcytosine
  modified_base 50: mod_base = OTHER; note = 2'-Omethylcytosine
  modified_base 51: mod_base = OTHER; note = 2'-Omethylguanosine
  modified_base 52: mod_base = OTHER; note = 2'-Omethylguanosine
  modified_base 53: mod_base = OTHER; note = 2'-Omethylguanosine
  modified_base 56: mod_base = OTHER; note = 2'-Omethylcytosine
  modified_base 59: mod_base = OTHER; note = 2'-Omethylguanosine
  modified_base 61: mod_base = OTHER; note = 2'-Omethylcytosine
  modified_base 62: mod_base = OTHER; note = 2'-Omethylcytosine
  modified_base 63: mod_base = OTHER; note = 2'-fluorocytosine
  modified_base 64: mod_base = OTHER; note = 2'-Omethylguanosine
  modified_base 65: mod_base = OTHER; note = 2'-Omethylguanosine
  modified_base 66: mod_base = OTHER; note = 2'-Omethylcytosine
  modified_base 67: mod_base = OTHER; note = 2'-Omethylguanosine
  modified_base 68: mod_base = OTHER; note = 2'-Omethylguanosine
  modified_base 69: mod_base = OTHER; note = 2'-fluoroadenosine
  modified_base 71: mod_base = OTHER; note = 2'-Omethyluridine
  modified_base 73: mod_base = OTHER; note = 2'-Omethylguanosine
  modified_base 75: mod_base = OTHER; note = 2'-fluorocytosine phosphorothiorate

SEQ ID NO: 6550 - RNA, 85 nt, synthetic construct; identical to SEQ ID NO: 3301
  source 1..85: mol_type = other RNA
  modified_base 1: mod_base = OTHER; note = 2'-Omethylguanosine phosphorothiorate
  modified_base 5: mod_base = OTHER; note = Uridine phosphorothiorate
  modified_base 7: mod_base = OTHER; note = 2'-Omethyladenosine
  modified_base 18: mod_base = OTHER; note = 2'-Omethylguanosine phosphorothiorate
  modified_base 24: mod_base = OTHER; note = 2'-fluoroguanosine
  modified_base 25: mod_base = OTHER; note = 2'-fluorocytosine
  modified_base 31: mod_base = OTHER; note = 2'-fluoroadenosine
  modified_base 33: mod_base = OTHER; note = 2'-fluorouridine
  modified_base 40: mod_base = OTHER; note = Cytosine phosphorothiorate
  modified_base 48: mod_base = OTHER; note = 2'-Omethylguanosine
  modified_base 53: mod_base = OTHER; note = Cytosine phosphorothiorate
  modified_base 58: mod_base = OTHER; note = 2'-fluoroguanosine
  modified_base 63: mod_base = OTHER; note = Uridine phosphorothiorate
  modified_base 65: mod_base = OTHER; note = 2'-fluorocytosine
  modified_base 80: mod_base = OTHER; note = 2'-fluoroguanosine
  modified_base 82: mod_base = OTHER; note = 2'-Omethylguanosine phosphorothiorate
  modified_base 85: mod_base = OTHER; note = 2'-fluoroadenosine

SEQ ID NO: 6551 - RNA, 76 nt, synthetic construct; identical to SEQ ID NO: 3318
  source 1..76: mol_type = other RNA
  modified_base 1: mod_base = OTHER; note = 2'-Omethylcytosine phosphorothiorate
  modified_base 2: mod_base = OTHER; note = 2'-Omethylcytosine phosphorothiorate
  modified_base 74: mod_base = OTHER; note = Cytosine phosphorothiorate
  modified_base 75: mod_base = OTHER; note = 2'-Omethylcytosine phosphorothiorate

SEQ ID NO: 6552 - RNA, 73 nt, synthetic construct; identical to SEQ ID NO: 935
  source 1..73: mol_type = other RNA
  modified_base 1: mod_base = OTHER; note = 2'-Omethylguanosine phosphorothiorate
  modified_base 2: mod_base = OTHER; note = 2'-Omethylguanosine phosphorothiorate
  modified_base 5: mod_base = OTHER; note = 2'-Omethylcytosine
  modified_base 61: mod_base = OTHER; note = 2'-fluorocytosine
  modified_base 72: mod_base = OTHER; note = Cytosine phosphorothiorate

SEQ ID NO: 6553 - RNA, 86 nt, synthetic construct; identical to SEQ ID NO: 3290
  source 1..86: mol_type = other RNA
  modified_base 1: mod_base = OTHER; note = 2'-Omethyladenosine
  modified_base 2: mod_base = OTHER; note = 2'-Omethylcytosine
  modified_base 3: mod_base = OTHER; note = 2'-Omethylcytosine
  modified_base 4: mod_base = OTHER; note = 2'-Omethyladenosine
  modified_base 5: mod_base = OTHER; note = 2'-Omethylguanosine
  modified_base 6: mod_base = OTHER; note = 2'-Omethylguanosine
  modified_base 10: mod_base = OTHER; note = 2'-Omethylguanosine
  modified_base 11: mod_base = OTHER; note = 2'-Omethylcytosine
  modified_base 12: mod_base = OTHER; note = 2'-Omethylcytosine
  modified_base 13: mod_base = OTHER; note = 2'-Omethylguanosine
  modified_base 14: mod_base = OTHER; note = 2'-Omethyladenosine
  modified_base 15: mod_base = OTHER; note = 2'-fluoroguanosine
  modified_base 16: mod_base = OTHER; note = 2'-Omethyluridine
  modified_base 17: mod_base = OTHER; note = 2'-Omethylguanosine
  modified_base 18: mod_base = OTHER; note = 2'-Omethylguanosine
  modified_base 20: mod_base = OTHER; note = 2'-Omethyluridine
  modified_base 22: mod_base = OTHER; note = 2'-Omethyladenosine
  modified_base 23: mod_base = OTHER; note = 2'-Omethylguanosine
  modified_base 24: mod_base = OTHER; note = 2'-Omethylguanosine
  modified_base 25: mod_base = OTHER; note = 2'-Omethylcytosine
  modified_base 33: mod_base = OTHER; note = 2'-fluorouridine
  modified_base 35: mod_base = OTHER; note = Cytosine phosphorothiorate
  modified_base 37: mod_base = OTHER; note = Guanosine phosphorothiorate
  modified_base 38: mod_base = OTHER; note = Adenosine phosphorothiorate
  modified_base 41: mod_base = OTHER; note = 2'-Omethylcytosine
  modified_base 42: mod_base = OTHER; note = 2'-Omethyladenosine
  modified_base 43: mod_base = OTHER; note = 2'-Omethyladenosine
  modified_base 44: mod_base = OTHER; note = 2'-Omethyluridine
  modified_base 59: mod_base = OTHER; note = 2'-Omethylguanosine
  modified_base 60: mod_base = OTHER; note = 2'-Omethyluridine
  modified_base 62: mod_base = OTHER; note = 2'-Omethylguanosine
  modified_base 64: mod_base = OTHER; note = 2'-Omethyluridine
  modified_base 65: mod_base = OTHER; note = Uridine phosphorothiorate
  modified_base 66: mod_base = OTHER; note = 2'-Omethylcytosine
  modified_base 67: mod_base = OTHER; note = 2'-fluoroguanosine
  modified_base 69: mod_base = OTHER; note = 2'-Omethyladenosine
  modified_base 71: mod_base = OTHER; note = 2'-Omethylcytosine
  modified_base 75: mod_base = OTHER; note = 2'-Omethylcytosine
  modified_base 83: mod_base = OTHER; note = 2'-Omethyladenosine

SEQ ID NO: 6554 - RNA, 85 nt, synthetic construct; identical to SEQ ID NO: 3297
  source 1..85: mol_type = other RNA
  modified_base 1: mod_base = OTHER; note = 2'-Omethylguanosine
  modified_base 70: mod_base = OTHER; note = 2'-Omethylcytosine
  modified_base 71: mod_base = OTHER; note = 2'-Omethylcytosine
  modified_base 72: mod_base = OTHER; note = 2'-fluorouridine
  modified_base 73: mod_base = OTHER; note = 2'-Omethylguanosine
  modified_base 74: mod_base = OTHER; note = 2'-Omethylcytosine
  modified_base 75: mod_base = OTHER; note = 2'-Omethyluridine
  modified_base 76: mod_base = OTHER; note = 2'-Omethylcytosine
  modified_base 77: mod_base = OTHER; note = 2'-Omethyladenosine
  modified_base 78: mod_base = OTHER; note = 2'-Omethylcytosine
  modified_base 79: mod_base = OTHER; note = 2'-fluoroadenosine
  modified_base 80: mod_base = OTHER; note = 2'-Omethylguanosine
  modified_base 81: mod_base = OTHER; note = 2'-Omethylcytosine
  modified_base 82: mod_base = OTHER; note = 2'-Omethylguanosine

SEQ ID NO: 6555 - RNA, 76 nt, synthetic construct; identical to SEQ ID NO: 625
  source 1..76: mol_type = other RNA
  modified_base 1: mod_base = OTHER; note = 2'-Omethylguanosine
  modified_base 10: mod_base = OTHER; note = 2'-Omethylguanosine
  modified_base 13: mod_base = OTHER; note = 2'-Omethylcytosine
  modified_base 17: mod_base = OTHER; note = Guanosine phosphorothiorate
  modified_base 18: mod_base = OTHER; note = 2'-Omethylguanosine
  modified_base 19: mod_base = OTHER; note = Adenosine phosphorothiorate
  modified_base 25: mod_base = OTHER; note = 2'-Omethylcytosine
  modified_base 29: mod_base = OTHER; note = 2'-Omethylguanosine
  modified_base 33: mod_base = OTHER; note = 2'-fluorouridine
  modified_base 35: mod_base = OTHER; note = Cytosine phosphorothiorate
  modified_base 37: mod_base = OTHER; note = Adenosine phosphorothiorate
  modified_base 38: mod_base = OTHER; note = Adenosine phosphorothiorate
  modified_base 41: mod_base = OTHER; note = 2'-fluorocytosine phosphorothiorate
  modified_base 43: mod_base = OTHER; note = 2'-Omethyladenosine
  modified_base 44: mod_base = OTHER; note = 2'-fluoroadenosine
  modified_base 50: mod_base = OTHER; note = 2'-Omethylcytosine
  modified_base 52: mod_base = OTHER; note = 2'-Omethylguanosine
  modified_base 54: mod_base = OTHER; note = Uridine phosphorothiorate
  modified_base 55: mod_base = OTHER; note = Uridine phosphorothiorate
  modified_base 56: mod_base = OTHER; note = 2'-Omethylcytosine
  modified_base 57: mod_base = OTHER; note = Guanosine phosphorothiorate
  modified_base 62: mod_base = OTHER; note = 2'-Omethylcytosine
  modified_base 63: mod_base = OTHER; note = 2'-fluorocytosine
  modified_base 65: mod_base = OTHER; note = 2'-Omethylguanosine
  modified_base 71: mod_base = OTHER; note = 2'-Omethyluridine
  modified_base 73: mod_base = OTHER; note = 2'-Omethylguanosine

SEQ ID NO: 6556 - RNA, 85 nt, synthetic construct; identical to SEQ ID NO: 3288
  source 1..85: mol_type = other RNA
  modified_base 1: mod_base = OTHER; note = 2'-Omethylcytosine phosphorothiorate
  modified_base 8: mod_base = OTHER; note = Guanosine phosphorothiorate
  modified_base 25: mod_base = OTHER; note = 2'-Omethylguanosine
  modified_base 53: mod_base = OTHER; note = 2'-fluorouridine
  modified_base 57: mod_base = OTHER; note = Cytosine phosphorothiorate
  modified_base 58: mod_base = OTHER; note = Guanosine phosphorothiorate
  modified_base 84: mod_base = OTHER; note = Cytosine phosphorothiorate

SEQ ID NO: 6557 - RNA, 76 nt, synthetic construct; identical to SEQ ID NO: 625
  source 1..76: mol_type = other RNA
  modified_base 1: mod_base = OTHER; note = 2'-Omethylguanosine
  modified_base 3: mod_base = OTHER; note = 2'-fluorocytosine
  modified_base 5: mod_base = OTHER; note = Cytosine phosphorothiorate
  modified_base 6: mod_base = OTHER; note = 2'-fluorocytosine
  modified_base 11: mod_base = OTHER; note = 2'-Omethylcytosine
  modified_base 15: mod_base = OTHER; note = 2'-fluoroadenosine
  modified_base 18: mod_base = OTHER; note = Guanosine phosphorothiorate
  modified_base 21: mod_base = OTHER; note = Adenosine phosphorothiorate
  modified_base 22: mod_base = OTHER; note = 2'-fluoroguanosine
  modified_base 23: mod_base = OTHER; note = 2'-fluorocytosine phosphorothiorate
  modified_base 24: mod_base = OTHER; note = 2'-Omethylguanosine
  modified_base 25: mod_base = OTHER; note = 2'-Omethylcytosine
  modified_base 26: mod_base = OTHER; note = Adenosine phosphorothiorate
  modified_base 27: mod_base = OTHER; note = Uridine phosphorothiorate
  modified_base 28: mod_base = OTHER; note = 2'-fluorouridine phosphorothiorate
  modified_base 29: mod_base = OTHER; note = 2'-Omethylguanosine
  modified_base 30: mod_base = OTHER; note = 2'-fluoroguanosine
  modified_base 38: mod_base = OTHER; note = 2'-fluoroadenosine
  modified_base 39: mod_base = OTHER; note = 2'-Omethyluridine phosphorothiorate
  modified_base 40: mod_base = OTHER; note = 2'-Omethyluridine
  modified_base 41: mod_base = OTHER; note = 2'-fluorocytosine
  modified_base 42: mod_base = OTHER; note = 2'-Omethyladenosine phosphorothiorate
  modified_base 43: mod_base = OTHER; note = 2'-Omethyladenosine
  modified_base 44: mod_base = OTHER; note = 2'-Omethyladenosine
  modified_base 46: mod_base = OTHER; note = 2'-fluoroguanosine
  modified_base 47: mod_base = OTHER; note = 2'-Omethyluridine
  modified_base 51: mod_base = OTHER; note = 2'-Omethylguanosine phosphorothiorate
  modified_base 52: mod_base = OTHER; note = Guanosine phosphorothiorate
  modified_base 53: mod_base = OTHER; note = 2'-fluoroguanosine
  modified_base 56: mod_base = OTHER; note = 2'-Omethylcytosine
  modified_base 57: mod_base = OTHER; note = 2'-Omethylguanosine
  modified_base 60: mod_base = OTHER; note = 2'-Omethyluridine
  modified_base 62: mod_base = OTHER; note = 2'-fluorocytosine
  modified_base 63: mod_base = OTHER; note = 2'-fluorocytosine
  modified_base 67: mod_base = OTHER; note = 2'-Omethylguanosine
  modified_base 69: mod_base = OTHER; note = 2'-Omethyladenosine

SEQ ID NO: 6558 - RNA, 75 nt, synthetic construct; identical to SEQ ID NO: 3336
  source 1..75: mol_type = other RNA
  modified_base 2: mod_base = OTHER; note = 2'-Omethylcytosine
  modified_base 10: mod_base = OTHER; note = Cytosine phosphorothiorate
  modified_base 11: mod_base = OTHER; note = Uridine phosphorothiorate
  modified_base 18: mod_base = OTHER; note = 2'-fluoroguanosine
  modified_base 19: mod_base = OTHER; note = 2'-fluorouridine
  modified_base 20: mod_base = OTHER; note = 2'-fluoroadenosine
  modified_base 25: mod_base = OTHER; note = 2'-fluoroadenosine
  modified_base 28: mod_base = OTHER; note = 2'-Omethyladenosine phosphorothiorate
  modified_base 33: mod_base = OTHER; note = 2'-fluorocytosine phosphorothiorate
  modified_base 38: mod_base = OTHER; note = 2'-fluorouridine
  modified_base 40: mod_base = OTHER; note = 2'-fluorouridine
  modified_base 41: mod_base = OTHER; note = 2'-Omethylguanosine phosphorothiorate
  modified_base 48: mod_base = OTHER; note = 2'-fluorocytosine phosphorothiorate
  modified_base 49: mod_base = OTHER; note = 2'-fluoroadenosine
  modified_base 52: mod_base = OTHER; note = 2'-Omethylguanosine
  modified_base 56: mod_base = OTHER; note = 2'-Omethyladenosine phosphorothiorate
  modified_base 62: mod_base = OTHER; note = 2'-Omethylcytosine phosphorothiorate
  modified_base 72: mod_base = OTHER; note = Guanosine phosphorothiorate
  modified_base 73: mod_base = OTHER; note = Cytosine phosphorothiorate
  modified_base 74: mod_base = OTHER; note = 2'-Omethylcytosine phosphorothiorate

SEQ ID NO: 6559 - RNA, 75 nt, synthetic construct; identical to SEQ ID NO: 1045
  source 1..75: mol_type = other RNA
  modified_base 1: mod_base = OTHER; note = Guanosine phosphorothiorate
  modified_base 10: mod_base = OTHER; note = Guanosine phosphorothiorate
  modified_base 26: mod_base = OTHER; note = 2'-Omethyluridine
  modified_base 27: mod_base = OTHER; note = Cytosine phosphorothiorate
  modified_base 40: mod_base = OTHER; note = 2'-Omethylcytosine
  modified_base 48: mod_base = OTHER; note = 2'-fluorocytosine
  modified_base 65: mod_base = OTHER; note = Uridine phosphorothiorate
  modified_base 66: mod_base = OTHER; note = 2'-fluoroguanosine
  modified_base 73: mod_base = OTHER; note = 2'-fluorocytosine phosphorothiorate
  modified_base 74: mod_base = OTHER; note = Cytosine phosphorothiorate

SEQ ID NO: 6560 - RNA, 86 nt, synthetic construct; identical to SEQ ID NO: 3290
  source 1..86: mol_type = other RNA
  modified_base 86: mod_base = OTHER; note = 2'-fluoroadenosine

SEQ ID NO: 6561 - RNA, 86 nt, synthetic construct; identical to SEQ ID NO: 3290
  source 1..86: mol_type = other RNA
  modified_base 59: mod_base = OTHER; note = Guanosine phosphorothiorate

SEQ ID NO: 6562 - RNA, 85 nt, synthetic construct; identical to SEQ ID NO: 3286
  source 1..85: mol_type = other RNA
  modified_base 1: mod_base = OTHER; note = 2'-Omethylcytosine phosphorothiorate
  modified_base 2: mod_base = OTHER; note = 2'-fluorocytosine
  modified_base 13: mod_base = OTHER; note = Adenosine phosphorothiorate
  modified_base 17: mod_base = OTHER; note = Guanosine phosphorothiorate
  modified_base 28: mod_base = OTHER; note = 2'-fluoroguanosine
  modified_base 30: mod_base = OTHER; note = 2'-fluoroadenosine
  modified_base 34: mod_base = OTHER; note = 2'-fluorouridine
  modified_base 38: mod_base = OTHER; note = 2'-fluorouridine
  modified_base 39: mod_base = OTHER; note = Cytosine phosphorothiorate
  modified_base 43: mod_base = OTHER; note = 2'-Omethyluridine
  modified_base 46: mod_base = OTHER; note = Adenosine phosphorothiorate
  modified_base 47: mod_base = OTHER; note = 2'-fluorocytosine
  modified_base 50: mod_base = OTHER; note = 2'-Omethyladenosine phosphorothiorate
  modified_base 51: mod_base = OTHER; note = 2'-Omethyluridine
  modified_base 54: mod_base = OTHER; note = 2'-Omethylcytosine
  modified_base 55: mod_base = OTHER; note = 2'-Omethylcytosine
  modified_base 57: mod_base = OTHER; note = 2'-Omethylcytosine
  modified_base 61: mod_base = OTHER; note = 2'-fluoroguanosine
  modified_base 65: mod_base = OTHER; note = Cytosine phosphorothiorate

SEQ ID NO: 6563 - RNA, 86 nt, synthetic construct
  source 1..86: mol_type = other RNA
accaggatggccgagtggttaaggcgttggacttcagatccaatggacatatgtctgcgtgggttcgaaccccactcctggtacca

SEQ ID NO: 6564 - RNA, 76 nt, synthetic construct; identical to SEQ ID NO: 3318
  source 1..76: mol_type = other RNA
  modified_base 1: mod_base = OTHER; note = 2'-Omethylcytosine
  modified_base 47: mod_base = OTHER; note = 2'-fluorouridine
  modified_base 48: mod_base = OTHER; note = 2'-fluorocytosine
  modified_base 73: mod_base = OTHER; note = 2'-Omethyladenosine

SEQ ID NO: 6565 - RNA, 74 nt, synthetic construct; identical to SEQ ID NO: 766
  source 1..74: mol_type = other RNA
  modified_base 1: mod_base = OTHER; note = 2'-Omethylguanosine phosphorothiorate
  modified_base 2: mod_base = OTHER; note = 2'-Omethylguanosine
  modified_base 3: mod_base = OTHER; note = 2'-Omethylcytosine
  modified_base 4: mod_base = OTHER; note = 2'-Omethyluridine
  modified_base 5: mod_base = OTHER; note = 2'-Omethylcytosine
  modified_base 6: mod_base = OTHER; note = 2'-Omethylcytosine
  modified_base 10: mod_base = OTHER; note = 2'-Omethylguanosine
  modified_base 11: mod_base = OTHER; note = 2'-Omethylcytosine
  modified_base 12: mod_base = OTHER; note = 2'-Omethylguanosine
  modified_base 13: mod_base = OTHER; note = 2'-Omethylcytosine
  modified_base 16: mod_base = OTHER; note = 2'-Omethyluridine
  modified_base 17: mod_base = OTHER; note = 2'-Omethylguanosine
  modified_base 18: mod_base = OTHER; note = 2'-Omethylguanosine
  modified_base 20: mod_base = OTHER; note = 2'-Omethyluridine
  modified_base 25: mod_base = OTHER; note = 2'-Omethylcytosine
  modified_base 33: mod_base = OTHER; note = 2'-fluorouridine
  modified_base 35: mod_base = OTHER; note = Cytosine phosphorothiorate
  modified_base 37: mod_base = OTHER; note = Adenosine phosphorothiorate
  modified_base 38: mod_base = OTHER; note = Adenosine phosphorothiorate
  modified_base 41: mod_base = OTHER; note = 2'-fluorocytosine
  modified_base 42: mod_base = OTHER; note = 2'-Omethyladenosine
  modified_base 43: mod_base = OTHER; note = 2'-Omethyladenosine
  modified_base 44: mod_base = OTHER; note = 2'-fluoroadenosine
  modified_base 49: mod_base = OTHER; note = 2'-Omethylcytosine
  modified_base 50: mod_base = OTHER; note = 2'-Omethylcytosine
  modified_base 52: mod_base = OTHER; note = 2'-Omethylguanosine
  modified_base 54: mod_base = OTHER; note = 2'-Omethyluridine
  modified_base 55: mod_base = OTHER; note = Uridine phosphorothiorate
  modified_base 56: mod_base = OTHER; note = 2'-Omethylcytosine
  modified_base 57: mod_base = OTHER; note = 2'-fluoroguanosine
  modified_base 59: mod_base = OTHER; note = 2'-Omethylguanosine
  modified_base 61: mod_base = OTHER; note = 2'-Omethylcytosine
  modified_base 65: mod_base = OTHER; note = 2'-Omethylguanosine
  modified_base 73: mod_base = OTHER; note = 2'-Omethylguanosine

SEQ ID NO: 6566 - RNA, 76 nt, synthetic construct; identical to SEQ ID NO: 625
  source 1..76: mol_type = other RNA
  modified_base 1: mod_base = OTHER; note = 2'-Omethylguanosine phosphorothiorate
  modified_base 2: mod_base = OTHER; note = 2'-Omethylguanosine
  modified_base 3: mod_base = OTHER; note = 2'-Omethylcytosine
  modified_base 4: mod_base = OTHER; note = 2'-Omethyluridine
  modified_base 5: mod_base = OTHER; note = 2'-Omethylcytosine
  modified_base 6: mod_base = OTHER; note = 2'-Omethylcytosine
  modified_base 10: mod_base = OTHER; note = 2'-Omethylguanosine
  modified_base 11: mod_base = OTHER; note = 2'-Omethylcytosine
  modified_base 12: mod_base = OTHER; note = 2'-Omethylguanosine
  modified_base 13: mod_base = OTHER; note = 2'-Omethylcytosine
  modified_base 14: mod_base = OTHER; note = 2'-Omethyladenosine
  modified_base 15: mod_base = OTHER; note = 2'-fluoroadenosine
  modified_base 16: mod_base = OTHER; note = 2'-Omethyluridine
  modified_base 17: mod_base = OTHER; note = 2'-Omethylguanosine
  modified_base 18: mod_base = OTHER; note = 2'-Omethylguanosine
  modified_base 19: mod_base = OTHER; note = 2'-fluoroadenosine
  modified_base 20: mod_base = OTHER; note = 2'-Omethyluridine
  modified_base 21: mod_base = OTHER; note = 2'-fluoroadenosine
  modified_base 22: mod_base = OTHER; note = 2'-Omethylguanosine
  modified_base 23: mod_base = OTHER; note = 2'-Omethylcytosine
  modified_base 24: mod_base = OTHER; note = 2'-Omethylguanosine
  modified_base 25: mod_base = OTHER; note = 2'-Omethylcytosine
  modified_base 38: mod_base = OTHER; note = Adenosine phosphorothiorate
  modified_base 39: mod_base = OTHER; note = Uridine phosphorothiorate
  modified_base 40: mod_base = OTHER; note = 2'-fluorouridine
  modified_base 43: mod_base = OTHER; note = 2'-Omethyladenosine
  modified_base 44: mod_base = OTHER; note = 2'-Omethyladenosine
  modified_base 45: mod_base = OTHER; note = 2'-Omethylguanosine
  modified_base 46: mod_base = OTHER; note = 2'-fluoroguanosine
  modified_base 48: mod_base = OTHER; note = 2'-fluorouridine
  modified_base 49: mod_base = OTHER; note = 2'-Omethylcytosine
  modified_base 50: mod_base = OTHER; note = 2'-Omethylcytosine
  modified_base 54: mod_base = OTHER; note = 2'-Omethyluridine phosphorothiorate
  modified_base 55: mod_base = OTHER; note = Uridine phosphorothiorate
  modified_base 56: mod_base = OTHER; note = 2'-Omethylcytosine
  modified_base 57: mod_base = OTHER; note = 2'-fluoroguanosine
  modified_base 61: mod_base = OTHER; note = 2'-Omethylcytosine
  modified_base 62: mod_base = OTHER; note = 2'-Omethylcytosine
  modified_base 63: mod_base = OTHER; note = 2'-fluorocytosine
  modified_base 64: mod_base = OTHER; note = 2'-Omethylguanosine
  modified_base 65: mod_base = OTHER; note = 2'-Omethylguanosine
  modified_base 66: mod_base = OTHER; note = 2'-Omethylcytosine
  modified_base 67: mod_base = OTHER; note = 2'-Omethylguanosine
  modified_base 68: mod_base = OTHER; note = 2'-Omethylguanosine
  modified_base 69: mod_base = OTHER; note = 2'-Omethyladenosine

SEQ ID NO: 6567 - RNA, 76 nt, synthetic construct; identical to SEQ ID NO: 625
  source 1..76: mol_type = other RNA
  modified_base 1: mod_base = OTHER; note = 2'-Omethylguanosine
  modified_base 2: mod_base = OTHER; note = 2'-Omethylguanosine
  modified_base 3: mod_base = OTHER; note = 2'-Omethylcytosine
  modified_base 10: mod_base = OTHER; note = 2'-Omethylguanosine
  modified_base 11: mod_base = OTHER; note = 2'-Omethylcytosine
  modified_base 12: mod_base = OTHER; note = 2'-Omethylguanosine
  modified_base 13: mod_base = OTHER; note = 2'-Omethylcytosine
  modified_base 14: mod_base = OTHER; note = 2'-Omethyladenosine
  modified_base 15: mod_base = OTHER; note = 2'-fluoroadenosine
  modified_base 16: mod_base = OTHER; note = 2'-Omethyluridine
  modified_base 17: mod_base = OTHER; note = 2'-Omethylguanosine
  modified_base 18: mod_base = OTHER; note = 2'-Omethylguanosine
  modified_base 19: mod_base = OTHER; note = 2'-fluoroadenosine
  modified_base 20: mod_base = OTHER; note = 2'-Omethyluridine
  modified_base 22: mod_base = OTHER; note = 2'-Omethylguanosine
  modified_base 23: mod_base = OTHER; note = 2'-Omethylcytosine
  modified_base 24: mod_base = OTHER; note = 2'-Omethylguanosine
  modified_base 25: mod_base = OTHER; note = 2'-Omethylcytosine
  modified_base 38: mod_base = OTHER; note = Adenosine phosphorothiorate
  modified_base 39: mod_base = OTHER; note = Uridine phosphorothiorate
  modified_base 40: mod_base = OTHER; note = 2'-fluorouridine
  modified_base 43: mod_base = OTHER; note = 2'-Omethyladenosine
  modified_base 44: mod_base = OTHER; note = 2'-Omethyladenosine
  modified_base 45: mod_base = OTHER; note = 2'-Omethylguanosine
  modified_base 46: mod_base = OTHER; note = 2'-fluoroguanosine
  modified_base 48: mod_base = OTHER; note = 2'-fluorouridine
  modified_base 49: mod_base = OTHER; note = 2'-Omethylcytosine
  modified_base 50: mod_base = OTHER; note = 2'-Omethylcytosine
  modified_base 51: mod_base = OTHER; note = 2'-Omethylguanosine
  modified_base 52: mod_base = OTHER; note = 2'-Omethylguanosine
  modified_base 53: mod_base = OTHER; note = 2'-Omethylguanosine
  modified_base 54: mod_base = OTHER; note = 2'-Omethyluridine
  modified_base 61: mod_base = OTHER; note = 2'-Omethylcytosine
  modified_base 62: mod_base = OTHER; note = 2'-Omethylcytosine
  modified_base 63: mod_base = OTHER; note = 2'-fluorocytosine
  modified_base 64: mod_base = OTHER; note = 2'-Omethylguanosine
  modified_base 65: mod_base = OTHER; note = 2'-Omethylguanosine
  modified_base 66: mod_base = OTHER; note = 2'-Omethylcytosine
  modified_base 67: mod_base = OTHER; note = 2'-Omethylguanosine
  modified_base 68: mod_base = OTHER; note = 2'-Omethylguanosine
  modified_base 69: mod_base = OTHER; note = 2'-fluoroadenosine
  modified_base 70: mod_base = OTHER; note = 2'-fluoroguanosine

SEQ ID NO: 6568 - RNA, 76 nt, synthetic construct; identical to SEQ ID NO: 625
  source 1..76: mol_type = other RNA
  modified_base 1: mod_base = OTHER; note = 2'-Omethylguanosine
  modified_base 10: mod_base = OTHER; note = 2'-Omethylguanosine
  modified_base 13: mod_base = OTHER; note = 2'-Omethylcytosine
  modified_base 17: mod_base = OTHER; note = Guanosine phosphorothiorate
  modified_base 18: mod_base = OTHER; note = 2'-Omethylguanosine
  modified_base 19: mod_base = OTHER; note = Adenosine phosphorothiorate
  modified_base 20: mod_base = OTHER; note = 2'-Omethyluridine
  modified_base 25: mod_base = OTHER; note = 2'-Omethylcytosine
  modified_base 29: mod_base = OTHER; note = 2'-Omethylguanosine
  modified_base 33: mod_base = OTHER; note = 2'-fluorouridine
  modified_base 35: mod_base = OTHER; note = Cytosine phosphorothiorate
  modified_base 37: mod_base = OTHER; note = Adenosine phosphorothiorate
  modified_base 38: mod_base = OTHER; note = Adenosine phosphorothiorate
  modified_base 43: mod_base = OTHER; note = 2'-Omethyladenosine
  modified_base 44: mod_base = OTHER; note = 2'-fluoroadenosine
  modified_base 46: mod_base = OTHER; note = Guanosine phosphorothiorate
  modified_base 50: mod_base = OTHER; note = 2'-Omethylcytosine
  modified_base 52: mod_base = OTHER; note = 2'-Omethylguanosine
  modified_base 54: mod_base = OTHER; note = Uridine phosphorothiorate
  modified_base 55: mod_base = OTHER; note = Uridine phosphorothiorate
  modified_base 56: mod_base = OTHER; note = 2'-Omethylcytosine
  modified_base 62: mod_base = OTHER; note = 2'-Omethylcytosine
  modified_base 63: mod_base = OTHER; note = 2'-fluorocytosine
  modified_base 65: mod_base = OTHER; note = 2'-Omethylguanosine
  modified_base 71: mod_base = OTHER; note = 2'-Omethyluridine
  modified_base 73: mod_base = OTHER; note = 2'-Omethylguanosine

SEQ ID NO: 6569 - RNA, 75 nt, synthetic construct; identical to SEQ ID NO: 3311
  source 1..75: mol_type = other RNA
  modified_base 1: mod_base = OTHER; note = 2'-Omethylguanosine phosphorothiorate
  modified_base 2: mod_base = OTHER; note = 2'-Omethylguanosine
  modified_base 13: mod_base = OTHER; note = 2'-fluorouridine
  modified_base 14: mod_base = OTHER; note = Adenosine phosphorothiorate
  modified_base 19: mod_base = OTHER; note = 2'-Omethyluridine phosphorothiorate
  modified_base 21: mod_base = OTHER; note = 2'-fluoroadenosine
  modified_base 29: mod_base = OTHER; note = 2'-Omethylguanosine
  modified_base 38: mod_base = OTHER; note = 2'-fluoroadenosine
  modified_base 44: mod_base = OTHER; note = 2'-fluorocytosine phosphorothiorate
  modified_base 51: mod_base = OTHER; note = 2'-fluoroadenosine phosphorothiorate
  modified_base 57: mod_base = OTHER; note = 2'-Omethyladenosine
  modified_base 58: mod_base = OTHER; note = Guanosine phosphorothiorate
  modified_base 63: mod_base = OTHER; note = Guanosine phosphorothiorate
  modified_base 65: mod_base = OTHER; note = 2'-fluorouridine
  modified_base 71: mod_base = OTHER; note = Cytosine phosphorothiorate
  modified_base 74: mod_base = OTHER; note = 2'-fluorocytosine phosphorothiorate

SEQ ID NO: 6570 - RNA, 76 nt, synthetic construct; identical to SEQ ID NO: 625
  source 1..76: mol_type = other RNA
  modified_base 4: mod_base = OTHER; note = 2'-Omethyluridine
  modified_base 5: mod_base = OTHER; note = 2'-Omethylcytosine
  modified_base 6: mod_base = OTHER; note = 2'-fluorocytosine phosphorothiorate
  modified_base 11: mod_base = OTHER; note = 2'-fluorocytosine
  modified_base 13: mod_base = OTHER; note = 2'-Omethylcytosine
  modified_base 14: mod_base = OTHER; note = Adenosine phosphorothiorate
  modified_base 15: mod_base = OTHER; note = 2'-fluoroadenosine
  modified_base 18: mod_base = OTHER; note = 2'-Omethylguanosine phosphorothiorate
  modified_base 21: mod_base = OTHER; note = Adenosine phosphorothiorate
  modified_base 22: mod_base = OTHER; note = 2'-Omethylguanosine
  modified_base 23: mod_base = OTHER; note = Cytosine phosphorothiorate
  modified_base 24: mod_base = OTHER; note = 2'-fluoroguanosine
  modified_base 28: mod_base = OTHER; note = 2'-Omethyluridine phosphorothiorate
  modified_base 36: mod_base = OTHER; note = Adenosine phosphorothiorate
  modified_base 38: mod_base = OTHER; note = 2'-fluoroadenosine phosphorothiorate
  modified_base 39: mod_base = OTHER; note = 2'-Omethyluridine
  modified_base 40: mod_base = OTHER; note = 2'-fluorouridine
  modified_base 41: mod_base = OTHER; note = 2'-Omethylcytosine phosphorothiorate
  modified_base 44: mod_base = OTHER; note = 2'-fluoroadenosine
  modified_base 46: mod_base = OTHER; note = Guanosine phosphorothiorate
  modified_base 47: mod_base = OTHER; note = 2'-fluorouridine
  modified_base 48: mod_base = OTHER; note = 2'-Omethyluridine phosphorothiorate
  modified_base 49: mod_base = OTHER; note = 2'-Omethylcytosine
  modified_base 50: mod_base = OTHER; note = 2'-Omethylcytosine
  modified_base 56: mod_base = OTHER; note = 2'-fluorocytosine
  modified_base 59: mod_base = OTHER; note = Guanosine phosphorothiorate
  modified_base 63: mod_base = OTHER; note = 2'-fluorocytosine phosphorothiorate
  modified_base 64: mod_base = OTHER; note = 2'-Omethylguanosine
  modified_base 65: mod_base = OTHER; note = 2'-Omethylguanosine
  modified_base 66: mod_base = OTHER; note = 2'-fluorocytosine
  modified_base 72: mod_base = OTHER; note = 2'-fluorocytosine
  modified_base 73: mod_base = OTHER; note = 2'-fluoroguanosine
  modified_base 74: mod_base = OTHER; note = Cytosine phosphorothiorate

SEQ ID NO: 6571 - RNA, 75 nt, synthetic construct; identical to SEQ ID NO: 3336
  source 1..75: mol_type = other RNA
  modified_base 2: mod_base = OTHER; note = 2'-Omethylcytosine phosphorothiorate
  modified_base 6: mod_base = OTHER; note = 2'-Omethylguanosine phosphorothiorate
  modified_base 9: mod_base = OTHER; note = 2'-fluoroguanosine
  modified_base 15: mod_base = OTHER; note = 2'-fluorouridine phosphorothiorate
  modified_base 19: mod_base = OTHER; note = 2'-Omethyluridine phosphorothiorate
  modified_base 21: mod_base = OTHER; note = Guanosine phosphorothiorate
  modified_base 23: mod_base = OTHER; note = 2'-fluoroguanosine
  modified_base 27: mod_base = OTHER; note = 2'-Omethylcytosine
  modified_base 28: mod_base = OTHER; note = Adenosine phosphorothiorate
  modified_base 29: mod_base = OTHER; note = 2'-Omethylguanosine phosphorothiorate
  modified_base 30: mod_base = OTHER; note = 2'-fluoroadenosine
  modified_base 39: mod_base = OTHER; note = 2'-fluorocytosine
  modified_base 40: mod_base = OTHER; note = 2'-fluorouridine
  modified_base 46: mod_base = OTHER; note = 2'-fluorouridine
  modified_base 47: mod_base = OTHER; note = 2'-fluorocytosine
  modified_base 50: mod_base = OTHER; note = 2'-fluoroguanosine phosphorothiorate
  modified_base 55: mod_base = OTHER; note = 2'-fluorocytosine phosphorothiorate
  modified_base 59: mod_base = OTHER; note = Uridine phosphorothiorate
  modified_base 60: mod_base = OTHER; note = 2'-fluorocytosine
  modified_base 70: mod_base = OTHER; note = 2'-fluoroguanosine phosphorothiorate
  modified_base 73: mod_base = OTHER; note = Cytosine phosphorothiorate
  modified_base 74: mod_base = OTHER; note = Cytosine phosphorothiorate

SEQ ID NO: 6572 - RNA, 76 nt, synthetic construct; identical to SEQ ID NO: 3295
  source 1..76: mol_type = other RNA
  modified_base 1: mod_base = OTHER; note = 2'-Omethylcytosine
  modified_base 2: mod_base = OTHER; note = 2'-fluorocytosine phosphorothiorate
  modified_base 3: mod_base = OTHER; note = 2'-fluorouridine
  modified_base 4: mod_base = OTHER; note = 2'-Omethyluridine phosphorothiorate
  modified_base 5: mod_base = OTHER; note = 2'-fluorocytosine
  modified_base 9: mod_base = OTHER; note = 2'-Omethyladenosine
  modified_base 13: mod_base = OTHER; note = 2'-fluorocytosine phosphorothiorate
  modified_base 15: mod_base = OTHER; note = Guanosine phosphorothiorate
  modified_base 25: mod_base = OTHER; note = 2'-Omethylcytosine
  modified_base 26: mod_base = OTHER; note = 2'-Omethylguanosine
  modified_base 27: mod_base = OTHER; note = 2'-fluoroguanosine
  modified_base 30: mod_base = OTHER; note = 2'-fluoroguanosine phosphorothiorate
  modified_base 39: mod_base = OTHER; note = 2'-Omethyluridine phosphorothiorate
  modified_base 46: mod_base = OTHER; note = 2'-fluoroguanosine phosphorothiorate
  modified_base 47: mod_base = OTHER; note = 2'-fluorouridine phosphorothiorate
  modified_base 49: mod_base = OTHER; note = 2'-fluoroguanosine phosphorothiorate
  modified_base 52: mod_base = OTHER; note = 2'-Omethylguanosine
  modified_base 58: mod_base = OTHER; note = 2'-fluoroadenosine phosphorothiorate
  modified_base 67: mod_base = OTHER; note = 2'-fluorocytosine
  modified_base 69: mod_base = OTHER; note = 2'-fluoroadenosine
  modified_base 75: mod_base = OTHER; note = Cytosine phosphorothiorate
  modified_base 76: mod_base = OTHER; note = 2'-fluoroadenosine

SEQ ID NO: 6573 - RNA, 76 nt, synthetic construct; identical to SEQ ID NO: 625
  source 1..76: mol_type = other RNA
  modified_base 8: mod_base = OTHER; note = 2'-Omethyluridine
  modified_base 9: mod_base = OTHER; note = 2'-Omethylguanosine

SEQ ID NO: 6574 - RNA, 85 nt, synthetic construct; identical to SEQ ID NO: 3286
  source 1..85: mol_type = other RNA
  modified_base 1: mod_base = OTHER; note = 2'-fluorocytosine phosphorothiorate
  modified_base 13: mod_base = OTHER; note = Adenosine phosphorothiorate
  modified_base 30: mod_base = OTHER; note = 2'-fluoroadenosine
  modified_base 52: mod_base = OTHER; note = 2'-fluoroguanosine
  modified_base 53: mod_base = OTHER; note = 2'-fluorouridine
  modified_base 57: mod_base = OTHER; note = 2'-Omethylcytosine
  modified_base 73: mod_base = OTHER; note = Adenosine phosphorothiorate
  modified_base 84: mod_base = OTHER; note = 2'-Omethylcytosine

SEQ ID NO: 6575 - RNA, 76 nt, synthetic construct
  source 1..76: mol_type = other RNA
ggctccgtggcgcaatggatagcgcatacagcttcaaactgtaaggttccgggttcgagtcccggcggagtcgcca

SEQ ID NO: 6576 - RNA, 76 nt, synthetic construct; identical to SEQ ID NO: 3318
  source 1..76: mol_type = other RNA
  modified_base 1: mod_base = OTHER; note = 2'-Omethylcytosine phosphorothiorate
  modified_base 2: mod_base = OTHER; note = 2'-Omethylcytosine

SEQ ID NO: 6577 - RNA, 76 nt, synthetic construct; identical to SEQ ID NO: 3318
  source 1..76: mol_type = other RNA
  modified_base 22: mod_base = OTHER; note = 2'-Omethylguanosine
  modified_base 23: mod_base = OTHER; note = 2'-Omethyladenosine
  modified_base 24: mod_base = OTHER; note = 2'-Omethylguanosine
  modified_base 25: mod_base = OTHER; note = 2'-Omethylcytosine
  modified_base 73: mod_base = OTHER; note = 2'-Omethyladenosine

SEQ ID NO: 6578 - RNA, 86 nt, synthetic construct; identical to SEQ ID NO: 3290
  source 1..86: mol_type = other RNA
  modified_base 1: mod_base = OTHER; note = 2'-Omethyladenosine

SEQ ID NO: 6579 - RNA, 76 nt, synthetic construct; identical to SEQ ID NO: 625
  source 1..76: mol_type = other RNA
  modified_base 1: mod_base = OTHER; note = 2'-Omethylguanosine phosphorothiorate
  modified_base 2: mod_base = OTHER; note = 2'-Omethylguanosine phosphorothiorate
  modified_base 3: mod_base = OTHER; note = 2'-Omethylcytosine
  modified_base 4: mod_base = OTHER; note = 2'-Omethyluridine
  modified_base 5: mod_base = OTHER; note = 2'-Omethylcytosine
  modified_base 6: mod_base = OTHER; note = 2'-Omethylcytosine
  modified_base 10: mod_base = OTHER; note = 2'-Omethylguanosine
  modified_base 11: mod_base = OTHER; note = 2'-Omethylcytosine
  modified_base 12: mod_base = OTHER; note = 2'-Omethylguanosine
  modified_base 13: mod_base = OTHER; note = 2'-Omethylcytosine
  modified_base 16: mod_base = OTHER; note = 2'-Omethyluridine
  modified_base 17: mod_base = OTHER; note = 2'-Omethylguanosine
  modified_base 18: mod_base = OTHER; note = 2'-Omethylguanosine
  modified_base 20: mod_base = OTHER; note = 2'-Omethyluridine
  modified_base 25: mod_base = OTHER; note = 2'-Omethylcytosine
  modified_base 33: mod_base = OTHER; note = 2'-fluorouridine
  modified_base 35: mod_base = OTHER; note = Cytosine phosphorothiorate
  modified_base 37: mod_base = OTHER; note = Adenosine phosphorothiorate
  modified_base 38: mod_base = OTHER; note = Adenosine phosphorothiorate
  modified_base 41: mod_base = OTHER; note = 2'-fluorocytosine
  modified_base 42: mod_base = OTHER; note = 2'-Omethyladenosine
  modified_base 43: mod_base = OTHER; note = 2'-Omethyladenosine
  modified_base 44: mod_base = OTHER; note = 2'-fluoroadenosine
  modified_base 49: mod_base = OTHER; note = 2'-Omethylcytosine
  modified_base 50: mod_base = OTHER; note = 2'-Omethylcytosine
  modified_base 52: mod_base = OTHER; note = 2'-Omethylguanosine
  modified_base 54: mod_base = OTHER; note = 2'-Omethyluridine
  modified_base 55: mod_base = OTHER; note = Uridine phosphorothiorate
  modified_base 56: mod_base = OTHER; note = 2'-Omethylcytosine
  modified_base 57: mod_base = OTHER; note = 2'-fluoroguanosine
  modified_base 59: mod_base = OTHER; note = 2'-Omethylguanosine
  modified_base 61: mod_base = OTHER; note = 2'-Omethylcytosine
  modified_base 65: mod_base = OTHER; note = 2'-Omethylguanosine
  modified_base 74: mod_base = OTHER; note = Cytosine phosphorothiorate
  modified_base 75: mod_base = OTHER; note = 2'-Omethylcytosine phosphorothiorate
  modified_base 76: mod_base = OTHER; note = 2'-Omethyladenosine

SEQ ID NO: 6580 - RNA, 85 nt, synthetic construct; identical to SEQ ID NO: 3301
  source 1..85: mol_type = other RNA
  modified_base 1: mod_base = OTHER; note = 2'-Omethylguanosine phosphorothiorate
  modified_base 2: mod_base = OTHER; note = 2'-Omethylcytosine phosphorothiorate
  modified_base 3: mod_base = OTHER; note = Uridine phosphorothiorate
  modified_base 14: mod_base = OTHER; note = 2'-Omethyladenosine phosphorothiorate
  modified_base 20: mod_base = OTHER; note = 2'-fluorouridine phosphorothiorate
  modified_base 21: mod_base = OTHER; note = Adenosine phosphorothiorate
  modified_base 25: mod_base = OTHER; note = Cytosine phosphorothiorate
  modified_base 27: mod_base = OTHER; note = Uridine phosphorothiorate
  modified_base 36: mod_base = OTHER; note = 2'-fluoroadenosine
  modified_base 37: mod_base = OTHER; note = 2'-fluoroadenosine
  modified_base 38: mod_base = OTHER; note = 2'-Omethyladenosine
  modified_base 49: mod_base = OTHER; note = 2'-Omethyluridine
  modified_base 50: mod_base = OTHER; note = 2'-Omethylcytosine
  modified_base 57: mod_base = OTHER; note = 2'-Omethylcytosine phosphorothiorate
  modified_base 59: mod_base = OTHER; note = 2'-Omethylcytosine
  modified_base 62: mod_base = OTHER; note = 2'-Omethylguanosine
  modified_base 67: mod_base = OTHER; note = 2'-Omethyladenosine
  modified_base 74: mod_base = OTHER; note = Cytosine phosphorothiorate
  modified_base 81: mod_base = OTHER; note = 2'-Omethylcytosine phosphorothiorate
  modified_base 84: mod_base = OTHER; note = 2'-fluorocytosine

SEQ ID NO: 6581 - RNA, 75 nt, synthetic construct; identical to SEQ ID NO: 3311
  source 1..75: mol_type = other RNA
  modified_base 1: mod_base = OTHER; note = 2'-Omethylguanosine phosphorothiorate
  modified_base 2: mod_base = OTHER; note = 2'-Omethylguanosine
  modified_base 17: mod_base = OTHER; note = 2'-fluoroguanosine phosphorothiorate
  modified_base 20: mod_base = OTHER; note = 2'-fluoroadenosine
  modified_base 22: mod_base = OTHER; note = 2'-fluoroguanosine
  modified_base 26: mod_base = OTHER; note = 2'-Omethyluridine phosphorothiorate
  modified_base 38: mod_base = OTHER; note = 2'-fluoroadenosine
  modified_base 43: mod_base = OTHER; note = 2'-fluoroguanosine
  modified_base 58: mod_base = OTHER; note = 2'-Omethylguanosine
  modified_base 59: mod_base = OTHER; note = Uridine phosphorothiorate
  modified_base 62: mod_base = OTHER; note = Cytosine phosphorothiorate
  modified_base 63: mod_base = OTHER; note = 2'-fluoroguanosine
  modified_base 67: mod_base = OTHER; note = 2'-fluoroguanosine phosphorothiorate
  modified_base 68: mod_base = OTHER; note = Adenosine phosphorothiorate
  modified_base 69: mod_base = OTHER; note = 2'-fluoroadenosine
  modified_base 70: mod_base = OTHER; note = 2'-fluorocytosine phosphorothiorate
  modified_base 75: mod_base = OTHER; note = 2'-fluoroadenosine

SEQ ID NO: 6582 - RNA, 76 nt, synthetic construct; identical to SEQ ID NO: 3289
  source 1..76: mol_type = other RNA
  modified_base 1: mod_base = OTHER; note = 2'-Omethylguanosine phosphorothiorate
  modified_base 2: mod_base = OTHER; note = 2'-Omethylcytosine phosphorothiorate
  modified_base 13: mod_base = OTHER; note = 2'-fluorocytosine
  modified_base 14: mod_base = OTHER; note = 2'-fluoroadenosine
  modified_base 54: mod_base = OTHER; note = 2'-fluorouridine
  modified_base 59: mod_base = OTHER; note = 2'-Omethylguanosine
  modified_base 75: mod_base = OTHER; note = Cytosine phosphorothiorate
  modified_base 76: mod_base = OTHER; note = 2'-Omethyladenosine

SEQ ID NO: 6583 - RNA, 76 nt, synthetic construct; identical to SEQ ID NO: 625
  source 1..76: mol_type = other RNA
  modified_base 1: mod_base = OTHER; note = 2'-Omethylguanosine
  modified_base 3: mod_base = OTHER; note = 2'-fluorocytosine
  modified_base 4: mod_base = OTHER; note = 2'-Omethyluridine
  modified_base 12: mod_base = OTHER; note = 2'-fluoroguanosine
  modified_base 13: mod_base = OTHER; note = 2'-Omethylcytosine
  modified_base 14: mod_base = OTHER; note = 2'-Omethyladenosine
  modified_base 15: mod_base = OTHER; note = 2'-fluoroadenosine
  modified_base 17: mod_base = OTHER; note = 2'-Omethylguanosine
  modified_base 20: mod_base = OTHER; note = 2'-Omethyluridine
  modified_base 23: mod_base = OTHER; note = 2'-Omethylcytosine
  modified_base 26: mod_base = OTHER; note = 2'-Omethyladenosine
  modified_base 34: mod_base = OTHER; note = 2'-fluorouridine
  modified_base 39: mod_base = OTHER; note = 2'-fluorouridine
  modified_base 40: mod_base = OTHER; note = 2'-Omethyluridine
  modified_base 41: mod_base = OTHER; note = 2'-Omethylcytosine
  modified_base 42: mod_base = OTHER; note = 2'-Omethyladenosine
  modified_base 46: mod_base = OTHER; note = 2'-Omethylguanosine
  modified_base 53: mod_base = OTHER; note = 2'-Omethylguanosine
  modified_base 56: mod_base = OTHER; note = 2'-fluorocytosine
  modified_base 58: mod_base = OTHER; note = 2'-fluoroadenosine
  modified_base 59: mod_base = OTHER; note = Guanosine phosphorothiorate
  modified_base 60: mod_base = OTHER; note = 2'-fluorouridine
  modified_base 62: mod_base = OTHER; note = 2'-Omethylcytosine
  modified_base 63: mod_base = OTHER; note = 2'-fluorocytosine
  modified_base 64: mod_base = OTHER; note = 2'-fluoroguanosine
  modified_base 65: mod_base = OTHER; note = 2'-fluoroguanosine
  modified_base 66: mod_base = OTHER; note = 2'-Omethylcytosine
  modified_base 67: mod_base = OTHER; note = 2'-fluoroguanosine
  modified_base 68: mod_base = OTHER; note = 2'-fluoroguanosine
  modified_base 69: mod_base = OTHER; note = 2'-fluoroadenosine phosphorothiorate
  modified_base 70: mod_base = OTHER; note = 2'-fluoroguanosine
  modified_base 73: mod_base = OTHER; note = 2'-Omethylguanosine
  modified_base 76: mod_base = OTHER; note = 2'-Omethyladenosine

SEQ ID NO: 6584 - RNA, 75 nt, synthetic construct
  source 1..75: mol_type = other RNA
  modified_base 1: mod_base = OTHER; note = 2'-Omethylguanosine phosphorothiorate
  modified_base 2: mod_base = OTHER; note = 2'-Omethylguanosine phosphorothiorate
  modified_base 3: mod_base = OTHER; note = 2'-Omethylcytosine
  modified_base 4: mod_base = OTHER; note = 2'-Omethyluridine
  modified_base 5: mod_base = OTHER; note = 2'-Omethylcytosine
  modified_base 6: mod_base = OTHER; note = 2'-Omethylcytosine
  modified_base 8: mod_base = OTHER; note = 2'-fluorouridine
  modified_base 15: mod_base = OTHER; note = 2'-Omethyluridine
  modified_base 16: mod_base = OTHER; note = 2'-Omethylguanosine
  modified_base 17: mod_base = OTHER; note = 2'-Omethylguanosine
  modified_base 32: mod_base = OTHER; note = 2'-fluorouridine
  modified_base 34: mod_base = OTHER; note = Cytosine phosphorothiorate
  modified_base 36: mod_base = OTHER; note = Adenosine phosphorothiorate
  modified_base 37: mod_base = OTHER; note = Adenosine phosphorothiorate
  modified_base 43: mod_base = OTHER; note = 2'-Omethyladenosine
  modified_base 44: mod_base = OTHER; note = 2'-Omethylguanosine
  modified_base 45: mod_base = OTHER; note = 2'-fluoroguanosine
  modified_base 46: mod_base = OTHER; note = 2'-fluorouridine
  modified_base 47: mod_base = OTHER; note = 2'-fluorouridine
  modified_base 48: mod_base = OTHER; note = 2'-Omethylcytosine
  modified_base 49: mod_base = OTHER; note = 2'-Omethylcytosine
  modified_base 50: mod_base = OTHER; note = 2'-Omethylguanosine
  modified_base 51: mod_base = OTHER; note = 2'-Omethylguanosine
  modified_base 52: mod_base = OTHER; note = 2'-Omethylguanosine
  modified_base 53: mod_base = OTHER; note = 2'-Omethyluridine
  modified_base 55: mod_base = OTHER; note = 2'-Omethylcytosine
  modified_base 58: mod_base = OTHER; note = 2'-Omethylguanosine
  modified_base 60: mod_base = OTHER; note = 2'-Omethylcytosine
  modified_base 61: mod_base = OTHER; note = 2'-Omethylcytosine
  modified_base 62: mod_base = OTHER; note = 2'-fluorocytosine
  modified_base 63: mod_base = OTHER; note = 2'-Omethylguanosine
  modified_base 64: mod_base = OTHER; note = 2'-Omethylguanosine
  modified_base 65: mod_base = OTHER; note = 2'-Omethylcytosine
  modified_base 66: mod_base = OTHER; note = 2'-Omethylguanosine
  modified_base 67: mod_base = OTHER; note = 2'-Omethylguanosine
  modified_base 72: mod_base = OTHER; note = 2'-Omethylguanosine
ggctccgtgggcaatggatagcgcattggacttcaaattcaaaggttccgggttcgagtcccggcggagtcgcca

SEQ ID NO: 6585 - RNA, 86 nt, synthetic construct; identical to SEQ ID NO: 3290
  source 1..86: mol_type = other RNA
  modified_base 29: mod_base = OTHER; note = Guanosine phosphorothiorate

SEQ ID NO: 6586 - RNA, 76 nt, synthetic construct; identical to SEQ ID NO: 625
  source 1..76: mol_type = other RNA
  modified_base 4: mod_base = OTHER; note = 2'-fluorouridine
  modified_base 5: mod_base = OTHER; note = 2'-fluorocytosine
  modified_base 11: mod_base = OTHER; note = 2'-fluorocytosine phosphorothiorate
  modified_base 14: mod_base = OTHER; note = 2'-Omethyladenosine
  modified_base 15: mod_base = OTHER; note = 2'-fluoroadenosine
  modified_base 21: mod_base = OTHER; note = Adenosine phosphorothiorate
  modified_base 22: mod_base = OTHER; note = 2'-fluoroguanosine
  modified_base 23: mod_base = OTHER; note = Cytosine phosphorothiorate
  modified_base 25: mod_base = OTHER; note = 2'-fluorocytosine
  modified_base 26: mod_base = OTHER; note = Adenosine phosphorothiorate
  modified_base 27: mod_base = OTHER; note = 2'-Omethyluridine
  modified_base 28: mod_base = OTHER; note = 2'-fluorouridine
  modified_base 29: mod_base = OTHER; note = 2'-Omethylguanosine
  modified_base 30: mod_base = OTHER; note = 2'-fluoroguanosine
  modified_base 31: mod_base = OTHER; note = 2'-Omethyladenosine
  modified_base 33: mod_base = OTHER; note = 2'-fluorouridine
  modified_base 36: mod_base = OTHER; note = Adenosine phosphorothiorate
  modified_base 40: mod_base = OTHER; note = 2'-fluorouridine
  modified_base 41: mod_base = OTHER; note = 2'-Omethylcytosine phosphorothiorate
  modified_base 43: mod_base = OTHER; note = 2'-Omethyladenosine phosphorothiorate
  modified_base 44: mod_base = OTHER; note = 2'-fluoroadenosine
  modified_base 45: mod_base = OTHER; note = Guanosine phosphorothiorate
  modified_base 46: mod_base = OTHER; note = 2'-Omethylguanosine
  modified_base 52: mod_base = OTHER; note = 2'-fluoroguanosine
  modified_base 56: mod_base = OTHER; note = 2'-Omethylcytosine
  modified_base 57: mod_base = OTHER; note = 2'-Omethylguanosine
  modified_base 59: mod_base = OTHER; note = 2'-fluoroguanosine
  modified_base 61: mod_base = OTHER; note = Cytosine phosphorothiorate
  modified_base 62: mod_base = OTHER; note = 2'-Omethylcytosine
  modified_base 65: mod_base = OTHER; note = 2'-Omethylguanosine
  modified_base 68: mod_base = OTHER; note = 2'-Omethylguanosine
  modified_base 72: mod_base = OTHER; note = 2'-Omethylcytosine
  modified_base 73: mod_base = OTHER; note = Guanosine phosphorothiorate
  modified_base 74: mod_base = OTHER; note = 2'-fluorocytosine
  modified_base 75: mod_base = OTHER; note = 2'-fluorocytosine phosphorothiorate
  modified_base 76: mod_base = OTHER; note = 2'-Omethyladenosine

SEQ ID NO: 6587 - RNA, 76 nt, synthetic construct; identical to SEQ ID NO: 3295
  source 1..76: mol_type = other RNA
  modified_base 1: mod_base = OTHER; note = 2'-Omethylcytosine
  modified_base 2: mod_base = OTHER; note = 2'-fluorocytosine
  modified_base 3: mod_base = OTHER; note = 2'-fluorouridine
  modified_base 12: mod_base = OTHER; note = 2'-Omethyluridine
  modified_base 16: mod_base = OTHER; note = 2'-Omethyluridine
  modified_base 17: mod_base = OTHER; note = 2'-Omethyluridine
  modified_base 28: mod_base = OTHER; note = 2'-fluoroadenosine phosphorothiorate
  modified_base 43: mod_base = OTHER; note = Uridine phosphorothiorate
  modified_base 52: mod_base = OTHER; note = 2'-Omethylguanosine phosphorothiorate
  modified_base 54: mod_base = OTHER; note = 2'-fluorouridine phosphorothiorate
  modified_base 74: mod_base = OTHER; note = 2'-Omethylcytosine phosphorothiorate
  modified_base 75: mod_base = OTHER; note = 2'-fluorocytosine

SEQ ID NO: 6588 - RNA, 76 nt, synthetic construct; identical to SEQ ID NO: 3325
  source 1..76: mol_type = other RNA
  modified_base 1: mod_base = OTHER; note = 2'-Omethyluridine
  modified_base 17: mod_base = OTHER; note = 2'-Omethylguanosine
  modified_base 18: mod_base = OTHER; note = 2'-Omethylguanosine
  modified_base 50: mod_base = OTHER; note = 2'-Omethylcytosine
  modified_base 52: mod_base = OTHER; note = 2'-Omethylguanosine
  modified_base 73: mod_base = OTHER; note = 2'-Omethylguanosine

SEQ ID NO: 6589 - RNA, 76 nt, synthetic construct; identical to SEQ ID NO: 3316
  source 1..76: mol_type = other RNA
  modified_base 1: mod_base = OTHER; note = 2'-Omethyladenosine
  modified_base 2: mod_base = OTHER; note = 2'-Omethylcytosine
  modified_base 3: mod_base = OTHER; note = 2'-Omethylcytosine
  modified_base 4: mod_base = OTHER; note = 2'-Omethyladenosine
  modified_base 5: mod_base = OTHER; note = 2'-Omethyladenosine
  modified_base 6: mod_base = OTHER; note = 2'-Omethylcytosine
  modified_base 10: mod_base = OTHER; note = 2'-Omethylguanosine
  modified_base 11: mod_base = OTHER; note = 2'-Omethylcytosine
  modified_base 12: mod_base = OTHER; note = 2'-Omethylguanosine
  modified_base 13: mod_base = OTHER; note = 2'-Omethylcytosine
  modified_base 16: mod_base = OTHER; note = 2'-Omethyluridine
  modified_base 17: mod_base = OTHER; note = 2'-Omethylguanosine
  modified_base 18: mod_base = OTHER; note = 2'-Omethylguanosine
  modified_base 20: mod_base = OTHER; note = 2'-Omethyluridine
  modified_base 25: mod_base = OTHER; note = 2'-Omethylcytosine
  modified_base 33: mod_base = OTHER; note = 2'-fluorouridine
  modified_base 35: mod_base = OTHER; note = Cytosine phosphorothiorate
  modified_base 37: mod_base = OTHER; note = Adenosine phosphorothiorate
  modified_base 38: mod_base = OTHER; note = Adenosine phosphorothiorate
  modified_base 41: mod_base = OTHER; note = 2'-fluorocytosine
  modified_base 42: mod_base = OTHER; note = 2'-Omethyladenosine
  modified_base 43: mod_base = OTHER; note = 2'-Omethyladenosine
  modified_base 44: mod_base = OTHER; note = 2'-fluoroadenosine
  modified_base 49: mod_base = OTHER; note = 2'-Omethylcytosine
  modified_base 50: mod_base = OTHER; note = 2'-Omethylcytosine
  modified_base 52: mod_base = OTHER; note = 2'-Omethylguanosine
  modified_base 54: mod_base = OTHER; note = 2'-Omethyluridine
  modified_base 55: mod_base = OTHER; note = Uridine phosphorothiorate
  modified_base 56: mod_base = OTHER; note = 2'-Omethylcytosine
  modified_base 57: mod_base = OTHER; note = 2'-fluoroguanosine
  modified_base 59: mod_base = OTHER; note = 2'-Omethylguanosine
  modified_base 61: mod_base = OTHER; note = 2'-Omethylcytosine
  modified_base 65: mod_base = OTHER; note = 2'-Omethylguanosine
  modified_base 73: mod_base = OTHER; note = 2'-Omethylguanosine

SEQ ID NO: 6590 - RNA, 76 nt, synthetic construct; identical to SEQ ID NO: 625
  source 1..76: mol_type = other RNA
  modified_base 14: mod_base = OTHER; note = Adenosine phosphorothiorate
  modified_base 15: mod_base = OTHER; note = Adenosine phosphorothiorate
  modified_base 16: mod_base = OTHER; note = Uridine phosphorothiorate
  modified_base 17: mod_base = OTHER; note = Guanosine phosphorothiorate
  modified_base 18: mod_base = OTHER; note = Guanosine phosphorothiorate
  modified_base 19: mod_base = OTHER; note = Adenosine phosphorothiorate
  modified_base 20: mod_base = OTHER; note = Uridine phosphorothiorate
  modified_base 21: mod_base = OTHER; note = Adenosine phosphorothiorate

SEQ ID NO: 6591 - RNA, 85 nt, synthetic construct; identical to SEQ ID NO: 3288
  source 1..85: mol_type = other RNA
  modified_base 1: mod_base = OTHER; note = 2'-Omethylcytosine
  modified_base 30: mod_base = OTHER; note = 2'-fluoroadenosine
  modified_base 44: mod_base = OTHER; note = 2'-Omethylguanosine
  modified_base 50: mod_base = OTHER; note = Adenosine phosphorothiorate
  modified_base 57: mod_base = OTHER; note = 2'-Omethylcytosine
  modified_base 59: mod_base = OTHER; note = 2'-Omethyluridine
  modified_base 85: mod_base = OTHER; note = 2'-Omethyladenosine

SEQ ID NO: 6592 - RNA, 76 nt, synthetic construct
  source 1..76: mol_type = other RNA
gactccgtggcgcaatggatagcgcatgggacttcaaattccaaggttccgggttcgagtcccggcggagtcgcca

SEQ ID NO: 6593 - RNA, 76 nt, synthetic construct; identical to SEQ ID NO: 3289
  source 1..76: mol_type = other RNA
  modified_base 1: mod_base = OTHER; note = 2'-Omethylguanosine
  modified_base 2: mod_base = OTHER; note = 2'-Omethylcytosine
  modified_base 3: mod_base = OTHER; note = 2'-Omethylcytosine
  modified_base 4: mod_base = OTHER; note = 2'-Omethyluridine
  modified_base 5: mod_base = OTHER; note = 2'-Omethylguanosine
  modified_base 6: mod_base = OTHER; note = 2'-Omethylguanosine

SEQ ID NO: 6594 - RNA, 76 nt, synthetic construct; identical to SEQ ID NO: 3318
  source 1..76: mol_type = other RNA
  modified_base 1: mod_base = OTHER; note = 2'-Omethylcytosine phosphorothiorate
  modified_base 2: mod_base = OTHER; note = 2'-Omethylcytosine phosphorothiorate
  modified_base 32: mod_base = OTHER; note = Cytosine phosphorothiorate
  modified_base 33: mod_base = OTHER; note = 2'-Omethyluridine
  modified_base 74: mod_base = OTHER; note = Cytosine phosphorothiorate
  modified_base 75: mod_base = OTHER; note = 2'-Omethylcytosine phosphorothiorate
  modified_base 76: mod_base = OTHER; note = 2'-Omethyladenosine

SEQ ID NO: 6595 - RNA, 76 nt, synthetic construct
  source 1..76: mol_type = other RNA
ggagcactggcgcaatggatagcgcattggacttcaaattcaaaggttccgggttcgagtcccgggtgcttcgcca

SEQ ID NO: 6596 - RNA, 75 nt, synthetic construct; identical to SEQ ID NO: 1045
  source 1..75: mol_type = other RNA
  modified_base 2: mod_base = OTHER; note = 2'-Omethylguanosine phosphorothiorate
  modified_base 6: mod_base = OTHER; note = 2'-Omethylcytosine
  modified_base 27: mod_base = OTHER; note = 2'-fluorocytosine
  modified_base 39: mod_base = OTHER; note = 2'-Omethyluridine
  modified_base 56: mod_base = OTHER; note = 2'-Omethylguanosine
  modified_base 70: mod_base = OTHER; note = 2'-fluorocytosine
  modified_base 74: mod_base = OTHER; note = 2'-fluorocytosine phosphorothiorate

SEQ ID NO: 6597 - RNA, 76 nt, synthetic construct; identical to SEQ ID NO: 625
  source 1..76: mol_type = other RNA
  modified_base 2: mod_base = OTHER; note = Guanosine phosphorothiorate
  modified_base 3: mod_base = OTHER; note = 2'-fluorocytosine
  modified_base 4: mod_base = OTHER; note = 2'-fluorouridine
  modified_base 14: mod_base = OTHER; note = 2'-fluoroadenosine
  modified_base 17: mod_base = OTHER; note = 2'-Omethylguanosine
  modified_base 18: mod_base = OTHER; note = 2'-fluoroguanosine
  modified_base 20: mod_base = OTHER; note = 2'-Omethyluridine phosphorothiorate
  modified_base 23: mod_base = OTHER; note = 2'-Omethylcytosine
  modified_base 24: mod_base = OTHER; note = 2'-fluoroguanosine
  modified_base 26: mod_base = OTHER; note = 2'-fluoroadenosine
  modified_base 27: mod_base = OTHER; note = 2'-fluorouridine phosphorothiorate
  modified_base 28: mod_base = OTHER; note = 2'-fluorouridine
  modified_base 29: mod_base = OTHER; note = 2'-Omethylguanosine phosphorothiorate
  modified_base 30: mod_base = OTHER; note = 2'-fluoroguanosine phosphorothiorate
  modified_base 31: mod_base = OTHER; note = 2'-fluoroadenosine
  modified_base 40: mod_base = OTHER; note = 2'-Omethyluridine
  modified_base 43: mod_base = OTHER; note = Adenosine phosphorothiorate
  modified_base 44: mod_base = OTHER; note = Adenosine phosphorothiorate
  modified_base 46: mod_base = OTHER; note = Guanosine phosphorothiorate
  modified_base 47: mod_base = OTHER; note = 2'-fluorouridine
  modified_base 48: mod_base = OTHER; note = 2'-Omethyluridine
  modified_base 53: mod_base = OTHER; note = 2'-Omethylguanosine
  modified_base 54: mod_base = OTHER; note = 2'-fluorouridine phosphorothiorate
  modified_base 55: mod_base = OTHER; note = Uridine phosphorothiorate
  modified_base 58: mod_base = OTHER; note = Adenosine phosphorothiorate
  modified_base 59: mod_base = OTHER; note = 2'-Omethylguanosine
  modified_base 62: mod_base = OTHER; note = 2'-fluorocytosine
  modified_base 63: mod_base = OTHER; note = Cytosine phosphorothiorate
  modified_base 64: mod_base = OTHER; note = 2'-Omethylguanosine
  modified_base 66: mod_base = OTHER; note = 2'-fluorocytosine
  modified_base 68: mod_base = OTHER; note = 2'-Omethylguanosine
  modified_base 69: mod_base = OTHER; note = 2'-fluoroadenosine
  modified_base 72: mod_base = OTHER; note = Cytosine phosphorothiorate
  modified_base 73: mod_base = OTHER; note = 2'-Omethylguanosine
  modified_base 75: mod_base = OTHER; note = 2'-fluorocytosine

SEQ ID NO: 6598 - RNA, 75 nt, synthetic construct; identical to SEQ ID NO: 3336
  source 1..75: mol_type = other RNA
  modified_base 1: mod_base = OTHER; note = Cytosine phosphorothiorate
  modified_base 13: mod_base = OTHER; note = 2'-fluoroadenosine phosphorothiorate
  modified_base 21: mod_base = OTHER; note = 2'-fluoroguanosine phosphorothiorate
  modified_base 29: mod_base = OTHER; note = Guanosine phosphorothiorate
  modified_base 40: mod_base = OTHER; note = 2'-Omethyluridine
  modified_base 46: mod_base = OTHER; note = 2'-fluorouridine phosphorothiorate
  modified_base 75: mod_base = OTHER; note = 2'-Omethyladenosine

SEQ ID NO: 6599 - RNA, 76 nt, synthetic construct; identical to SEQ ID NO: 3795
  source 1..76: mol_type = other RNA
  modified_base 1: mod_base = OTHER; note = 2'-Omethylguanosine
  modified_base 19: mod_base = OTHER; note = 2'-Omethyladenosine
  modified_base 20: mod_base = OTHER; note = 2'-Omethyluridine
  modified_base 21: mod_base = OTHER; note = 2'-fluoroadenosine
  modified_base 22: mod_base = OTHER; note = 2'-Omethyladenosine
  modified_base 40: mod_base = OTHER; note = 2'-fluorocytosine
  modified_base 41: mod_base = OTHER; note = 2'-Omethylcytosine
  modified_base 42: mod_base = OTHER; note = 2'-Omethylguanosine
  modified_base 43: mod_base = OTHER; note = 2'-Omethylguanosine
  modified_base 73: mod_base = OTHER; note = 2'-Omethylguanosine

SEQ ID NO: 6600 - RNA, 76 nt, synthetic construct; identical to SEQ ID NO: 3318
  source 1..76: mol_type = other RNA
  modified_base 1: mod_base = OTHER; note = 2'-Omethylcytosine
  modified_base 10: mod_base = OTHER; note = 2'-Omethylguanosine
  modified_base 11: mod_base = OTHER; note = 2'-Omethylcytosine
  modified_base 12: mod_base = OTHER; note = 2'-Omethyluridine
  modified_base 13: mod_base = OTHER; note = 2'-Omethylcytosine
  modified_base 18: mod_base = OTHER; note = 2'-Omethylguanosine
  modified_base 19: mod_base = OTHER; note = 2'-Omethylguanosine
  modified_base 25: mod_base = OTHER; note = 2'-Omethylcytosine
  modified_base 33: mod_base = OTHER; note = 2'-fluorouridine
  modified_base 34: mod_base = OTHER; note = 2'-Omethylcytosine
  modified_base 35: mod_base = OTHER; note = Uridine phosphorothiorate
  modified_base 37: mod_base = OTHER; note = Guanosine phosphorothiorate
  modified_base 38: mod_base = OTHER; note = Adenosine phosphorothiorate
  modified_base 41: mod_base = OTHER; note = 2'-Omethylcytosine
  modified_base 42: mod_base = OTHER; note = 2'-Omethyluridine
  modified_base 43: mod_base = OTHER; note = 2'-Omethyluridine
  modified_base 44: mod_base = OTHER; note = 2'-Omethyladenosine
  modified_base 49: mod_base = OTHER; note = 2'-Omethylguanosine
  modified_base 50: mod_base = OTHER; note = 2'-Omethylcytosine
  modified_base 52: mod_base = OTHER; note = 2'-Omethylguanosine
  modified_base 54: mod_base = OTHER; note = Uridine phosphorothiorate
  modified_base 55: mod_base = OTHER; note = Uridine phosphorothiorate
  modified_base 61: mod_base = OTHER; note = 2'-Omethylcytosine
  modified_base 65: mod_base = OTHER; note = 2'-Omethylcytosine
  modified_base 73: mod_base = OTHER; note = 2'-Omethyladenosine

SEQ ID NO: 6601 - RNA, 75 nt, synthetic construct; identical to SEQ ID NO: 1045
  source 1..75: mol_type = other RNA
  modified_base 1: mod_base = OTHER; note = 2'-Omethylguanosine phosphorothiorate
  modified_base 2: mod_base = OTHER; note = 2'-Omethylguanosine phosphorothiorate
  modified_base 3: mod_base = OTHER; note = 2'-Omethyluridine phosphorothiorate
  modified_base 13: mod_base = OTHER; note = Uridine phosphorothiorate
  modified_base 14: mod_base = OTHER; note = 2'-Omethyladenosine
  modified_base 17: mod_base = OTHER; note = 2'-Omethylguanosine
  modified_base 21: mod_base = OTHER; note = 2'-Omethyladenosine
  modified_base 23: mod_base = OTHER; note = 2'-fluorocytosine phosphorothiorate
  modified_base 29: mod_base = OTHER; note = 2'-Omethylguanosine
  modified_base 39: mod_base = OTHER; note = 2'-Omethyluridine
  modified_base 41: mod_base = OTHER; note = 2'-Omethylcytosine
  modified_base 47: mod_base = OTHER; note = 2'-fluorouridine
  modified_base 48: mod_base = OTHER; note = 2'-Omethylcytosine phosphorothiorate
  modified_base 49: mod_base = OTHER; note = 2'-Omethylcytosine phosphorothiorate
  modified_base 52: mod_base = OTHER; note = 2'-Omethylguanosine
  modified_base 53: mod_base = OTHER; note = 2'-Omethyluridine
  modified_base 72: mod_base = OTHER; note = 2'-Omethyluridine
  modified_base 74: mod_base = OTHER; note = 2'-Omethylcytosine phosphorothiorate
  modified_base 75: mod_base = OTHER; note = 2'-Omethyladenosine

SEQ ID NO: 6602 - RNA, 75 nt, synthetic construct; identical to SEQ ID NO: 1045
  source 1..75: mol_type = other RNA
  modified_base 1: mod_base = OTHER; note = 2'-Omethylguanosine phosphorothiorate
  modified_base 2: mod_base = OTHER; note = 2'-Omethylguanosine
  modified_base 17: mod_base = OTHER; note = 2'-fluoroguanosine phosphorothiorate
  modified_base 20: mod_base = OTHER; note = 2'-fluoroadenosine
  modified_base 22: mod_base = OTHER; note = 2'-fluoroguanosine
  modified_base 26: mod_base = OTHER; note = 2'-Omethyluridine phosphorothiorate
  modified_base 38: mod_base = OTHER; note = 2'-fluoroadenosine
  modified_base 43: mod_base = OTHER; note = 2'-fluoroguanosine
  modified_base 58: mod_base = OTHER; note = 2'-Omethylguanosine
  modified_base 59: mod_base = OTHER; note = Uridine phosphorothiorate
  modified_base 62: mod_base = OTHER; note = Cytosine phosphorothiorate
  modified_base 63: mod_base = OTHER; note = 2'-fluoroguanosine
  modified_base 67: mod_base = OTHER; note = 2'-fluoroguanosine phosphorothiorate
  modified_base 68: mod_base = OTHER; note = Adenosine phosphorothiorate
  modified_base 69: mod_base = OTHER; note = 2'-fluoroadenosine
  modified_base 70: mod_base = OTHER; note = 2'-fluorocytosine phosphorothiorate
  modified_base 75: mod_base = OTHER; note = 2'-fluoroadenosine

SEQ ID NO: 6603 - RNA, 76 nt, synthetic construct; identical to SEQ ID NO: 625
  source 1..76: mol_type = other RNA
  modified_base 1: mod_base = OTHER; note = 2'-Omethylguanosine
  modified_base 40: mod_base = OTHER; note = 2'-fluorouridine
  modified_base 41: mod_base = OTHER; note = 2'-O-(2-Methoxyethyl) 5-methylcytosine phosphorothiorate
  modified_base 42: mod_base = OTHER; note = 2'-Omethyladenosine
  modified_base 43: mod_base = OTHER; note = 2'-Omethyladenosine
  modified_base 73: mod_base = OTHER; note = 2'-Omethylguanosine

SEQ ID NO: 6604 - RNA, 76 nt, synthetic construct; identical to SEQ ID NO: 625
  source 1..76: mol_type = other RNA
  modified_base 1: mod_base = OTHER; note = 2'-Omethylguanosine phosphorothiorate
  modified_base 2: mod_base = OTHER; note = 2'-Omethylguanosine phosphorothiorate
  modified_base 3: mod_base = OTHER; note = 2'-Omethylcytosine phosphorothiorate
  modified_base 4: mod_base = OTHER; note = 2'-Omethyluridine phosphorothiorate
  modified_base 5: mod_base = OTHER; note = 2'-Omethylcytosine phosphorothiorate
  modified_base 6: mod_base = OTHER; note = 2'-Omethylcytosine phosphorothiorate
  modified_base 10: mod_base = OTHER; note = 2'-Omethylguanosine
  modified_base 11: mod_base = OTHER; note = 2'-Omethylcytosine
  modified_base 12: mod_base = OTHER; note = 2'-Omethylguanosine
  modified_base 13: mod_base = OTHER; note = 2'-Omethylcytosine
  modified_base 22: mod_base = OTHER; note = 2'-Omethylguanosine
  modified_base 23: mod_base = OTHER; note = 2'-Omethylcytosine
  modified_base 24: mod_base = OTHER; note = 2'-Omethylguanosine
  modified_base 25: mod_base = OTHER; note = 2'-Omethylcytosine
  modified_base 54: mod_base = OTHER; note = Uridine phosphorothiorate
  modified_base 55: mod_base = OTHER; note = Uridine phosphorothiorate
  modified_base 56: mod_base = OTHER; note = Cytosine phosphorothiorate
  modified_base 57: mod_base = OTHER; note = Guanosine phosphorothiorate
  modified_base 61: mod_base = OTHER; note = 2'-Omethylcytosine
  modified_base 62: mod_base = OTHER; note = 2'-Omethylcytosine
  modified_base 63: mod_base = OTHER; note = 2'-Omethylcytosine
  modified_base 64: mod_base = OTHER; note = 2'-Omethylguanosine
  modified_base 65: mod_base = OTHER; note = 2'-Omethylguanosine
  modified_base 66: mod_base = OTHER; note = 2'-Omethylcytosine
  modified_base 67: mod_base = OTHER; note = 2'-Omethylguanosine
  modified_base 68: mod_base = OTHER; note = 2'-Omethylguanosine
  modified_base 69: mod_base = OTHER; note = 2'-Omethyladenosine

SEQ ID NO: 6605 - RNA, 75 nt, synthetic construct; identical to SEQ ID NO: 3306
  source 1..75: mol_type = other RNA
  modified_base 1: mod_base = OTHER; note = 2'-Omethylguanosine
  modified_base 49: mod_base = OTHER; note = 2'-Omethylcytosine
  modified_base 51: mod_base = OTHER; note = 2'-Omethyluridine
  modified_base 72: mod_base = OTHER; note = 2'-Omethyladenosine

SEQ ID NO: 6606 - RNA, 76 nt, synthetic construct; identical to SEQ ID NO: 3318
  source 1..76: mol_type = other RNA
  modified_base 1: mod_base = OTHER; note = 2'-Omethylcytosine
  modified_base 16: mod_base = OTHER; note = 2'-Omethyluridine
  modified_base 18: mod_base = OTHER; note = 2'-Omethylguanosine
  modified_base 19: mod_base = OTHER; note = 2'-Omethylguanosine
  modified_base 54: mod_base = OTHER; note = 2'-Omethyluridine
  modified_base 56: mod_base = OTHER; note = 2'-Omethylcytosine
  modified_base 57: mod_base = OTHER; note = 2'-fluoroguanosine
  modified_base 59: mod_base = OTHER; note = 2'-Omethyladenosine
  modified_base 73: mod_base = OTHER; note = 2'-Omethyladenosine

SEQ ID NO: 6607 - RNA, 76 nt, synthetic construct; identical to SEQ ID NO: 3289
  source 1..76: mol_type = other RNA
  modified_base 1: mod_base = OTHER; note = 2'-Omethylguanosine
  modified_base 2: mod_base = OTHER; note = 2'-Omethylcytosine
  modified_base 3: mod_base = OTHER; note = 2'-Omethylcytosine
  modified_base 4: mod_base = OTHER; note = 2'-Omethyluridine
  modified_base 5: mod_base = OTHER; note = 2'-Omethylguanosine
  modified_base 6: mod_base = OTHER; note = 2'-Omethylguanosine
  modified_base 10: mod_base = OTHER; note = 2'-Omethylguanosine
  modified_base 11: mod_base = OTHER; note = 2'-Omethylcytosine
  modified_base 12: mod_base = OTHER; note = 2'-Omethyluridine
  modified_base 13: mod_base = OTHER; note = 2'-Omethylcytosine
  modified_base 14: mod_base = OTHER; note = 2'-Omethyladenosine
  modified_base 15: mod_base = OTHER; note = 2'-Omethylguanosine
  modified_base 16: mod_base = OTHER; note = 2'-Omethyluridine
  modified_base 18: mod_base = OTHER; note = 2'-Omethylguanosine
  modified_base 19: mod_base = OTHER; note = 2'-Omethylguanosine
  modified_base 22: mod_base = OTHER; note = 2'-Omethylguanosine
  modified_base 23: mod_base = OTHER; note = 2'-Omethyladenosine
  modified_base 24: mod_base = OTHER; note = 2'-Omethylguanosine
  modified_base 25: mod_base = OTHER; note = 2'-Omethylcytosine
  modified_base 41: mod_base = OTHER; note = 2'-Omethyluridine
  modified_base 42: mod_base = OTHER; note = 2'-Omethylguanosine
  modified_base 43: mod_base = OTHER; note = 2'-Omethyladenosine
  modified_base 44: mod_base = OTHER; note = 2'-Omethylguanosine
  modified_base 49: mod_base = OTHER; note = 2'-Omethylcytosine
  modified_base 50: mod_base = OTHER; note = 2'-Omethyladenosine
  modified_base 52: mod_base = OTHER; note = 2'-Omethylguanosine
  modified_base 54: mod_base = OTHER; note = 2'-Omethyluridine
  modified_base 55: mod_base = OTHER; note = Uridine phosphorothiorate
  modified_base 56: mod_base = OTHER; note = 2'-Omethylcytosine
  modified_base 57: mod_base = OTHER; note = 2'-fluoroadenosine
  modified_base 59: mod_base = OTHER; note = 2'-Omethylguanosine
  modified_base 61: mod_base = OTHER; note = 2'-Omethylcytosine
  modified_base 65: mod_base = OTHER; note = 2'-Omethylguanosine
  modified_base 73: mod_base = OTHER; note = 2'-Omethylguanosine

SEQ ID NO: 6608 - RNA, 76 nt, synthetic construct; identical to SEQ ID NO: 625
  source 1..76: mol_type = other RNA
  modified_base 1: mod_base = OTHER; note = 2'-Omethylguanosine
  modified_base 10: mod_base = OTHER; note = 2'-Omethylguanosine
  modified_base 13: mod_base = OTHER; note = 2'-Omethylcytosine
  modified_base 17: mod_base = OTHER; note = Guanosine phosphorothiorate
  modified_base 18: mod_base = OTHER; note = 2'-Omethylguanosine
  modified_base 19: mod_base = OTHER; note = Adenosine phosphorothiorate
  modified_base 20: mod_base = OTHER; note = 2'-Omethyluridine
  modified_base 25: mod_base = OTHER; note = 2'-Omethylcytosine
  modified_base 29: mod_base = OTHER; note = 2'-Omethylguanosine
  modified_base 33: mod_base = OTHER; note = 2'-fluorouridine
  modified_base 35: mod_base = OTHER; note = Cytosine phosphorothiorate
  modified_base 37: mod_base = OTHER; note = Adenosine phosphorothiorate
  modified_base 38: mod_base = OTHER; note = 2'-fluoroadenosine
  modified_base 43: mod_base = OTHER; note = 2'-Omethyladenosine
  modified_base 44: mod_base = OTHER; note = 2'-fluoroadenosine
  modified_base 46: mod_base = OTHER; note = Guanosine phosphorothiorate
  modified_base 50: mod_base = OTHER; note = 2'-Omethylcytosine
  modified_base 52: mod_base = OTHER; note = 2'-Omethylguanosine
  modified_base 54: mod_base = OTHER; note = Uridine phosphorothiorate
  modified_base 55: mod_base = OTHER; note = Uridine phosphorothiorate
  modified_base 56: mod_base = OTHER; note = 2'-Omethylcytosine
  modified_base 57: mod_base = OTHER; note = Guanosine phosphorothiorate
  modified_base 62: mod_base = OTHER; note = 2'-Omethylcytosine
  modified_base 63: mod_base = OTHER; note = 2'-fluorocytosine
  modified_base 65: mod_base = OTHER; note = 2'-Omethylguanosine
  modified_base 71: mod_base = OTHER; note = 2'-Omethyluridine
  modified_base 73: mod_base = OTHER; note = 2'-Omethylguanosine

SEQ ID NO: 6609 - RNA, 85 nt, synthetic construct; identical to SEQ ID NO: 3288
  source 1..85: mol_type = other RNA
  modified_base 1: mod_base = OTHER; note = 2'-Omethylcytosine
  modified_base 11: mod_base = OTHER; note = Cytosine phosphorothiorate
  modified_base 17: mod_base = OTHER; note = 2'-Omethylguanosine
  modified_base 44: mod_base = OTHER; note = 2'-Omethylguanosine
  modified_base 55: mod_base = OTHER; note = 2'-Omethylcytosine
  modified_base 57: mod_base = OTHER; note = 2'-Omethylcytosine
  modified_base 59: mod_base = OTHER; note = 2'-Omethyluridine
  modified_base 67: mod_base = OTHER; note = Adenosine phosphorothiorate
  modified_base 84: mod_base = OTHER; note = 2'-fluorocytosine phosphorothiorate

SEQ ID NO: 6610 - RNA, 76 nt, synthetic construct; identical to SEQ ID NO: 625
  source 1..76: mol_type = other RNA
  modified_base 3: mod_base = OTHER; note = 2'-Omethylcytosine phosphorothiorate
  modified_base 6: mod_base = OTHER; note = 2'-Omethylcytosine
  modified_base 8: mod_base = OTHER; note = Uridine phosphorothiorate
  modified_base 11: mod_base = OTHER; note = 2'-Omethylcytosine phosphorothiorate
  modified_base 12: mod_base = OTHER; note = 2'-Omethylguanosine
  modified_base 16: mod_base = OTHER; note = 2'-Omethyluridine phosphorothiorate
  modified_base 17: mod_base = OTHER; note = 2'-Omethylguanosine
  modified_base 20: mod_base = OTHER; note = 2'-Omethyluridine
  modified_base 23: mod_base = OTHER; note = 2'-Omethylcytosine
  modified_base 26: mod_base = OTHER; note = 2'-Omethyladenosine
  modified_base 30: mod_base = OTHER; note = 2'-fluoroguanosine
  modified_base 34: mod_base = OTHER; note = 2'-Omethyluridine
  modified_base 39: mod_base = OTHER; note = 2'-fluorouridine phosphorothiorate
  modified_base 40: mod_base = OTHER; note = 2'-fluorouridine phosphorothiorate
  modified_base 41: mod_base = OTHER; note = Cytosine phosphorothiorate
  modified_base 46: mod_base = OTHER; note = 2'-fluoroguanosine
  modified_base 52: mod_base = OTHER; note = 2'-Omethylguanosine
  modified_base 53: mod_base = OTHER; note = 2'-Omethylguanosine
  modified_base 58: mod_base = OTHER; note = Adenosine phosphorothiorate
  modified_base 59: mod_base = OTHER; note = 2'-Omethylguanosine phosphorothiorate
  modified_base 60: mod_base = OTHER; note = 2'-Omethyluridine
  modified_base 61: mod_base = OTHER; note = 2'-Omethylcytosine
  modified_base 63: mod_base = OTHER; note = Cytosine phosphorothiorate
  modified_base 64: mod_base = OTHER; note = 2'-Omethylguanosine
  modified_base 65: mod_base = OTHER; note = Guanosine phosphorothiorate
  modified_base 67: mod_base = OTHER; note = 2'-Omethylguanosine phosphorothiorate
  modified_base 68: mod_base = OTHER; note = 2'-fluoroguanosine phosphorothiorate
  modified_base 69: mod_base = OTHER; note = 2'-fluoroadenosine
  modified_base 70: mod_base = OTHER; note = 2'-fluoroguanosine
  modified_base 72: mod_base = OTHER; note = Cytosine phosphorothiorate
  modified_base 74: mod_base = OTHER; note = 2'-Omethylcytosine phosphorothiorate
  modified_base 75: mod_base = OTHER; note = 2'-fluorocytosine

SEQ ID NO: 6611 - RNA, 76 nt, synthetic construct; identical to SEQ ID NO: 625
  source 1..76: mol_type = other RNA
  modified_base 1: mod_base = OTHER; note = 2'-Omethylguanosine phosphorothiorate
  modified_base 2: mod_base = OTHER; note = 2'-Omethylguanosine
  modified_base 3: mod_base = OTHER; note = 2'-Omethylcytosine
  modified_base 4: mod_base = OTHER; note = 2'-Omethyluridine
  modified_base 5: mod_base = OTHER; note = 2'-Omethylcytosine
  modified_base 6: mod_base = OTHER; note = 2'-Omethylcytosine
  modified_base 10: mod_base = OTHER; note = 2'-Omethylguanosine
  modified_base 11: mod_base = OTHER; note = 2'-Omethylcytosine
  modified_base 12: mod_base = OTHER; note = 2'-Omethylguanosine
  modified_base 13: mod_base = OTHER; note = 2'-Omethylcytosine
  modified_base 14: mod_base = OTHER; note = 2'-Omethyladenosine
  modified_base 15: mod_base = OTHER; note = 2'-Omethyladenosine
  modified_base 16: mod_base = OTHER; note = 2'-Omethyluridine
  modified_base 17: mod_base = OTHER; note = 2'-Omethylguanosine
  modified_base 18: mod_base = OTHER; note = 2'-Omethylguanosine
  modified_base 19: mod_base = OTHER; note = 2'-Omethyladenosine
  modified_base 20: mod_base = OTHER; note = 2'-Omethyluridine
  modified_base 22: mod_base = OTHER; note = 2'-Omethylguanosine
  modified_base 23: mod_base = OTHER; note = 2'-Omethylcytosine
  modified_base 24: mod_base = OTHER; note = 2'-Omethylguanosine
  modified_base 25: mod_base = OTHER; note = 2'-Omethylcytosine
  modified_base 40: mod_base = OTHER; note = 2'-fluorouridine
  modified_base 41: mod_base = OTHER; note = 2'-fluorocytosine
  modified_base 42: mod_base = OTHER; note = 2'-fluoroadenosine
  modified_base 43: mod_base = OTHER; note = 2'-fluoroadenosine
  modified_base 44: mod_base = OTHER; note = 2'-Omethyladenosine
  modified_base 45: mod_base = OTHER; note = 2'-Omethylguanosine
  modified_base 46: mod_base = OTHER; note = 2'-Omethylguanosine
  modified_base 49: mod_base = OTHER; note = 2'-Omethylcytosine
  modified_base 50: mod_base = OTHER; note = 2'-Omethylcytosine
  modified_base 51: mod_base = OTHER; note = 2'-Omethylguanosine
  modified_base 52: mod_base = OTHER; note = 2'-Omethylguanosine
  modified_base 53: mod_base = OTHER; note = 2'-Omethylguanosine
  modified_base 54: mod_base = OTHER; note = Uridine phosphorothiorate
  modified_base 55: mod_base = OTHER; note = Uridine phosphorothiorate
  modified_base 56: mod_base = OTHER; note = Cytosine phosphorothiorate
  modified_base 57: mod_base = OTHER; note = Guanosine phosphorothiorate
  modified_base 61: mod_base = OTHER; note = 2'-Omethylcytosine
  modified_base 62: mod_base = OTHER; note = 2'-Omethylcytosine
  modified_base 63: mod_base = OTHER; note = 2'-fluorocytosine
  modified_base 64: mod_base = OTHER; note = 2'-Omethylguanosine
  modified_base 65: mod_base = OTHER; note = 2'-Omethylguanosine
  modified_base 66: mod_base = OTHER; note = 2'-Omethylcytosine
  modified_base 67: mod_base = OTHER; note = 2'-Omethylguanosine
  modified_base 68: mod_base = OTHER; note = 2'-Omethylguanosine
  modified_base 69: mod_base = OTHER; note = 2'-Omethyladenosine

SEQ ID NO: 6612 - RNA, 85 nt, synthetic construct; identical to SEQ ID NO: 3286
  source 1..85: mol_type = other RNA
  modified_base 1: mod_base = OTHER; note = 2'-Omethylcytosine
  modified_base 16: mod_base = OTHER; note = Guanosine phosphorothiorate
  modified_base 28: mod_base = OTHER; note = 2'-fluoroguanosine
  modified_base 34: mod_base = OTHER; note = 2'-fluorouridine
  modified_base 36: mod_base = OTHER; note = Guanosine phosphorothiorate
  modified_base 42: mod_base = OTHER; note = Adenosine phosphorothiorate
  modified_base 53: mod_base = OTHER; note = 2'-fluorouridine
  modified_base 65: mod_base = OTHER; note = Cytosine phosphorothiorate
  modified_base 83: mod_base = OTHER; note = Cytosine phosphorothiorate
  modified_base 84: mod_base = OTHER; note = 2'-fluorocytosine phosphorothiorate

SEQ ID NO: 6613 - RNA, 76 nt, synthetic construct; identical to SEQ ID NO: 625
  source 1..76: mol_type = other RNA
  modified_base 2: mod_base = OTHER; note = 2'-fluoroguanosine
  modified_base 6: mod_base = OTHER; note = 2'-Omethylcytosine
  modified_base 8: mod_base = OTHER; note = Uridine phosphorothiorate
  modified_base 10: mod_base = OTHER; note = 2'-Omethylguanosine
  modified_base 11: mod_base = OTHER; note = 2'-fluorocytosine
  modified_base 12: mod_base = OTHER; note = 2'-fluoroguanosine
  modified_base 14: mod_base = OTHER; note = 2'-Omethyladenosine
  modified_base 15: mod_base = OTHER; note = Adenosine phosphorothiorate
  modified_base 16: mod_base = OTHER; note = 2'-Omethyluridine
  modified_base 18: mod_base = OTHER; note = 2'-Omethylguanosine
  modified_base 20: mod_base = OTHER; note = Uridine phosphorothiorate
  modified_base 27: mod_base = OTHER; note = 2'-Omethyluridine
  modified_base 28: mod_base = OTHER; note = 2'-fluorouridine phosphorothiorate
  modified_base 29: mod_base = OTHER; note = 2'-fluoroguanosine
  modified_base 30: mod_base = OTHER; note = 2'-fluoroguanosine
  modified_base 38: mod_base = OTHER; note = 2'-Omethyladenosine
  modified_base 39: mod_base = OTHER; note = 2'-Omethyluridine
  modified_base 40: mod_base = OTHER; note = 2'-Omethyluridine
  modified_base 41: mod_base = OTHER; note = Cytosine phosphorothiorate
  modified_base 43: mod_base = OTHER; note = 2'-Omethyladenosine
  modified_base 44: mod_base = OTHER; note = Adenosine phosphorothiorate
  modified_base 45: mod_base = OTHER; note = 2'-fluoroguanosine phosphorothiorate
  modified_base 46: mod_base = OTHER; note = 2'-fluoroguanosine
  modified_base 47: mod_base = OTHER; note = 2'-Omethyluridine
  modified_base 50: mod_base = OTHER; note = 2'-fluorocytosine
  modified_base 53: mod_base = OTHER; note = 2'-Omethylguanosine
  modified_base 54: mod_base = OTHER; note = 2'-Omethyluridine
  modified_base 58: mod_base = OTHER; note = 2'-fluoroadenosine
  modified_base 61: mod_base = OTHER; note = 2'-Omethylcytosine
  modified_base 62: mod_base = OTHER; note = 2'-Omethylcytosine
  modified_base 64: mod_base = OTHER; note = 2'-fluoroguanosine
  modified_base 65: mod_base = OTHER; note = 2'-fluoroguanosine
  modified_base 68: mod_base = OTHER; note = 2'-fluoroguanosine phosphorothiorate
  modified_base 69: mod_base = OTHER; note = 2'-fluoroadenosine
  modified_base 70: mod_base = OTHER; note = Guanosine phosphorothiorate
  modified_base 73: mod_base = OTHER; note = 2'-fluoroguanosine
  modified_base 75: mod_base = OTHER; note = 2'-fluorocytosine

SEQ ID NO: 6614 - RNA, 76 nt, synthetic construct; identical to SEQ ID NO: 625
  source 1..76: mol_type = other RNA
  modified_base 1: mod_base = OTHER; note = 2'-Omethylguanosine
  modified_base 2: mod_base = OTHER; note = 2'-Omethylguanosine
  modified_base 3: mod_base = OTHER; note = 2'-Omethylcytosine
  modified_base 4: mod_base = OTHER; note = 2'-Omethyluridine
  modified_base 5: mod_base = OTHER; note = 2'-Omethylcytosine
  modified_base 6: mod_base = OTHER; note = 2'-Omethylcytosine
  modified_base 7: mod_base = OTHER; note = 2'-fluoroguanosine phosphorothiorate
  modified_base 10: mod_base = OTHER; note = 2'-Omethylguanosine
  modified_base 11: mod_base = OTHER; note = 2'-Omethylcytosine
  modified_base 12: mod_base = OTHER; note = 2'-Omethylguanosine
  modified_base 13: mod_base = OTHER; note = 2'-Omethylcytosine
  modified_base 14: mod_base = OTHER; note = 2'-fluoroadenosine phosphorothiorate
  modified_base 16: mod_base = OTHER; note = 2'-Omethyluridine
  modified_base 17: mod_base = OTHER; note = 2'-Omethylguanosine
  modified_base 18: mod_base = OTHER; note = 2'-fluoroguanosine phosphorothiorate
  modified_base 19: mod_base = OTHER; note = 2'-Omethyladenosine
  modified_base 21: mod_base = OTHER; note = 2'-fluoroadenosine phosphorothiorate
  modified_base 22: mod_base = OTHER; note = 2'-Omethylguanosine
  modified_base 23: mod_base = OTHER; note = 2'-Omethylcytosine
  modified_base 24: mod_base = OTHER; note = 2'-Omethylguanosine
  modified_base 25: mod_base = OTHER; note = 2'-Omethylcytosine
  modified_base 26: mod_base = OTHER; note = Adenosine phosphorothiorate
  modified_base 28: mod_base = OTHER; note = 2'-Omethyluridine phosphorothiorate
  modified_base 29: mod_base = OTHER; note = 2'-fluoroguanosine phosphorothiorate
  modified_base 31: mod_base = OTHER; note = 2'-Omethyladenosine phosphorothiorate
  modified_base 32: mod_base = OTHER; note = 2'-Omethylcytosine phosphorothiorate
  modified_base 33: mod_base = OTHER; note = 2'-fluorouridine
  modified_base 34: mod_base = OTHER; note = 2'-Omethyluridine phosphorothiorate
  modified_base 35: mod_base = OTHER; note = 2'-Omethylcytosine phosphorothiorate
  modified_base 36: mod_base = OTHER; note = 2'-Omethyladenosine phosphorothiorate
  modified_base 37: mod_base = OTHER; note = Adenosine phosphorothiorate
  modified_base 38: mod_base = OTHER; note = Adenosine phosphorothiorate
  modified_base 40: mod_base = OTHER; note = 2'-Omethyluridine
  modified_base 41: mod_base = OTHER; note = 2'-Omethylcytosine
  modified_base 42: mod_base = OTHER; note = Adenosine phosphorothiorate
  modified_base 44: mod_base = OTHER; note = 2'-Omethyladenosine
  modified_base 49: mod_base = OTHER; note = 2'-Omethylcytosine
  modified_base 50: mod_base = OTHER; note = 2'-Omethylcytosine
  modified_base 51: mod_base = OTHER; note = 2'-Omethylguanosine
  modified_base 53: mod_base = OTHER; note = Guanosine phosphorothiorate
  modified_base 55: mod_base = OTHER; note = Uridine phosphorothiorate
  modified_base 56: mod_base = OTHER; note = 2'-Omethylcytosine
  modified_base 57: mod_base = OTHER; note = 2'-fluoroguanosine phosphorothiorate
  modified_base 59: mod_base = OTHER; note = 2'-Omethylguanosine
  modified_base 61: mod_base = OTHER; note = 2'-Omethylcytosine phosphorothiorate
  modified_base 62: mod_base = OTHER; note = 2'-Omethylcytosine
  modified_base 63: mod_base = OTHER; note = 2'-fluorocytosine
  modified_base 64: mod_base = OTHER; note = 2'-Omethylguanosine phosphorothiorate
  modified_base 65: mod_base = OTHER; note = 2'-Omethylguanosine phosphorothiorate
  modified_base 66: mod_base = OTHER; note = 2'-Omethylcytosine
  modified_base 67: mod_base = OTHER; note = 2'-fluoroguanosine
  modified_base 68: mod_base = OTHER; note = 2'-Omethylguanosine phosphorothiorate
  modified_base 69: mod_base = OTHER; note = 2'-Omethyladenosine
  modified_base 72: mod_base = OTHER; note = 2'-fluorocytosine phosphorothiorate
  modified_base 73: mod_base = OTHER; note = 2'-Omethylguanosine
  modified_base 74: mod_base = OTHER; note = 2'-fluorocytosine phosphorothiorate
  modified_base 75: mod_base = OTHER; note = 2'-Omethylcytosine phosphorothiorate

SEQ ID NO: 6615 - DNA, 76 bp, synthetic construct; identical to SEQ ID NO: 1924
  source 1..76: mol_type = other DNA
  modified_base 1: mod_base = OTHER; note = 2'-Omethylguanosine phosphorothiorate
  modified_base 2: mod_base = OTHER; note = 2'-Omethylguanosine phosphorothiorate
  modified_base 24: mod_base = OTHER; note = Guanosine phosphorothiorate
  modified_base 25: mod_base = OTHER; note = 2'-O-(2-Methoxyethyl) 5-methylcytosine
  modified_base 38: mod_base = OTHER; note = Adenosine phosphorothiorate
  modified_base 74: mod_base = OTHER; note = Cytosine phosphorothiorate
  modified_base 75: mod_base = OTHER; note = 2'-Omethylcytosine phosphorothiorate
  modified_base 76: mod_base = OTHER; note = 2'-Omethyladenosine
  misc_feature 1..38: note = RNA
  misc_feature 39: note = DNA
  misc_feature 40..76: note = RNA

SEQ ID NO: 6616 - RNA, 76 nt, synthetic construct; identical to SEQ ID NO: 3490
  source 1..76: mol_type = other RNA
  modified_base 1: mod_base = OTHER; note = 2'-Omethylguanosine
  modified_base 2: mod_base = OTHER; note = 2'-Omethylguanosine
  modified_base 3: mod_base = OTHER; note = 2'-Omethylcytosine
  modified_base 4: mod_base = OTHER; note = 2'-Omethyluridine
  modified_base 5: mod_base = OTHER; note = 2'-Omethylcytosine
  modified_base 6: mod_base = OTHER; note = 2'-Omethylcytosine
  modified_base 14: mod_base = OTHER; note = 2'-Omethyladenosine
  modified_base 15: mod_base = OTHER; note = 2'-Omethyladenosine
  modified_base 16: mod_base = OTHER; note = 2'-Omethyluridine
  modified_base 17: mod_base = OTHER; note = 2'-Omethylguanosine
  modified_base 18: mod_base = OTHER; note = 2'-Omethylguanosine
  modified_base 20: mod_base = OTHER; note = 2'-Omethyluridine
  modified_base 25: mod_base = OTHER; note = 2'-Omethylcytosine
  modified_base 33: mod_base = OTHER; note = 2'-fluorouridine
  modified_base 35: mod_base = OTHER; note = Cytosine phosphorothiorate
  modified_base 37: mod_base = OTHER; note = Adenosine phosphorothiorate
  modified_base 38: mod_base = OTHER; note = Adenosine phosphorothiorate
  modified_base 41: mod_base = OTHER; note = 2'-Omethylcytosine
  modified_base 42: mod_base = OTHER; note = 2'-Omethyladenosine
  modified_base 43: mod_base = OTHER; note = 2'-Omethyladenosine
  modified_base 44: mod_base = OTHER; note = 2'-fluoroadenosine
  modified_base 49: mod_base = OTHER; note = 2'-Omethylguanosine
  modified_base 50: mod_base = OTHER; note = 2'-Omethylcytosine
  modified_base 52: mod_base = OTHER; note = 2'-Omethylguanosine
  modified_base 54: mod_base = OTHER; note = 2'-Omethyluridine
  modified_base 55: mod_base = OTHER; note = Uridine phosphorothiorate
  modified_base 56: mod_base = OTHER; note = 2'-Omethylcytosine
  modified_base 57: mod_base = OTHER; note = 2'-fluoroguanosine
  modified_base 59: mod_base = OTHER; note = 2'-Omethylguanosine
  modified_base 61: mod_base = OTHER; note = 2'-Omethylcytosine
  modified_base 65: mod_base = OTHER; note = 2'-Omethylcytosine
  modified_base 73: mod_base = OTHER; note = 2'-Omethylguanosine

SEQ ID NO: 6617 - RNA, 75 nt, synthetic construct; identical to SEQ ID NO: 3311
  source 1..75: mol_type = other RNA
  modified_base 1: mod_base = OTHER; note = 2'-Omethylguanosine phosphorothiorate
  modified_base 2: mod_base = OTHER; note = 2'-Omethylguanosine phosphorothiorate
  modified_base 10: mod_base = OTHER; note = 2'-fluoroguanosine
  modified_base 11: mod_base = OTHER; note = 2'-Omethyluridine
  modified_base 20: mod_base = OTHER; note = 2'-Omethyladenosine phosphorothiorate
  modified_base 21: mod_base = OTHER; note = 2'-fluoroadenosine
  modified_base 22: mod_base = OTHER; note = 2'-fluoroguanosine
  modified_base 23: mod_base = OTHER; note = 2'-fluorocytosine
  modified_base 24: mod_base = OTHER; note = Adenosine phosphorothiorate
  modified_base 32: mod_base = OTHER; note = 2'-Omethylcytosine phosphorothiorate
  modified_base 33: mod_base = OTHER; note = 2'-fluorouridine
  modified_base 37: mod_base = OTHER; note = 2'-Omethyladenosine phosphorothiorate
  modified_base 55: mod_base = OTHER; note = 2'-fluorocytosine
  modified_base 64: mod_base = OTHER; note = 2'-fluoroguanosine
  modified_base 65: mod_base = OTHER; note = 2'-fluorouridine
  modified_base 66: mod_base = OTHER; note = 2'-fluoroguanosine
  modified_base 67: mod_base = OTHER; note = Guanosine phosphorothiorate
  modified_base 73: mod_base = OTHER; note = Cytosine phosphorothiorate
  modified_base 74: mod_base = OTHER; note = 2'-Omethylcytosine

SEQ ID NO: 6618 - RNA, 76 nt, synthetic construct; identical to SEQ ID NO: 625
  source 1..76: mol_type = other RNA
  modified_base 1: mod_base = OTHER; note = 2'-Omethylguanosine phosphorothiorate
  modified_base 2: mod_base = OTHER; note = 2'-Omethylguanosine
  modified_base 3: mod_base = OTHER; note = 2'-Omethylcytosine
  modified_base 4: mod_base = OTHER; note = 2'-Omethyluridine
  modified_base 5: mod_base = OTHER; note = 2'-Omethylcytosine
  modified_base 6: mod_base = OTHER; note = 2'-Omethylcytosine
  modified_base 10: mod_base = OTHER; note = 2'-Omethylguanosine
  modified_base 11: mod_base = OTHER; note = 2'-Omethylcytosine
  modified_base 12: mod_base = OTHER; note = 2'-Omethylguanosine
  modified_base 13: mod_base = OTHER; note = 2'-Omethylcytosine
  modified_base 22: mod_base = OTHER; note = 2'-Omethylguanosine
  modified_base 23: mod_base = OTHER; note = 2'-Omethylcytosine
  modified_base 24: mod_base = OTHER; note = 2'-Omethylguanosine
  modified_base 25: mod_base = OTHER; note = 2'-Omethylcytosine
  modified_base 40: mod_base = OTHER; note = 2'-fluorouridine
  modified_base 41: mod_base = OTHER; note = 2'-fluorocytosine
  modified_base 42: mod_base = OTHER; note = 2'-fluoroadenosine
  modified_base 43: mod_base = OTHER; note = 2'-fluoroadenosine
  modified_base 49: mod_base = OTHER; note = 2'-Omethylcytosine
  modified_base 50: mod_base = OTHER; note = 2'-Omethylcytosine
  modified_base 51: mod_base = OTHER; note = 2'-Omethylguanosine
  modified_base 52: mod_base = OTHER; note = 2'-Omethylguanosine
  modified_base 53: mod_base = OTHER; note = 2'-Omethylguanosine
  modified_base 54: mod_base = OTHER; note = Uridine phosphorothiorate
  modified_base 55: mod_base = OTHER; note = Uridine phosphorothiorate
  modified_base 56: mod_base = OTHER; note = Cytosine phosphorothiorate
  modified_base 57: mod_base = OTHER; note = Guanosine phosphorothiorate
  modified_base 61: mod_base = OTHER; note = 2'-Omethylcytosine
  modified_base 62: mod_base = OTHER; note = 2'-Omethylcytosine
  modified_base 63: mod_base = OTHER; note = 2'-fluorocytosine
  modified_base 64: mod_base = OTHER; note = 2'-Omethylguanosine
  modified_base 65: mod_base = OTHER; note = 2'-Omethylguanosine
  modified_base 66: mod_base = OTHER; note = 2'-Omethylcytosine
  modified_base 67: mod_base = OTHER; note = 2'-Omethylguanosine
  modified_base 68: mod_base = OTHER; note = 2'-Omethylguanosine
  modified_base 69: mod_base = OTHER; note = 2'-Omethyladenosine

SEQ ID NO: 6619 - RNA, 76 nt, synthetic construct
  source 1..76: mol_type = other RNA
ggctccgtggcgcaatggatagcgcattggacttcaaattcaagggttcagggttcgagtccctgcggagtcgcca

SEQ ID NO: 6620 - RNA, 75 nt, synthetic construct; identical to SEQ ID NO: 3311
  source 1..75: mol_type = other RNA
  modified_base 1: mod_base = OTHER; note = 2'-Omethylguanosine phosphorothiorate
  modified_base 2: mod_base = OTHER; note = 2'-Omethylguanosine phosphorothiorate
  modified_base 12: mod_base = OTHER; note = Guanosine phosphorothiorate
  modified_base 14: mod_base = OTHER; note = 2'-Omethyladenosine
  modified_base 22: mod_base = OTHER; note = 2'-fluoroguanosine
  modified_base 24: mod_base = OTHER; note = 2'-fluoroadenosine
  modified_base 32: mod_base = OTHER; note = 2'-fluorocytosine
  modified_base 39: mod_base = OTHER; note = 2'-fluorouridine
  modified_base 42: mod_base = OTHER; note = 2'-fluoroadenosine
  modified_base 51: mod_base = OTHER; note = Adenosine phosphorothiorate
  modified_base 60: mod_base = OTHER; note = 2'-fluorocytosine
  modified_base 66: mod_base = OTHER; note = 2'-fluoroguanosine
  modified_base 73: mod_base = OTHER; note = Cytosine phosphorothiorate
  modified_base 74: mod_base = OTHER; note = 2'-Omethylcytosine

SEQ ID NO: 6621 - RNA, 85 nt, synthetic construct; identical to SEQ ID NO: 3286
  source 1..85: mol_type = other RNA
  modified_base 1: mod_base = OTHER; note = Cytosine phosphorothiorate
  modified_base 9: mod_base = OTHER; note = Guanosine phosphorothiorate
  modified_base 38: mod_base = OTHER; note = Uridine phosphorothiorate
  modified_base 55: mod_base = OTHER; note = 2'-Omethylcytosine
  modified_base 57: mod_base = OTHER; note = Cytosine phosphorothiorate
  modified_base 73: mod_base = OTHER; note = Adenosine phosphorothiorate

SEQ ID NO: 6622 - RNA, 85 nt, synthetic construct; identical to SEQ ID NO: 3297
  source 1..85: mol_type = other RNA
  modified_base 1: mod_base = OTHER; note = 2'-Omethylguanosine phosphorothiorate
  modified_base 2: mod_base = OTHER; note = 2'-Omethylcytosine phosphorothiorate
  modified_base 3: mod_base = OTHER; note = 2'-Omethyluridine
  modified_base 4: mod_base = OTHER; note = 2'-Omethylguanosine
  modified_base 5: mod_base = OTHER; note = 2'-Omethyluridine
  modified_base 6: mod_base = OTHER; note = 2'-Omethylguanosine
  modified_base 10: mod_base = OTHER; note = 2'-Omethylguanosine
  modified_base 11: mod_base = OTHER; note = 2'-Omethylcytosine
  modified_base 12: mod_base = OTHER; note = 2'-Omethylcytosine
  modified_base 13: mod_base = OTHER; note = 2'-Omethylguanosine
  modified_base 14: mod_base = OTHER; note = 2'-Omethyladenosine
  modified_base 15: mod_base = OTHER; note = 2'-fluoroguanosine
  modified_base 16: mod_base = OTHER; note = 2'-Omethyluridine
  modified_base 17: mod_base = OTHER; note = 2'-Omethylguanosine
  modified_base 18: mod_base = OTHER; note = 2'-Omethylguanosine
  modified_base 19: mod_base = OTHER; note = 2'-fluorouridine
  modified_base 20: mod_base = OTHER; note = 2'-Omethyluridine
  modified_base 33: mod_base = OTHER; note = 2'-fluorouridine
  modified_base 35: mod_base = OTHER; note = Cytosine phosphorothiorate
  modified_base 37: mod_base = OTHER; note = Adenosine phosphorothiorate
  modified_base 38: mod_base = OTHER; note = Adenosine phosphorothiorate
  modified_base 44: mod_base = OTHER; note = 2'-Omethyluridine
  modified_base 56: mod_base = OTHER; note = 2'-fluoroguanosine
  modified_base 57: mod_base = OTHER; note = 2'-fluorocytosine
  modified_base 65: mod_base = OTHER; note = 2'-Omethylcytosine
  modified_base 68: mod_base = OTHER; note = 2'-Omethyladenosine
  modified_base 70: mod_base = OTHER; note = 2'-Omethylcytosine
  modified_base 71: mod_base = OTHER; note = 2'-Omethylcytosine
  modified_base 72: mod_base = OTHER; note = 2'-fluorouridine
  modified_base 73: mod_base = OTHER; note = 2'-Omethylguanosine
  modified_base 74: mod_base = OTHER; note = 2'-Omethylcytosine
  modified_base 75: mod_base = OTHER; note = 2'-Omethyluridine
  modified_base 76: mod_base = OTHER; note = 2'-Omethylcytosine
  modified_base 77: mod_base = OTHER; note = 2'-Omethyladenosine
  modified_base 82: mod_base = OTHER; note = 2'-Omethylguanosine

SEQ ID NO: 6623 - RNA, 76 nt, synthetic construct; identical to SEQ ID NO: 625
  source 1..76: mol_type = other RNA
  modified_base 1: mod_base = OTHER; note = 2'-fluoroguanosine
  modified_base 2: mod_base = OTHER; note = 2'-fluoroguanosine
  modified_base 10: mod_base = OTHER; note = 2'-fluoroguanosine
  modified_base 11: mod_base = OTHER; note = 2'-fluorocytosine
  modified_base 12: mod_base = OTHER; note = Guanosine phosphorothiorate
  modified_base 15: mod_base = OTHER; note = 2'-fluoroadenosine
  modified_base 18: mod_base = OTHER; note = 2'-Omethylguanosine
  modified_base 20: mod_base = OTHER; note = 2'-fluorouridine
  modified_base 22: mod_base = OTHER; note = 2'-fluoroguanosine
  modified_base 27: mod_base = OTHER; note = 2'-fluorouridine
  modified_base 29: mod_base = OTHER; note = 2'-Omethylguanosine
  modified_base 30: mod_base = OTHER; note = Guanosine phosphorothiorate
  modified_base 34: mod_base = OTHER; note = 2'-fluorouridine
  modified_base 41: mod_base = OTHER; note = 2'-fluorocytosine
  modified_base 42: mod_base = OTHER; note = Adenosine phosphorothiorate
  modified_base 43: mod_base = OTHER; note = Adenosine phosphorothiorate
  modified_base 44: mod_base = OTHER; note = 2'-Omethyladenosine
  modified_base 45: mod_base = OTHER; note = 2'-Omethylguanosine
  modified_base 47: mod_base = OTHER; note = 2'-Omethyluridine
  modified_base 48: mod_base = OTHER; note = Uridine phosphorothiorate
  modified_base 49: mod_base = OTHER; note = 2'-Omethylcytosine
  modified_base 53: mod_base = OTHER; note = Guanosine phosphorothiorate
  modified_base 54: mod_base = OTHER; note = 2'-fluorouridine
  modified_base 56: mod_base = OTHER; note = 2'-Omethylcytosine
  modified_base 57: mod_base = OTHER; note = 2'-Omethylguanosine phosphorothiorate
  modified_base 58: mod_base = OTHER; note = 2'-fluoroadenosine phosphorothiorate
  modified_base 60: mod_base = OTHER; note = 2'-fluorouridine
  modified_base 62: mod_base = OTHER; note = 2'-Omethylcytosine
  modified_base 63: mod_base = OTHER; note = Cytosine phosphorothiorate
  modified_base 64: mod_base = OTHER; note = 2'-fluoroguanosine
  modified_base 67: mod_base = OTHER; note = Guanosine phosphorothiorate
  modified_base 71: mod_base = OTHER; note = Uridine phosphorothiorate
  modified_base 72: mod_base = OTHER; note = 2'-fluorocytosine
  modified_base 73: mod_base = OTHER; note = 2'-Omethylguanosine phosphorothiorate
  modified_base 75: mod_base = OTHER; note = 2'-fluorocytosine

SEQ ID NO: 6624 - RNA, 75 nt, synthetic construct; identical to SEQ ID NO: 3299
  source 1..75: mol_type = other RNA
  modified_base 1: mod_base = OTHER; note = 2'-Omethylcytosine phosphorothiorate
  modified_base 2: mod_base = OTHER; note = Cytosine phosphorothiorate
  modified_base 4: mod_base = OTHER; note = 2'-Omethylguanosine phosphorothiorate
  modified_base 8: mod_base = OTHER; note = 2'-Omethyladenosine phosphorothiorate
  modified_base 9: mod_base = OTHER; note = 2'-fluoroguanosine phosphorothiorate
  modified_base 13: mod_base = OTHER; note = Adenosine phosphorothiorate
  modified_base 20: mod_base = OTHER; note = 2'-fluoroadenosine
  modified_base 21: mod_base = OTHER; note = 2'-Omethylguanosine
  modified_base 25: mod_base = OTHER; note = 2'-fluoroadenosine
  modified_base 26: mod_base = OTHER; note = 2'-fluorouridine
  modified_base 34: mod_base = OTHER; note = 2'-Omethyluridine phosphorothiorate
  modified_base 37: mod_base = OTHER; note = 2'-Omethyladenosine phosphorothiorate
  modified_base 38: mod_base = OTHER; note = 2'-fluorouridine
  modified_base 46: mod_base = OTHER; note = 2'-fluorouridine
  modified_base 47: mod_base = OTHER; note = 2'-fluorocytosine
  modified_base 53: mod_base = OTHER; note = 2'-fluorouridine
  modified_base 57: mod_base = OTHER; note = 2'-fluoroadenosine
  modified_base 62: mod_base = OTHER; note = 2'-Omethylcytosine
  modified_base 73: mod_base = OTHER; note = 2'-Omethylcytosine
  modified_base 74: mod_base = OTHER; note = Cytosine phosphorothiorate

SEQ ID NO: 6625 - RNA, 76 nt, synthetic construct; identical to SEQ ID NO: 625
  source 1..76: mol_type = other RNA
  modified_base 1: mod_base = OTHER; note = 2'-Omethylguanosine phosphorothiorate
  modified_base 2: mod_base = OTHER; note = 2'-Omethylguanosine
  modified_base 17: mod_base = OTHER; note = 2'-Omethylguanosine
  modified_base 25: mod_base = OTHER; note = 2'-Omethylcytosine
  modified_base 33: mod_base = OTHER; note = 2'-fluorouridine
  modified_base 35: mod_base = OTHER; note = Cytosine phosphorothiorate
  modified_base 37: mod_base = OTHER; note = Adenosine phosphorothiorate
  modified_base 38: mod_base = OTHER; note = Adenosine phosphorothiorate
  modified_base 52: mod_base = OTHER; note = 2'-fluoroguanosine
  modified_base 56: mod_base = OTHER; note = 2'-Omethylcytosine
  modified_base 62: mod_base = OTHER; note = 2'-Omethylcytosine
  modified_base 68: mod_base = OTHER; note = 2'-Omethylguanosine
  modified_base 73: mod_base = OTHER; note = 2'-Omethylguanosine
  modified_base 75: mod_base = OTHER; note = 2'-fluorocytosine phosphorothiorate

SEQ ID NO: 6626 - RNA, 76 nt, synthetic construct; identical to SEQ ID NO: 625
  source 1..76: mol_type = other RNA
  modified_base 1: mod_base = OTHER; note = 2'-Omethylguanosine phosphorothiorate
  modified_base 2: mod_base = OTHER; note = 2'-Omethylguanosine phosphorothiorate
  modified_base 3: mod_base = OTHER; note = 2'-Omethylcytosine
  modified_base 4: mod_base = OTHER; note = 2'-Omethyluridine
  modified_base 5: mod_base = OTHER; note = 2'-Omethylcytosine
  modified_base 6: mod_base = OTHER; note = 2'-Omethylcytosine
  modified_base 22: mod_base = OTHER; note = 2'-Omethylguanosine
  modified_base 23: mod_base = OTHER; note = 2'-Omethylcytosine
  modified_base 24: mod_base = OTHER; note = 2'-Omethylguanosine
  modified_base 25: mod_base = OTHER; note = 2'-Omethylcytosine
  modified_base 48: mod_base = OTHER; note = 2'-fluorouridine
  modified_base 49: mod_base = OTHER; note = 2'-Omethylcytosine
  modified_base 50: mod_base = OTHER; note = 2'-Omethylcytosine
  modified_base 51: mod_base = OTHER; note = 2'-Omethylguanosine
  modified_base 52: mod_base = OTHER; note = 2'-Omethylguanosine
  modified_base 53: mod_base = OTHER; note = 2'-Omethylguanosine
  modified_base 54: mod_base = OTHER; note = 2'-Omethyluridine
  modified_base 61: mod_base = OTHER; note = 2'-Omethylcytosine
  modified_base 62: mod_base = OTHER; note = 2'-Omethylcytosine
  modified_base 63: mod_base = OTHER; note = 2'-fluorocytosine
  modified_base 64: mod_base = OTHER; note = 2'-Omethylguanosine
  modified_base 65: mod_base = OTHER; note = 2'-Omethylguanosine
  modified_base 66: mod_base = OTHER; note = 2'-Omethylcytosine
  modified_base 67: mod_base = OTHER; note = 2'-Omethylguanosine
  modified_base 68: mod_base = OTHER; note = 2'-Omethylguanosine
  modified_base 73: mod_base = OTHER; note = 2'-Omethylguanosine

SEQ ID NO: 6627 - RNA, 76 nt, synthetic construct; identical to SEQ ID NO: 625
  source 1..76: mol_type = other RNA
  modified_base 1: mod_base = OTHER; note = 2'-Omethylguanosine phosphorothiorate
  modified_base 2: mod_base = OTHER; note = 2'-Omethylguanosine
  modified_base 3: mod_base = OTHER; note = 2'-Omethylcytosine
  modified_base 4: mod_base = OTHER; note = 2'-Omethyluridine
  modified_base 5: mod_base = OTHER; note = 2'-Omethylcytosine
  modified_base 6: mod_base = OTHER; note = 2'-Omethylcytosine
  modified_base 22: mod_base = OTHER; note = 2'-Omethylguanosine
  modified_base 23: mod_base = OTHER; note = 2'-Omethylcytosine
  modified_base 24: mod_base = OTHER; note = 2'-Omethylguanosine
  modified_base 25: mod_base = OTHER; note = 2'-Omethylcytosine
  modified_base 40: mod_base = OTHER; note = 2'-fluorouridine
  modified_base 41: mod_base = OTHER; note = 2'-fluorocytosine
  modified_base 42: mod_base = OTHER; note = 2'-fluoroadenosine
  modified_base 43: mod_base = OTHER; note = 2'-fluoroadenosine
  modified_base 49: mod_base = OTHER; note = 2'-Omethylcytosine
  modified_base 50: mod_base = OTHER; note = 2'-Omethylcytosine
  modified_base 51: mod_base = OTHER; note = 2'-Omethylguanosine
  modified_base 52: mod_base = OTHER; note = 2'-Omethylguanosine
  modified_base 53: mod_base = OTHER; note = 2'-Omethylguanosine
  modified_base 61: mod_base = OTHER; note = 2'-Omethylcytosine
  modified_base 62: mod_base = OTHER; note = 2'-Omethylcytosine
  modified_base 63: mod_base = OTHER; note = 2'-fluorocytosine
  modified_base 64: mod_base = OTHER; note = 2'-Omethylguanosine
  modified_base 65: mod_base = OTHER; note = 2'-Omethylguanosine
  modified_base 66: mod_base = OTHER; note = 2'-Omethylcytosine
  modified_base 67: mod_base = OTHER; note = 2'-Omethylguanosine
  modified_base 68: mod_base = OTHER; note = 2'-Omethylguanosine
  modified_base 69: mod_base = OTHER; note = 2'-Omethyladenosine
  modified_base 71: mod_base = OTHER; note = 2'-Omethyluridine
  modified_base 72: mod_base = OTHER; note = 2'-Omethylcytosine

SEQ ID NO: 6628 - RNA, 76 nt, synthetic construct
  source 1..76: mol_type = other RNA
ggctctgtggcgcaatggatagcgcgttggacttcaaattcaaaggttgtgggttcgaatcccaccagagtcgcca

SEQ ID NO: 6629 - RNA, 85 nt, synthetic construct; identical to SEQ ID NO: 3310
  source 1..85: mol_type = other RNA
  modified_base 2: mod_base = OTHER; note = 2'-Omethylcytosine
  modified_base 29: mod_base = OTHER; note = 2'-fluoroguanosine
  modified_base 65: mod_base = OTHER; note = Cytosine phosphorothiorate
  modified_base 75: mod_base = OTHER; note = Uridine phosphorothiorate

SEQ ID NO: 6630 - DNA, 76 bp, synthetic construct; identical to SEQ ID NO: 1924
  source 1..76: mol_type = other DNA
  modified_base 1: mod_base = OTHER; note = 2'-Omethylguanosine phosphorothiorate
  modified_base 2: mod_base = OTHER; note = 2'-Omethylguanosine
  modified_base 24: mod_base = OTHER; note = Guanosine phosphorothiorate
  modified_base 30: mod_base = OTHER; note = Guanosine phosphorothiorate
  modified_base 31: mod_base = OTHER; note = 2'-Omethyladenosine
  modified_base 41: mod_base = OTHER; note = Cytosine phosphorothiorate
  modified_base 48: mod_base = OTHER; note = Uridine phosphorothiorate
  modified_base 49: mod_base = OTHER; note = 2'-O-(2-Methoxyethyl) 5-methylcytosine
  modified_base 50: mod_base = OTHER; note = Cytosine phosphorothiorate
  modified_base 51: mod_base = OTHER; note = 2'-O-(2-Methoxyethyl) guanosine
  modified_base 74: mod_base = OTHER; note = Cytosine phosphorothiorate
  modified_base 75: mod_base = OTHER; note = 2'-Omethylcytosine phosphorothiorate
  modified_base 76: mod_base = OTHER; note = 2'-Omethyladenosine
  misc_feature 1..24: note = RNA
  misc_feature 25: note = DNA
  misc_feature 26..41: note = RNA
  misc_feature 42: note = DNA
  misc_feature 43..76: note = RNA

SEQ ID NO: 6631 - RNA, 85 nt, synthetic construct; identical to SEQ ID NO: 3297
  source 1..85: mol_type = other RNA
  modified_base 1: mod_base = OTHER; note = 2'-Omethylguanosine phosphorothiorate
  modified_base 2: mod_base = OTHER; note = 2'-Omethylcytosine phosphorothiorate
  modified_base 3: mod_base = OTHER; note = 2'-Omethyluridine
  modified_base 4: mod_base = OTHER; note = 2'-Omethylguanosine
  modified_base 5: mod_base = OTHER; note = 2'-Omethyluridine
  modified_base 6: mod_base = OTHER; note = 2'-Omethylguanosine
  modified_base 10: mod_base = OTHER; note = 2'-Omethylguanosine
  modified_base 11: mod_base = OTHER; note = 2'-Omethylcytosine
  modified_base 12: mod_base = OTHER; note = 2'-Omethylcytosine
  modified_base 13: mod_base = OTHER; note = 2'-Omethylguanosine
  modified_base 16: mod_base = OTHER; note = 2'-Omethyluridine
  modified_base 17: mod_base = OTHER; note = 2'-Omethylguanosine
  modified_base 18: mod_base = OTHER; note = 2'-Omethylguanosine
  modified_base 33: mod_base = OTHER; note = 2'-fluorouridine
  modified_base 35: mod_base = OTHER; note = Cytosine phosphorothiorate
  modified_base 37: mod_base = OTHER; note = Adenosine phosphorothiorate
  modified_base 38: mod_base = OTHER; note = Adenosine phosphorothiorate
  modified_base 44: mod_base = OTHER; note = 2'-Omethyluridine
  modified_base 56: mod_base = OTHER; note = 2'-fluoroguanosine
  modified_base 57: mod_base = OTHER; note = 2'-fluorocytosine
  modified_base 58: mod_base = OTHER; note = 2'-Omethylguanosine
  modified_base 59: mod_base = OTHER; note = 2'-Omethylcytosine
  modified_base 60: mod_base = OTHER; note = 2'-Omethyladenosine
  modified_base 61: mod_base = OTHER; note = 2'-Omethylguanosine
  modified_base 62: mod_base = OTHER; note = 2'-Omethylguanosine
  modified_base 63: mod_base = OTHER; note = 2'-Omethyluridine
  modified_base 65: mod_base = OTHER; note = 2'-Omethylcytosine
  modified_base 68: mod_base = OTHER; note = 2'-Omethyladenosine
  modified_base 70: mod_base = OTHER; note = 2'-Omethylcytosine
  modified_base 71: mod_base = OTHER; note = 2'-Omethylcytosine
  modified_base 72: mod_base = OTHER; note = 2'-fluorouridine
  modified_base 73: mod_base = OTHER; note = 2'-Omethylguanosine
  modified_base 74: mod_base = OTHER; note = 2'-Omethylcytosine
  modified_base 75: mod_base = OTHER; note = 2'-Omethyluridine
  modified_base 76: mod_base = OTHER; note = 2'-Omethylcytosine
  modified_base 77: mod_base = OTHER; note = 2'-Omethyladenosine
  modified_base 82: mod_base = OTHER; note = 2'-Omethylguanosine

SEQ ID NO: 6632 - RNA, 74 nt, synthetic construct; identical to SEQ ID NO: 766
  source 1..74: mol_type = other RNA
  modified_base 1: mod_base = OTHER; note = 2'-Omethylguanosine phosphorothiorate
  modified_base 2: mod_base = OTHER; note = 2'-Omethylguanosine
  modified_base 3: mod_base = OTHER; note = 2'-Omethylcytosine
  modified_base 4: mod_base = OTHER; note = 2'-Omethyluridine
  modified_base 5: mod_base = OTHER; note = 2'-Omethylcytosine
  modified_base 6: mod_base = OTHER; note = 2'-Omethylcytosine
  modified_base 14: mod_base = OTHER; note = 2'-Omethyladenosine
  modified_base 15: mod_base = OTHER; note = 2'-Omethyladenosine
  modified_base 16: mod_base = OTHER; note = 2'-Omethyluridine
  modified_base 17: mod_base = OTHER; note = 2'-Omethylguanosine
  modified_base 18: mod_base = OTHER; note = 2'-Omethylguanosine
  modified_base 20: mod_base = OTHER; note = 2'-Omethyluridine
  modified_base 22: mod_base = OTHER; note = 2'-Omethylguanosine
  modified_base 23: mod_base = OTHER; note = 2'-Omethylcytosine
  modified_base 24: mod_base = OTHER; note = 2'-Omethylguanosine
  modified_base 25: mod_base = OTHER; note = 2'-Omethylcytosine
  modified_base 33: mod_base = OTHER; note = 2'-fluorouridine
  modified_base 35: mod_base = OTHER; note = Cytosine phosphorothiorate
  modified_base 37: mod_base = OTHER; note = Adenosine phosphorothiorate
  modified_base 38: mod_base = OTHER; note = Adenosine phosphorothiorate
  modified_base 41: mod_base = OTHER; note = 2'-Omethylcytosine
  modified_base 42: mod_base = OTHER; note = 2'-Omethyladenosine
  modified_base 43: mod_base = OTHER; note = 2'-Omethyladenosine
  modified_base 44: mod_base = OTHER; note = 2'-Omethyladenosine
  modified_base 49: mod_base = OTHER; note = 2'-Omethylcytosine
  modified_base 50: mod_base = OTHER; note = 2'-Omethylcytosine
  modified_base 52: mod_base = OTHER; note = 2'-Omethylguanosine
  modified_base 54: mod_base = OTHER; note = 2'-Omethyluridine
  modified_base 55: mod_base = OTHER; note = Uridine phosphorothiorate
  modified_base 56: mod_base = OTHER; note = 2'-Omethylcytosine
  modified_base 57: mod_base = OTHER; note = 2'-fluoroguanosine
  modified_base 59: mod_base = OTHER; note = 2'-Omethylguanosine
  modified_base 61: mod_base = OTHER; note = 2'-Omethylcytosine
  modified_base 62: mod_base = OTHER; note = 2'-Omethylcytosine
  modified_base 63: mod_base = OTHER; note = 2'-fluorocytosine
  modified_base 64: mod_base = OTHER; note = 2'-Omethylguanosine
  modified_base 65: mod_base = OTHER; note = 2'-Omethylguanosine
  modified_base 73: mod_base = OTHER; note = 2'-Omethylguanosine

SEQ ID NO: 6633 - RNA, 76 nt, synthetic construct; identical to SEQ ID NO: 3318
  source 1..76: mol_type = other RNA
  modified_base 1: mod_base = OTHER; note = 2'-Omethylcytosine
  modified_base 18: mod_base = OTHER; note = 2'-Omethylguanosine
  modified_base 19: mod_base = OTHER; note = 2'-Omethylguanosine
  modified_base 33: mod_base = OTHER; note = Uridine phosphorothiorate
  modified_base 34: mod_base = OTHER; note = 2'-Omethylcytosine
  modified_base 35: mod_base = OTHER; note = Uridine phosphorothiorate
  modified_base 36: mod_base = OTHER; note = Adenosine phosphorothiorate
  modified_base 37: mod_base = OTHER; note = Guanosine phosphorothiorate
  modified_base 38: mod_base = OTHER; note = Adenosine phosphorothiorate
  modified_base 50: mod_base = OTHER; note = 2'-Omethylcytosine
  modified_base 52: mod_base = OTHER; note = 2'-Omethylguanosine
  modified_base 73: mod_base = OTHER; note = 2'-Omethyladenosine

SEQ ID NO: 6634 - RNA, 73 nt, synthetic construct; identical to SEQ ID NO: 935
  source 1..73: mol_type = other RNA
  modified_base 1: mod_base = OTHER; note = 2'-Omethylguanosine phosphorothiorate
  modified_base 2: mod_base = OTHER; note = 2'-Omethylguanosine phosphorothiorate
  modified_base 52: mod_base = OTHER; note = Guanosine phosphorothiorate
  modified_base 73: mod_base = OTHER; note = 2'-Omethylguanosine

SEQ ID NO: 6635 - RNA, 76 nt, synthetic construct; identical to SEQ ID NO: 625
  source 1..76: mol_type = other RNA
  modified_base 1: mod_base = OTHER; note = 2'-Omethylguanosine phosphorothiorate
  modified_base 2: mod_base = OTHER; note = 2'-Omethylguanosine
  modified_base 3: mod_base = OTHER; note = 2'-Omethylcytosine
  modified_base 4: mod_base = OTHER; note = 2'-Omethyluridine
  modified_base 5: mod_base = OTHER; note = 2'-Omethylcytosine
  modified_base 6: mod_base = OTHER; note = 2'-Omethylcytosine
  modified_base 13: mod_base = OTHER; note = 2'-Omethylcytosine
  modified_base 16: mod_base = OTHER; note = 2'-Omethyluridine
  modified_base 17: mod_base = OTHER; note = 2'-Omethylguanosine
  modified_base 18: mod_base = OTHER; note = 2'-Omethylguanosine
  modified_base 33: mod_base = OTHER; note = 2'-fluorouridine
  modified_base 35: mod_base = OTHER; note = Cytosine phosphorothiorate
  modified_base 37: mod_base = OTHER; note = Adenosine phosphorothiorate
  modified_base 38: mod_base = OTHER; note = Adenosine phosphorothiorate
  modified_base 49: mod_base = OTHER; note = 2'-Omethylcytosine
  modified_base 50: mod_base = OTHER; note = 2'-Omethylcytosine
  modified_base 51: mod_base = OTHER; note = 2'-Omethylguanosine
  modified_base 52: mod_base = OTHER; note = 2'-fluoroguanosine
  modified_base 53: mod_base = OTHER; note = 2'-Omethylguanosine
  modified_base 54: mod_base = OTHER; note = 2'-Omethyluridine
  modified_base 56: mod_base = OTHER; note = 2'-Omethylcytosine
  modified_base 57: mod_base = OTHER; note = 2'-fluoroguanosine
  modified_base 59: mod_base = OTHER; note = 2'-Omethylguanosine
  modified_base 61: mod_base = OTHER; note = 2'-Omethylcytosine
  modified_base 62: mod_base = OTHER; note = 2'-Omethylcytosine
  modified_base 63: mod_base = OTHER; note = 2'-fluorocytosine
  modified_base 64: mod_base = OTHER; note = 2'-Omethylguanosine
  modified_base 65: mod_base = OTHER; note = 2'-Omethylguanosine
  modified_base 66: mod_base = OTHER; note = 2'-Omethylcytosine
  modified_base 67: mod_base = OTHER; note = 2'-Omethylguanosine
  modified_base 68: mod_base = OTHER; note = 2'-Omethylguanosine
  modified_base 69: mod_base = OTHER; note = 2'-Omethyladenosine
  modified_base 70: mod_base = OTHER; note = 2'-fluoroguanosine
  modified_base 73: mod_base = OTHER; note = 2'-Omethylguanosine
  modified_base 75: mod_base = OTHER; note = 2'-fluorocytosine phosphorothiorate

SEQ ID NO: 6636 - RNA, 76 nt, synthetic construct; identical to SEQ ID NO: 3318
  source 1..76: mol_type = other RNA
  modified_base 1: mod_base = OTHER; note = 2'-Omethylcytosine phosphorothiorate
  modified_base 2: mod_base = OTHER; note = 2'-Omethylcytosine
  modified_base 3: mod_base = OTHER; note = 2'-Omethyluridine
  modified_base 44: mod_base = OTHER; note = Adenosine phosphorothiorate
  modified_base 50: mod_base = OTHER; note = 2'-Omethylcytosine
  modified_base 75: mod_base = OTHER; note = Cytosine phosphorothiorate
  modified_base 76: mod_base = OTHER; note = 2'-Omethyladenosine

SEQ ID NO: 6637 - RNA, 86 nt, synthetic construct; identical to SEQ ID NO: 3290
  source 1..86: mol_type = other RNA
  modified_base 60: mod_base = OTHER; note = 2'-Omethyluridine
  modified_base 62: mod_base = OTHER; note = 2'-Omethylguanosine

SEQ ID NO: 6638 - RNA, 76 nt, synthetic construct; identical to SEQ ID NO: 625
  source 1..76: mol_type = other RNA
  modified_base 1: mod_base = OTHER; note = 2'-Omethylguanosine
  modified_base 2: mod_base = OTHER; note = 2'-fluoroguanosine
  modified_base 10: mod_base = OTHER; note = 2'-fluoroguanosine
  modified_base 11: mod_base = OTHER; note = 2'-fluorocytosine
  modified_base 12: mod_base = OTHER; note = 2'-Omethylguanosine
  modified_base 14: mod_base = OTHER; note = 2'-Omethyladenosine phosphorothiorate
  modified_base 18: mod_base = OTHER; note = Guanosine phosphorothiorate
  modified_base 19: mod_base = OTHER; note = Adenosine phosphorothiorate
  modified_base 21: mod_base = OTHER; note = Adenosine phosphorothiorate
  modified_base 22: mod_base = OTHER; note = 2'-Omethylguanosine
  modified_base 23: mod_base = OTHER; note = Cytosine phosphorothiorate
  modified_base 25: mod_base = OTHER; note = 2'-fluorocytosine
  modified_base 26: mod_base = OTHER; note = 2'-fluoroadenosine
  modified_base 28: mod_base = OTHER; note = Uridine phosphorothiorate
  modified_base 29: mod_base = OTHER; note = 2'-Omethylguanosine phosphorothiorate
  modified_base 30: mod_base = OTHER; note = 2'-Omethylguanosine
  modified_base 34: mod_base = OTHER; note = Uridine phosphorothiorate
  modified_base 38: mod_base = OTHER; note = 2'-fluoroadenosine
  modified_base 39: mod_base = OTHER; note = Uridine phosphorothiorate
  modified_base 40: mod_base = OTHER; note = Uridine phosphorothiorate
  modified_base 41: mod_base = OTHER; note = 2'-Omethylcytosine phosphorothiorate
  modified_base 42: mod_base = OTHER; note = 2'-Omethyladenosine
  modified_base 43: mod_base = OTHER; note = 2'-fluoroadenosine
  modified_base 44: mod_base = OTHER; note = 2'-Omethyladenosine
  modified_base 46: mod_base = OTHER; note = Guanosine phosphorothiorate
  modified_base 47: mod_base = OTHER; note = Uridine phosphorothiorate
  modified_base 48: mod_base = OTHER; note = 2'-fluorouridine
  modified_base 54: mod_base = OTHER; note = Uridine phosphorothiorate
  modified_base 56: mod_base = OTHER; note = 2'-fluorocytosine
  modified_base 59: mod_base = OTHER; note = 2'-fluoroguanosine phosphorothiorate
  modified_base 61: mod_base = OTHER; note = 2'-Omethylcytosine
  modified_base 63: mod_base = OTHER; note = 2'-fluorocytosine
  modified_base 65: mod_base = OTHER; note = 2'-fluoroguanosine
  modified_base 66: mod_base = OTHER; note = 2'-fluorocytosine
  modified_base 68: mod_base = OTHER; note = 2'-fluoroguanosine phosphorothiorate
  modified_base 69: mod_base = OTHER; note = 2'-Omethyladenosine
  modified_base 71: mod_base = OTHER; note = Uridine phosphorothiorate
  modified_base 72: mod_base = OTHER; note = 2'-fluorocytosine

SEQ ID NO: 6639 - RNA, 76 nt, synthetic construct; identical to SEQ ID NO: 625
  source 1..76: mol_type = other RNA
  modified_base 1: mod_base = OTHER; note = 2'-Omethylguanosine phosphorothiorate
  modified_base 2: mod_base = OTHER; note = 2'-Omethylguanosine
  modified_base 3: mod_base = OTHER; note = 2'-Omethylcytosine
  modified_base 10: mod_base = OTHER; note = 2'-Omethylguanosine
  modified_base 11: mod_base = OTHER; note = 2'-Omethylcytosine
  modified_base 12: mod_base = OTHER; note = 2'-Omethylguanosine
  modified_base 13: mod_base = OTHER; note = 2'-Omethylcytosine
  modified_base 14: mod_base = OTHER; note = 2'-Omethyladenosine
  modified_base 15: mod_base = OTHER; note = 2'-fluoroadenosine
  modified_base 16: mod_base = OTHER; note = 2'-Omethyluridine
  modified_base 17: mod_base = OTHER; note = 2'-Omethylguanosine
  modified_base 18: mod_base = OTHER; note = 2'-Omethylguanosine
  modified_base 19: mod_base = OTHER; note = 2'-fluoroadenosine
  modified_base 20: mod_base = OTHER; note = 2'-Omethyluridine
  modified_base 22: mod_base = OTHER; note = 2'-Omethylguanosine
  modified_base 23: mod_base = OTHER; note = 2'-Omethylcytosine
  modified_base 24: mod_base = OTHER; note = 2'-Omethylguanosine
  modified_base 25: mod_base = OTHER; note = 2'-Omethylcytosine
  modified_base 38: mod_base = OTHER; note = Adenosine phosphorothiorate
  modified_base 39: mod_base = OTHER; note = Uridine phosphorothiorate
  modified_base 40: mod_base = OTHER; note = 2'-fluorouridine
  modified_base 43: mod_base = OTHER; note = 2'-Omethyladenosine
  modified_base 44: mod_base = OTHER; note = 2'-Omethyladenosine
  modified_base 45: mod_base = OTHER; note = 2'-Omethylguanosine
  modified_base 46: mod_base = OTHER; note = 2'-fluoroguanosine
  modified_base 48: mod_base = OTHER; note = 2'-fluorouridine
  modified_base 49: mod_base = OTHER; note = 2'-Omethylcytosine
  modified_base 50: mod_base = OTHER; note = 2'-Omethylcytosine
  modified_base 54: mod_base = OTHER; note = 2'-Omethyluridine phosphorothiorate
  modified_base 55: mod_base = OTHER; note = Uridine phosphorothiorate
  modified_base 56: mod_base = OTHER; note = 2'-Omethylcytosine
  modified_base 57: mod_base = OTHER; note = 2'-fluoroguanosine
  modified_base 61: mod_base = OTHER; note = 2'-Omethylcytosine
  modified_base 62: mod_base = OTHER; note = 2'-Omethylcytosine
  modified_base 63: mod_base = OTHER; note = 2'-fluorocytosine
  modified_base 64: mod_base = OTHER; note = 2'-Omethylguanosine
  modified_base 65: mod_base = OTHER; note = 2'-Omethylguanosine
  modified_base 66: mod_base = OTHER; note = 2'-Omethylcytosine
  modified_base 67: mod_base = OTHER; note = 2'-Omethylguanosine
  modified_base 68: mod_base = OTHER; note = 2'-Omethylguanosine
  modified_base 69: mod_base = OTHER; note = 2'-fluoroadenosine

SEQ ID NO: 6640 - RNA, 85 nt, synthetic construct; identical to SEQ ID NO: 3297
  source 1..85: mol_type = other RNA
  modified_base 1: mod_base = OTHER; note = 2'-Omethylguanosine
  modified_base 19: mod_base = OTHER; note = 2'-Omethyluridine
  modified_base 20: mod_base = OTHER; note = 2'-Omethyluridine
  modified_base 22: mod_base = OTHER; note = 2'-Omethyladenosine
  modified_base 40: mod_base = OTHER; note = 2'-fluorocytosine
  modified_base 41: mod_base = OTHER; note = 2'-Omethylcytosine
  modified_base 42: mod_base = OTHER; note = 2'-Omethyladenosine
  modified_base 43: mod_base = OTHER; note = 2'-Omethyladenosine
  modified_base 82: mod_base = OTHER; note = 2'-Omethylguanosine

SEQ ID NO: 6641 - RNA, 75 nt, synthetic construct; identical to SEQ ID NO: 3311
  source 1..75: mol_type = other RNA
  modified_base 1: mod_base = OTHER; note = 2'-Omethylguanosine phosphorothiorate
  modified_base 2: mod_base = OTHER; note = 2'-Omethylguanosine phosphorothiorate
  modified_base 12: mod_base = OTHER; note = Guanosine phosphorothiorate
  modified_base 13: mod_base = OTHER; note = 2'-fluorouridine
  modified_base 22: mod_base = OTHER; note = 2'-fluoroguanosine
  modified_base 24: mod_base = OTHER; note = 2'-fluoroadenosine
  modified_base 40: mod_base = OTHER; note = Cytosine phosphorothiorate
  modified_base 41: mod_base = OTHER; note = 2'-fluorocytosine
  modified_base 59: mod_base = OTHER; note = 2'-fluorouridine
  modified_base 64: mod_base = OTHER; note = Guanosine phosphorothiorate
  modified_base 65: mod_base = OTHER; note = 2'-fluorouridine
  modified_base 74: mod_base = OTHER; note = Cytosine phosphorothiorate
  modified_base 75: mod_base = OTHER; note = 2'-fluoroadenosine

SEQ ID NO: 6642 - RNA, 76 nt, synthetic construct; identical to SEQ ID NO: 3289
  source 1..76: mol_type = other RNA
  modified_base 1: mod_base = OTHER; note = 2'-Omethylguanosine phosphorothiorate
  modified_base 2: mod_base = OTHER; note = 2'-Omethylcytosine
  modified_base 3: mod_base = OTHER; note = 2'-Omethylcytosine
  modified_base 4: mod_base = OTHER; note = 2'-Omethyluridine
  modified_base 5: mod_base = OTHER; note = 2'-Omethylguanosine
  modified_base 6: mod_base = OTHER; note = 2'-Omethylguanosine
  modified_base 49: mod_base = OTHER; note = 2'-Omethylcytosine
  modified_base 50: mod_base = OTHER; note = 2'-Omethyladenosine
  modified_base 51: mod_base = OTHER; note = 2'-Omethylguanosine
  modified_base 52: mod_base = OTHER; note = 2'-Omethylguanosine
  modified_base 53: mod_base = OTHER; note = 2'-Omethylguanosine
  modified_base 61: mod_base = OTHER; note = 2'-Omethylcytosine
  modified_base 62: mod_base = OTHER; note = 2'-Omethylcytosine
  modified_base 63: mod_base = OTHER; note = 2'-fluorocytosine
  modified_base 64: mod_base = OTHER; note = 2'-Omethyluridine
  modified_base 65: mod_base = OTHER; note = 2'-Omethylguanosine
  modified_base 66: mod_base = OTHER; note = 2'-Omethyluridine
  modified_base 67: mod_base = OTHER; note = 2'-Omethylcytosine
  modified_base 68: mod_base = OTHER; note = 2'-Omethylcytosine
  modified_base 69: mod_base = OTHER; note = 2'-fluoroadenosine
  modified_base 71: mod_base = OTHER; note = 2'-Omethylguanosine
  modified_base 72: mod_base = OTHER; note = 2'-Omethylcytosine

SEQ ID NO: 6643 - RNA, 86 nt, synthetic construct; identical to SEQ ID NO: 3290
  source 1..86: mol_type = other RNA
  modified_base 59: mod_base = OTHER; note = 2'-Omethylguanosine
  modified_base 62: mod_base = OTHER; note = 2'-Omethylguanosine

SEQ ID NO: 6644 - RNA, 75 nt, synthetic construct; identical to SEQ ID NO: 3311
  source 1..75: mol_type = other RNA
  modified_base 1: mod_base = OTHER; note = 2'-Omethylguanosine phosphorothiorate
  modified_base 2: mod_base = OTHER; note = 2'-fluoroguanosine phosphorothiorate
  modified_base 19: mod_base = OTHER; note = Uridine phosphorothiorate
  modified_base 25: mod_base = OTHER; note = 2'-fluorocytosine
  modified_base 30: mod_base = OTHER; note = 2'-fluoroguanosine
  modified_base 36: mod_base = OTHER; note = 2'-Omethyladenosine phosphorothiorate
  modified_base 40: mod_base = OTHER; note = 2'-fluorocytosine
  modified_base 44: mod_base = OTHER; note = 2'-fluorocytosine
  modified_base 48: mod_base = OTHER; note = 2'-fluorocytosine
  modified_base 58: mod_base = OTHER; note = 2'-Omethylguanosine
  modified_base 65: mod_base = OTHER; note = 2'-fluorouridine
  modified_base 69: mod_base = OTHER; note = Adenosine phosphorothiorate
  modified_base 72: mod_base = OTHER; note = 2'-fluorouridine

SEQ ID NO: 6645 - RNA, 86 nt, synthetic construct; identical to SEQ ID NO: 3290
  source 1..86: mol_type = other RNA
  modified_base 25: mod_base = OTHER; note = 2'-fluorocytosine

SEQ ID NO: 6646 - RNA, 85 nt, synthetic construct; identical to SEQ ID NO: 3297
  source 1..85: mol_type = other RNA
  modified_base 10: mod_base = OTHER; note = 2'-Omethylguanosine
  modified_base 11: mod_base = OTHER; note = 2'-Omethylcytosine
  modified_base 12: mod_base = OTHER; note = 2'-Omethylcytosine
  modified_base 13: mod_base = OTHER; note = 2'-Omethylguanosine
  modified_base 82: mod_base = OTHER; note = 2'-Omethylguanosine

SEQ ID NO: 6647 - RNA, 75 nt, synthetic construct; identical to SEQ ID NO: 1045
  source 1..75: mol_type = other RNA
  modified_base 1: mod_base = OTHER; note = 2'-Omethylguanosine phosphorothiorate
  modified_base 2: mod_base = OTHER; note = 2'-Omethylguanosine phosphorothiorate
  modified_base 3: mod_base = OTHER; note = 2'-Omethyluridine
  modified_base 4: mod_base = OTHER; note = 2'-Omethyluridine
  modified_base 5: mod_base = OTHER; note = 2'-Omethylcytosine
  modified_base 6: mod_base = OTHER; note = 2'-Omethylcytosine
  modified_base 10: mod_base = OTHER; note = 2'-Omethylguanosine
  modified_base 11: mod_base = OTHER; note = 2'-Omethyluridine
  modified_base 12: mod_base = OTHER; note = 2'-Omethylguanosine
  modified_base 13: mod_base = OTHER; note = 2'-Omethyluridine
  modified_base 17: mod_base = OTHER; note = 2'-Omethylguanosine
  modified_base 18: mod_base = OTHER; note = 2'-Omethylguanosine
  modified_base 22: mod_base = OTHER; note = 2'-Omethylguanosine
  modified_base 23: mod_base = OTHER; note = 2'-Omethylcytosine
  modified_base 24: mod_base = OTHER; note = 2'-Omethyladenosine
  modified_base 25: mod_base = OTHER; note = 2'-Omethylcytosine
  modified_base 33: mod_base = OTHER; note = 2'-fluorouridine
  modified_base 35: mod_base = OTHER; note = Uridine phosphorothiorate
  modified_base 37: mod_base = OTHER; note = Adenosine phosphorothiorate
  modified_base 38: mod_base = OTHER; note = Adenosine phosphorothiorate
  modified_base 41: mod_base = OTHER; note = 2'-fluorocytosine
  modified_base 42: mod_base = OTHER; note = 2'-Omethyladenosine
  modified_base 43: mod_base = OTHER; note = 2'-Omethylguanosine
  modified_base 44: mod_base = OTHER; note = 2'-fluorocytosine
  modified_base 48: mod_base = OTHER; note = 2'-Omethylcytosine
  modified_base 49: mod_base = OTHER; note = 2'-Omethylcytosine
  modified_base 50: mod_base = OTHER; note = 2'-Omethylguanosine
  modified_base 51: mod_base = OTHER; note = 2'-Omethyladenosine
  modified_base 52: mod_base = OTHER; note = 2'-Omethylguanosine
  modified_base 53: mod_base = OTHER; note = Uridine phosphorothiorate
  modified_base 54: mod_base = OTHER; note = Uridine phosphorothiorate
  modified_base 60: mod_base = OTHER; note = 2'-Omethylcytosine
  modified_base 61: mod_base = OTHER; note = 2'-Omethyluridine
  modified_base 62: mod_base = OTHER; note = 2'-fluorocytosine
  modified_base 63: mod_base = OTHER; note = 2'-Omethylguanosine
  modified_base 64: mod_base = OTHER; note = 2'-Omethylguanosine
  modified_base 65: mod_base = OTHER; note = 2'-Omethyluridine
  modified_base 66: mod_base = OTHER; note = 2'-Omethylguanosine
  modified_base 67: mod_base = OTHER; note = 2'-Omethylguanosine
  modified_base 72: mod_base = OTHER; note = 2'-Omethyluridine

SEQ ID NO: 6648 - RNA, 74 nt, synthetic construct; identical to SEQ ID NO: 766
  source 1..74: mol_type = other RNA
  modified_base 1: mod_base = OTHER; note = 2'-Omethylguanosine phosphorothiorate
  modified_base 2: mod_base = OTHER; note = 2'-Omethylguanosine
  modified_base 3: mod_base = OTHER; note = 2'-Omethylcytosine
  modified_base 4: mod_base = OTHER; note = 2'-Omethyluridine
  modified_base 5: mod_base = OTHER; note = 2'-Omethylcytosine
  modified_base 6: mod_base = OTHER; note = 2'-Omethylcytosine
  modified_base 10: mod_base = OTHER; note = 2'-Omethylguanosine
  modified_base 11: mod_base = OTHER; note = 2'-Omethylcytosine
  modified_base 12: mod_base = OTHER; note = 2'-Omethylguanosine
  modified_base 13: mod_base = OTHER; note = 2'-Omethylcytosine
  modified_base 14: mod_base = OTHER; note = 2'-Omethyladenosine
  modified_base 15: mod_base = OTHER; note = 2'-Omethyladenosine
  modified_base 16: mod_base = OTHER; note = 2'-Omethyluridine
  modified_base 17: mod_base = OTHER; note = 2'-Omethylguanosine
  modified_base 18: mod_base = OTHER; note = 2'-Omethylguanosine
  modified_base 20: mod_base = OTHER; note = 2'-Omethyluridine
  modified_base 22: mod_base = OTHER; note = 2'-Omethylguanosine
  modified_base 23: mod_base = OTHER; note = 2'-Omethylcytosine
  modified_base 24: mod_base = OTHER; note = 2'-Omethylguanosine
  modified_base 25: mod_base = OTHER; note = 2'-Omethylcytosine
  modified_base 33: mod_base = OTHER; note = 2'-fluorouridine
  modified_base 35: mod_base = OTHER; note = Cytosine phosphorothiorate
  modified_base 37: mod_base = OTHER; note = Adenosine phosphorothiorate
  modified_base 38: mod_base = OTHER; note = Adenosine phosphorothiorate
  modified_base 41: mod_base = OTHER; note = 2'-fluorocytosine
  modified_base 42: mod_base = OTHER; note = 2'-Omethyladenosine
  modified_base 43: mod_base = OTHER; note = 2'-Omethyladenosine
  modified_base 44: mod_base = OTHER; note = 2'-fluoroadenosine
  modified_base 49: mod_base = OTHER; note = 2'-Omethylcytosine
  modified_base 50: mod_base = OTHER; note = 2'-Omethylcytosine
  modified_base 52: mod_base = OTHER; note = 2'-Omethylguanosine
  modified_base 54: mod_base = OTHER; note = 2'-Omethyluridine
  modified_base 55: mod_base = OTHER; note = Uridine phosphorothiorate
  modified_base 56: mod_base = OTHER; note = 2'-Omethylcytosine
  modified_base 57: mod_base = OTHER; note = 2'-fluoroguanosine
  modified_base 59: mod_base = OTHER; note = 2'-Omethylguanosine
  modified_base 61: mod_base = OTHER; note = 2'-Omethylcytosine
  modified_base 65: mod_base = OTHER; note = 2'-Omethylguanosine
  modified_base 73: mod_base = OTHER; note = 2'-Omethylguanosine

SEQ ID NO: 6649 - RNA, 85 nt, synthetic construct; identical to SEQ ID NO: 3317
  source 1..85: mol_type = other RNA
  modified_base 1: mod_base = OTHER; note = 2'-Omethylguanosine phosphorothiorate
  modified_base 2: mod_base = OTHER; note = 2'-Omethylcytosine
  modified_base 3: mod_base = OTHER; note = 2'-Omethyluridine phosphorothiorate
  modified_base 4: mod_base = OTHER; note = Guanosine phosphorothiorate
  modified_base 15: mod_base = OTHER; note = 2'-Omethylguanosine phosphorothiorate
  modified_base 19: mod_base = OTHER; note = Uridine phosphorothiorate
  modified_base 20: mod_base = OTHER; note = Uridine phosphorothiorate
  modified_base 25: mod_base = OTHER; note = 2'-fluorocytosine phosphorothiorate
  modified_base 26: mod_base = OTHER; note = 2'-fluoroguanosine
  modified_base 35: mod_base = OTHER; note = Uridine phosphorothiorate
  modified_base 37: mod_base = OTHER; note = 2'-fluoroadenosine phosphorothiorate
  modified_base 47: mod_base = OTHER; note = 2'-Omethylguanosine
  modified_base 53: mod_base = OTHER; note = 2'-Omethylcytosine phosphorothiorate
  modified_base 57: mod_base = OTHER; note = 2'-fluorocytosine
  modified_base 58: mod_base = OTHER; note = 2'-fluoroguanosine
  modified_base 59: mod_base = OTHER; note = 2'-Omethylcytosine
  modified_base 61: mod_base = OTHER; note = 2'-Omethylguanosine
  modified_base 71: mod_base = OTHER; note = Cytosine phosphorothiorate
  modified_base 80: mod_base = OTHER; note = 2'-fluoroguanosine phosphorothiorate
  modified_base 81: mod_base = OTHER; note = 2'-fluorocytosine
  modified_base 84: mod_base = OTHER; note = 2'-Omethylcytosine phosphorothiorate

SEQ ID NO: 6650 - RNA, 86 nt, synthetic construct; identical to SEQ ID NO: 3290
  source 1..86: mol_type = other RNA
  modified_base 1: mod_base = OTHER; note = 2'-Omethyladenosine
  modified_base 2: mod_base = OTHER; note = 2'-Omethylcytosine
  modified_base 3: mod_base = OTHER; note = 2'-Omethylcytosine
  modified_base 4: mod_base = OTHER; note = 2'-Omethyladenosine
  modified_base 5: mod_base = OTHER; note = 2'-Omethylguanosine
  modified_base 6: mod_base = OTHER; note = 2'-Omethylguanosine
  modified_base 10: mod_base = OTHER; note = 2'-Omethylguanosine
  modified_base 13: mod_base = OTHER; note = 2'-Omethylguanosine
  modified_base 17: mod_base = OTHER; note = Guanosine phosphorothiorate
  modified_base 18: mod_base = OTHER; note = 2'-Omethylguanosine
  modified_base 19: mod_base = OTHER; note = Uridine phosphorothiorate
  modified_base 20: mod_base = OTHER; note = 2'-Omethyluridine
  modified_base 25: mod_base = OTHER; note = 2'-Omethylcytosine
  modified_base 29: mod_base = OTHER; note = 2'-Omethylguanosine
  modified_base 33: mod_base = OTHER; note = 2'-fluorouridine
  modified_base 35: mod_base = OTHER; note = Cytosine phosphorothiorate
  modified_base 37: mod_base = OTHER; note = Guanosine phosphorothiorate
  modified_base 38: mod_base = OTHER; note = Adenosine phosphorothiorate
  modified_base 41: mod_base = OTHER; note = 2'-fluorocytosine phosphorothiorate
  modified_base 43: mod_base = OTHER; note = 2'-Omethyladenosine
  modified_base 44: mod_base = OTHER; note = 2'-fluorouridine
  modified_base 57: mod_base = OTHER; note = Guanosine phosphorothiorate
  modified_base 60: mod_base = OTHER; note = 2'-Omethyluridine
  modified_base 62: mod_base = OTHER; note = 2'-Omethylguanosine
  modified_base 64: mod_base = OTHER; note = Uridine phosphorothiorate
  modified_base 65: mod_base = OTHER; note = Uridine phosphorothiorate
  modified_base 66: mod_base = OTHER; note = 2'-Omethylcytosine
  modified_base 67: mod_base = OTHER; note = Guanosine phosphorothiorate
  modified_base 72: mod_base = OTHER; note = 2'-Omethylcytosine
  modified_base 73: mod_base = OTHER; note = 2'-fluorocytosine
  modified_base 75: mod_base = OTHER; note = 2'-Omethylcytosine
  modified_base 81: mod_base = OTHER; note = 2'-Omethylguanosine
  modified_base 83: mod_base = OTHER; note = 2'-Omethyladenosine

SEQ ID NO: 6651 - RNA, 76 nt, synthetic construct; identical to SEQ ID NO: 625
  source 1..76: mol_type = other RNA
  modified_base 1: mod_base = OTHER; note = 2'-Omethylguanosine
  modified_base 2: mod_base = OTHER; note = 2'-fluoroguanosine
  modified_base 4: mod_base = OTHER; note = 2'-fluorouridine
  modified_base 5: mod_base = OTHER; note = Cytosine phosphorothiorate
  modified_base 11: mod_base = OTHER; note = 2'-Omethylcytosine
  modified_base 15: mod_base = OTHER; note = Adenosine phosphorothiorate
  modified_base 16: mod_base = OTHER; note = 2'-Omethyluridine
  modified_base 18: mod_base = OTHER; note = 2'-fluoroguanosine
  modified_base 19: mod_base = OTHER; note = Adenosine phosphorothiorate
  modified_base 22: mod_base = OTHER; note = 2'-Omethylguanosine
  modified_base 26: mod_base = OTHER; note = 2'-Omethyladenosine
  modified_base 27: mod_base = OTHER; note = Uridine phosphorothiorate
  modified_base 32: mod_base = OTHER; note = 2'-fluorocytosine
  modified_base 34: mod_base = OTHER; note = Uridine phosphorothiorate
  modified_base 38: mod_base = OTHER; note = 2'-fluoroadenosine
  modified_base 39: mod_base = OTHER; note = Uridine phosphorothiorate
  modified_base 40: mod_base = OTHER; note = 2'-fluorouridine
  modified_base 42: mod_base = OTHER; note = Adenosine phosphorothiorate
  modified_base 43: mod_base = OTHER; note = 2'-Omethyladenosine
  modified_base 44: mod_base = OTHER; note = Adenosine phosphorothiorate
  modified_base 56: mod_base = OTHER; note = 2'-fluorocytosine
  modified_base 58: mod_base = OTHER; note = 2'-fluoroadenosine
  modified_base 59: mod_base = OTHER; note = 2'-Omethylguanosine
  modified_base 60: mod_base = OTHER; note = 2'-Omethyluridine
  modified_base 61: mod_base = OTHER; note = 2'-Omethylcytosine
  modified_base 67: mod_base = OTHER; note = 2'-fluoroguanosine
  modified_base 70: mod_base = OTHER; note = 2'-Omethylguanosine phosphorothiorate
  modified_base 71: mod_base = OTHER; note = 2'-Omethyluridine
  modified_base 72: mod_base = OTHER; note = 2'-fluorocytosine
  modified_base 73: mod_base = OTHER; note = 2'-fluoroguanosine
  modified_base 76: mod_base = OTHER; note = 2'-fluoroadenosine

SEQ ID NO: 6652 - RNA, 76 nt, synthetic construct; identical to SEQ ID NO: 625
  source 1..76: mol_type = other RNA
  modified_base 2: mod_base = OTHER; note = Guanosine phosphorothiorate
  modified_base 3: mod_base = OTHER; note = 2'-Omethylcytosine phosphorothiorate
  modified_base 4: mod_base = OTHER; note = 2'-Omethyluridine
  modified_base 6: mod_base = OTHER; note = 2'-Omethylcytosine
  modified_base 10: mod_base = OTHER; note = Guanosine phosphorothiorate
  modified_base 11: mod_base = OTHER; note = 2'-Omethylcytosine
  modified_base 13: mod_base = OTHER; note = 2'-Omethylcytosine
  modified_base 14: mod_base = OTHER; note = 2'-fluoroadenosine
  modified_base 15: mod_base = OTHER; note = 2'-fluoroadenosine
  modified_base 22: mod_base = OTHER; note = 2'-fluoroguanosine
  modified_base 23: mod_base = OTHER; note = 2'-Omethylcytosine phosphorothiorate
  modified_base 24: mod_base = OTHER; note = 2'-fluoroguanosine
  modified_base 27: mod_base = OTHER; note = Uridine phosphorothiorate
  modified_base 28: mod_base = OTHER; note = 2'-fluorouridine
  modified_base 31: mod_base = OTHER; note = 2'-Omethyladenosine
  modified_base 32: mod_base = OTHER; note = 2'-fluorocytosine
  modified_base 34: mod_base = OTHER; note = 2'-fluorouridine
  modified_base 36: mod_base = OTHER; note = Adenosine phosphorothiorate
  modified_base 39: mod_base = OTHER; note = 2'-fluorouridine phosphorothiorate
  modified_base 41: mod_base = OTHER; note = 2'-Omethylcytosine
  modified_base 43: mod_base = OTHER; note = 2'-Omethyladenosine phosphorothiorate
  modified_base 46: mod_base = OTHER; note = 2'-fluoroguanosine
  modified_base 47: mod_base = OTHER; note = 2'-Omethyluridine
  modified_base 49: mod_base = OTHER; note = 2'-Omethylcytosine
  modified_base 57: mod_base = OTHER; note = Guanosine phosphorothiorate
  modified_base 58: mod_base = OTHER; note = 2'-fluoroadenosine
  modified_base 60: mod_base = OTHER; note = 2'-fluorouridine
  modified_base 61: mod_base = OTHER; note = Cytosine phosphorothiorate
  modified_base 65: mod_base = OTHER; note = Guanosine phosphorothiorate
  modified_base 66: mod_base = OTHER; note = 2'-Omethylcytosine
  modified_base 67: mod_base = OTHER; note = 2'-fluoroguanosine phosphorothiorate
  modified_base 71: mod_base = OTHER; note = 2'-Omethyluridine
  modified_base 73: mod_base = OTHER; note = 2'-Omethylguanosine phosphorothiorate
  modified_base 74: mod_base = OTHER; note = 2'-fluorocytosine

SEQ ID NO: 6653 - RNA, 75 nt, synthetic construct; identical to SEQ ID NO: 3306
  source 1..75: mol_type = other RNA
  modified_base 1: mod_base = OTHER; note = 2'-Omethylguanosine
  modified_base 48: mod_base = OTHER; note = 2'-Omethylguanosine
  modified_base 49: mod_base = OTHER; note = 2'-Omethylcytosine
  modified_base 50: mod_base = OTHER; note = 2'-Omethylguanosine
  modified_base 51: mod_base = OTHER; note = 2'-Omethyluridine
  modified_base 52: mod_base = OTHER; note = 2'-Omethylguanosine
  modified_base 60: mod_base = OTHER; note = 2'-Omethylcytosine
  modified_base 61: mod_base = OTHER; note = 2'-Omethyladenosine
  modified_base 62: mod_base = OTHER; note = 2'-fluorocytosine
  modified_base 63: mod_base = OTHER; note = 2'-Omethylguanosine
  modified_base 64: mod_base = OTHER; note = 2'-Omethyluridine
  modified_base 72: mod_base = OTHER; note = 2'-Omethyladenosine

SEQ ID NO: 6654 - RNA, 76 nt, synthetic construct; identical to SEQ ID NO: 625
  source 1..76: mol_type = other RNA
  modified_base 1: mod_base = OTHER; note = 2'-Omethylguanosine
  modified_base 10: mod_base = OTHER; note = 2'-Omethylguanosine
  modified_base 13: mod_base = OTHER; note = 2'-Omethylcytosine
  modified_base 17: mod_base = OTHER; note = Guanosine phosphorothiorate
  modified_base 18: mod_base = OTHER; note = 2'-Omethylguanosine
  modified_base 19: mod_base = OTHER; note = Adenosine phosphorothiorate
  modified_base 20: mod_base = OTHER; note = 2'-Omethyluridine
  modified_base 25: mod_base = OTHER; note = 2'-Omethylcytosine
  modified_base 29: mod_base = OTHER; note = 2'-Omethylguanosine
  modified_base 33: mod_base = OTHER; note = 2'-fluorouridine
  modified_base 35: mod_base = OTHER; note = Cytosine phosphorothiorate
  modified_base 37: mod_base = OTHER; note = 2'-fluoroadenosine phosphorothiorate
  modified_base 38: mod_base = OTHER; note = Adenosine phosphorothiorate
  modified_base 43: mod_base = OTHER; note = 2'-Omethyladenosine
  modified_base 44: mod_base = OTHER; note = 2'-fluoroadenosine
  modified_base 46: mod_base = OTHER; note = Guanosine phosphorothiorate
  modified_base 50: mod_base = OTHER; note = 2'-Omethylcytosine
  modified_base 52: mod_base = OTHER; note = 2'-Omethylguanosine
  modified_base 54: mod_base = OTHER; note = Uridine phosphorothiorate
  modified_base 55: mod_base = OTHER; note = Uridine phosphorothiorate
  modified_base 56: mod_base = OTHER; note = 2'-Omethylcytosine
  modified_base 57: mod_base = OTHER; note = Guanosine phosphorothiorate
  modified_base 62: mod_base = OTHER; note = 2'-Omethylcytosine
  modified_base 63: mod_base = OTHER; note = 2'-fluorocytosine
  modified_base 65: mod_base = OTHER; note = 2'-Omethylguanosine
  modified_base 71: mod_base = OTHER; note = 2'-Omethyluridine
  modified_base 73: mod_base = OTHER; note = 2'-Omethylguanosine

SEQ ID NO: 6655 - RNA, 85 nt, synthetic construct; identical to SEQ ID NO: 3288
  source 1..85: mol_type = other RNA
  modified_base 1: mod_base = OTHER; note = 2'-Omethylcytosine phosphorothiorate
  modified_base 2: mod_base = OTHER; note = 2'-fluorocytosine phosphorothiorate
  modified_base 3: mod_base = OTHER; note = 2'-Omethyladenosine
  modified_base 10: mod_base = OTHER; note = Cytosine phosphorothiorate
  modified_base 30: mod_base = OTHER; note = 2'-fluoroadenosine
  modified_base 52: mod_base = OTHER; note = Guanosine phosphorothiorate
  modified_base 53: mod_base = OTHER; note = Uridine phosphorothiorate
  modified_base 60: mod_base = OTHER; note = 2'-fluoroguanosine
  modified_base 84: mod_base = OTHER; note = 2'-Omethylcytosine

SEQ ID NO: 6656 - RNA, 76 nt, synthetic construct
  source 1..76: mol_type = other RNA
gccccggtggcctaatggataaggcattggccttcaaagccagggattgtgggttcgagtcccatccggggtgcca

SEQ ID NO: 6657 - RNA, 85 nt, synthetic construct; identical to SEQ ID NO: 3297
  source 1..85: mol_type = other RNA
  modified_base 1: mod_base = OTHER; note = 2'-Omethylguanosine
  modified_base 74: mod_base = OTHER; note = 2'-Omethylcytosine

SEQ ID NO: 6658 - RNA, 85 nt, synthetic construct; identical to SEQ ID NO: 3297
  source 1..85: mol_type = other RNA
  modified_base 1: mod_base = OTHER; note = 2'-Omethylguanosine
  modified_base 35: mod_base = OTHER; note = Cytosine phosphorothiorate
  modified_base 37: mod_base = OTHER; note = Adenosine phosphorothiorate
  modified_base 38: mod_base = OTHER; note = Adenosine phosphorothiorate
  modified_base 82: mod_base = OTHER; note = 2'-Omethylguanosine

SEQ ID NO: 6659 - RNA, 86 nt, synthetic construct; identical to SEQ ID NO: 3290
  source 1..86: mol_type = other RNA
  modified_base 43: mod_base = OTHER; note = 2'-Omethyladenosine
  modified_base 83: mod_base = OTHER; note = 2'-Omethyladenosine

SEQ ID NO: 6660 - RNA, 75 nt, synthetic construct; identical to SEQ ID NO: 1045
  source 1..75: mol_type = other RNA
  modified_base 1: mod_base = OTHER; note = 2'-Omethylguanosine phosphorothiorate
  modified_base 2: mod_base = OTHER; note = 2'-Omethylguanosine phosphorothiorate
  modified_base 3: mod_base = OTHER; note = 2'-Omethyluridine
  modified_base 4: mod_base = OTHER; note = 2'-Omethyluridine
  modified_base 5: mod_base = OTHER; note = 2'-Omethylcytosine
  modified_base 6: mod_base = OTHER; note = 2'-Omethylcytosine
  modified_base 8: mod_base = OTHER; note = Uridine phosphorothiorate
  modified_base 16: mod_base = OTHER; note = 2'-Omethyluridine
  modified_base 17: mod_base = OTHER; note = 2'-Omethylguanosine
  modified_base 18: mod_base = OTHER; note = 2'-Omethylguanosine
  modified_base 33: mod_base = OTHER; note = 2'-fluorouridine
  modified_base 35: mod_base = OTHER; note = Uridine phosphorothiorate
  modified_base 37: mod_base = OTHER; note = Adenosine phosphorothiorate
  modified_base 38: mod_base = OTHER; note = Adenosine phosphorothiorate
  modified_base 44: mod_base = OTHER; note = 2'-Omethylcytosine
  modified_base 45: mod_base = OTHER; note = 2'-Omethylguanosine
  modified_base 46: mod_base = OTHER; note = 2'-fluoroadenosine
  modified_base 47: mod_base = OTHER; note = 2'-fluorouridine
  modified_base 48: mod_base = OTHER; note = 2'-Omethylcytosine
  modified_base 49: mod_base = OTHER; note = 2'-Omethylcytosine
  modified_base 50: mod_base = OTHER; note = 2'-Omethylguanosine
  modified_base 51: mod_base = OTHER; note = 2'-Omethyladenosine
  modified_base 52: mod_base = OTHER; note = 2'-Omethylguanosine
  modified_base 53: mod_base = OTHER; note = 2'-Omethyluridine
  modified_base 55: mod_base = OTHER; note = 2'-Omethylcytosine
  modified_base 58: mod_base = OTHER; note = 2'-Omethylguanosine
  modified_base 60: mod_base = OTHER; note = 2'-Omethylcytosine
  modified_base 61: mod_base = OTHER; note = 2'-Omethyluridine
  modified_base 62: mod_base = OTHER; note = 2'-fluorocytosine
  modified_base 63: mod_base = OTHER; note = 2'-Omethylguanosine
  modified_base 64: mod_base = OTHER; note = 2'-Omethylguanosine
  modified_base 65: mod_base = OTHER; note = 2'-Omethyluridine
  modified_base 66: mod_base = OTHER; note = 2'-Omethylguanosine
  modified_base 67: mod_base = OTHER; note = 2'-Omethylguanosine
  modified_base 72: mod_base = OTHER; note = 2'-Omethyluridine

SEQ ID NO: 6661 - DNA, 76 bp, synthetic construct; identical to SEQ ID NO: 1924
  source 1..76: mol_type = other DNA
  misc_feature 1..7: note = RNA
  misc_feature 8..76: note = DNA

SEQ ID NO: 6662 - RNA, 85 nt, synthetic construct; identical to SEQ ID NO: 3317
  source 1..85: mol_type = other RNA
  modified_base 1: mod_base = OTHER; note = 2'-Omethylguanosine phosphorothiorate
  modified_base 2: mod_base = OTHER; note = 2'-Omethylcytosine
  modified_base 3: mod_base = OTHER; note = 2'-Omethyluridine phosphorothiorate
  modified_base 4: mod_base = OTHER; note = 2'-Omethylguanosine phosphorothiorate
  modified_base 8: mod_base = OTHER; note = 2'-fluorouridine
  modified_base 9: mod_base = OTHER; note = 2'-fluoroguanosine
  modified_base 16: mod_base = OTHER; note = 2'-Omethyluridine phosphorothiorate
  modified_base 23: mod_base = OTHER; note = 2'-fluoroguanosine
  modified_base 24: mod_base = OTHER; note = Guanosine phosphorothiorate
  modified_base 26: mod_base = OTHER; note = 2'-fluoroguanosine
  modified_base 39: mod_base = OTHER; note = Uridine phosphorothiorate
  modified_base 48: mod_base = OTHER; note = Guanosine phosphorothiorate
  modified_base 54: mod_base = OTHER; note = 2'-Omethylcytosine
  modified_base 56: mod_base = OTHER; note = 2'-Omethylguanosine
  modified_base 58: mod_base = OTHER; note = 2'-Omethylguanosine phosphorothiorate
  modified_base 61: mod_base = OTHER; note = 2'-fluoroguanosine phosphorothiorate
  modified_base 68: mod_base = OTHER; note = 2'-fluoroadenosine
  modified_base 72: mod_base = OTHER; note = 2'-fluorouridine
  modified_base 82: mod_base = OTHER; note = Guanosine phosphorothiorate

SEQ ID NO: 6663 - RNA, 85 nt, synthetic construct; identical to SEQ ID NO: 3310
  source 1..85: mol_type = other RNA
  modified_base 1: mod_base = OTHER; note = 2'-Omethylcytosine
  modified_base 3: mod_base = OTHER; note = 2'-fluoroadenosine
  modified_base 11: mod_base = OTHER; note = Cytosine phosphorothiorate
  modified_base 30: mod_base = OTHER; note = 2'-fluoroadenosine
  modified_base 52: mod_base = OTHER; note = Guanosine phosphorothiorate
  modified_base 56: mod_base = OTHER; note = 2'-Omethylguanosine
  modified_base 58: mod_base = OTHER; note = 2'-Omethylguanosine
  modified_base 73: mod_base = OTHER; note = 2'-fluoroadenosine
  modified_base 84: mod_base = OTHER; note = 2'-Omethylcytosine

SEQ ID NO: 6664 - RNA, 76 nt, synthetic construct; identical to SEQ ID NO: 3318
  source 1..76: mol_type = other RNA
  modified_base 1: mod_base = OTHER; note = 2'-Omethylcytosine
  modified_base 16: mod_base = OTHER; note = 2'-Omethyluridine
  modified_base 18: mod_base = OTHER; note = 2'-Omethylguanosine
  modified_base 19: mod_base = OTHER; note = 2'-Omethylguanosine
  modified_base 54: mod_base = OTHER; note = 2'-Omethyluridine
  modified_base 56: mod_base = OTHER; note = 2'-Omethylcytosine
  modified_base 57: mod_base = OTHER; note = 2'-Omethylguanosine
  modified_base 59: mod_base = OTHER; note = 2'-Omethyladenosine
  modified_base 73: mod_base = OTHER; note = 2'-Omethyladenosine

SEQ ID NO: 6665 - RNA, 85 nt, synthetic construct; identical to SEQ ID NO: 3301
  source 1..85: mol_type = other RNA
  modified_base 1: mod_base = OTHER; note = 2'-Omethylguanosine phosphorothiorate
  modified_base 2: mod_base = OTHER; note = Cytosine phosphorothiorate
  modified_base 3: mod_base = OTHER; note = 2'-Omethyluridine phosphorothiorate
  modified_base 7: mod_base = OTHER; note = 2'-fluoroadenosine phosphorothiorate
  modified_base 10: mod_base = OTHER; note = 2'-fluoroguanosine
  modified_base 17: mod_base = OTHER; note = Guanosine phosphorothiorate
  modified_base 18: mod_base = OTHER; note = 2'-Omethylguanosine
  modified_base 24: mod_base = OTHER; note = 2'-fluoroguanosine
  modified_base 36: mod_base = OTHER; note = 2'-fluoroadenosine
  modified_base 47: mod_base = OTHER; note = 2'-Omethylguanosine phosphorothiorate
  modified_base 55: mod_base = OTHER; note = 2'-Omethylcytosine phosphorothiorate
  modified_base 57: mod_base = OTHER; note = 2'-Omethylcytosine phosphorothiorate
  modified_base 58: mod_base = OTHER; note = 2'-fluoroguanosine
  modified_base 59: mod_base = OTHER; note = 2'-Omethylcytosine
  modified_base 71: mod_base = OTHER; note = 2'-fluorocytosine
  modified_base 72: mod_base = OTHER; note = 2'-fluorouridine
  modified_base 73: mod_base = OTHER; note = 2'-Omethylguanosine
  modified_base 83: mod_base = OTHER; note = Cytosine phosphorothiorate
  modified_base 84: mod_base = OTHER; note = 2'-Omethylcytosine

SEQ ID NO: 6666 - RNA, 85 nt, synthetic construct; identical to SEQ ID NO: 3286
  source 1..85: mol_type = other RNA
  modified_base 1: mod_base = OTHER; note = 2'-Omethylcytosine
  modified_base 3: mod_base = OTHER; note = 2'-fluoroadenosine
  modified_base 11: mod_base = OTHER; note = Cytosine phosphorothiorate
  modified_base 19: mod_base = OTHER; note = Uridine phosphorothiorate
  modified_base 27: mod_base = OTHER; note = 2'-fluorouridine
  modified_base 29: mod_base = OTHER; note = 2'-fluoroguanosine
  modified_base 36: mod_base = OTHER; note = Guanosine phosphorothiorate
  modified_base 42: mod_base = OTHER; note = Adenosine phosphorothiorate
  modified_base 46: mod_base = OTHER; note = 2'-Omethyladenosine
  modified_base 50: mod_base = OTHER; note = Adenosine phosphorothiorate
  modified_base 55: mod_base = OTHER; note = 2'-fluorocytosine
  modified_base 56: mod_base = OTHER; note = 2'-Omethylguanosine
  modified_base 57: mod_base = OTHER; note = 2'-Omethylcytosine
  modified_base 59: mod_base = OTHER; note = 2'-fluorouridine phosphorothiorate
  modified_base 64: mod_base = OTHER; note = 2'-Omethyluridine phosphorothiorate
  modified_base 67: mod_base = OTHER; note = 2'-Omethyladenosine
  modified_base 71: mod_base = OTHER; note = Cytosine phosphorothiorate
  modified_base 73: mod_base = OTHER; note = 2'-fluoroadenosine
  modified_base 81: mod_base = OTHER; note = 2'-fluorouridine
  modified_base 84: mod_base = OTHER; note = 2'-fluorocytosine phosphorothiorate

SEQ ID NO: 6667 - RNA, 86 nt, synthetic construct; identical to SEQ ID NO: 3290
  source 1..86: mol_type = other RNA
  modified_base 1: mod_base = OTHER; note = 2'-Omethyladenosine
  modified_base 2: mod_base = OTHER; note = 2'-Omethylcytosine
  modified_base 3: mod_base = OTHER; note = 2'-Omethylcytosine
  modified_base 4: mod_base = OTHER; note = 2'-Omethyladenosine
  modified_base 5: mod_base = OTHER; note = 2'-Omethylguanosine
  modified_base 6: mod_base = OTHER; note = 2'-Omethylguanosine
  modified_base 10: mod_base = OTHER; note = 2'-Omethylguanosine
  modified_base 11: mod_base = OTHER; note = 2'-Omethylcytosine
  modified_base 12: mod_base = OTHER; note = 2'-Omethylcytosine
  modified_base 13: mod_base = OTHER; note = 2'-Omethylguanosine
  modified_base 16: mod_base = OTHER; note = 2'-Omethyluridine
  modified_base 17: mod_base = OTHER; note = 2'-Omethylguanosine
  modified_base 18: mod_base = OTHER; note = 2'-Omethylguanosine
  modified_base 20: mod_base = OTHER; note = 2'-Omethyluridine
  modified_base 25: mod_base = OTHER; note = 2'-Omethylcytosine
  modified_base 33: mod_base = OTHER; note = 2'-fluorouridine
  modified_base 35: mod_base = OTHER; note = Cytosine phosphorothiorate
  modified_base 37: mod_base = OTHER; note = Guanosine phosphorothiorate
  modified_base 38: mod_base = OTHER; note = Adenosine phosphorothiorate
  modified_base 41: mod_base = OTHER; note = 2'-fluorocytosine
  modified_base 42: mod_base = OTHER; note = 2'-Omethyladenosine
  modified_base 43: mod_base = OTHER; note = 2'-Omethyladenosine
  modified_base 44: mod_base = OTHER; note = 2'-fluorouridine
  modified_base 59: mod_base = OTHER; note = 2'-Omethylguanosine
  modified_base 60: mod_base = OTHER; note = 2'-Omethyluridine
  modified_base 62: mod_base = OTHER; note = 2'-Omethylguanosine
  modified_base 64: mod_base = OTHER; note = 2'-Omethyluridine
  modified_base 65: mod_base = OTHER; note = Uridine phosphorothiorate
  modified_base 66: mod_base = OTHER; note = 2'-Omethylcytosine
  modified_base 67: mod_base = OTHER; note = 2'-fluoroguanosine
  modified_base 69: mod_base = OTHER; note = 2'-Omethyladenosine
  modified_base 71: mod_base = OTHER; note = 2'-Omethylcytosine
  modified_base 75: mod_base = OTHER; note = 2'-Omethylcytosine
  modified_base 83: mod_base = OTHER; note = 2'-Omethyladenosine

SEQ ID NO: 6668 - RNA, 76 nt, synthetic construct; identical to SEQ ID NO: 625
  source 1..76: mol_type = other RNA
  modified_base 1: mod_base = OTHER; note = 2'-Omethylguanosine
  modified_base 2: mod_base = OTHER; note = 2'-Omethylguanosine
  modified_base 13: mod_base = OTHER; note = 2'-Omethylcytosine
  modified_base 33: mod_base = OTHER; note = 2'-fluorouridine
  modified_base 35: mod_base = OTHER; note = Cytosine phosphorothiorate
  modified_base 37: mod_base = OTHER; note = Adenosine phosphorothiorate
  modified_base 52: mod_base = OTHER; note = 2'-Omethylguanosine
  modified_base 56: mod_base = OTHER; note = 2'-Omethylcytosine
  modified_base 62: mod_base = OTHER; note = 2'-Omethylcytosine
  modified_base 63: mod_base = OTHER; note = 2'-fluorocytosine
  modified_base 73: mod_base = OTHER; note = 2'-Omethylguanosine
  modified_base 75: mod_base = OTHER; note = 2'-fluorocytosine phosphorothiorate

SEQ ID NO: 6669 - RNA, 76 nt, synthetic construct; identical to SEQ ID NO: 625
  source 1..76: mol_type = other RNA
  modified_base 1: mod_base = OTHER; note = 2'-Omethylguanosine phosphorothiorate
  modified_base 2: mod_base = OTHER; note = 2'-Omethylguanosine
  modified_base 17: mod_base = OTHER; note = 2'-Omethylguanosine
  modified_base 33: mod_base = OTHER; note = 2'-fluorouridine
  modified_base 35: mod_base = OTHER; note = Cytosine phosphorothiorate
  modified_base 37: mod_base = OTHER; note = Adenosine phosphorothiorate
  modified_base 38: mod_base = OTHER; note = Adenosine phosphorothiorate
  modified_base 52: mod_base = OTHER; note = 2'-Omethylguanosine
  modified_base 54: mod_base = OTHER; note = 2'-Omethyluridine
  modified_base 65: mod_base = OTHER; note = 2'-Omethylguanosine
  modified_base 73: mod_base = OTHER; note = 2'-Omethylguanosine
  modified_base 75: mod_base = OTHER; note = 2'-fluorocytosine phosphorothiorate

SEQ ID NO: 6670 - RNA, 76 nt, synthetic construct; identical to SEQ ID NO: 625
  source 1..76: mol_type = other RNA
  modified_base 1: mod_base = OTHER; note = 2'-Omethylguanosine
  modified_base 2: mod_base = OTHER; note = Guanosine phosphorothiorate
  modified_base 10: mod_base = OTHER; note = 2'-Omethylguanosine
  modified_base 11: mod_base = OTHER; note = Cytosine phosphorothiorate
  modified_base 12: mod_base = OTHER; note = 2'-Omethylguanosine
  modified_base 14: mod_base = OTHER; note = 2'-fluoroadenosine
  modified_base 16: mod_base = OTHER; note = Uridine phosphorothiorate
  modified_base 17: mod_base = OTHER; note = 2'-Omethylguanosine
  modified_base 18: mod_base = OTHER; note = 2'-fluoroguanosine
  modified_base 20: mod_base = OTHER; note = 2'-fluorouridine
  modified_base 22: mod_base = OTHER; note = 2'-fluoroguanosine
  modified_base 23: mod_base = OTHER; note = 2'-Omethylcytosine
  modified_base 24: mod_base = OTHER; note = 2'-fluoroguanosine
  modified_base 28: mod_base = OTHER; note = 2'-fluorouridine
  modified_base 32: mod_base = OTHER; note = 2'-fluorocytosine
  modified_base 33: mod_base = OTHER; note = 2'-fluorouridine
  modified_base 36: mod_base = OTHER; note = Adenosine phosphorothiorate
  modified_base 38: mod_base = OTHER; note = 2'-fluoroadenosine
  modified_base 40: mod_base = OTHER; note = 2'-Omethyluridine
  modified_base 41: mod_base = OTHER; note = 2'-fluorocytosine phosphorothiorate
  modified_base 44: mod_base = OTHER; note = 2'-fluoroadenosine
  modified_base 45: mod_base = OTHER; note = 2'-Omethylguanosine
  modified_base 47: mod_base = OTHER; note = Uridine phosphorothiorate
  modified_base 48: mod_base = OTHER; note = 2'-fluorouridine
  modified_base 56: mod_base = OTHER; note = Cytosine phosphorothiorate
  modified_base 57: mod_base = OTHER; note = 2'-fluoroguanosine
  modified_base 59: mod_base = OTHER; note = 2'-fluoroguanosine
  modified_base 62: mod_base = OTHER; note = 2'-fluorocytosine
  modified_base 65: mod_base = OTHER; note = 2'-Omethylguanosine phosphorothiorate
  modified_base 71: mod_base = OTHER; note = 2'-fluorouridine
  modified_base 73: mod_base = OTHER; note = Guanosine phosphorothiorate

SEQ ID NO: 6671 - RNA, 76 nt, synthetic construct; identical to SEQ ID NO: 3447
  source 1..76: mol_type = other RNA
  modified_base 1: mod_base = OTHER; note = 2'-Omethylguanosine
  modified_base 13: mod_base = OTHER; note = 2'-Omethylcytosine
  modified_base 17: mod_base = OTHER; note = 2'-Omethylguanosine
  modified_base 18: mod_base = OTHER; note = 2'-Omethylguanosine
  modified_base 25: mod_base = OTHER; note = 2'-Omethylcytosine
  modified_base 33: mod_base = OTHER; note = Uridine phosphorothiorate
  modified_base 34: mod_base = OTHER; note = 2'-Omethyluridine
  modified_base 35: mod_base = OTHER; note = Cytosine phosphorothiorate
  modified_base 37: mod_base = OTHER; note = Adenosine phosphorothiorate
  modified_base 38: mod_base = OTHER; note = Adenosine phosphorothiorate
  modified_base 41: mod_base = OTHER; note = 2'-fluorocytosine
  modified_base 42: mod_base = OTHER; note = 2'-Omethyladenosine
  modified_base 43: mod_base = OTHER; note = 2'-Omethyladenosine
  modified_base 44: mod_base = OTHER; note = 2'-fluoroadenosine
  modified_base 49: mod_base = OTHER; note = 2'-Omethylcytosine
  modified_base 50: mod_base = OTHER; note = 2'-Omethylcytosine
  modified_base 52: mod_base = OTHER; note = 2'-Omethylguanosine
  modified_base 54: mod_base = OTHER; note = Uridine phosphorothiorate
  modified_base 55: mod_base = OTHER; note = Uridine phosphorothiorate
  modified_base 56: mod_base = OTHER; note = 2'-Omethylcytosine
  modified_base 57: mod_base = OTHER; note = Guanosine phosphorothiorate
  modified_base 58: mod_base = OTHER; note = Adenosine phosphorothiorate
  modified_base 59: mod_base = OTHER; note = 2'-Omethylguanosine
  modified_base 61: mod_base = OTHER; note = 2'-Omethylcytosine
  modified_base 65: mod_base = OTHER; note = 2'-Omethylguanosine
  modified_base 73: mod_base = OTHER; note = 2'-Omethylguanosine

SEQ ID NO: 6672 - RNA, 85 nt, synthetic construct; identical to SEQ ID NO: 3286
  source 1..85: mol_type = other RNA
  modified_base 1: mod_base = OTHER; note = 2'-Omethylcytosine
  modified_base 8: mod_base = OTHER; note = Guanosine phosphorothiorate
  modified_base 26: mod_base = OTHER; note = 2'-fluorouridine
  modified_base 29: mod_base = OTHER; note = 2'-fluoroguanosine
  modified_base 39: mod_base = OTHER; note = Cytosine phosphorothiorate
  modified_base 40: mod_base = OTHER; note = Cytosine phosphorothiorate
  modified_base 44: mod_base = OTHER; note = 2'-fluoroguanosine
  modified_base 45: mod_base = OTHER; note = Guanosine phosphorothiorate
  modified_base 46: mod_base = OTHER; note = 2'-Omethyladenosine
  modified_base 48: mod_base = OTHER; note = 2'-Omethyladenosine
  modified_base 55: mod_base = OTHER; note = 2'-fluorocytosine
  modified_base 56: mod_base = OTHER; note = Guanosine phosphorothiorate
  modified_base 57: mod_base = OTHER; note = 2'-Omethylcytosine
  modified_base 60: mod_base = OTHER; note = 2'-fluoroguanosine phosphorothiorate
  modified_base 84: mod_base = OTHER; note = Cytosine phosphorothiorate

SEQ ID NO: 6673 - RNA, 76 nt, synthetic construct; identical to SEQ ID NO: 3318
  source 1..76: mol_type = other RNA
  modified_base 1: mod_base = OTHER; note = 2'-Omethylcytosine phosphorothiorate
  modified_base 2: mod_base = OTHER; note = 2'-Omethylcytosine phosphorothiorate
  modified_base 3: mod_base = OTHER; note = 2'-Omethyluridine
  modified_base 4: mod_base = OTHER; note = 2'-Omethyluridine
  modified_base 5: mod_base = OTHER; note = 2'-Omethylcytosine
  modified_base 6: mod_base = OTHER; note = 2'-Omethylguanosine
  modified_base 16: mod_base = OTHER; note = 2'-Omethyluridine
  modified_base 18: mod_base = OTHER; note = 2'-Omethylguanosine
  modified_base 19: mod_base = OTHER; note = 2'-Omethylguanosine
  modified_base 33: mod_base = OTHER; note = 2'-fluorouridine
  modified_base 35: mod_base = OTHER; note = Uridine phosphorothiorate
  modified_base 37: mod_base = OTHER; note = Guanosine phosphorothiorate
  modified_base 38: mod_base = OTHER; note = Adenosine phosphorothiorate
  modified_base 44: mod_base = OTHER; note = 2'-Omethyladenosine
  modified_base 45: mod_base = OTHER; note = 2'-Omethylguanosine
  modified_base 46: mod_base = OTHER; note = 2'-fluoroguanosine
  modified_base 47: mod_base = OTHER; note = 2'-fluorouridine
  modified_base 48: mod_base = OTHER; note = 2'-fluorocytosine
  modified_base 52: mod_base = OTHER; note = 2'-Omethylguanosine
  modified_base 53: mod_base = OTHER; note = 2'-Omethylguanosine
  modified_base 54: mod_base = OTHER; note = 2'-Omethyluridine
  modified_base 56: mod_base = OTHER; note = 2'-Omethylcytosine
  modified_base 59: mod_base = OTHER; note = 2'-Omethyladenosine
  modified_base 61: mod_base = OTHER; note = 2'-Omethylcytosine
  modified_base 62: mod_base = OTHER; note = 2'-Omethylcytosine
  modified_base 63: mod_base = OTHER; note = 2'-fluoroguanosine
  modified_base 64: mod_base = OTHER; note = 2'-Omethylguanosine
  modified_base 65: mod_base = OTHER; note = 2'-Omethylcytosine
  modified_base 66: mod_base = OTHER; note = 2'-Omethyluridine
  modified_base 67: mod_base = OTHER; note = 2'-Omethylcytosine
  modified_base 68: mod_base = OTHER; note = 2'-Omethylguanosine
  modified_base 73: mod_base = OTHER; note = 2'-Omethyladenosine

SEQ ID NO: 6674 - RNA, 76 nt, synthetic construct; identical to SEQ ID NO: 625
  source 1..76: mol_type = other RNA
  modified_base 1: mod_base = OTHER; note = 2'-Omethylguanosine
  modified_base 4: mod_base = OTHER; note = Uridine phosphorothiorate
  modified_base 5: mod_base = OTHER; note = 2'-fluorocytosine
  modified_base 10: mod_base = OTHER; note = 2'-Omethylguanosine
  modified_base 11: mod_base = OTHER; note = Cytosine phosphorothiorate
  modified_base 12: mod_base = OTHER; note = 2'-Omethylguanosine phosphorothiorate
  modified_base 13: mod_base = OTHER; note = 2'-fluorocytosine
  modified_base 15: mod_base = OTHER; note = Adenosine phosphorothiorate
  modified_base 16: mod_base = OTHER; note = 2'-fluorouridine
  modified_base 17: mod_base = OTHER; note = 2'-Omethylguanosine phosphorothiorate
  modified_base 18: mod_base = OTHER; note = 2'-fluoroguanosine
  modified_base 22: mod_base = OTHER; note = 2'-fluoroguanosine
  modified_base 27: mod_base = OTHER; note = 2'-Omethyluridine
  modified_base 29: mod_base = OTHER; note = 2'-fluoroguanosine
  modified_base 30: mod_base = OTHER; note = Guanosine phosphorothiorate
  modified_base 31: mod_base = OTHER; note = 2'-Omethyladenosine
  modified_base 33: mod_base = OTHER; note = Uridine phosphorothiorate
  modified_base 34: mod_base = OTHER; note = 2'-Omethyluridine
  modified_base 37: mod_base = OTHER; note = Adenosine phosphorothiorate
  modified_base 38: mod_base = OTHER; note = 2'-Omethyladenosine
  modified_base 39: mod_base = OTHER; note = 2'-Omethyluridine
  modified_base 40: mod_base = OTHER; note = 2'-Omethyluridine
  modified_base 41: mod_base = OTHER; note = 2'-fluorocytosine
  modified_base 43: mod_base = OTHER; note = 2'-fluoroadenosine
  modified_base 44: mod_base = OTHER; note = 2'-Omethyladenosine
  modified_base 46: mod_base = OTHER; note = 2'-Omethylguanosine phosphorothiorate
  modified_base 47: mod_base = OTHER; note = 2'-Omethyluridine phosphorothiorate
  modified_base 48: mod_base = OTHER; note = 2'-fluorouridine
  modified_base 52: mod_base = OTHER; note = 2'-Omethylguanosine
  modified_base 53: mod_base = OTHER; note = 2'-fluoroguanosine
  modified_base 56: mod_base = OTHER; note = Cytosine phosphorothiorate
  modified_base 57: mod_base = OTHER; note = 2'-Omethylguanosine
  modified_base 64: mod_base = OTHER; note = 2'-fluoroguanosine
  modified_base 65: mod_base = OTHER; note = 2'-Omethylguanosine
  modified_base 67: mod_base = OTHER; note = Guanosine phosphorothiorate
  modified_base 68: mod_base = OTHER; note = 2'-fluoroguanosine
  modified_base 70: mod_base = OTHER; note = 2'-fluoroguanosine
  modified_base 72: mod_base = OTHER; note = 2'-Omethylcytosine
  modified_base 75: mod_base = OTHER; note = 2'-fluorocytosine
  modified_base 76: mod_base = OTHER; note = 2'-Omethyladenosine

SEQ ID NO: 6675 - DNA, 76 bp, synthetic construct; identical to SEQ ID NO: 1924
  source 1..76: mol_type = other DNA
  modified_base 1: mod_base = OTHER; note = 2'-Omethylguanosine phosphorothiorate
  modified_base 2: mod_base = OTHER; note = 2'-Omethylguanosine phosphorothiorate
  modified_base 3: mod_base = OTHER; note = 2'-Omethylcytosine
  modified_base 4: mod_base = OTHER; note = 2'-Omethyluridine
  modified_base 5: mod_base = OTHER; note = 2'-Omethylcytosine
  modified_base 6: mod_base = OTHER; note = 2'-Omethylcytosine
  modified_base 10: mod_base = OTHER; note = 2'-Omethylguanosine
  modified_base 11: mod_base = OTHER; note = 2'-Omethylcytosine
  modified_base 12: mod_base = OTHER; note = Guanosine phosphorothiorate
  modified_base 13: mod_base = OTHER; note = 2'-Omethylcytosine
  modified_base 17: mod_base = OTHER; note = 2'-Omethylguanosine
  modified_base 21: mod_base = OTHER; note = Adenosine phosphorothiorate
  modified_base 23: mod_base = OTHER; note = 2'-Omethylcytosine
  modified_base 24: mod_base = OTHER; note = 2'-Omethylguanosine
  modified_base 25: mod_base = OTHER; note = Cytosine phosphorothiorate
  modified_base 33: mod_base = OTHER; note = 2'-fluorouridine
  modified_base 35: mod_base = OTHER; note = Cytosine phosphorothiorate
  modified_base 37: mod_base = OTHER; note = Adenosine phosphorothiorate
  modified_base 38: mod_base = OTHER; note = Adenosine phosphorothiorate
  modified_base 44: mod_base = OTHER; note = Adenosine phosphorothiorate
  modified_base 45: mod_base = OTHER; note = 2'-fluoroguanosine
  modified_base 49: mod_base = OTHER; note = 2'-Omethylcytosine
  modified_base 50: mod_base = OTHER; note = 2'-Omethylcytosine
  modified_base 51: mod_base = OTHER; note = 2'-Omethylguanosine
  modified_base 52: mod_base = OTHER; note = 2'-Omethylguanosine
  modified_base 53: mod_base = OTHER; note = 2'-Omethylguanosine
  modified_base 56: mod_base = OTHER; note = 2'-Omethylcytosine
  modified_base 61: mod_base = OTHER; note = 2'-Omethylcytosine
  modified_base 62: mod_base = OTHER; note = 2'-Omethylcytosine
  modified_base 63: mod_base = OTHER; note = 2'-fluorocytosine
  modified_base 64: mod_base = OTHER; note = 2'-Omethylguanosine
  modified_base 65: mod_base = OTHER; note = 2'-Omethylguanosine
  modified_base 66: mod_base = OTHER; note = 2'-Omethylcytosine
  modified_base 67: mod_base = OTHER; note = 2'-Omethylguanosine
  modified_base 68: mod_base = OTHER; note = 2'-Omethylguanosine
  modified_base 69: mod_base = OTHER; note = 2'-fluoroadenosine
  modified_base 70: mod_base = OTHER; note = 2'-fluoroguanosine
  modified_base 73: mod_base = OTHER; note = 2'-Omethylguanosine
  modified_base 74: mod_base = OTHER; note = Cytosine phosphorothiorate
  modified_base 75: mod_base = OTHER; note = 2'-Omethylcytosine
  misc_feature 1..21: note = RNA
  misc_feature 22: note = DNA
  misc_feature 23..76: note = RNA

SEQ ID NO: 6676 - RNA, 76 nt, synthetic construct; identical to SEQ ID NO: 625
  source 1..76: mol_type = other RNA
  modified_base 1: mod_base = OTHER; note = 2'-Omethylguanosine phosphorothiorate
  modified_base 2: mod_base = OTHER; note = 2'-Omethylguanosine
  modified_base 17: mod_base = OTHER; note = 2'-Omethylguanosine
  modified_base 22: mod_base = OTHER; note = 2'-Omethylguanosine
  modified_base 23: mod_base = OTHER; note = 2'-Omethylcytosine
  modified_base 24: mod_base = OTHER; note = 2'-Omethylguanosine
  modified_base 25: mod_base = OTHER; note = 2'-Omethylcytosine
  modified_base 33: mod_base = OTHER; note = 2'-fluorouridine
  modified_base 35: mod_base = OTHER; note = Cytosine phosphorothiorate
  modified_base 37: mod_base = OTHER; note = Adenosine phosphorothiorate
  modified_base 38: mod_base = OTHER; note = Adenosine phosphorothiorate
  modified_base 52: mod_base = OTHER; note = 2'-fluoroguanosine
  modified_base 54: mod_base = OTHER; note = 2'-Omethyluridine
  modified_base 62: mod_base = OTHER; note = 2'-Omethylcytosine
  modified_base 63: mod_base = OTHER; note = 2'-fluorocytosine
  modified_base 65: mod_base = OTHER; note = 2'-Omethylguanosine
  modified_base 73: mod_base = OTHER; note = 2'-Omethylguanosine
  modified_base 75: mod_base = OTHER; note = 2'-fluorocytosine phosphorothiorate

SEQ ID NO: 6677 - RNA, 85 nt, synthetic construct; identical to SEQ ID NO: 3286
  source 1..85: mol_type = other RNA
  modified_base 1: mod_base = OTHER; note = 2'-Omethylcytosine
  modified_base 21: mod_base = OTHER; note = 2'-fluoroadenosine
  modified_base 25: mod_base = OTHER; note = Guanosine phosphorothiorate
  modified_base 26: mod_base = OTHER; note = 2'-fluorouridine
  modified_base 28: mod_base = OTHER; note = 2'-Omethylguanosine
  modified_base 30: mod_base = OTHER; note = 2'-fluoroadenosine
  modified_base 33: mod_base = OTHER; note = 2'-fluorouridine
  modified_base 34: mod_base = OTHER; note = 2'-fluorouridine
  modified_base 35: mod_base = OTHER; note = 2'-fluoroadenosine phosphorothiorate
  modified_base 39: mod_base = OTHER; note = 2'-fluorocytosine phosphorothiorate
  modified_base 50: mod_base = OTHER; note = Adenosine phosphorothiorate
  modified_base 52: mod_base = OTHER; note = 2'-fluoroguanosine
  modified_base 60: mod_base = OTHER; note = 2'-fluoroguanosine
  modified_base 73: mod_base = OTHER; note = 2'-fluoroadenosine
  modified_base 84: mod_base = OTHER; note = Cytosine phosphorothiorate
  modified_base 85: mod_base = OTHER; note = 2'-Omethyladenosine

SEQ ID NO: 6678 - RNA, 76 nt, synthetic construct; identical to SEQ ID NO: 625
  source 1..76: mol_type = other RNA
  modified_base 2: mod_base = OTHER; note = 2'-fluoroguanosine
  modified_base 9: mod_base = OTHER; note = Guanosine phosphorothiorate
  modified_base 10: mod_base = OTHER; note = 2'-fluoroguanosine
  modified_base 14: mod_base = OTHER; note = Adenosine phosphorothiorate
  modified_base 16: mod_base = OTHER; note = 2'-fluorouridine phosphorothiorate
  modified_base 18: mod_base = OTHER; note = 2'-fluoroguanosine
  modified_base 22: mod_base = OTHER; note = 2'-fluoroguanosine
  modified_base 26: mod_base = OTHER; note = 2'-fluoroadenosine
  modified_base 27: mod_base = OTHER; note = 2'-fluorouridine
  modified_base 32: mod_base = OTHER; note = 2'-fluorocytosine
  modified_base 34: mod_base = OTHER; note = Uridine phosphorothiorate
  modified_base 37: mod_base = OTHER; note = Adenosine phosphorothiorate
  modified_base 38: mod_base = OTHER; note = 2'-fluoroadenosine phosphorothiorate
  modified_base 39: mod_base = OTHER; note = 2'-fluorouridine
  modified_base 43: mod_base = OTHER; note = Adenosine phosphorothiorate
  modified_base 44: mod_base = OTHER; note = 2'-fluoroadenosine
  modified_base 45: mod_base = OTHER; note = Guanosine phosphorothiorate
  modified_base 46: mod_base = OTHER; note = 2'-Omethylguanosine
  modified_base 48: mod_base = OTHER; note = 2'-Omethyluridine
  modified_base 49: mod_base = OTHER; note = 2'-fluorocytosine
  modified_base 50: mod_base = OTHER; note = Cytosine phosphorothiorate
  modified_base 51: mod_base = OTHER; note = 2'-Omethylguanosine
  modified_base 55: mod_base = OTHER; note = Uridine phosphorothiorate
  modified_base 56: mod_base = OTHER; note = 2'-fluorocytosine
  modified_base 57: mod_base = OTHER; note = 2'-fluoroguanosine
  modified_base 58: mod_base = OTHER; note = 2'-fluoroadenosine
  modified_base 61: mod_base = OTHER; note = 2'-Omethylcytosine
  modified_base 63: mod_base = OTHER; note = 2'-fluorocytosine
  modified_base 64: mod_base = OTHER; note = 2'-Omethylguanosine phosphorothiorate
  modified_base 65: mod_base = OTHER; note = 2'-Omethylguanosine phosphorothiorate
  modified_base 66: mod_base = OTHER; note = 2'-Omethylcytosine
  modified_base 68: mod_base = OTHER; note = 2'-fluoroguanosine
  modified_base 71: mod_base = OTHER; note = Uridine phosphorothiorate
  modified_base 73: mod_base = OTHER; note = 2'-Omethylguanosine
  modified_base 76: mod_base = OTHER; note = 2'-fluoroadenosine

SEQ ID NO: 6679 - RNA, 76 nt, synthetic construct; identical to SEQ ID NO: 625
  source 1..76: mol_type = other RNA
  modified_base 2: mod_base = OTHER; note = 2'-Omethylguanosine
  modified_base 5: mod_base = OTHER; note = 2'-fluorocytosine
  modified_base 11: mod_base = OTHER; note = 2'-fluorocytosine phosphorothiorate
  modified_base 13: mod_base = OTHER; note = 2'-Omethylcytosine
  modified_base 14: mod_base = OTHER; note = 2'-Omethyladenosine
  modified_base 16: mod_base = OTHER; note = 2'-Omethyluridine
  modified_base 17: mod_base = OTHER; note = 2'-Omethylguanosine
  modified_base 18: mod_base = OTHER; note = 2'-fluoroguanosine phosphorothiorate
  modified_base 22: mod_base = OTHER; note = 2'-fluoroguanosine
  modified_base 24: mod_base = OTHER; note = 2'-fluoroguanosine
  modified_base 26: mod_base = OTHER; note = Adenosine phosphorothiorate
  modified_base 28: mod_base = OTHER; note = Uridine phosphorothiorate
  modified_base 29: mod_base = OTHER; note = 2'-fluoroguanosine
  modified_base 30: mod_base = OTHER; note = 2'-fluoroguanosine
  modified_base 31: mod_base = OTHER; note = 2'-fluoroadenosine
  modified_base 32: mod_base = OTHER; note = 2'-fluorocytosine
  modified_base 42: mod_base = OTHER; note = Adenosine phosphorothiorate
  modified_base 43: mod_base = OTHER; note = 2'-fluoroadenosine
  modified_base 44: mod_base = OTHER; note = 2'-fluoroadenosine
  modified_base 48: mod_base = OTHER; note = 2'-Omethyluridine
  modified_base 49: mod_base = OTHER; note = Cytosine phosphorothiorate
  modified_base 50: mod_base = OTHER; note = 2'-Omethylcytosine
  modified_base 53: mod_base = OTHER; note = 2'-Omethylguanosine
  modified_base 54: mod_base = OTHER; note = 2'-Omethyluridine
  modified_base 56: mod_base = OTHER; note = 2'-fluorocytosine
  modified_base 60: mod_base = OTHER; note = 2'-fluorouridine
  modified_base 61: mod_base = OTHER; note = 2'-Omethylcytosine
  modified_base 62: mod_base = OTHER; note = Cytosine phosphorothiorate
  modified_base 66: mod_base = OTHER; note = Cytosine phosphorothiorate
  modified_base 69: mod_base = OTHER; note = 2'-fluoroadenosine
  modified_base 75: mod_base = OTHER; note = 2'-Omethylcytosine phosphorothiorate
  modified_base 76: mod_base = OTHER; note = 2'-fluoroadenosine

SEQ ID NO: 6680 - RNA, 75 nt, synthetic construct; identical to SEQ ID NO: 1045
  source 1..75: mol_type = other RNA
  modified_base 2: mod_base = OTHER; note = 2'-Omethylguanosine phosphorothiorate
  modified_base 3: mod_base = OTHER; note = 2'-Omethyluridine
  modified_base 4: mod_base = OTHER; note = 2'-Omethyluridine
  modified_base 6: mod_base = OTHER; note = 2'-Omethylcytosine
  modified_base 11: mod_base = OTHER; note = 2'-Omethyluridine phosphorothiorate
  modified_base 14: mod_base = OTHER; note = 2'-Omethyladenosine
  modified_base 16: mod_base = OTHER; note = 2'-Omethyluridine
  modified_base 17: mod_base = OTHER; note = Guanosine phosphorothiorate
  modified_base 18: mod_base = OTHER; note = 2'-Omethylguanosine phosphorothiorate
  modified_base 19: mod_base = OTHER; note = 2'-Omethyluridine phosphorothiorate
  modified_base 34: mod_base = OTHER; note = 2'-Omethyluridine phosphorothiorate
  modified_base 60: mod_base = OTHER; note = 2'-Omethylcytosine
  modified_base 62: mod_base = OTHER; note = 2'-fluorocytosine phosphorothiorate
  modified_base 67: mod_base = OTHER; note = 2'-Omethylguanosine
  modified_base 72: mod_base = OTHER; note = 2'-Omethyluridine
  modified_base 73: mod_base = OTHER; note = Cytosine phosphorothiorate
  modified_base 74: mod_base = OTHER; note = 2'-Omethylcytosine phosphorothiorate

SEQ ID NO: 6681 - RNA, 76 nt, synthetic construct; identical to SEQ ID NO: 625
  source 1..76: mol_type = other RNA
  modified_base 1: mod_base = OTHER; note = 2'-Omethylguanosine
  modified_base 5: mod_base = OTHER; note = 2'-fluorocytosine phosphorothiorate
  modified_base 6: mod_base = OTHER; note = 2'-fluorocytosine
  modified_base 11: mod_base = OTHER; note = 2'-Omethylcytosine
  modified_base 13: mod_base = OTHER; note = 2'-Omethylcytosine
  modified_base 14: mod_base = OTHER; note = 2'-Omethyladenosine
  modified_base 18: mod_base = OTHER; note = 2'-fluoroguanosine
  modified_base 20: mod_base = OTHER; note = Uridine phosphorothiorate
  modified_base 21: mod_base = OTHER; note = Adenosine phosphorothiorate
  modified_base 22: mod_base = OTHER; note = 2'-fluoroguanosine
  modified_base 23: mod_base = OTHER; note = 2'-fluorocytosine
  modified_base 25: mod_base = OTHER; note = 2'-fluorocytosine phosphorothiorate
  modified_base 26: mod_base = OTHER; note = 2'-Omethyladenosine phosphorothiorate
  modified_base 27: mod_base = OTHER; note = 2'-Omethyluridine
  modified_base 29: mod_base = OTHER; note = 2'-Omethylguanosine
  modified_base 42: mod_base = OTHER; note = 2'-Omethyladenosine
  modified_base 43: mod_base = OTHER; note = Adenosine phosphorothiorate
  modified_base 46: mod_base = OTHER; note = Guanosine phosphorothiorate
  modified_base 47: mod_base = OTHER; note = 2'-fluorouridine
  modified_base 50: mod_base = OTHER; note = 2'-fluorocytosine
  modified_base 51: mod_base = OTHER; note = 2'-Omethylguanosine
  modified_base 52: mod_base = OTHER; note = 2'-fluoroguanosine phosphorothiorate
  modified_base 53: mod_base = OTHER; note = 2'-Omethylguanosine phosphorothiorate
  modified_base 54: mod_base = OTHER; note = 2'-fluorouridine
  modified_base 57: mod_base = OTHER; note = Guanosine phosphorothiorate
  modified_base 58: mod_base = OTHER; note = 2'-fluoroadenosine
  modified_base 60: mod_base = OTHER; note = 2'-Omethyluridine
  modified_base 62: mod_base = OTHER; note = 2'-fluorocytosine
  modified_base 63: mod_base = OTHER; note = Cytosine phosphorothiorate
  modified_base 65: mod_base = OTHER; note = 2'-fluoroguanosine
  modified_base 69: mod_base = OTHER; note = 2'-fluoroadenosine
  modified_base 70: mod_base = OTHER; note = 2'-fluoroguanosine
  modified_base 71: mod_base = OTHER; note = Uridine phosphorothiorate
  modified_base 72: mod_base = OTHER; note = 2'-Omethylcytosine
  modified_base 73: mod_base = OTHER; note = 2'-fluoroguanosine
  modified_base 75: mod_base = OTHER; note = Cytosine phosphorothiorate
  modified_base 76: mod_base = OTHER; note = 2'-Omethyladenosine

SEQ ID NO: 6682 - RNA, 76 nt, synthetic construct; identical to SEQ ID NO: 625
  source 1..76: mol_type = other RNA
  modified_base 1: mod_base = OTHER; note = 2'-Omethylguanosine phosphorothiorate
  modified_base 2: mod_base = OTHER; note = 2'-Omethylguanosine
  modified_base 33: mod_base = OTHER; note = 2'-fluorouridine
  modified_base 37: mod_base = OTHER; note = Adenosine phosphorothiorate
  modified_base 52: mod_base = OTHER; note = 2'-Omethylguanosine
  modified_base 57: mod_base = OTHER; note = 2'-Omethylguanosine
  modified_base 62: mod_base = OTHER; note = 2'-Omethylcytosine
  modified_base 73: mod_base = OTHER; note = 2'-Omethylguanosine
  modified_base 75: mod_base = OTHER; note = 2'-fluorocytosine phosphorothiorate

SEQ ID NO: 6683 - RNA, 75 nt, synthetic construct; identical to SEQ ID NO: 3299
  source 1..75: mol_type = other RNA
  modified_base 1: mod_base = OTHER; note = Cytosine phosphorothiorate
  modified_base 13: mod_base = OTHER; note = 2'-fluoroadenosine
  modified_base 15: mod_base = OTHER; note = 2'-Omethyluridine phosphorothiorate
  modified_base 21: mod_base = OTHER; note = Guanosine phosphorothiorate
  modified_base 22: mod_base = OTHER; note = 2'-fluoroadenosine
  modified_base 27: mod_base = OTHER; note = 2'-fluorocytosine phosphorothiorate
  modified_base 28: mod_base = OTHER; note = 2'-fluoroadenosine
  modified_base 29: mod_base = OTHER; note = 2'-fluoroguanosine
  modified_base 34: mod_base = OTHER; note = 2'-Omethyluridine phosphorothiorate
  modified_base 37: mod_base = OTHER; note = 2'-Omethyladenosine
  modified_base 39: mod_base = OTHER; note = 2'-Omethylcytosine phosphorothiorate
  modified_base 49: mod_base = OTHER; note = Adenosine phosphorothiorate
  modified_base 50: mod_base = OTHER; note = Guanosine phosphorothiorate
  modified_base 58: mod_base = OTHER; note = 2'-Omethylguanosine
  modified_base 73: mod_base = OTHER; note = 2'-Omethylcytosine
  modified_base 74: mod_base = OTHER; note = Cytosine phosphorothiorate

SEQ ID NO: 6684 - RNA, 86 nt, synthetic construct; identical to SEQ ID NO: 3290
  source 1..86: mol_type = other RNA
  modified_base 1: mod_base = OTHER; note = 2'-Omethyladenosine
  modified_base 19: mod_base = OTHER; note = 2'-fluorouridine
  modified_base 20: mod_base = OTHER; note = 2'-Omethyluridine phosphorothiorate
  modified_base 21: mod_base = OTHER; note = 2'-fluoroadenosine
  modified_base 22: mod_base = OTHER; note = 2'-Omethyladenosine
  modified_base 40: mod_base = OTHER; note = 2'-fluorocytosine
  modified_base 41: mod_base = OTHER; note = 2'-Omethylcytosine
  modified_base 42: mod_base = OTHER; note = 2'-Omethyladenosine
  modified_base 43: mod_base = OTHER; note = 2'-Omethyladenosine
  modified_base 83: mod_base = OTHER; note = 2'-Omethyladenosine

SEQ ID NO: 6685 - RNA, 85 nt, synthetic construct; identical to SEQ ID NO: 3301
  source 1..85: mol_type = other RNA
  modified_base 1: mod_base = OTHER; note = 2'-Omethylguanosine phosphorothiorate
  modified_base 2: mod_base = OTHER; note = Cytosine phosphorothiorate
  modified_base 7: mod_base = OTHER; note = Adenosine phosphorothiorate
  modified_base 15: mod_base = OTHER; note = 2'-Omethylguanosine
  modified_base 16: mod_base = OTHER; note = 2'-fluorouridine
  modified_base 18: mod_base = OTHER; note = Guanosine phosphorothiorate
  modified_base 24: mod_base = OTHER; note = 2'-Omethylguanosine
  modified_base 29: mod_base = OTHER; note = 2'-fluoroguanosine phosphorothiorate
  modified_base 38: mod_base = OTHER; note = 2'-fluoroadenosine
  modified_base 46: mod_base = OTHER; note = 2'-Omethylguanosine
  modified_base 51: mod_base = OTHER; note = 2'-Omethyluridine phosphorothiorate
  modified_base 56: mod_base = OTHER; note = 2'-Omethylguanosine
  modified_base 58: mod_base = OTHER; note = Guanosine phosphorothiorate
  modified_base 60: mod_base = OTHER; note = Adenosine phosphorothiorate
  modified_base 81: mod_base = OTHER; note = 2'-fluorocytosine phosphorothiorate
  modified_base 82: mod_base = OTHER; note = 2'-fluoroguanosine
  modified_base 84: mod_base = OTHER; note = 2'-Omethylcytosine

SEQ ID NO: 6686 - RNA, 85 nt, synthetic construct; identical to SEQ ID NO: 3286
  source 1..85: mol_type = other RNA
  modified_base 1: mod_base = OTHER; note = 2'-Omethylcytosine
  modified_base 9: mod_base = OTHER; note = 2'-fluoroguanosine phosphorothiorate
  modified_base 13: mod_base = OTHER; note = Adenosine phosphorothiorate
  modified_base 15: mod_base = OTHER; note = 2'-Omethyluridine
  modified_base 22: mod_base = OTHER; note = 2'-fluoroguanosine phosphorothiorate
  modified_base 26: mod_base = OTHER; note = 2'-fluorouridine
  modified_base 30: mod_base = OTHER; note = 2'-fluoroadenosine
  modified_base 34: mod_base = OTHER; note = 2'-fluorouridine
  modified_base 35: mod_base = OTHER; note = 2'-Omethyladenosine
  modified_base 39: mod_base = OTHER; note = Cytosine phosphorothiorate
  modified_base 43: mod_base = OTHER; note = 2'-Omethyluridine
  modified_base 45: mod_base = OTHER; note = 2'-fluoroguanosine
  modified_base 48: mod_base = OTHER; note = Adenosine phosphorothiorate
  modified_base 53: mod_base = OTHER; note = 2'-Omethyluridine
  modified_base 57: mod_base = OTHER; note = 2'-fluorocytosine
  modified_base 58: mod_base = OTHER; note = 2'-Omethylguanosine
  modified_base 61: mod_base = OTHER; note = 2'-Omethylguanosine
  modified_base 65: mod_base = OTHER; note = Cytosine phosphorothiorate
  modified_base 84: mod_base = OTHER; note = 2'-Omethylcytosine
  modified_base 85: mod_base = OTHER; note = 2'-fluoroadenosine

SEQ ID NO: 6687 - RNA, 76 nt, synthetic construct; identical to SEQ ID NO: 625
  source 1..76: mol_type = other RNA
  modified_base 3: mod_base = OTHER; note = 2'-Omethylcytosine
  modified_base 4: mod_base = OTHER; note = Uridine phosphorothiorate
  modified_base 5: mod_base = OTHER; note = 2'-Omethylcytosine
  modified_base 8: mod_base = OTHER; note = Uridine phosphorothiorate
  modified_base 9: mod_base = OTHER; note = Guanosine phosphorothiorate
  modified_base 10: mod_base = OTHER; note = 2'-fluoroguanosine
  modified_base 11: mod_base = OTHER; note = Cytosine phosphorothiorate
  modified_base 12: mod_base = OTHER; note = 2'-Omethylguanosine
  modified_base 13: mod_base = OTHER; note = 2'-Omethylcytosine
  modified_base 14: mod_base = OTHER; note = 2'-Omethyladenosine
  modified_base 18: mod_base = OTHER; note = 2'-Omethylguanosine
  modified_base 19: mod_base = OTHER; note = Adenosine phosphorothiorate
  modified_base 20: mod_base = OTHER; note = 2'-fluorouridine
  modified_base 24: mod_base = OTHER; note = 2'-fluoroguanosine
  modified_base 25: mod_base = OTHER; note = Cytosine phosphorothiorate
  modified_base 26: mod_base = OTHER; note = 2'-fluoroadenosine
  modified_base 30: mod_base = OTHER; note = 2'-fluoroguanosine
  modified_base 34: mod_base = OTHER; note = Uridine phosphorothiorate
  modified_base 37: mod_base = OTHER; note = Adenosine phosphorothiorate
  modified_base 40: mod_base = OTHER; note = Uridine phosphorothiorate
  modified_base 41: mod_base = OTHER; note = 2'-fluorocytosine
  modified_base 46: mod_base = OTHER; note = 2'-Omethylguanosine
  modified_base 47: mod_base = OTHER; note = 2'-fluorouridine
  modified_base 48: mod_base = OTHER; note = Uridine phosphorothiorate
  modified_base 52: mod_base = OTHER; note = Guanosine phosphorothiorate
  modified_base 53: mod_base = OTHER; note = 2'-Omethylguanosine
  modified_base 55: mod_base = OTHER; note = Uridine phosphorothiorate
  modified_base 56: mod_base = OTHER; note = 2'-Omethylcytosine phosphorothiorate
  modified_base 57: mod_base = OTHER; note = 2'-fluoroguanosine phosphorothiorate
  modified_base 58: mod_base = OTHER; note = 2'-fluoroadenosine
  modified_base 60: mod_base = OTHER; note = 2'-Omethyluridine phosphorothiorate
  modified_base 61: mod_base = OTHER; note = 2'-fluorocytosine
  modified_base 62: mod_base = OTHER; note = Cytosine phosphorothiorate
  modified_base 63: mod_base = OTHER; note = 2'-Omethylcytosine
  modified_base 70: mod_base = OTHER; note = 2'-Omethylguanosine
  modified_base 71: mod_base = OTHER; note = 2'-fluorouridine phosphorothiorate
  modified_base 72: mod_base = OTHER; note = 2'-Omethylcytosine
  modified_base 73: mod_base = OTHER; note = 2'-fluoroguanosine phosphorothiorate
  modified_base 74: mod_base = OTHER; note = 2'-Omethylcytosine phosphorothiorate

SEQ ID NO: 6688 - RNA, 76 nt, synthetic construct; identical to SEQ ID NO: 3318
  source 1..76: mol_type = other RNA
  modified_base 1: mod_base = OTHER; note = 2'-Omethylcytosine phosphorothiorate
  modified_base 2: mod_base = OTHER; note = 2'-Omethylcytosine phosphorothiorate
  modified_base 3: mod_base = OTHER; note = 2'-Omethyluridine
  modified_base 4: mod_base = OTHER; note = 2'-Omethyluridine
  modified_base 5: mod_base = OTHER; note = 2'-Omethylcytosine
  modified_base 6: mod_base = OTHER; note = 2'-Omethylguanosine
  modified_base 16: mod_base = OTHER; note = 2'-Omethyluridine
  modified_base 18: mod_base = OTHER; note = 2'-Omethylguanosine
  modified_base 19: mod_base = OTHER; note = 2'-Omethylguanosine
  modified_base 33: mod_base = OTHER; note = 2'-fluorouridine
  modified_base 35: mod_base = OTHER; note = Uridine phosphorothiorate
  modified_base 37: mod_base = OTHER; note = Guanosine phosphorothiorate
  modified_base 38: mod_base = OTHER; note = Adenosine phosphorothiorate
  modified_base 44: mod_base = OTHER; note = 2'-Omethyladenosine
  modified_base 45: mod_base = OTHER; note = 2'-Omethylguanosine
  modified_base 46: mod_base = OTHER; note = 2'-fluoroguanosine
  modified_base 47: mod_base = OTHER; note = 2'-fluorouridine
  modified_base 49: mod_base = OTHER; note = 2'-Omethylguanosine
  modified_base 50: mod_base = OTHER; note = 2'-Omethylcytosine
  modified_base 51: mod_base = OTHER; note = 2'-Omethyluridine
  modified_base 52: mod_base = OTHER; note = 2'-Omethylguanosine
  modified_base 53: mod_base = OTHER; note = 2'-Omethylguanosine
  modified_base 54: mod_base = OTHER; note = 2'-Omethyluridine
  modified_base 56: mod_base = OTHER; note = 2'-Omethylcytosine
  modified_base 59: mod_base = OTHER; note = 2'-Omethyladenosine
  modified_base 61: mod_base = OTHER; note = 2'-Omethylcytosine
  modified_base 62: mod_base = OTHER; note = 2'-Omethylcytosine
  modified_base 63: mod_base = OTHER; note = 2'-fluoroguanosine
  modified_base 64: mod_base = OTHER; note = 2'-Omethylguanosine
  modified_base 65: mod_base = OTHER; note = 2'-Omethylcytosine
  modified_base 66: mod_base = OTHER; note = 2'-Omethyluridine
  modified_base 67: mod_base = OTHER; note = 2'-Omethylcytosine
  modified_base 68: mod_base = OTHER; note = 2'-Omethylguanosine
  modified_base 73: mod_base = OTHER; note = 2'-Omethyladenosine

SEQ ID NO: 6689 - RNA, 74 nt, synthetic construct; identical to SEQ ID NO: 3293
  source 1..74: mol_type = other RNA
  modified_base 1: mod_base = OTHER; note = 2'-fluoroadenosine
  modified_base 7: mod_base = OTHER; note = Uridine phosphorothiorate
  modified_base 12: mod_base = OTHER; note = 2'-fluorocytosine
  modified_base 15: mod_base = OTHER; note = 2'-Omethylcytosine
  modified_base 36: mod_base = OTHER; note = 2'-fluoroadenosine
  modified_base 48: mod_base = OTHER; note = 2'-Omethylcytosine phosphorothiorate
  modified_base 73: mod_base = OTHER; note = 2'-Omethylcytosine phosphorothiorate
  modified_base 74: mod_base = OTHER; note = 2'-fluoroadenosine

SEQ ID NO: 6690 - RNA, 76 nt, synthetic construct; identical to SEQ ID NO: 3295
  source 1..76: mol_type = other RNA
  modified_base 1: mod_base = OTHER; note = 2'-Omethylcytosine
  modified_base 2: mod_base = OTHER; note = 2'-Omethylcytosine phosphorothiorate
  modified_base 3: mod_base = OTHER; note = 2'-Omethyluridine phosphorothiorate
  modified_base 5: mod_base = OTHER; note = 2'-Omethylcytosine phosphorothiorate
  modified_base 12: mod_base = OTHER; note = 2'-Omethyluridine
  modified_base 14: mod_base = OTHER; note = 2'-fluoroadenosine
  modified_base 16: mod_base = OTHER; note = 2'-fluorouridine phosphorothiorate
  modified_base 26: mod_base = OTHER; note = 2'-Omethylguanosine phosphorothiorate
  modified_base 34: mod_base = OTHER; note = 2'-fluorouridine
  modified_base 40: mod_base = OTHER; note = 2'-Omethylcytosine phosphorothiorate
  modified_base 41: mod_base = OTHER; note = 2'-Omethylcytosine
  modified_base 51: mod_base = OTHER; note = 2'-Omethyluridine
  modified_base 53: mod_base = OTHER; note = 2'-fluoroguanosine
  modified_base 67: mod_base = OTHER; note = 2'-fluorocytosine
  modified_base 76: mod_base = OTHER; note = 2'-Omethyladenosine

SEQ ID NO: 6691 - RNA, 86 nt, synthetic construct; identical to SEQ ID NO: 3290
  source 1..86: mol_type = other RNA
  modified_base 25: mod_base = OTHER; note = Cytosine phosphorothiorate

SEQ ID NO: 6692 - RNA, 85 nt, synthetic construct; identical to SEQ ID NO: 3297
  source 1..85: mol_type = other RNA
  modified_base 1: mod_base = OTHER; note = 2'-Omethylguanosine
  modified_base 14: mod_base = OTHER; note = 2'-Omethyladenosine phosphorothiorate
  modified_base 15: mod_base = OTHER; note = 2'-Omethylguanosine phosphorothiorate
  modified_base 16: mod_base = OTHER; note = 2'-Omethyluridine phosphorothiorate
  modified_base 17: mod_base = OTHER; note = 2'-Omethylguanosine phosphorothiorate
  modified_base 18: mod_base = OTHER; note = 2'-Omethylguanosine phosphorothiorate
  modified_base 19: mod_base = OTHER; note = 2'-fluorouridine phosphorothiorate
  modified_base 20: mod_base = OTHER; note = 2'-Omethyluridine phosphorothiorate
  modified_base 21: mod_base = OTHER; note = 2'-fluoroadenosine phosphorothiorate
  modified_base 59: mod_base = OTHER; note = 2'-Omethylcytosine
  modified_base 61: mod_base = OTHER; note = 2'-Omethylguanosine
  modified_base 82: mod_base = OTHER; note = 2'-Omethylguanosine

SEQ ID NO: 6693 - RNA, 73 nt, synthetic construct; identical to SEQ ID NO: 935
  source 1..73: mol_type = other RNA
  modified_base 1: mod_base = OTHER; note = 2'-Omethylguanosine phosphorothiorate
  modified_base 2: mod_base = OTHER; note = 2'-Omethylguanosine phosphorothiorate
  modified_base 45: mod_base = OTHER; note = 2'-fluoroguanosine
  modified_base 57: mod_base = OTHER; note = 2'-fluoroguanosine
  modified_base 68: mod_base = OTHER; note = 2'-fluoroguanosine
  modified_base 72: mod_base = OTHER; note = 2'-Omethylcytosine phosphorothiorate

SEQ ID NO: 6694 - RNA, 85 nt, synthetic construct; identical to SEQ ID NO: 3297
  source 1..85: mol_type = other RNA
  modified_base 1: mod_base = OTHER; note = 2'-Omethylguanosine
  modified_base 2: mod_base = OTHER; note = 2'-Omethylcytosine
  modified_base 3: mod_base = OTHER; note = 2'-Omethyluridine
  modified_base 4: mod_base = OTHER; note = 2'-Omethylguanosine
  modified_base 5: mod_base = OTHER; note = 2'-Omethyluridine
  modified_base 6: mod_base = OTHER; note = 2'-Omethylguanosine
  modified_base 16: mod_base = OTHER; note = 2'-Omethyluridine
  modified_base 17: mod_base = OTHER; note = 2'-Omethylguanosine
  modified_base 18: mod_base = OTHER; note = 2'-Omethylguanosine
  modified_base 33: mod_base = OTHER; note = 2'-fluorouridine
  modified_base 35: mod_base = OTHER; note = Cytosine phosphorothiorate
  modified_base 37: mod_base = OTHER; note = Adenosine phosphorothiorate
  modified_base 38: mod_base = OTHER; note = Adenosine phosphorothiorate
  modified_base 44: mod_base = OTHER; note = 2'-Omethyluridine
  modified_base 56: mod_base = OTHER; note = 2'-fluoroguanosine
  modified_base 57: mod_base = OTHER; note = 2'-fluorocytosine
  modified_base 65: mod_base = OTHER; note = 2'-Omethylcytosine
  modified_base 68: mod_base = OTHER; note = 2'-Omethyladenosine
  modified_base 70: mod_base = OTHER; note = 2'-Omethylcytosine
  modified_base 71: mod_base = OTHER; note = 2'-Omethylcytosine
  modified_base 72: mod_base = OTHER; note = 2'-fluorouridine
  modified_base 73: mod_base = OTHER; note = 2'-Omethylguanosine
  modified_base 74: mod_base = OTHER; note = 2'-Omethylcytosine
  modified_base 75: mod_base = OTHER; note = 2'-Omethyluridine
  modified_base 76: mod_base = OTHER; note = 2'-Omethylcytosine
  modified_base 77: mod_base = OTHER; note = 2'-Omethyladenosine
  modified_base 82: mod_base = OTHER; note = 2'-Omethylguanosine

SEQ ID NO: 6695 - RNA, 86 nt, synthetic construct; identical to SEQ ID NO: 3290
  source 1..86: mol_type = other RNA
  modified_base 1: mod_base = OTHER; note = 2'-Omethyladenosine
  modified_base 10: mod_base = OTHER; note = 2'-Omethylguanosine
  modified_base 11: mod_base = OTHER; note = 2'-Omethylcytosine
  modified_base 12: mod_base = OTHER; note = 2'-Omethylcytosine
  modified_base 13: mod_base = OTHER; note = 2'-Omethylguanosine
  modified_base 14: mod_base = OTHER; note = 2'-Omethyladenosine
  modified_base 15: mod_base = OTHER; note = 2'-Omethylguanosine
  modified_base 16: mod_base = OTHER; note = 2'-Omethyluridine
  modified_base 17: mod_base = OTHER; note = 2'-Omethylguanosine
  modified_base 18: mod_base = OTHER; note = 2'-Omethylguanosine
  modified_base 19: mod_base = OTHER; note = Uridine phosphorothiorate
  modified_base 20: mod_base = OTHER; note = 2'-Omethyluridine
  modified_base 21: mod_base = OTHER; note = Adenosine phosphorothiorate
  modified_base 25: mod_base = OTHER; note = 2'-Omethylcytosine
  modified_base 33: mod_base = OTHER; note = Uridine phosphorothiorate
  modified_base 34: mod_base = OTHER; note = 2'-Omethyluridine
  modified_base 35: mod_base = OTHER; note = Cytosine phosphorothiorate
  modified_base 37: mod_base = OTHER; note = Guanosine phosphorothiorate
  modified_base 38: mod_base = OTHER; note = Adenosine phosphorothiorate
  modified_base 59: mod_base = OTHER; note = 2'-Omethylguanosine
  modified_base 60: mod_base = OTHER; note = 2'-Omethyluridine
  modified_base 62: mod_base = OTHER; note = 2'-Omethylguanosine
  modified_base 64: mod_base = OTHER; note = Uridine phosphorothiorate
  modified_base 65: mod_base = OTHER; note = Uridine phosphorothiorate
  modified_base 71: mod_base = OTHER; note = 2'-Omethylcytosine
  modified_base 75: mod_base = OTHER; note = 2'-Omethylcytosine
  modified_base 83: mod_base = OTHER; note = 2'-Omethyladenosine

SEQ ID NO: 6696 - RNA, 76 nt, synthetic construct; identical to SEQ ID NO: 3325
  source 1..76: mol_type = other RNA
  modified_base 1: mod_base = OTHER; note = 2'-Omethyluridine
  modified_base 2: mod_base = OTHER; note = 2'-Omethyladenosine
  modified_base 3: mod_base = OTHER; note = 2'-Omethylcytosine
  modified_base 4: mod_base = OTHER; note = 2'-Omethyladenosine
  modified_base 5: mod_base = OTHER; note = 2'-Omethylcytosine
  modified_base 6: mod_base = OTHER; note = 2'-Omethylcytosine
  modified_base 16: mod_base = OTHER; note = 2'-Omethyluridine
  modified_base 17: mod_base = OTHER; note = 2'-Omethylguanosine
  modified_base 18: mod_base = OTHER; note = 2'-Omethylguanosine
  modified_base 20: mod_base = OTHER; note = 2'-Omethyluridine
  modified_base 25: mod_base = OTHER; note = 2'-Omethylcytosine
  modified_base 33: mod_base = OTHER; note = 2'-fluorouridine
  modified_base 35: mod_base = OTHER; note = Cytosine phosphorothiorate
  modified_base 37: mod_base = OTHER; note = Adenosine phosphorothiorate
  modified_base 38: mod_base = OTHER; note = Adenosine phosphorothiorate
  modified_base 41: mod_base = OTHER; note = 2'-Omethylcytosine
  modified_base 42: mod_base = OTHER; note = 2'-Omethyladenosine
  modified_base 43: mod_base = OTHER; note = 2'-Omethyladenosine
  modified_base 44: mod_base = OTHER; note = 2'-Omethyladenosine
  modified_base 49: mod_base = OTHER; note = 2'-Omethylcytosine
  modified_base 50: mod_base = OTHER; note = 2'-Omethylcytosine
  modified_base 52: mod_base = OTHER; note = 2'-Omethylguanosine
  modified_base 54: mod_base = OTHER; note = Uridine phosphorothiorate
  modified_base 55: mod_base = OTHER; note = Uridine phosphorothiorate
  modified_base 61: mod_base = OTHER; note = 2'-Omethylcytosine
  modified_base 65: mod_base = OTHER; note = 2'-Omethylguanosine
  modified_base 73: mod_base = OTHER; note = 2'-Omethylguanosine

SEQ ID NO: 6697 - RNA, 76 nt, synthetic construct; identical to SEQ ID NO: 625
  source 1..76: mol_type = other RNA
  modified_base 1: mod_base = OTHER; note = 2'-fluoroguanosine
  modified_base 2: mod_base = OTHER; note = 2'-fluoroguanosine
  modified_base 6: mod_base = OTHER; note = 2'-fluorocytosine phosphorothiorate
  modified_base 11: mod_base = OTHER; note = 2'-Omethylcytosine
  modified_base 12: mod_base = OTHER; note = 2'-fluoroguanosine
  modified_base 13: mod_base = OTHER; note = 2'-Omethylcytosine
  modified_base 14: mod_base = OTHER; note = 2'-Omethyladenosine
  modified_base 16: mod_base = OTHER; note = Uridine phosphorothiorate
  modified_base 17: mod_base = OTHER; note = 2'-Omethylguanosine
  modified_base 20: mod_base = OTHER; note = Uridine phosphorothiorate
  modified_base 23: mod_base = OTHER; note = 2'-Omethylcytosine phosphorothiorate
  modified_base 24: mod_base = OTHER; note = Guanosine phosphorothiorate
  modified_base 25: mod_base = OTHER; note = 2'-fluorocytosine
  modified_base 26: mod_base = OTHER; note = 2'-Omethyladenosine
  modified_base 27: mod_base = OTHER; note = Uridine phosphorothiorate
  modified_base 28: mod_base = OTHER; note = 2'-fluorouridine phosphorothiorate
  modified_base 31: mod_base = OTHER; note = 2'-fluoroadenosine
  modified_base 32: mod_base = OTHER; note = 2'-fluorocytosine
  modified_base 34: mod_base = OTHER; note = 2'-Omethyluridine phosphorothiorate
  modified_base 40: mod_base = OTHER; note = 2'-fluorouridine
  modified_base 41: mod_base = OTHER; note = Cytosine phosphorothiorate
  modified_base 42: mod_base = OTHER; note = 2'-fluoroadenosine
  modified_base 44: mod_base = OTHER; note = 2'-Omethyladenosine
  modified_base 47: mod_base = OTHER; note = 2'-fluorouridine
  modified_base 51: mod_base = OTHER; note = Guanosine phosphorothiorate
  modified_base 52: mod_base = OTHER; note = 2'-fluoroguanosine phosphorothiorate
  modified_base 53: mod_base = OTHER; note = 2'-Omethylguanosine
  modified_base 57: mod_base = OTHER; note = 2'-Omethylguanosine
  modified_base 59: mod_base = OTHER; note = Guanosine phosphorothiorate
  modified_base 60: mod_base = OTHER; note = 2'-fluorouridine
  modified_base 61: mod_base = OTHER; note = 2'-fluorocytosine
  modified_base 63: mod_base = OTHER; note = 2'-fluorocytosine
  modified_base 68: mod_base = OTHER; note = 2'-fluoroguanosine
  modified_base 70: mod_base = OTHER; note = Guanosine phosphorothiorate
  modified_base 71: mod_base = OTHER; note = 2'-fluorouridine
  modified_base 72: mod_base = OTHER; note = Cytosine phosphorothiorate
  modified_base 73: mod_base = OTHER; note = 2'-Omethylguanosine

SEQ ID NO: 6698 - RNA, 76 nt, synthetic construct; identical to SEQ ID NO: 625
  source 1..76: mol_type = other RNA
  modified_base 1: mod_base = OTHER; note = 2'-Omethylguanosine
  modified_base 2: mod_base = OTHER; note = 2'-Omethylguanosine
  modified_base 3: mod_base = OTHER; note = 2'-Omethylcytosine
  modified_base 4: mod_base = OTHER; note = 2'-Omethyluridine
  modified_base 5: mod_base = OTHER; note = 2'-Omethylcytosine
  modified_base 6: mod_base = OTHER; note = 2'-Omethylcytosine
  modified_base 7: mod_base = OTHER; note = 2'-fluoroguanosine phosphorothiorate
  modified_base 10: mod_base = OTHER; note = 2'-Omethylguanosine
  modified_base 11: mod_base = OTHER; note = 2'-Omethylcytosine
  modified_base 12: mod_base = OTHER; note = 2'-Omethylguanosine
  modified_base 14: mod_base = OTHER; note = 2'-Omethyladenosine
  modified_base 15: mod_base = OTHER; note = 2'-fluoroadenosine
  modified_base 17: mod_base = OTHER; note = 2'-Omethylguanosine
  modified_base 18: mod_base = OTHER; note = 2'-Omethylguanosine
  modified_base 19: mod_base = OTHER; note = 2'-fluoroadenosine phosphorothiorate
  modified_base 22: mod_base = OTHER; note = 2'-Omethylguanosine
  modified_base 23: mod_base = OTHER; note = 2'-Omethylcytosine
  modified_base 24: mod_base = OTHER; note = 2'-fluoroguanosine phosphorothiorate
  modified_base 26: mod_base = OTHER; note = Adenosine phosphorothiorate
  modified_base 28: mod_base = OTHER; note = 2'-Omethyluridine
  modified_base 29: mod_base = OTHER; note = 2'-fluoroguanosine
  modified_base 30: mod_base = OTHER; note = 2'-Omethylguanosine
  modified_base 33: mod_base = OTHER; note = 2'-fluorouridine
  modified_base 35: mod_base = OTHER; note = 2'-fluorocytosine phosphorothiorate
  modified_base 37: mod_base = OTHER; note = Adenosine phosphorothiorate
  modified_base 38: mod_base = OTHER; note = Adenosine phosphorothiorate
  modified_base 40: mod_base = OTHER; note = 2'-fluorouridine
  modified_base 44: mod_base = OTHER; note = 2'-fluoroadenosine phosphorothiorate
  modified_base 48: mod_base = OTHER; note = 2'-fluorouridine
  modified_base 49: mod_base = OTHER; note = 2'-Omethylcytosine phosphorothiorate
  modified_base 50: mod_base = OTHER; note = 2'-Omethylcytosine
  modified_base 51: mod_base = OTHER; note = 2'-Omethylguanosine
  modified_base 52: mod_base = OTHER; note = 2'-Omethylguanosine
  modified_base 55: mod_base = OTHER; note = Uridine phosphorothiorate
  modified_base 56: mod_base = OTHER; note = 2'-Omethylcytosine
  modified_base 59: mod_base = OTHER; note = 2'-Omethylguanosine
  modified_base 61: mod_base = OTHER; note = Cytosine phosphorothiorate
  modified_base 62: mod_base = OTHER; note = 2'-Omethylcytosine
  modified_base 63: mod_base = OTHER; note = 2'-fluorocytosine
  modified_base 64: mod_base = OTHER; note = 2'-fluoroguanosine
  modified_base 65: mod_base = OTHER; note = 2'-fluoroguanosine
  modified_base 66: mod_base = OTHER; note = 2'-fluorocytosine
  modified_base 67: mod_base = OTHER; note = 2'-Omethylguanosine phosphorothiorate
  modified_base 68: mod_base = OTHER; note = 2'-fluoroguanosine
  modified_base 69: mod_base = OTHER; note = 2'-fluoroadenosine
  modified_base 72: mod_base = OTHER; note = 2'-Omethylcytosine
  modified_base 73: mod_base = OTHER; note = 2'-Omethylguanosine
  modified_base 74: mod_base = OTHER; note = 2'-fluorocytosine phosphorothiorate
  modified_base 75: mod_base = OTHER; note = 2'-Omethylcytosine
  modified_base 76: mod_base = OTHER; note = 2'-fluoroadenosine

SEQ ID NO: 6699 - RNA, 76 nt, synthetic construct; identical to SEQ ID NO: 3289
  source 1..76: mol_type = other RNA
  modified_base 1: mod_base = OTHER; note = 2'-Omethylguanosine
  modified_base 13: mod_base = OTHER; note = 2'-Omethylcytosine

SEQ ID NO: 6700 - RNA, 75 nt, synthetic construct; identical to SEQ ID NO: 3336
  source 1..75: mol_type = other RNA
  modified_base 1: mod_base = OTHER; note = 2'-Omethylcytosine phosphorothiorate
  modified_base 7: mod_base = OTHER; note = 2'-fluorouridine
  modified_base 19: mod_base = OTHER; note = 2'-fluorouridine
  modified_base 21: mod_base = OTHER; note = 2'-fluoroguanosine
  modified_base 46: mod_base = OTHER; note = 2'-fluorouridine
  modified_base 48: mod_base = OTHER; note = 2'-fluorocytosine
  modified_base 49: mod_base = OTHER; note = Adenosine phosphorothiorate
  modified_base 58: mod_base = OTHER; note = 2'-fluoroguanosine
  modified_base 63: mod_base = OTHER; note = 2'-Omethyluridine
  modified_base 73: mod_base = OTHER; note = Cytosine phosphorothiorate
  modified_base 74: mod_base = OTHER; note = 2'-Omethylcytosine

SEQ ID NO: 6701 - RNA, 74 nt, synthetic construct; identical to SEQ ID NO: 3293
  source 1..74: mol_type = other RNA
  modified_base 1: mod_base = OTHER; note = Adenosine phosphorothiorate
  modified_base 4: mod_base = OTHER; note = 2'-fluorouridine
  modified_base 27: mod_base = OTHER; note = Uridine phosphorothiorate
  modified_base 43: mod_base = OTHER; note = Guanosine phosphorothiorate
  modified_base 51: mod_base = OTHER; note = 2'-fluoroguanosine
  modified_base 59: mod_base = OTHER; note = 2'-fluorocytosine
  modified_base 73: mod_base = OTHER; note = 2'-Omethylcytosine phosphorothiorate

SEQ ID NO: 6702 - RNA, 85 nt, synthetic construct; identical to SEQ ID NO: 3297
  source 1..85: mol_type = other RNA
  modified_base 10: mod_base = OTHER; note = 2'-Omethylguanosine
  modified_base 11: mod_base = OTHER; note = 2'-Omethylcytosine
  modified_base 12: mod_base = OTHER; note = 2'-Omethylcytosine
  modified_base 13: mod_base = OTHER; note = 2'-Omethylguanosine
  modified_base 22: mod_base = OTHER; note = 2'-Omethyladenosine
  modified_base 23: mod_base = OTHER; note = 2'-Omethylguanosine
  modified_base 24: mod_base = OTHER; note = 2'-Omethylguanosine
  modified_base 25: mod_base = OTHER; note = 2'-Omethylcytosine
  modified_base 58: mod_base = OTHER; note = 2'-Omethylguanosine
  modified_base 59: mod_base = OTHER; note = 2'-Omethylcytosine
  modified_base 60: mod_base = OTHER; note = 2'-Omethyladenosine
  modified_base 61: mod_base = OTHER; note = 2'-Omethylguanosine
  modified_base 62: mod_base = OTHER; note = 2'-Omethylguanosine

SEQ ID NO: 6703 - RNA, 76 nt, synthetic construct; identical to SEQ ID NO: 625
  source 1..76: mol_type = other RNA
  modified_base 1: mod_base = OTHER; note = 2'-Omethylguanosine
  modified_base 2: mod_base = OTHER; note = 2'-fluoroguanosine
  modified_base 3: mod_base = OTHER; note = 2'-Omethylcytosine
  modified_base 4: mod_base = OTHER; note = 2'-Omethyluridine
  modified_base 5: mod_base = OTHER; note = Cytosine phosphorothiorate
  modified_base 6: mod_base = OTHER; note = 2'-fluorocytosine
  modified_base 10: mod_base = OTHER; note = 2'-fluoroguanosine
  modified_base 13: mod_base = OTHER; note = 2'-Omethylcytosine
  modified_base 19: mod_base = OTHER; note = Adenosine phosphorothiorate
  modified_base 20: mod_base = OTHER; note = 2'-fluorouridine
  modified_base 22: mod_base = OTHER; note = 2'-Omethylguanosine
  modified_base 24: mod_base = OTHER; note = 2'-fluoroguanosine
  modified_base 25: mod_base = OTHER; note = 2'-fluorocytosine phosphorothiorate
  modified_base 26: mod_base = OTHER; note = 2'-fluoroadenosine
  modified_base 28: mod_base = OTHER; note = 2'-fluorouridine
  modified_base 30: mod_base = OTHER; note = 2'-Omethylguanosine phosphorothiorate
  modified_base 31: mod_base = OTHER; note = 2'-fluoroadenosine
  modified_base 32: mod_base = OTHER; note = 2'-fluorocytosine
  modified_base 42: mod_base = OTHER; note = Adenosine phosphorothiorate
  modified_base 44: mod_base = OTHER; note = Adenosine phosphorothiorate
  modified_base 45: mod_base = OTHER; note = 2'-fluoroguanosine
  modified_base 47: mod_base = OTHER; note = 2'-fluorouridine
  modified_base 52: mod_base = OTHER; note = Guanosine phosphorothiorate
  modified_base 53: mod_base = OTHER; note = 2'-Omethylguanosine
  modified_base 54: mod_base = OTHER; note = 2'-Omethyluridine
  modified_base 59: mod_base = OTHER; note = Guanosine phosphorothiorate
  modified_base 61: mod_base = OTHER; note = Cytosine phosphorothiorate
  modified_base 63: mod_base = OTHER; note = 2'-fluorocytosine phosphorothiorate
  modified_base 64: mod_base = OTHER; note = 2'-fluoroguanosine
  modified_base 65: mod_base = OTHER; note = 2'-fluoroguanosine
  modified_base 66: mod_base = OTHER; note = 2'-fluorocytosine
  modified_base 67: mod_base = OTHER; note = 2'-fluoroguanosine
  modified_base 68: mod_base = OTHER; note = 2'-fluoroguanosine
  modified_base 69: mod_base = OTHER; note = 2'-Omethyladenosine
  modified_base 71: mod_base = OTHER; note = 2'-fluorouridine
  modified_base 73: mod_base = OTHER; note = 2'-Omethylguanosine
  modified_base 76: mod_base = OTHER; note = 2'-Omethyladenosine

SEQ ID NO: 6704 - RNA, 76 nt, synthetic construct; identical to SEQ ID NO: 3447
  source 1..76: mol_type = other RNA
  modified_base 1: mod_base = OTHER; note = 2'-Omethylguanosine
  modified_base 14: mod_base = OTHER; note = 2'-Omethyladenosine
  modified_base 15: mod_base = OTHER; note = 2'-Omethyladenosine
  modified_base 16: mod_base = OTHER; note = 2'-Omethyluridine
  modified_base 17: mod_base = OTHER; note = 2'-Omethylguanosine
  modified_base 18: mod_base = OTHER; note = 2'-Omethylguanosine
  modified_base 19: mod_base = OTHER; note = Adenosine phosphorothiorate
  modified_base 20: mod_base = OTHER; note = 2'-Omethyluridine
  modified_base 21: mod_base = OTHER; note = Adenosine phosphorothiorate
  modified_base 33: mod_base = OTHER; note = 2'-fluorouridine
  modified_base 34: mod_base = OTHER; note = 2'-Omethyluridine
  modified_base 35: mod_base = OTHER; note = Cytosine phosphorothiorate
  modified_base 37: mod_base = OTHER; note = Adenosine phosphorothiorate
  modified_base 38: mod_base = OTHER; note = Adenosine phosphorothiorate
  modified_base 41: mod_base = OTHER; note = 2'-Omethylcytosine
  modified_base 42: mod_base = OTHER; note = 2'-Omethyladenosine
  modified_base 43: mod_base = OTHER; note = 2'-Omethyladenosine
  modified_base 44: mod_base = OTHER; note = 2'-Omethyladenosine
  modified_base 50: mod_base = OTHER; note = 2'-Omethylcytosine
  modified_base 52: mod_base = OTHER; note = 2'-Omethylguanosine
  modified_base 73: mod_base = OTHER; note = 2'-Omethylguanosine

SEQ ID NO: 6705 - RNA, 85 nt, synthetic construct; identical to SEQ ID NO: 3310
  source 1..85: mol_type = other RNA
  modified_base 1: mod_base = OTHER; note = 2'-Omethylcytosine phosphorothiorate
  modified_base 8: mod_base = OTHER; note = Guanosine phosphorothiorate
  modified_base 11: mod_base = OTHER; note = Cytosine phosphorothiorate
  modified_base 30: mod_base = OTHER; note = 2'-fluoroadenosine
  modified_base 44: mod_base = OTHER; note = Guanosine phosphorothiorate
  modified_base 50: mod_base = OTHER; note = Adenosine phosphorothiorate
  modified_base 59: mod_base = OTHER; note = 2'-Omethyluridine
  modified_base 75: mod_base = OTHER; note = 2'-fluorouridine
  modified_base 84: mod_base = OTHER; note = 2'-fluorocytosine

SEQ ID NO: 6706 - RNA, 86 nt, synthetic construct; identical to SEQ ID NO: 3290
  source 1..86: mol_type = other RNA
  modified_base 62: mod_base = OTHER; note = 2'-Omethylguanosine
  modified_base 83: mod_base = OTHER; note = 2'-Omethyladenosine

SEQ ID NO: 6707 - RNA, 75 nt, synthetic construct; identical to SEQ ID NO: 3311
  source 1..75: mol_type = other RNA

SEQ ID NO: 6708 - RNA, 74 nt, synthetic construct; identical to SEQ ID NO: 3293
  source 1..74: mol_type = other RNA
  modified_base 2: mod_base = OTHER; note = 2'-Omethylcytosine
  modified_base 8: mod_base = OTHER; note = 2'-fluoroguanosine
  modified_base 10: mod_base = OTHER; note = 2'-fluorocytosine
  modified_base 35: mod_base = OTHER; note = 2'-fluoroguanosine
  modified_base 43: mod_base = OTHER; note = Guanosine phosphorothiorate
  modified_base 48: mod_base = OTHER; note = 2'-fluorocytosine
  modified_base 64: mod_base = OTHER; note = 2'-fluorocytosine
  modified_base 73: mod_base = OTHER; note = 2'-Omethylcytosine phosphorothiorate

SEQ ID NO: 6709 - RNA, 85 nt, synthetic construct; identical to SEQ ID NO: 3286
  source 1..85: mol_type = other RNA
  modified_base 1: mod_base = OTHER; note = 2'-Omethylcytosine phosphorothiorate
  modified_base 2: mod_base = OTHER; note = 2'-Omethylcytosine phosphorothiorate
  modified_base 4: mod_base = OTHER; note = Guanosine phosphorothiorate
  modified_base 26: mod_base = OTHER; note = 2'-fluorouridine
  modified_base 33: mod_base = OTHER; note = 2'-fluorouridine
  modified_base 34: mod_base = OTHER; note = Uridine phosphorothiorate
  modified_base 38: mod_base = OTHER; note = 2'-fluorouridine
  modified_base 51: mod_base = OTHER; note = 2'-Omethyluridine
  modified_base 54: mod_base = OTHER; note = 2'-Omethylcytosine
  modified_base 56: mod_base = OTHER; note = 2'-fluoroguanosine
  modified_base 57: mod_base = OTHER; note = 2'-Omethylcytosine
  modified_base 58: mod_base = OTHER; note = 2'-Omethylguanosine
  modified_base 69: mod_base = OTHER; note = Cytosine phosphorothiorate
  modified_base 72: mod_base = OTHER; note = 2'-fluorocytosine
  modified_base 84: mod_base = OTHER; note = 2'-fluorocytosine

SEQ ID NO: 6710 - RNA, 76 nt, synthetic construct; identical to SEQ ID NO: 3795
  source 1..76: mol_type = other RNA
  modified_base 1: mod_base = OTHER; note = 2'-Omethylguanosine phosphorothiorate
  modified_base 2: mod_base = OTHER; note = 2'-Omethylcytosine
  modified_base 3: mod_base = OTHER; note = 2'-Omethylcytosine
  modified_base 4: mod_base = OTHER; note = 2'-Omethyluridine
  modified_base 5: mod_base = OTHER; note = 2'-Omethylcytosine
  modified_base 6: mod_base = OTHER; note = 2'-Omethylcytosine
  modified_base 49: mod_base = OTHER; note = 2'-Omethylguanosine
  modified_base 50: mod_base = OTHER; note = 2'-Omethylcytosine
  modified_base 51: mod_base = OTHER; note = 2'-Omethylguanosine
  modified_base 52: mod_base = OTHER; note = 2'-Omethylguanosine
  modified_base 53: mod_base = OTHER; note = 2'-Omethylguanosine
  modified_base 61: mod_base = OTHER; note = 2'-Omethylcytosine
  modified_base 62: mod_base = OTHER; note = 2'-Omethylcytosine
  modified_base 63: mod_base = OTHER; note = 2'-fluorocytosine
  modified_base 64: mod_base = OTHER; note = 2'-Omethylguanosine
  modified_base 65: mod_base = OTHER; note = 2'-Omethyluridine
  modified_base 66: mod_base = OTHER; note = 2'-Omethylcytosine
  modified_base 67: mod_base = OTHER; note = 2'-Omethylguanosine
  modified_base 68: mod_base = OTHER; note = 2'-Omethylguanosine
  modified_base 69: mod_base = OTHER; note = 2'-Omethyladenosine
  modified_base 71: mod_base = OTHER; note = 2'-Omethylguanosine
  modified_base 72: mod_base = OTHER; note = 2'-Omethyluridine

SEQ ID NO: 6711 - RNA, 86 nt, synthetic construct; identical to SEQ ID NO: 3290
  source 1..86: mol_type = other RNA
  modified_base 1: mod_base = OTHER; note = 2'-Omethyladenosine
  modified_base 2: mod_base = OTHER; note = 2'-Omethylcytosine
  modified_base 3: mod_base = OTHER; note = 2'-Omethylcytosine
  modified_base 4: mod_base = OTHER; note = 2'-Omethyladenosine
  modified_base 5: mod_base = OTHER; note = 2'-Omethylguanosine
  modified_base 6: mod_base = OTHER; note = 2'-Omethylguanosine
  modified_base 14: mod_base = OTHER; note = 2'-Omethyladenosine
  modified_base 15: mod_base = OTHER; note = 2'-Omethylguanosine
  modified_base 16: mod_base = OTHER; note = 2'-Omethyluridine
  modified_base 17: mod_base = OTHER; note = 2'-Omethylguanosine
  modified_base 18: mod_base = OTHER; note = 2'-Omethylguanosine
  modified_base 20: mod_base = OTHER; note = 2'-Omethyluridine
  modified_base 22: mod_base = OTHER; note = 2'-Omethyladenosine
  modified_base 23: mod_base = OTHER; note = 2'-Omethylguanosine
  modified_base 24: mod_base = OTHER; note = 2'-Omethylguanosine
  modified_base 25: mod_base = OTHER; note = 2'-Omethylcytosine
  modified_base 41: mod_base = OTHER; note = 2'-fluorocytosine
  modified_base 42: mod_base = OTHER; note = 2'-Omethyladenosine
  modified_base 43: mod_base = OTHER; note = 2'-Omethyladenosine
  modified_base 44: mod_base = OTHER; note = 2'-fluorouridine
  modified_base 59: mod_base = OTHER; note = 2'-Omethylguanosine
  modified_base 60: mod_base = OTHER; note = 2'-Omethyluridine
  modified_base 62: mod_base = OTHER; note = 2'-Omethylguanosine
  modified_base 64: mod_base = OTHER; note = 2'-Omethyluridine
  modified_base 65: mod_base = OTHER; note = Uridine phosphorothiorate
  modified_base 66: mod_base = OTHER; note = 2'-Omethylcytosine
  modified_base 67: mod_base = OTHER; note = 2'-fluoroguanosine
  modified_base 69: mod_base = OTHER; note = 2'-Omethyladenosine
  modified_base 71: mod_base = OTHER; note = 2'-Omethylcytosine
  modified_base 75: mod_base = OTHER; note = 2'-Omethylcytosine
  modified_base 83: mod_base = OTHER; note = 2'-Omethyladenosine

SEQ ID NO: 6712 - RNA, 76 nt, synthetic construct; identical to SEQ ID NO: 3332
  source 1..76: mol_type = other RNA
  modified_base 1: mod_base = OTHER; note = 2'-Omethylguanosine
  modified_base 2: mod_base = OTHER; note = 2'-Omethylguanosine
  modified_base 3: mod_base = OTHER; note = 2'-Omethylcytosine
  modified_base 4: mod_base = OTHER; note = 2'-Omethylcytosine
  modified_base 5: mod_base = OTHER; note = 2'-Omethylcytosine
  modified_base 6: mod_base = OTHER; note = 2'-Omethylcytosine
  modified_base 14: mod_base = OTHER; note = 2'-Omethyladenosine
  modified_base 15: mod_base = OTHER; note = 2'-Omethyladenosine
  modified_base 16: mod_base = OTHER; note = 2'-Omethyluridine
  modified_base 17: mod_base = OTHER; note = 2'-Omethylguanosine
  modified_base 18: mod_base = OTHER; note = 2'-Omethylguanosine
  modified_base 20: mod_base = OTHER; note = 2'-Omethyluridine
  modified_base 25: mod_base = OTHER; note = 2'-Omethylcytosine
  modified_base 33: mod_base = OTHER; note = 2'-fluorouridine
  modified_base 35: mod_base = OTHER; note = Cytosine phosphorothiorate
  modified_base 37: mod_base = OTHER; note = Adenosine phosphorothiorate
  modified_base 38: mod_base = OTHER; note = Adenosine phosphorothiorate
  modified_base 41: mod_base = OTHER; note = 2'-Omethylcytosine
  modified_base 42: mod_base = OTHER; note = 2'-Omethyladenosine
  modified_base 43: mod_base = OTHER; note = 2'-Omethyladenosine
  modified_base 44: mod_base = OTHER; note = 2'-fluoroadenosine
  modified_base 49: mod_base = OTHER; note = 2'-Omethylguanosine
  modified_base 50: mod_base = OTHER; note = 2'-Omethylcytosine
  modified_base 52: mod_base = OTHER; note = 2'-Omethylguanosine
  modified_base 54: mod_base = OTHER; note = 2'-Omethyluridine
  modified_base 55: mod_base = OTHER; note = Uridine phosphorothiorate
  modified_base 56: mod_base = OTHER; note = 2'-Omethylcytosine
  modified_base 57: mod_base = OTHER; note = 2'-fluoroguanosine
  modified_base 59: mod_base = OTHER; note = 2'-Omethylguanosine
  modified_base 61: mod_base = OTHER; note = 2'-Omethylcytosine
  modified_base 65: mod_base = OTHER; note = 2'-Omethylcytosine
  modified_base 73: mod_base = OTHER; note = 2'-Omethylguanosine

SEQ ID NO: 6713 - RNA, 76 nt, synthetic construct; identical to SEQ ID NO: 625
  source 1..76: mol_type = other RNA
  modified_base 1: mod_base = OTHER; note = 2'-Omethylguanosine phosphorothiorate
  modified_base 2: mod_base = OTHER; note = 2'-Omethylguanosine
  modified_base 17: mod_base = OTHER; note = 2'-Omethylguanosine
  modified_base 22: mod_base = OTHER; note = 2'-Omethylguanosine
  modified_base 23: mod_base = OTHER; note = 2'-Omethylcytosine
  modified_base 24: mod_base = OTHER; note = 2'-Omethylguanosine
  modified_base 25: mod_base = OTHER; note = 2'-Omethylcytosine
  modified_base 33: mod_base = OTHER; note = 2'-fluorouridine
  modified_base 35: mod_base = OTHER; note = Cytosine phosphorothiorate
  modified_base 37: mod_base = OTHER; note = Adenosine phosphorothiorate
  modified_base 38: mod_base = OTHER; note = Adenosine phosphorothiorate
  modified_base 52: mod_base = OTHER; note = 2'-Omethylguanosine
  modified_base 54: mod_base = OTHER; note = Uridine phosphorothiorate
  modified_base 55: mod_base = OTHER; note = Uridine phosphorothiorate
  modified_base 56: mod_base = OTHER; note = Cytosine phosphorothiorate
  modified_base 57: mod_base = OTHER; note = Guanosine phosphorothiorate
  modified_base 62: mod_base = OTHER; note = 2'-Omethylcytosine
  modified_base 63: mod_base = OTHER; note = 2'-fluorocytosine
  modified_base 65: mod_base = OTHER; note = 2'-Omethylguanosine
  modified_base 68: mod_base = OTHER; note = 2'-Omethylguanosine
  modified_base 73: mod_base = OTHER; note = 2'-Omethylguanosine
  modified_base 75: mod_base = OTHER; note = 2'-fluorocytosine phosphorothiorate

SEQ ID NO: 6714 - RNA, 76 nt, synthetic construct; identical to SEQ ID NO: 625
  source 1..76: mol_type = other RNA
  modified_base 61: mod_base = OTHER; note = 2'-fluorocytosine
  modified_base 62: mod_base = OTHER; note = 2'-fluorocytosine
  modified_base 63: mod_base = OTHER; note = 2'-fluorocytosine
  modified_base 64: mod_base = OTHER; note = 2'-fluoroguanosine
  modified_base 65: mod_base = OTHER; note = 2'-fluoroguanosine

SEQ ID NO: 6715 - RNA, 85 nt, synthetic construct; identical to SEQ ID NO: 3297
  source 1..85: mol_type = other RNA
  modified_base 1: mod_base = OTHER; note = 2'-Omethylguanosine
  modified_base 17: mod_base = OTHER; note = 2'-Omethylguanosine

SEQ ID NO: 6716 - RNA, 76 nt, synthetic construct; identical to SEQ ID NO: 3318
  source 1..76: mol_type = other RNA
  modified_base 1: mod_base = OTHER; note = 2'-Omethylcytosine phosphorothiorate
  modified_base 2: mod_base = OTHER; note = 2'-Omethylcytosine phosphorothiorate
  modified_base 8: mod_base = OTHER; note = Uridine phosphorothiorate
  modified_base 14: mod_base = OTHER; note = 2'-Omethyladenosine
  modified_base 18: mod_base = OTHER; note = 2'-Omethylguanosine
  modified_base 19: mod_base = OTHER; note = 2'-Omethylguanosine
  modified_base 22: mod_base = OTHER; note = 2'-Omethylguanosine
  modified_base 25: mod_base = OTHER; note = 2'-Omethylcytosine
  modified_base 27: mod_base = OTHER; note = 2'-Omethylguanosine
  modified_base 33: mod_base = OTHER; note = 2'-fluorouridine
  modified_base 41: mod_base = OTHER; note = 2'-Omethylcytosine phosphorothiorate
  modified_base 44: mod_base = OTHER; note = 2'-Omethyladenosine phosphorothiorate
  modified_base 45: mod_base = OTHER; note = 2'-Omethylguanosine
  modified_base 46: mod_base = OTHER; note = 2'-fluoroguanosine
  modified_base 47: mod_base = OTHER; note = 2'-fluorouridine
  modified_base 48: mod_base = OTHER; note = 2'-fluorocytosine
  modified_base 55: mod_base = OTHER; note = Uridine phosphorothiorate
  modified_base 71: mod_base = OTHER; note = 2'-Omethylguanosine
  modified_base 73: mod_base = OTHER; note = 2'-Omethyladenosine

SEQ ID NO: 6717 - RNA, 76 nt, synthetic construct; identical to SEQ ID NO: 625
  source 1..76: mol_type = other RNA
  modified_base 1: mod_base = OTHER; note = 2'-Omethylguanosine
  modified_base 10: mod_base = OTHER; note = 2'-Omethylguanosine
  modified_base 13: mod_base = OTHER; note = 2'-Omethylcytosine
  modified_base 17: mod_base = OTHER; note = Guanosine phosphorothiorate
  modified_base 18: mod_base = OTHER; note = 2'-Omethylguanosine
  modified_base 19: mod_base = OTHER; note = Adenosine phosphorothiorate
  modified_base 20: mod_base = OTHER; note = 2'-Omethyluridine
  modified_base 25: mod_base = OTHER; note = 2'-Omethylcytosine
  modified_base 29: mod_base = OTHER; note = 2'-Omethylguanosine
  modified_base 33: mod_base = OTHER; note = 2'-fluorouridine
  modified_base 35: mod_base = OTHER; note = Cytosine phosphorothiorate
  modified_base 37: mod_base = OTHER; note = Adenosine phosphorothiorate
  modified_base 38: mod_base = OTHER; note = Adenosine phosphorothiorate
  modified_base 41: mod_base = OTHER; note = 2'-fluorocytosine phosphorothiorate
  modified_base 43: mod_base = OTHER; note = 2'-Omethyladenosine
  modified_base 50: mod_base = OTHER; note = 2'-Omethylcytosine
  modified_base 52: mod_base = OTHER; note = 2'-Omethylguanosine
  modified_base 54: mod_base = OTHER; note = Uridine phosphorothiorate
  modified_base 55: mod_base = OTHER; note = Uridine phosphorothiorate
  modified_base 56: mod_base = OTHER; note = 2'-Omethylcytosine
  modified_base 57: mod_base = OTHER; note = Guanosine phosphorothiorate
  modified_base 62: mod_base = OTHER; note = 2'-Omethylcytosine
  modified_base 63: mod_base = OTHER; note = 2'-fluorocytosine
  modified_base 65: mod_base = OTHER; note = 2'-Omethylguanosine
  modified_base 71: mod_base = OTHER; note = 2'-Omethyluridine
  modified_base 73: mod_base = OTHER; note = 2'-Omethylguanosine

SEQ ID NO: 6718 - RNA, 75 nt, synthetic construct; identical to SEQ ID NO: 1045
  source 1..75: mol_type = other RNA
  modified_base 1: mod_base = OTHER; note = Guanosine phosphorothiorate
  modified_base 3: mod_base = OTHER; note = 2'-Omethyluridine
  modified_base 19: mod_base = OTHER; note = 2'-fluorouridine
  modified_base 20: mod_base = OTHER; note = 2'-Omethyladenosine
  modified_base 39: mod_base = OTHER; note = 2'-fluorouridine
  modified_base 56: mod_base = OTHER; note = 2'-fluoroguanosine
  modified_base 57: mod_base = OTHER; note = 2'-Omethyladenosine
  modified_base 73: mod_base = OTHER; note = 2'-fluorocytosine phosphorothiorate

SEQ ID NO: 6719 - RNA, 85 nt, synthetic construct; identical to SEQ ID NO: 3288
  source 1..85: mol_type = other RNA
  modified_base 1: mod_base = OTHER; note = 2'-Omethylcytosine
  modified_base 12: mod_base = OTHER; note = Guanosine phosphorothiorate
  modified_base 26: mod_base = OTHER; note = 2'-fluorouridine
  modified_base 30: mod_base = OTHER; note = 2'-fluoroadenosine
  modified_base 44: mod_base = OTHER; note = 2'-Omethylguanosine
  modified_base 46: mod_base = OTHER; note = 2'-Omethyladenosine
  modified_base 54: mod_base = OTHER; note = 2'-fluorocytosine
  modified_base 56: mod_base = OTHER; note = 2'-Omethylguanosine
  modified_base 58: mod_base = OTHER; note = 2'-Omethylguanosine
  modified_base 84: mod_base = OTHER; note = 2'-fluorocytosine

SEQ ID NO: 6720 - RNA, 73 nt, synthetic construct; identical to SEQ ID NO: 935
  source 1..73: mol_type = other RNA
  modified_base 1: mod_base = OTHER; note = 2'-Omethylguanosine phosphorothiorate
  modified_base 2: mod_base = OTHER; note = 2'-Omethylguanosine phosphorothiorate
  modified_base 66: mod_base = OTHER; note = Cytosine phosphorothiorate
  modified_base 67: mod_base = OTHER; note = 2'-fluoroguanosine
  modified_base 72: mod_base = OTHER; note = 2'-Omethylcytosine

SEQ ID NO: 6721 - RNA, 75 nt, synthetic construct; identical to SEQ ID NO: 1045
  source 1..75: mol_type = other RNA
  modified_base 1: mod_base = OTHER; note = 2'-Omethylguanosine phosphorothiorate
  modified_base 2: mod_base = OTHER; note = 2'-Omethylguanosine phosphorothiorate
  modified_base 32: mod_base = OTHER; note = Cytosine phosphorothiorate
  modified_base 33: mod_base = OTHER; note = 2'-Omethyluridine
  modified_base 73: mod_base = OTHER; note = Cytosine phosphorothiorate
  modified_base 74: mod_base = OTHER; note = 2'-Omethylcytosine phosphorothiorate
  modified_base 75: mod_base = OTHER; note = 2'-Omethyladenosine

SEQ ID NO: 6722 - RNA, 76 nt, synthetic construct; identical to SEQ ID NO: 3316
  source 1..76: mol_type = other RNA
  modified_base 1: mod_base = OTHER; note = 2'-Omethyladenosine phosphorothiorate
  modified_base 2: mod_base = OTHER; note = 2'-Omethylcytosine phosphorothiorate
  modified_base 3: mod_base = OTHER; note = 2'-Omethylcytosine
  modified_base 4: mod_base = OTHER; note = 2'-Omethyladenosine
  modified_base 5: mod_base = OTHER; note = 2'-Omethyladenosine
  modified_base 6: mod_base = OTHER; note = 2'-Omethylcytosine
  modified_base 16: mod_base = OTHER; note = 2'-Omethyluridine
  modified_base 17: mod_base = OTHER; note = 2'-Omethylguanosine
  modified_base 18: mod_base = OTHER; note = 2'-Omethylguanosine
  modified_base 20: mod_base = OTHER; note = 2'-Omethyluridine
  modified_base 25: mod_base = OTHER; note = 2'-Omethylcytosine
  modified_base 33: mod_base = OTHER; note = 2'-fluorouridine
  modified_base 35: mod_base = OTHER; note = Cytosine phosphorothiorate
  modified_base 37: mod_base = OTHER; note = Adenosine phosphorothiorate
  modified_base 38: mod_base = OTHER; note = Adenosine phosphorothiorate
  modified_base 41: mod_base = OTHER; note = 2'-Omethylcytosine
  modified_base 44: mod_base = OTHER; note = 2'-Omethyladenosine
  modified_base 45: mod_base = OTHER; note = 2'-Omethylguanosine
  modified_base 46: mod_base = OTHER; note = 2'-fluoroguanosine
  modified_base 47: mod_base = OTHER; note = 2'-fluorouridine
  modified_base 48: mod_base = OTHER; note = 2'-fluorouridine
  modified_base 49: mod_base = OTHER; note = 2'-Omethylcytosine
  modified_base 50: mod_base = OTHER; note = 2'-Omethylcytosine
  modified_base 51: mod_base = OTHER; note = 2'-Omethylguanosine
  modified_base 52: mod_base = OTHER; note = 2'-Omethylguanosine
  modified_base 53: mod_base = OTHER; note = 2'-Omethylguanosine
  modified_base 54: mod_base = OTHER; note = 2'-Omethyluridine
  modified_base 56: mod_base = OTHER; note = 2'-Omethylcytosine
  modified_base 59: mod_base = OTHER; note = 2'-Omethylguanosine
  modified_base 73: mod_base = OTHER; note = 2'-Omethylguanosine

SEQ ID NO: 6723 - RNA, 76 nt, synthetic construct; identical to SEQ ID NO: 625
  source 1..76: mol_type = other RNA
  modified_base 1: mod_base = OTHER; note = 2'-Omethylguanosine
  modified_base 2: mod_base = OTHER; note = 2'-Omethylguanosine
  modified_base 18: mod_base = OTHER; note = 2'-Omethylguanosine
  modified_base 23: mod_base = OTHER; note = 2'-Omethylcytosine
  modified_base 33: mod_base = OTHER; note = 2'-fluorouridine
  modified_base 35: mod_base = OTHER; note = Cytosine phosphorothiorate
  modified_base 37: mod_base = OTHER; note = Adenosine phosphorothiorate
  modified_base 38: mod_base = OTHER; note = Adenosine phosphorothiorate
  modified_base 52: mod_base = OTHER; note = 2'-Omethylguanosine
  modified_base 57: mod_base = OTHER; note = 2'-Omethylguanosine
  modified_base 62: mod_base = OTHER; note = 2'-Omethylcytosine
  modified_base 73: mod_base = OTHER; note = 2'-Omethylguanosine
  modified_base 75: mod_base = OTHER; note = 2'-fluorocytosine phosphorothiorate

SEQ ID NO: 6724 - RNA, 76 nt, synthetic construct; identical to SEQ ID NO: 625
  source 1..76: mol_type = other RNA
  modified_base 1: mod_base = OTHER; note = 2'-Omethylguanosine phosphorothiorate
  modified_base 2: mod_base = OTHER; note = 2'-Omethylguanosine
  modified_base 10: mod_base = OTHER; note = 2'-Omethylguanosine
  modified_base 11: mod_base = OTHER; note = 2'-Omethylcytosine
  modified_base 12: mod_base = OTHER; note = 2'-Omethylguanosine
  modified_base 13: mod_base = OTHER; note = 2'-Omethylcytosine
  modified_base 17: mod_base = OTHER; note = 2'-Omethylguanosine
  modified_base 22: mod_base = OTHER; note = 2'-Omethylguanosine
  modified_base 23: mod_base = OTHER; note = 2'-Omethylcytosine
  modified_base 24: mod_base = OTHER; note = 2'-Omethylguanosine
  modified_base 25: mod_base = OTHER; note = 2'-Omethylcytosine
  modified_base 33: mod_base = OTHER; note = 2'-fluorouridine
  modified_base 35: mod_base = OTHER; note = Cytosine phosphorothiorate
  modified_base 37: mod_base = OTHER; note = Adenosine phosphorothiorate
  modified_base 38: mod_base = OTHER; note = Adenosine phosphorothiorate
  modified_base 40: mod_base = OTHER; note = 2'-fluorouridine
  modified_base 41: mod_base = OTHER; note = 2'-fluorocytosine
  modified_base 42: mod_base = OTHER; note = 2'-fluoroadenosine
  modified_base 43: mod_base = OTHER; note = 2'-fluoroadenosine
  modified_base 52: mod_base = OTHER; note = 2'-Omethylguanosine
  modified_base 54: mod_base = OTHER; note = Uridine phosphorothiorate
  modified_base 55: mod_base = OTHER; note = Uridine phosphorothiorate
  modified_base 56: mod_base = OTHER; note = Cytosine phosphorothiorate
  modified_base 57: mod_base = OTHER; note = Guanosine phosphorothiorate
  modified_base 62: mod_base = OTHER; note = 2'-Omethylcytosine
  modified_base 63: mod_base = OTHER; note = 2'-fluorocytosine
  modified_base 65: mod_base = OTHER; note = 2'-Omethylguanosine
  modified_base 68: mod_base = OTHER; note = 2'-Omethylguanosine
  modified_base 73: mod_base = OTHER; note = 2'-Omethylguanosine
  modified_base 75: mod_base = OTHER; note = 2'-fluorocytosine phosphorothiorate

SEQ ID NO: 6725 - RNA, 76 nt, synthetic construct; identical to SEQ ID NO: 3419
  source 1..76: mol_type = other RNA

SEQ ID NO: 6726 - RNA, 75 nt, synthetic construct; identical to SEQ ID NO: 3336
  source 1..75: mol_type = other RNA
  modified_base 1: mod_base = OTHER; note = Cytosine phosphorothiorate
  modified_base 8: mod_base = OTHER; note = Adenosine phosphorothiorate
  modified_base 13: mod_base = OTHER; note = Adenosine phosphorothiorate
  modified_base 14: mod_base = OTHER; note = 2'-Omethylguanosine phosphorothiorate
  modified_base 16: mod_base = OTHER; note = 2'-Omethylcytosine
  modified_base 20: mod_base = OTHER; note = 2'-fluoroadenosine
  modified_base 25: mod_base = OTHER; note = 2'-fluoroadenosine
  modified_base 27: mod_base = OTHER; note = 2'-Omethylcytosine
  modified_base 28: mod_base = OTHER; note = 2'-fluoroadenosine
  modified_base 35: mod_base = OTHER; note = 2'-fluoroadenosine phosphorothiorate
  modified_base 37: mod_base = OTHER; note = 2'-fluoroadenosine
  modified_base 39: mod_base = OTHER; note = 2'-fluorocytosine
  modified_base 46: mod_base = OTHER; note = 2'-fluorouridine
  modified_base 47: mod_base = OTHER; note = Cytosine phosphorothiorate
  modified_base 48: mod_base = OTHER; note = Cytosine phosphorothiorate
  modified_base 54: mod_base = OTHER; note = Uridine phosphorothiorate
  modified_base 64: mod_base = OTHER; note = 2'-fluoroguanosine phosphorothiorate
  modified_base 70: mod_base = OTHER; note = 2'-fluoroguanosine
  modified_base 73: mod_base = OTHER; note = Cytosine phosphorothiorate
  modified_base 74: mod_base = OTHER; note = 2'-Omethylcytosine

SEQ ID NO: 6727 - RNA, 76 nt, synthetic construct; identical to SEQ ID NO: 625
  source 1..76: mol_type = other RNA
  modified_base 1: mod_base = OTHER; note = 2'-Omethylguanosine phosphorothiorate
  modified_base 2: mod_base = OTHER; note = 2'-Omethylguanosine
  modified_base 13: mod_base = OTHER; note = 2'-Omethylcytosine
  modified_base 17: mod_base = OTHER; note = 2'-Omethylguanosine
  modified_base 33: mod_base = OTHER; note = 2'-fluorouridine
  modified_base 35: mod_base = OTHER; note = Cytosine phosphorothiorate
  modified_base 37: mod_base = OTHER; note = Adenosine phosphorothiorate
  modified_base 38: mod_base = OTHER; note = Adenosine phosphorothiorate
  modified_base 52: mod_base = OTHER; note = 2'-fluoroguanosine
  modified_base 62: mod_base = OTHER; note = 2'-Omethylcytosine
  modified_base 63: mod_base = OTHER; note = 2'-fluorocytosine
  modified_base 73: mod_base = OTHER; note = 2'-Omethylguanosine
  modified_base 75: mod_base = OTHER; note = 2'-fluorocytosine phosphorothiorate

SEQ ID NO: 6728 - RNA, 76 nt, synthetic construct; identical to SEQ ID NO: 3289
  source 1..76: mol_type = other RNA
  modified_base 1: mod_base = OTHER; note = 2'-Omethylguanosine
  modified_base 16: mod_base = OTHER; note = 2'-Omethyluridine
  modified_base 18: mod_base = OTHER; note = 2'-Omethylguanosine
  modified_base 19: mod_base = OTHER; note = 2'-Omethylguanosine
  modified_base 54: mod_base = OTHER; note = 2'-Omethyluridine phosphorothiorate
  modified_base 56: mod_base = OTHER; note = 2'-Omethylcytosine
  modified_base 59: mod_base = OTHER; note = 2'-Omethylguanosine
  modified_base 73: mod_base = OTHER; note = 2'-Omethylguanosine

SEQ ID NO: 6729 - RNA, 76 nt, synthetic construct
  source 1..76: mol_type = other RNA
gcccggctggcgcaatggatagcgcatccgccttcaaagtggaaggttgcaggttcgagtcctgcgttgggcgcca

SEQ ID NO: 6730 - RNA, 76 nt, synthetic construct; identical to SEQ ID NO: 3332
  source 1..76: mol_type = other RNA
  modified_base 1: mod_base = OTHER; note = 2'-Omethylguanosine
  modified_base 2: mod_base = OTHER; note = 2'-Omethylguanosine
  modified_base 3: mod_base = OTHER; note = 2'-Omethylcytosine
  modified_base 4: mod_base = OTHER; note = 2'-Omethylcytosine
  modified_base 5: mod_base = OTHER; note = 2'-Omethylcytosine
  modified_base 6: mod_base = OTHER; note = 2'-Omethylcytosine
  modified_base 14: mod_base = OTHER; note = 2'-Omethyladenosine
  modified_base 17: mod_base = OTHER; note = 2'-Omethylguanosine
  modified_base 18: mod_base = OTHER; note = 2'-Omethylguanosine
  modified_base 20: mod_base = OTHER; note = 2'-Omethyluridine
  modified_base 22: mod_base = OTHER; note = 2'-Omethylguanosine
  modified_base 25: mod_base = OTHER; note = 2'-Omethylcytosine
  modified_base 27: mod_base = OTHER; note = 2'-Omethyluridine
  modified_base 33: mod_base = OTHER; note = 2'-fluorouridine
  modified_base 71: mod_base = OTHER; note = 2'-Omethyluridine
  modified_base 73: mod_base = OTHER; note = 2'-Omethylguanosine

SEQ ID NO: 6731 - RNA, 76 nt, synthetic construct; identical to SEQ ID NO: 625
  source 1..76: mol_type = other RNA
  modified_base 1: mod_base = OTHER; note = 2'-Omethylguanosine phosphorothiorate
  modified_base 2: mod_base = OTHER; note = 2'-Omethylguanosine
  modified_base 13: mod_base = OTHER; note = 2'-fluorocytosine
  modified_base 17: mod_base = OTHER; note = 2'-Omethylguanosine
  modified_base 33: mod_base = OTHER; note = 2'-fluorouridine
  modified_base 35: mod_base = OTHER; note = Cytosine phosphorothiorate
  modified_base 37: mod_base = OTHER; note = Adenosine phosphorothiorate
  modified_base 38: mod_base = OTHER; note = Adenosine phosphorothiorate
  modified_base 52: mod_base = OTHER; note = 2'-fluoroguanosine
  modified_base 56: mod_base = OTHER; note = 2'-Omethylcytosine
  modified_base 62: mod_base = OTHER; note = 2'-Omethylcytosine
  modified_base 63: mod_base = OTHER; note = 2'-fluorocytosine
  modified_base 73: mod_base = OTHER; note = 2'-Omethylguanosine
  modified_base 75: mod_base = OTHER; note = 2'-fluorocytosine phosphorothiorate

SEQ ID NO: 6732 - RNA, 76 nt, synthetic construct; identical to SEQ ID NO: 3295
  source 1..76: mol_type = other RNA
  modified_base 1: mod_base = OTHER; note = 2'-fluorocytosine phosphorothiorate
  modified_base 2: mod_base = OTHER; note = 2'-fluorocytosine phosphorothiorate
  modified_base 3: mod_base = OTHER; note = 2'-Omethyluridine phosphorothiorate
  modified_base 8: mod_base = OTHER; note = 2'-fluorouridine
  modified_base 9: mod_base = OTHER; note = 2'-fluoroadenosine
  modified_base 12: mod_base = OTHER; note = Uridine phosphorothiorate
  modified_base 17: mod_base = OTHER; note = 2'-fluorouridine phosphorothiorate
  modified_base 20: mod_base = OTHER; note = 2'-Omethyluridine
  modified_base 25: mod_base = OTHER; note = 2'-Omethylcytosine
  modified_base 29: mod_base = OTHER; note = 2'-Omethylguanosine phosphorothiorate
  modified_base 31: mod_base = OTHER; note = 2'-fluoroadenosine phosphorothiorate
  modified_base 38: mod_base = OTHER; note = Adenosine phosphorothiorate
  modified_base 47: mod_base = OTHER; note = 2'-Omethyluridine
  modified_base 52: mod_base = OTHER; note = 2'-fluoroguanosine phosphorothiorate
  modified_base 60: mod_base = OTHER; note = Uridine phosphorothiorate
  modified_base 71: mod_base = OTHER; note = 2'-fluoroguanosine
  modified_base 76: mod_base = OTHER; note = 2'-fluoroadenosine

SEQ ID NO: 6733 - DNA, 76 bp, synthetic construct; identical to SEQ ID NO: 1924
  source 1..76: mol_type = other DNA
  modified_base 1: mod_base = OTHER; note = 2'-Omethylguanosine phosphorothiorate
  modified_base 2: mod_base = OTHER; note = 2'-Omethylguanosine
  modified_base 55: mod_base = OTHER; note = Uridine phosphorothiorate
  modified_base 56: mod_base = OTHER; note = 2'-O-(2-Methoxyethyl) 5-methylcytosine
  modified_base 64: mod_base = OTHER; note = Guanosine phosphorothiorate
  modified_base 65: mod_base = OTHER; note = 2'-Omethylguanosine
  modified_base 74: mod_base = OTHER; note = Cytosine phosphorothiorate
  modified_base 75: mod_base = OTHER; note = 2'-Omethylcytosine phosphorothiorate
  modified_base 76: mod_base = OTHER; note = 2'-Omethyladenosine
  misc_feature 1..2: note = RNA
  misc_feature 3: note = DNA
  misc_feature 4..76: note = RNA

SEQ ID NO: 6734 - RNA, 75 nt, synthetic construct; identical to SEQ ID NO: 3306
  source 1..75: mol_type = other RNA
  modified_base 1: mod_base = OTHER; note = 2'-Omethylguanosine phosphorothiorate
  modified_base 2: mod_base = OTHER; note = 2'-Omethyladenosine phosphorothiorate
  modified_base 73: mod_base = OTHER; note = Cytosine phosphorothiorate
  modified_base 74: mod_base = OTHER; note = 2'-Omethylcytosine phosphorothiorate
  modified_base 75: mod_base = OTHER; note = 2'-Omethyladenosine

SEQ ID NO: 6735 - RNA, 76 nt, synthetic construct; identical to SEQ ID NO: 625
  source 1..76: mol_type = other RNA
  modified_base 2: mod_base = OTHER; note = 2'-fluoroguanosine phosphorothiorate
  modified_base 3: mod_base = OTHER; note = 2'-Omethylcytosine
  modified_base 8: mod_base = OTHER; note = Uridine phosphorothiorate
  modified_base 11: mod_base = OTHER; note = Cytosine phosphorothiorate
  modified_base 12: mod_base = OTHER; note = 2'-fluoroguanosine
  modified_base 13: mod_base = OTHER; note = 2'-Omethylcytosine
  modified_base 14: mod_base = OTHER; note = 2'-fluoroadenosine
  modified_base 15: mod_base = OTHER; note = 2'-fluoroadenosine
  modified_base 22: mod_base = OTHER; note = 2'-fluoroguanosine phosphorothiorate
  modified_base 24: mod_base = OTHER; note = Guanosine phosphorothiorate
  modified_base 25: mod_base = OTHER; note = 2'-Omethylcytosine
  modified_base 30: mod_base = OTHER; note = Guanosine phosphorothiorate
  modified_base 33: mod_base = OTHER; note = Uridine phosphorothiorate
  modified_base 37: mod_base = OTHER; note = Adenosine phosphorothiorate
  modified_base 38: mod_base = OTHER; note = 2'-fluoroadenosine
  modified_base 40: mod_base = OTHER; note = 2'-fluorouridine
  modified_base 43: mod_base = OTHER; note = Adenosine phosphorothiorate
  modified_base 44: mod_base = OTHER; note = 2'-fluoroadenosine
  modified_base 46: mod_base = OTHER; note = 2'-Omethylguanosine phosphorothiorate
  modified_base 47: mod_base = OTHER; note = Uridine phosphorothiorate
  modified_base 48: mod_base = OTHER; note = 2'-fluorouridine
  modified_base 50: mod_base = OTHER; note = 2'-Omethylcytosine
  modified_base 51: mod_base = OTHER; note = 2'-Omethylguanosine
  modified_base 53: mod_base = OTHER; note = 2'-fluoroguanosine
  modified_base 54: mod_base = OTHER; note = 2'-Omethyluridine
  modified_base 64: mod_base = OTHER; note = 2'-Omethylguanosine
  modified_base 66: mod_base = OTHER; note = 2'-Omethylcytosine
  modified_base 68: mod_base = OTHER; note = 2'-fluoroguanosine
  modified_base 69: mod_base = OTHER; note = Adenosine phosphorothiorate
  modified_base 70: mod_base = OTHER; note = 2'-Omethylguanosine
  modified_base 71: mod_base = OTHER; note = 2'-Omethyluridine
  modified_base 72: mod_base = OTHER; note = 2'-Omethylcytosine
  modified_base 74: mod_base = OTHER; note = 2'-Omethylcytosine
  modified_base 75: mod_base = OTHER; note = 2'-fluorocytosine
  modified_base 76: mod_base = OTHER; note = 2'-fluoroadenosine

SEQ ID NO: 6736 - RNA, 76 nt, synthetic construct; identical to SEQ ID NO: 625
  source 1..76: mol_type = other RNA
  modified_base 1: mod_base = OTHER; note = 2'-Omethylguanosine phosphorothiorate
  modified_base 2: mod_base = OTHER; note = 2'-Omethylguanosine
  modified_base 10: mod_base = OTHER; note = 2'-Omethylguanosine
  modified_base 11: mod_base = OTHER; note = 2'-Omethylcytosine
  modified_base 12: mod_base = OTHER; note = 2'-Omethylguanosine
  modified_base 13: mod_base = OTHER; note = 2'-Omethylcytosine
  modified_base 17: mod_base = OTHER; note = 2'-Omethylguanosine
  modified_base 33: mod_base = OTHER; note = 2'-fluorouridine
  modified_base 35: mod_base = OTHER; note = Cytosine phosphorothiorate
  modified_base 37: mod_base = OTHER; note = Adenosine phosphorothiorate
  modified_base 38: mod_base = OTHER; note = Adenosine phosphorothiorate
  modified_base 44: mod_base = OTHER; note = 2'-Omethyladenosine
  modified_base 45: mod_base = OTHER; note = 2'-Omethylguanosine
  modified_base 46: mod_base = OTHER; note = 2'-Omethylguanosine
  modified_base 52: mod_base = OTHER; note = 2'-Omethylguanosine
  modified_base 62: mod_base = OTHER; note = 2'-Omethylcytosine
  modified_base 63: mod_base = OTHER; note = 2'-fluorocytosine
  modified_base 65: mod_base = OTHER; note = 2'-Omethylguanosine
  modified_base 68: mod_base = OTHER; note = 2'-Omethylguanosine
  modified_base 73: mod_base = OTHER; note = 2'-Omethylguanosine
  modified_base 75: mod_base = OTHER; note = 2'-fluorocytosine phosphorothiorate

SEQ ID NO: 6737 - RNA, 76 nt, synthetic construct; identical to SEQ ID NO: 3289
  source 1..76: mol_type = other RNA
  modified_base 1: mod_base = OTHER; note = 2'-Omethylguanosine
  modified_base 33: mod_base = OTHER; note = 2'-fluorouridine
  modified_base 35: mod_base = OTHER; note = Uridine phosphorothiorate
  modified_base 37: mod_base = OTHER; note = Adenosine phosphorothiorate
  modified_base 38: mod_base = OTHER; note = Adenosine phosphorothiorate
  modified_base 73: mod_base = OTHER; note = 2'-Omethylguanosine

SEQ ID NO: 6738 - RNA, 75 nt, synthetic construct; identical to SEQ ID NO: 3306
  source 1..75: mol_type = other RNA
  modified_base 1: mod_base = OTHER; note = 2'-Omethylguanosine
  modified_base 45: mod_base = OTHER; note = 2'-fluoroguanosine
  modified_base 47: mod_base = OTHER; note = 2'-fluorouridine
  modified_base 72: mod_base = OTHER; note = 2'-Omethyladenosine

SEQ ID NO: 6739 - RNA, 85 nt, synthetic construct; identical to SEQ ID NO: 3297
  source 1..85: mol_type = other RNA
  modified_base 1: mod_base = OTHER; note = 2'-Omethylguanosine phosphorothiorate
  modified_base 14: mod_base = OTHER; note = 2'-Omethyladenosine phosphorothiorate
  modified_base 16: mod_base = OTHER; note = 2'-Omethyluridine
  modified_base 41: mod_base = OTHER; note = 2'-fluorocytosine phosphorothiorate
  modified_base 44: mod_base = OTHER; note = 2'-Omethyluridine phosphorothiorate
  modified_base 50: mod_base = OTHER; note = 2'-Omethylcytosine
  modified_base 62: mod_base = OTHER; note = 2'-fluoroguanosine
  modified_base 82: mod_base = OTHER; note = 2'-Omethylguanosine

SEQ ID NO: 6740 - RNA, 85 nt, synthetic construct; identical to SEQ ID NO: 3286
  source 1..85: mol_type = other RNA
  modified_base 1: mod_base = OTHER; note = 2'-Omethylcytosine
  modified_base 2: mod_base = OTHER; note = 2'-fluorocytosine phosphorothiorate
  modified_base 11: mod_base = OTHER; note = Cytosine phosphorothiorate
  modified_base 20: mod_base = OTHER; note = 2'-fluoroadenosine
  modified_base 22: mod_base = OTHER; note = Guanosine phosphorothiorate
  modified_base 26: mod_base = OTHER; note = 2'-fluorouridine
  modified_base 29: mod_base = OTHER; note = 2'-fluoroguanosine
  modified_base 30: mod_base = OTHER; note = 2'-fluoroadenosine
  modified_base 34: mod_base = OTHER; note = 2'-fluorouridine
  modified_base 36: mod_base = OTHER; note = Guanosine phosphorothiorate
  modified_base 37: mod_base = OTHER; note = 2'-fluoroadenosine phosphorothiorate
  modified_base 39: mod_base = OTHER; note = Cytosine phosphorothiorate
  modified_base 43: mod_base = OTHER; note = 2'-Omethyluridine
  modified_base 46: mod_base = OTHER; note = 2'-Omethyladenosine
  modified_base 47: mod_base = OTHER; note = 2'-Omethylcytosine
  modified_base 53: mod_base = OTHER; note = 2'-fluorouridine
  modified_base 54: mod_base = OTHER; note = 2'-Omethylcytosine
  modified_base 55: mod_base = OTHER; note = 2'-Omethylcytosine
  modified_base 57: mod_base = OTHER; note = 2'-Omethylcytosine
  modified_base 59: mod_base = OTHER; note = 2'-Omethyluridine
  modified_base 70: mod_base = OTHER; note = 2'-fluorocytosine phosphorothiorate
  modified_base 73: mod_base = OTHER; note = 2'-Omethyladenosine
  modified_base 84: mod_base = OTHER; note = Cytosine phosphorothiorate

SEQ ID NO: 6741 - RNA, 75 nt, synthetic construct; identical to SEQ ID NO: 3299
  source 1..75: mol_type = other RNA
  modified_base 8: mod_base = OTHER; note = 2'-fluoroadenosine
  modified_base 10: mod_base = OTHER; note = Cytosine phosphorothiorate
  modified_base 13: mod_base = OTHER; note = Adenosine phosphorothiorate
  modified_base 20: mod_base = OTHER; note = 2'-fluoroadenosine
  modified_base 21: mod_base = OTHER; note = 2'-fluoroguanosine
  modified_base 22: mod_base = OTHER; note = 2'-fluoroadenosine
  modified_base 25: mod_base = OTHER; note = 2'-fluoroadenosine
  modified_base 26: mod_base = OTHER; note = Uridine phosphorothiorate
  modified_base 34: mod_base = OTHER; note = 2'-Omethyluridine phosphorothiorate
  modified_base 38: mod_base = OTHER; note = 2'-fluorouridine phosphorothiorate
  modified_base 40: mod_base = OTHER; note = 2'-fluorouridine phosphorothiorate
  modified_base 47: mod_base = OTHER; note = 2'-fluorocytosine
  modified_base 48: mod_base = OTHER; note = 2'-Omethylcytosine phosphorothiorate
  modified_base 49: mod_base = OTHER; note = 2'-fluoroadenosine
  modified_base 58: mod_base = OTHER; note = 2'-Omethylguanosine phosphorothiorate
  modified_base 69: mod_base = OTHER; note = Guanosine phosphorothiorate
  modified_base 73: mod_base = OTHER; note = Cytosine phosphorothiorate
  modified_base 74: mod_base = OTHER; note = 2'-Omethylcytosine

SEQ ID NO: 6742 - RNA, 76 nt, synthetic construct; identical to SEQ ID NO: 625
  source 1..76: mol_type = other RNA
  modified_base 1: mod_base = OTHER; note = 2'-Omethylguanosine phosphorothiorate
  modified_base 2: mod_base = OTHER; note = 2'-Omethylguanosine phosphorothiorate
  modified_base 3: mod_base = OTHER; note = 2'-Omethylcytosine
  modified_base 4: mod_base = OTHER; note = 2'-Omethyluridine
  modified_base 5: mod_base = OTHER; note = 2'-Omethylcytosine
  modified_base 6: mod_base = OTHER; note = 2'-Omethylcytosine
  modified_base 10: mod_base = OTHER; note = 2'-Omethylguanosine
  modified_base 11: mod_base = OTHER; note = 2'-Omethylcytosine
  modified_base 12: mod_base = OTHER; note = 2'-Omethylguanosine
  modified_base 13: mod_base = OTHER; note = 2'-Omethylcytosine
  modified_base 14: mod_base = OTHER; note = 2'-Omethyladenosine
  modified_base 15: mod_base = OTHER; note = 2'-fluoroadenosine
  modified_base 16: mod_base = OTHER; note = 2'-Omethyluridine
  modified_base 17: mod_base = OTHER; note = 2'-Omethylguanosine
  modified_base 18: mod_base = OTHER; note = 2'-Omethylguanosine
  modified_base 19: mod_base = OTHER; note = 2'-fluoroadenosine
  modified_base 20: mod_base = OTHER; note = 2'-Omethyluridine
  modified_base 22: mod_base = OTHER; note = 2'-Omethylguanosine
  modified_base 23: mod_base = OTHER; note = 2'-Omethylcytosine
  modified_base 24: mod_base = OTHER; note = 2'-Omethylguanosine
  modified_base 25: mod_base = OTHER; note = 2'-Omethylcytosine
  modified_base 33: mod_base = OTHER; note = 2'-fluorouridine
  modified_base 35: mod_base = OTHER; note = Cytosine phosphorothiorate
  modified_base 37: mod_base = OTHER; note = Adenosine phosphorothiorate
  modified_base 38: mod_base = OTHER; note = Adenosine phosphorothiorate
  modified_base 44: mod_base = OTHER; note = 2'-Omethyladenosine
  modified_base 45: mod_base = OTHER; note = 2'-Omethylguanosine
  modified_base 46: mod_base = OTHER; note = 2'-fluoroguanosine
  modified_base 47: mod_base = OTHER; note = 2'-fluorouridine
  modified_base 48: mod_base = OTHER; note = 2'-fluorouridine
  modified_base 49: mod_base = OTHER; note = 2'-Omethylcytosine
  modified_base 50: mod_base = OTHER; note = 2'-Omethylcytosine
  modified_base 51: mod_base = OTHER; note = 2'-Omethylguanosine
  modified_base 52: mod_base = OTHER; note = 2'-Omethylguanosine
  modified_base 53: mod_base = OTHER; note = 2'-Omethylguanosine
  modified_base 56: mod_base = OTHER; note = 2'-Omethylcytosine
  modified_base 59: mod_base = OTHER; note = 2'-Omethylguanosine
  modified_base 61: mod_base = OTHER; note = 2'-Omethylcytosine
  modified_base 62: mod_base = OTHER; note = 2'-Omethylcytosine
  modified_base 63: mod_base = OTHER; note = 2'-fluorocytosine
  modified_base 64: mod_base = OTHER; note = 2'-Omethylguanosine
  modified_base 65: mod_base = OTHER; note = 2'-Omethylguanosine
  modified_base 66: mod_base = OTHER; note = 2'-Omethylcytosine
  modified_base 67: mod_base = OTHER; note = 2'-Omethylguanosine
  modified_base 68: mod_base = OTHER; note = 2'-Omethylguanosine
  modified_base 73: mod_base = OTHER; note = 2'-Omethylguanosine

SEQ ID NO: 6743 - RNA, 76 nt, synthetic construct; identical to SEQ ID NO: 625
  source 1..76: mol_type = other RNA
  modified_base 1: mod_base = OTHER; note = 2'-Omethylguanosine
  modified_base 2: mod_base = OTHER; note = 2'-Omethylguanosine
  modified_base 3: mod_base = OTHER; note = 2'-Omethylcytosine
  modified_base 4: mod_base = OTHER; note = 2'-Omethyluridine
  modified_base 5: mod_base = OTHER; note = 2'-Omethylcytosine
  modified_base 6: mod_base = OTHER; note = 2'-Omethylcytosine
  modified_base 10: mod_base = OTHER; note = 2'-Omethylguanosine
  modified_base 11: mod_base = OTHER; note = 2'-Omethylcytosine
  modified_base 12: mod_base = OTHER; note = 2'-Omethylguanosine
  modified_base 13: mod_base = OTHER; note = 2'-Omethylcytosine
  modified_base 14: mod_base = OTHER; note = 2'-Omethyladenosine
  modified_base 15: mod_base = OTHER; note = 2'-fluoroadenosine
  modified_base 16: mod_base = OTHER; note = 2'-Omethyluridine
  modified_base 17: mod_base = OTHER; note = 2'-Omethylguanosine
  modified_base 18: mod_base = OTHER; note = 2'-Omethylguanosine
  modified_base 19: mod_base = OTHER; note = 2'-fluoroadenosine
  modified_base 20: mod_base = OTHER; note = 2'-Omethyluridine
  modified_base 21: mod_base = OTHER; note = 2'-fluoroadenosine
  modified_base 22: mod_base = OTHER; note = 2'-Omethylguanosine
  modified_base 23: mod_base = OTHER; note = 2'-Omethylcytosine
  modified_base 24: mod_base = OTHER; note = 2'-Omethylguanosine
  modified_base 25: mod_base = OTHER; note = 2'-Omethylcytosine
  modified_base 49: mod_base = OTHER; note = 2'-Omethylcytosine
  modified_base 50: mod_base = OTHER; note = 2'-Omethylcytosine
  modified_base 51: mod_base = OTHER; note = 2'-Omethylguanosine
  modified_base 52: mod_base = OTHER; note = 2'-Omethylguanosine
  modified_base 53: mod_base = OTHER; note = 2'-Omethylguanosine
  modified_base 54: mod_base = OTHER; note = Uridine phosphorothiorate
  modified_base 55: mod_base = OTHER; note = Uridine phosphorothiorate
  modified_base 56: mod_base = OTHER; note = Cytosine phosphorothiorate
  modified_base 57: mod_base = OTHER; note = Guanosine phosphorothiorate
  modified_base 61: mod_base = OTHER; note = 2'-Omethylcytosine
  modified_base 62: mod_base = OTHER; note = 2'-Omethylcytosine
  modified_base 63: mod_base = OTHER; note = 2'-Omethylcytosine
  modified_base 64: mod_base = OTHER; note = 2'-Omethylguanosine
  modified_base 65: mod_base = OTHER; note = 2'-Omethylguanosine
  modified_base 66: mod_base = OTHER; note = 2'-Omethylcytosine
  modified_base 67: mod_base = OTHER; note = 2'-Omethylguanosine
  modified_base 68: mod_base = OTHER; note = 2'-Omethylguanosine
  modified_base 69: mod_base = OTHER; note = 2'-Omethyladenosine
  modified_base 73: mod_base = OTHER; note = 2'-Omethylguanosine

SEQ ID NO: 6744 - RNA, 75 nt, synthetic construct; identical to SEQ ID NO: 1045
  source 1..75: mol_type = other RNA
  modified_base 1: mod_base = OTHER; note = Guanosine phosphorothiorate
  modified_base 5: mod_base = OTHER; note = 2'-Omethylcytosine
  modified_base 17: mod_base = OTHER; note = 2'-fluoroguanosine
  modified_base 18: mod_base = OTHER; note = 2'-fluoroguanosine phosphorothiorate
  modified_base 37: mod_base = OTHER; note = 2'-fluoroadenosine phosphorothiorate
  modified_base 40: mod_base = OTHER; note = 2'-Omethylcytosine
  modified_base 43: mod_base = OTHER; note = 2'-fluoroguanosine
  modified_base 59: mod_base = OTHER; note = 2'-Omethyluridine
  modified_base 73: mod_base = OTHER; note = Cytosine phosphorothiorate
  modified_base 74: mod_base = OTHER; note = 2'-Omethylcytosine

SEQ ID NO: 6745 - RNA, 75 nt, synthetic construct; identical to SEQ ID NO: 3306
  source 1..75: mol_type = other RNA
  modified_base 1: mod_base = OTHER; note = 2'-Omethylguanosine
  modified_base 16: mod_base = OTHER; note = 2'-Omethylcytosine

SEQ ID NO: 6746 - RNA, 76 nt, synthetic construct; identical to SEQ ID NO: 625
  source 1..76: mol_type = other RNA
  modified_base 1: mod_base = OTHER; note = 2'-fluoroguanosine
  modified_base 2: mod_base = OTHER; note = 2'-fluoroguanosine
  modified_base 3: mod_base = OTHER; note = 2'-fluorocytosine
  modified_base 11: mod_base = OTHER; note = 2'-fluorocytosine
  modified_base 12: mod_base = OTHER; note = 2'-fluoroguanosine phosphorothiorate
  modified_base 13: mod_base = OTHER; note = 2'-Omethylcytosine phosphorothiorate
  modified_base 14: mod_base = OTHER; note = 2'-fluoroadenosine
  modified_base 18: mod_base = OTHER; note = Guanosine phosphorothiorate
  modified_base 23: mod_base = OTHER; note = 2'-Omethylcytosine
  modified_base 25: mod_base = OTHER; note = 2'-fluorocytosine phosphorothiorate
  modified_base 26: mod_base = OTHER; note = 2'-fluoroadenosine
  modified_base 27: mod_base = OTHER; note = Uridine phosphorothiorate
  modified_base 28: mod_base = OTHER; note = 2'-Omethyluridine
  modified_base 30: mod_base = OTHER; note = 2'-Omethylguanosine
  modified_base 34: mod_base = OTHER; note = 2'-Omethyluridine
  modified_base 36: mod_base = OTHER; note = Adenosine phosphorothiorate
  modified_base 43: mod_base = OTHER; note = 2'-Omethyladenosine
  modified_base 45: mod_base = OTHER; note = 2'-Omethylguanosine
  modified_base 47: mod_base = OTHER; note = 2'-Omethyluridine
  modified_base 48: mod_base = OTHER; note = 2'-Omethyluridine
  modified_base 49: mod_base = OTHER; note = 2'-Omethylcytosine
  modified_base 50: mod_base = OTHER; note = 2'-Omethylcytosine phosphorothiorate
  modified_base 51: mod_base = OTHER; note = 2'-Omethylguanosine
  modified_base 52: mod_base = OTHER; note = Guanosine phosphorothiorate
  modified_base 53: mod_base = OTHER; note = 2'-Omethylguanosine
  modified_base 54: mod_base = OTHER; note = Uridine phosphorothiorate
  modified_base 58: mod_base = OTHER; note = Adenosine phosphorothiorate
  modified_base 60: mod_base = OTHER; note = 2'-Omethyluridine
  modified_base 61: mod_base = OTHER; note = 2'-Omethylcytosine
  modified_base 65: mod_base = OTHER; note = Guanosine phosphorothiorate
  modified_base 66: mod_base = OTHER; note = Cytosine phosphorothiorate
  modified_base 67: mod_base = OTHER; note = 2'-fluoroguanosine
  modified_base 71: mod_base = OTHER; note = Uridine phosphorothiorate
  modified_base 72: mod_base = OTHER; note = 2'-fluorocytosine
  modified_base 73: mod_base = OTHER; note = 2'-fluoroguanosine
  modified_base 75: mod_base = OTHER; note = Cytosine phosphorothiorate
  modified_base 76: mod_base = OTHER; note = 2'-Omethyladenosine

SEQ ID NO: 6747 - RNA, 76 nt, synthetic construct; identical to SEQ ID NO: 625
  source 1..76: mol_type = other RNA
  modified_base 1: mod_base = OTHER; note = 2'-Omethylguanosine
  modified_base 3: mod_base = OTHER; note = 2'-Omethylcytosine
  modified_base 4: mod_base = OTHER; note = 2'-fluorouridine
  modified_base 9: mod_base = OTHER; note = Guanosine phosphorothiorate
  modified_base 10: mod_base = OTHER; note = 2'-fluoroguanosine
  modified_base 11: mod_base = OTHER; note = 2'-fluorocytosine
  modified_base 15: mod_base = OTHER; note = 2'-fluoroadenosine phosphorothiorate
  modified_base 16: mod_base = OTHER; note = 2'-Omethyluridine
  modified_base 18: mod_base = OTHER; note = Guanosine phosphorothiorate
  modified_base 19: mod_base = OTHER; note = Adenosine phosphorothiorate
  modified_base 23: mod_base = OTHER; note = 2'-fluorocytosine phosphorothiorate
  modified_base 24: mod_base = OTHER; note = 2'-Omethylguanosine
  modified_base 26: mod_base = OTHER; note = 2'-fluoroadenosine phosphorothiorate
  modified_base 27: mod_base = OTHER; note = 2'-Omethyluridine
  modified_base 28: mod_base = OTHER; note = Uridine phosphorothiorate
  modified_base 29: mod_base = OTHER; note = 2'-Omethylguanosine
  modified_base 33: mod_base = OTHER; note = Uridine phosphorothiorate
  modified_base 34: mod_base = OTHER; note = 2'-Omethyluridine
  modified_base 42: mod_base = OTHER; note = 2'-fluoroadenosine
  modified_base 43: mod_base = OTHER; note = Adenosine phosphorothiorate
  modified_base 44: mod_base = OTHER; note = 2'-fluoroadenosine
  modified_base 45: mod_base = OTHER; note = Guanosine phosphorothiorate
  modified_base 48: mod_base = OTHER; note = 2'-fluorouridine
  modified_base 49: mod_base = OTHER; note = Cytosine phosphorothiorate
  modified_base 50: mod_base = OTHER; note = 2'-Omethylcytosine
  modified_base 53: mod_base = OTHER; note = 2'-fluoroguanosine
  modified_base 57: mod_base = OTHER; note = Guanosine phosphorothiorate
  modified_base 58: mod_base = OTHER; note = 2'-fluoroadenosine phosphorothiorate
  modified_base 59: mod_base = OTHER; note = 2'-fluoroguanosine phosphorothiorate
  modified_base 61: mod_base = OTHER; note = 2'-Omethylcytosine
  modified_base 62: mod_base = OTHER; note = 2'-Omethylcytosine
  modified_base 67: mod_base = OTHER; note = Guanosine phosphorothiorate
  modified_base 68: mod_base = OTHER; note = 2'-Omethylguanosine
  modified_base 71: mod_base = OTHER; note = 2'-fluorouridine
  modified_base 76: mod_base = OTHER; note = 2'-Omethyladenosine

SEQ ID NO: 6748 - RNA, 73 nt, synthetic construct; identical to SEQ ID NO: 935
  source 1..73: mol_type = other RNA
  modified_base 1: mod_base = OTHER; note = 2'-Omethylguanosine phosphorothiorate
  modified_base 2: mod_base = OTHER; note = 2'-Omethylguanosine
  modified_base 42: mod_base = OTHER; note = 2'-fluoroadenosine
  modified_base 45: mod_base = OTHER; note = Guanosine phosphorothiorate
  modified_base 46: mod_base = OTHER; note = 2'-fluoroguanosine
  modified_base 52: mod_base = OTHER; note = Guanosine phosphorothiorate
  modified_base 73: mod_base = OTHER; note = 2'-Omethylguanosine

SEQ ID NO: 6749 - RNA, 86 nt, synthetic construct; identical to SEQ ID NO: 3290
  source 1..86: mol_type = other RNA
  modified_base 23: mod_base = OTHER; note = 2'-Omethylguanosine

SEQ ID NO: 6750 - RNA, 76 nt, synthetic construct; identical to SEQ ID NO: 625
  source 1..76: mol_type = other RNA
  modified_base 1: mod_base = OTHER; note = 2'-fluoroguanosine
  modified_base 3: mod_base = OTHER; note = Cytosine phosphorothiorate
  modified_base 4: mod_base = OTHER; note = 2'-fluorouridine
  modified_base 6: mod_base = OTHER; note = 2'-Omethylcytosine
  modified_base 7: mod_base = OTHER; note = Guanosine phosphorothiorate
  modified_base 10: mod_base = OTHER; note = 2'-fluoroguanosine phosphorothiorate
  modified_base 13: mod_base = OTHER; note = 2'-fluorocytosine
  modified_base 14: mod_base = OTHER; note = 2'-Omethyladenosine
  modified_base 23: mod_base = OTHER; note = 2'-Omethylcytosine
  modified_base 24: mod_base = OTHER; note = 2'-Omethylguanosine
  modified_base 25: mod_base = OTHER; note = 2'-fluorocytosine
  modified_base 30: mod_base = OTHER; note = 2'-fluoroguanosine
  modified_base 31: mod_base = OTHER; note = 2'-fluoroadenosine
  modified_base 33: mod_base = OTHER; note = Uridine phosphorothiorate
  modified_base 36: mod_base = OTHER; note = Adenosine phosphorothiorate
  modified_base 37: mod_base = OTHER; note = Adenosine phosphorothiorate
  modified_base 40: mod_base = OTHER; note = Uridine phosphorothiorate
  modified_base 41: mod_base = OTHER; note = 2'-fluorocytosine
  modified_base 46: mod_base = OTHER; note = 2'-fluoroguanosine
  modified_base 48: mod_base = OTHER; note = Uridine phosphorothiorate
  modified_base 49: mod_base = OTHER; note = 2'-fluorocytosine
  modified_base 50: mod_base = OTHER; note = Cytosine phosphorothiorate
  modified_base 53: mod_base = OTHER; note = 2'-Omethylguanosine
  modified_base 55: mod_base = OTHER; note = Uridine phosphorothiorate
  modified_base 56: mod_base = OTHER; note = 2'-Omethylcytosine
  modified_base 60: mod_base = OTHER; note = 2'-fluorouridine phosphorothiorate
  modified_base 62: mod_base = OTHER; note = 2'-fluorocytosine phosphorothiorate
  modified_base 63: mod_base = OTHER; note = 2'-Omethylcytosine
  modified_base 65: mod_base = OTHER; note = Guanosine phosphorothiorate
  modified_base 66: mod_base = OTHER; note = 2'-Omethylcytosine
  modified_base 69: mod_base = OTHER; note = 2'-fluoroadenosine
  modified_base 70: mod_base = OTHER; note = 2'-fluoroguanosine
  modified_base 71: mod_base = OTHER; note = 2'-Omethyluridine
  modified_base 73: mod_base = OTHER; note = 2'-Omethylguanosine
  modified_base 76: mod_base = OTHER; note = 2'-fluoroadenosine

SEQ ID NO: 6751 - RNA, 75 nt, synthetic construct; identical to SEQ ID NO: 3306
  source 1..75: mol_type = other RNA
  modified_base 1: mod_base = OTHER; note = 2'-Omethylguanosine phosphorothiorate
  modified_base 2: mod_base = OTHER; note = 2'-Omethyladenosine phosphorothiorate
  modified_base 3: mod_base = OTHER; note = 2'-Omethylcytosine
  modified_base 4: mod_base = OTHER; note = 2'-Omethylcytosine
  modified_base 5: mod_base = OTHER; note = 2'-Omethyluridine
  modified_base 6: mod_base = OTHER; note = 2'-Omethylcytosine
  modified_base 10: mod_base = OTHER; note = 2'-Omethylguanosine
  modified_base 11: mod_base = OTHER; note = 2'-Omethylcytosine
  modified_base 12: mod_base = OTHER; note = 2'-Omethylguanosine
  modified_base 13: mod_base = OTHER; note = 2'-Omethylcytosine
  modified_base 17: mod_base = OTHER; note = Guanosine phosphorothiorate
  modified_base 18: mod_base = OTHER; note = 2'-Omethylguanosine
  modified_base 19: mod_base = OTHER; note = Uridine phosphorothiorate
  modified_base 21: mod_base = OTHER; note = 2'-Omethylguanosine
  modified_base 22: mod_base = OTHER; note = 2'-Omethylcytosine
  modified_base 23: mod_base = OTHER; note = 2'-Omethylguanosine
  modified_base 24: mod_base = OTHER; note = 2'-Omethylcytosine
  modified_base 28: mod_base = OTHER; note = 2'-Omethyluridine
  modified_base 32: mod_base = OTHER; note = 2'-fluorouridine
  modified_base 34: mod_base = OTHER; note = Uridine phosphorothiorate
  modified_base 36: mod_base = OTHER; note = Guanosine phosphorothiorate
  modified_base 37: mod_base = OTHER; note = Adenosine phosphorothiorate
  modified_base 40: mod_base = OTHER; note = 2'-fluoroadenosine phosphorothiorate
  modified_base 42: mod_base = OTHER; note = 2'-Omethyladenosine
  modified_base 43: mod_base = OTHER; note = 2'-fluoroadenosine
  modified_base 45: mod_base = OTHER; note = Guanosine phosphorothiorate
  modified_base 48: mod_base = OTHER; note = 2'-Omethylguanosine
  modified_base 49: mod_base = OTHER; note = 2'-Omethylcytosine
  modified_base 50: mod_base = OTHER; note = 2'-Omethylguanosine
  modified_base 51: mod_base = OTHER; note = 2'-Omethyluridine
  modified_base 52: mod_base = OTHER; note = 2'-Omethylguanosine
  modified_base 53: mod_base = OTHER; note = Uridine phosphorothiorate
  modified_base 54: mod_base = OTHER; note = Uridine phosphorothiorate
  modified_base 55: mod_base = OTHER; note = 2'-Omethylcytosine
  modified_base 56: mod_base = OTHER; note = Adenosine phosphorothiorate
  modified_base 60: mod_base = OTHER; note = 2'-Omethylcytosine
  modified_base 61: mod_base = OTHER; note = 2'-Omethyladenosine
  modified_base 62: mod_base = OTHER; note = 2'-fluorocytosine
  modified_base 63: mod_base = OTHER; note = 2'-Omethylguanosine
  modified_base 64: mod_base = OTHER; note = 2'-Omethyluridine
  modified_base 65: mod_base = OTHER; note = 2'-Omethylcytosine
  modified_base 66: mod_base = OTHER; note = 2'-Omethylguanosine
  modified_base 67: mod_base = OTHER; note = 2'-Omethylguanosine
  modified_base 70: mod_base = OTHER; note = 2'-Omethyluridine
  modified_base 72: mod_base = OTHER; note = 2'-Omethyladenosine

SEQ ID NO: 6752 - RNA, 76 nt, synthetic construct; identical to SEQ ID NO: 625
  source 1..76: mol_type = other RNA
  modified_base 1: mod_base = OTHER; note = 2'-fluoroguanosine
  modified_base 2: mod_base = OTHER; note = 2'-fluoroguanosine phosphorothiorate
  modified_base 3: mod_base = OTHER; note = 2'-fluorocytosine
  modified_base 5: mod_base = OTHER; note = 2'-Omethylcytosine
  modified_base 6: mod_base = OTHER; note = Cytosine phosphorothiorate
  modified_base 10: mod_base = OTHER; note = 2'-Omethylguanosine
  modified_base 11: mod_base = OTHER; note = 2'-Omethylcytosine
  modified_base 12: mod_base = OTHER; note = 2'-Omethylguanosine phosphorothiorate
  modified_base 13: mod_base = OTHER; note = 2'-Omethylcytosine
  modified_base 14: mod_base = OTHER; note = 2'-fluoroadenosine
  modified_base 16: mod_base = OTHER; note = Uridine phosphorothiorate
  modified_base 17: mod_base = OTHER; note = 2'-Omethylguanosine
  modified_base 18: mod_base = OTHER; note = Guanosine phosphorothiorate
  modified_base 20: mod_base = OTHER; note = Uridine phosphorothiorate
  modified_base 25: mod_base = OTHER; note = 2'-fluorocytosine
  modified_base 26: mod_base = OTHER; note = 2'-Omethyladenosine phosphorothiorate
  modified_base 27: mod_base = OTHER; note = 2'-Omethyluridine
  modified_base 38: mod_base = OTHER; note = 2'-Omethyladenosine
  modified_base 41: mod_base = OTHER; note = 2'-Omethylcytosine
  modified_base 44: mod_base = OTHER; note = 2'-fluoroadenosine
  modified_base 46: mod_base = OTHER; note = Guanosine phosphorothiorate
  modified_base 47: mod_base = OTHER; note = 2'-fluorouridine
  modified_base 48: mod_base = OTHER; note = 2'-Omethyluridine
  modified_base 52: mod_base = OTHER; note = 2'-fluoroguanosine
  modified_base 56: mod_base = OTHER; note = 2'-fluorocytosine
  modified_base 57: mod_base = OTHER; note = 2'-Omethylguanosine
  modified_base 61: mod_base = OTHER; note = 2'-fluorocytosine
  modified_base 63: mod_base = OTHER; note = Cytosine phosphorothiorate
  modified_base 66: mod_base = OTHER; note = 2'-Omethylcytosine
  modified_base 67: mod_base = OTHER; note = 2'-fluoroguanosine
  modified_base 68: mod_base = OTHER; note = Guanosine phosphorothiorate
  modified_base 70: mod_base = OTHER; note = 2'-fluoroguanosine
  modified_base 71: mod_base = OTHER; note = 2'-Omethyluridine
  modified_base 73: mod_base = OTHER; note = 2'-fluoroguanosine

SEQ ID NO: 6753 - RNA, 75 nt, synthetic construct; identical to SEQ ID NO: 3311
  source 1..75: mol_type = other RNA
  modified_base 1: mod_base = OTHER; note = 2'-Omethylguanosine phosphorothiorate
  modified_base 2: mod_base = OTHER; note = 2'-Omethylguanosine phosphorothiorate
  modified_base 10: mod_base = OTHER; note = 2'-fluoroguanosine
  modified_base 13: mod_base = OTHER; note = 2'-fluorouridine phosphorothiorate
  modified_base 20: mod_base = OTHER; note = 2'-fluoroadenosine
  modified_base 22: mod_base = OTHER; note = 2'-fluoroguanosine
  modified_base 23: mod_base = OTHER; note = Cytosine phosphorothiorate
  modified_base 24: mod_base = OTHER; note = 2'-fluoroadenosine
  modified_base 28: mod_base = OTHER; note = Uridine phosphorothiorate
  modified_base 39: mod_base = OTHER; note = 2'-fluorouridine phosphorothiorate
  modified_base 42: mod_base = OTHER; note = 2'-fluoroadenosine
  modified_base 44: mod_base = OTHER; note = 2'-fluorocytosine
  modified_base 48: mod_base = OTHER; note = 2'-fluorocytosine
  modified_base 51: mod_base = OTHER; note = Adenosine phosphorothiorate
  modified_base 57: mod_base = OTHER; note = 2'-fluoroadenosine
  modified_base 60: mod_base = OTHER; note = Cytosine phosphorothiorate
  modified_base 62: mod_base = OTHER; note = Cytosine phosphorothiorate
  modified_base 68: mod_base = OTHER; note = 2'-fluoroadenosine
  modified_base 73: mod_base = OTHER; note = Cytosine phosphorothiorate
  modified_base 74: mod_base = OTHER; note = 2'-fluorocytosine phosphorothiorate

SEQ ID NO: 6754 - RNA, 76 nt, synthetic construct
  source 1..76: mol_type = other RNA
acatacgtggcgcaatggatagcgcattggacttcaaattcaaaggttccgggttcgagtcccggcgtatgtgcca

SEQ ID NO: 6755 - RNA, 85 nt, synthetic construct; identical to SEQ ID NO: 3301
  source 1..85: mol_type = other RNA
  modified_base 1: mod_base = OTHER; note = 2'-Omethylguanosine phosphorothiorate
  modified_base 2: mod_base = OTHER; note = 2'-Omethylcytosine
  modified_base 3: mod_base = OTHER; note = 2'-Omethyluridine phosphorothiorate
  modified_base 4: mod_base = OTHER; note = 2'-Omethylguanosine phosphorothiorate
  modified_base 15: mod_base = OTHER; note = 2'-Omethylguanosine phosphorothiorate
  modified_base 18: mod_base = OTHER; note = 2'-fluoroguanosine
  modified_base 20: mod_base = OTHER; note = 2'-Omethyluridine
  modified_base 26: mod_base = OTHER; note = 2'-Omethylguanosine phosphorothiorate
  modified_base 27: mod_base = OTHER; note = 2'-fluorouridine
  modified_base 29: mod_base = OTHER; note = 2'-fluoroguanosine
  modified_base 34: mod_base = OTHER; note = 2'-fluorouridine
  modified_base 44: mod_base = OTHER; note = 2'-Omethyluridine
  modified_base 45: mod_base = OTHER; note = 2'-fluoroguanosine
  modified_base 47: mod_base = OTHER; note = Guanosine phosphorothiorate
  modified_base 54: mod_base = OTHER; note = 2'-Omethylcytosine
  modified_base 56: mod_base = OTHER; note = 2'-Omethylguanosine
  modified_base 63: mod_base = OTHER; note = Uridine phosphorothiorate
  modified_base 71: mod_base = OTHER; note = Cytosine phosphorothiorate
  modified_base 73: mod_base = OTHER; note = 2'-fluoroguanosine
  modified_base 82: mod_base = OTHER; note = 2'-Omethylguanosine

SEQ ID NO: 6756 - RNA, 85 nt, synthetic construct; identical to SEQ ID NO: 3286
  source 1..85: mol_type = other RNA
  modified_base 1: mod_base = OTHER; note = 2'-Omethylcytosine phosphorothiorate
  modified_base 2: mod_base = OTHER; note = 2'-Omethylcytosine
  modified_base 6: mod_base = OTHER; note = 2'-fluoroadenosine
  modified_base 16: mod_base = OTHER; note = 2'-fluoroguanosine phosphorothiorate
  modified_base 28: mod_base = OTHER; note = 2'-fluoroguanosine
  modified_base 36: mod_base = OTHER; note = 2'-fluoroguanosine phosphorothiorate
  modified_base 43: mod_base = OTHER; note = 2'-Omethyluridine
  modified_base 45: mod_base = OTHER; note = 2'-Omethylguanosine
  modified_base 49: mod_base = OTHER; note = 2'-Omethyluridine
  modified_base 58: mod_base = OTHER; note = 2'-Omethylguanosine
  modified_base 69: mod_base = OTHER; note = 2'-fluorocytosine phosphorothiorate
  modified_base 80: mod_base = OTHER; note = 2'-fluoroguanosine
  modified_base 85: mod_base = OTHER; note = 2'-fluoroadenosine

SEQ ID NO: 6757 - RNA, 75 nt, synthetic construct; identical to SEQ ID NO: 1045
  source 1..75: mol_type = other RNA
  modified_base 1: mod_base = OTHER; note = 2'-Omethylguanosine
  modified_base 13: mod_base = OTHER; note = 2'-Omethyluridine
  modified_base 14: mod_base = OTHER; note = 2'-Omethyladenosine
  modified_base 15: mod_base = OTHER; note = 2'-Omethyladenosine
  modified_base 16: mod_base = OTHER; note = 2'-Omethyluridine
  modified_base 17: mod_base = OTHER; note = 2'-Omethylguanosine
  modified_base 18: mod_base = OTHER; note = 2'-Omethylguanosine
  modified_base 19: mod_base = OTHER; note = Uridine phosphorothiorate
  modified_base 20: mod_base = OTHER; note = 2'-Omethyladenosine
  modified_base 21: mod_base = OTHER; note = Adenosine phosphorothiorate
  modified_base 25: mod_base = OTHER; note = 2'-Omethylcytosine
  modified_base 33: mod_base = OTHER; note = 2'-fluorouridine
  modified_base 34: mod_base = OTHER; note = 2'-Omethyluridine
  modified_base 35: mod_base = OTHER; note = Uridine phosphorothiorate
  modified_base 37: mod_base = OTHER; note = Adenosine phosphorothiorate
  modified_base 38: mod_base = OTHER; note = Adenosine phosphorothiorate
  modified_base 41: mod_base = OTHER; note = 2'-Omethylcytosine
  modified_base 42: mod_base = OTHER; note = 2'-Omethyladenosine
  modified_base 43: mod_base = OTHER; note = 2'-Omethylguanosine
  modified_base 44: mod_base = OTHER; note = 2'-Omethylcytosine
  modified_base 48: mod_base = OTHER; note = 2'-Omethylcytosine
  modified_base 49: mod_base = OTHER; note = 2'-Omethylcytosine
  modified_base 51: mod_base = OTHER; note = 2'-Omethyladenosine
  modified_base 53: mod_base = OTHER; note = Uridine phosphorothiorate
  modified_base 54: mod_base = OTHER; note = Uridine phosphorothiorate
  modified_base 60: mod_base = OTHER; note = 2'-Omethylcytosine
  modified_base 64: mod_base = OTHER; note = 2'-Omethylguanosine
  modified_base 72: mod_base = OTHER; note = 2'-Omethyluridine

SEQ ID NO: 6758 - RNA, 75 nt, synthetic construct; identical to SEQ ID NO: 3311
  source 1..75: mol_type = other RNA
  modified_base 1: mod_base = OTHER; note = 2'-Omethylguanosine phosphorothiorate
  modified_base 2: mod_base = OTHER; note = 2'-Omethylguanosine
  modified_base 13: mod_base = OTHER; note = 2'-Omethyluridine
  modified_base 19: mod_base = OTHER; note = 2'-Omethyluridine
  modified_base 23: mod_base = OTHER; note = 2'-fluorocytosine
  modified_base 24: mod_base = OTHER; note = 2'-fluoroadenosine
  modified_base 29: mod_base = OTHER; note = 2'-Omethylguanosine
  modified_base 30: mod_base = OTHER; note = 2'-Omethylguanosine
  modified_base 34: mod_base = OTHER; note = Cytosine phosphorothiorate
  modified_base 38: mod_base = OTHER; note = 2'-fluoroadenosine phosphorothiorate
  modified_base 39: mod_base = OTHER; note = 2'-fluorouridine
  modified_base 54: mod_base = OTHER; note = Uridine phosphorothiorate
  modified_base 58: mod_base = OTHER; note = 2'-Omethylguanosine
  modified_base 63: mod_base = OTHER; note = 2'-fluoroguanosine
  modified_base 64: mod_base = OTHER; note = Guanosine phosphorothiorate
  modified_base 65: mod_base = OTHER; note = 2'-fluorouridine
  modified_base 72: mod_base = OTHER; note = Uridine phosphorothiorate

SEQ ID NO: 6759 - RNA, 76 nt, synthetic construct; identical to SEQ ID NO: 625
  source 1..76: mol_type = other RNA
  modified_base 14: mod_base = OTHER; note = 2'-O-(2-Methoxyethyl) adenosine
  modified_base 15: mod_base = OTHER; note = 2'-O-(2-Methoxyethyl) adenosine
  modified_base 16: mod_base = OTHER; note = 2'-O-(2-Methoxyethyl) thymine
  modified_base 17: mod_base = OTHER; note = 2'-O-(2-Methoxyethyl) guanosine
  modified_base 18: mod_base = OTHER; note = 2'-O-(2-Methoxyethyl) guanosine
  modified_base 19: mod_base = OTHER; note = 2'-O-(2-Methoxyethyl) adenosine
  modified_base 20: mod_base = OTHER; note = 2'-O-(2-Methoxyethyl) thymine
  modified_base 21: mod_base = OTHER; note = 2'-O-(2-Methoxyethyl) adenosine

SEQ ID NO: 6760 - RNA, 76 nt, synthetic construct
  source 1..76: mol_type = other RNA
gcctcagtggcctaatggataaggcactggccttcaaagccagggattaggggttcgagtcccctctgaggtgcca

SEQ ID NO: 6761 - RNA, 75 nt, synthetic construct; identical to SEQ ID NO: 1045
  source 1..75: mol_type = other RNA
  modified_base 1: mod_base = OTHER; note = 2'-Omethylguanosine
  modified_base 2: mod_base = OTHER; note = 2'-Omethylguanosine phosphorothiorate
  modified_base 11: mod_base = OTHER; note = 2'-fluorouridine phosphorothiorate
  modified_base 14: mod_base = OTHER; note = Adenosine phosphorothiorate
  modified_base 20: mod_base = OTHER; note = Adenosine phosphorothiorate
  modified_base 21: mod_base = OTHER; note = 2'-fluoroadenosine
  modified_base 24: mod_base = OTHER; note = 2'-fluoroadenosine
  modified_base 33: mod_base = OTHER; note = 2'-fluorouridine
  modified_base 41: mod_base = OTHER; note = 2'-Omethylcytosine
  modified_base 42: mod_base = OTHER; note = 2'-fluoroadenosine
  modified_base 52: mod_base = OTHER; note = 2'-fluoroguanosine
  modified_base 57: mod_base = OTHER; note = 2'-Omethyladenosine
  modified_base 60: mod_base = OTHER; note = Cytosine phosphorothiorate
  modified_base 64: mod_base = OTHER; note = 2'-fluoroguanosine
  modified_base 65: mod_base = OTHER; note = 2'-fluorouridine
  modified_base 66: mod_base = OTHER; note = 2'-fluoroguanosine phosphorothiorate
  modified_base 72: mod_base = OTHER; note = Uridine phosphorothiorate
  modified_base 74: mod_base = OTHER; note = 2'-fluorocytosine phosphorothiorate

SEQ ID NO: 6762 - RNA, 76 nt, synthetic construct; identical to SEQ ID NO: 625
  source 1..76: mol_type = other RNA
  modified_base 1: mod_base = OTHER; note = 2'-Omethylguanosine
  modified_base 10: mod_base = OTHER; note = 2'-Omethylguanosine
  modified_base 13: mod_base = OTHER; note = 2'-Omethylcytosine
  modified_base 17: mod_base = OTHER; note = Guanosine phosphorothiorate
  modified_base 18: mod_base = OTHER; note = 2'-Omethylguanosine
  modified_base 19: mod_base = OTHER; note = 2'-fluoroadenosine
  modified_base 20: mod_base = OTHER; note = 2'-Omethyluridine
  modified_base 25: mod_base = OTHER; note = 2'-Omethylcytosine
  modified_base 29: mod_base = OTHER; note = 2'-Omethylguanosine
  modified_base 33: mod_base = OTHER; note = 2'-fluorouridine
  modified_base 35: mod_base = OTHER; note = Cytosine phosphorothiorate
  modified_base 37: mod_base = OTHER; note = Adenosine phosphorothiorate
  modified_base 38: mod_base = OTHER; note = Adenosine phosphorothiorate
  modified_base 43: mod_base = OTHER; note = 2'-Omethyladenosine
  modified_base 44: mod_base = OTHER; note = 2'-fluoroadenosine
  modified_base 46: mod_base = OTHER; note = Guanosine phosphorothiorate
  modified_base 50: mod_base = OTHER; note = 2'-Omethylcytosine
  modified_base 52: mod_base = OTHER; note = 2'-Omethylguanosine
  modified_base 54: mod_base = OTHER; note = Uridine phosphorothiorate
  modified_base 55: mod_base = OTHER; note = Uridine phosphorothiorate
  modified_base 56: mod_base = OTHER; note = 2'-Omethylcytosine
  modified_base 57: mod_base = OTHER; note = Guanosine phosphorothiorate
  modified_base 62: mod_base = OTHER; note = 2'-Omethylcytosine
  modified_base 63: mod_base = OTHER; note = 2'-fluorocytosine
  modified_base 65: mod_base = OTHER; note = 2'-Omethylguanosine
  modified_base 71: mod_base = OTHER; note = 2'-Omethyluridine
  modified_base 73: mod_base = OTHER; note = 2'-Omethylguanosine

SEQ ID NO: 6763 - RNA, 86 nt, synthetic construct; identical to SEQ ID NO: 3290
  source 1..86: mol_type = other RNA
  modified_base 17: mod_base = OTHER; note = Guanosine phosphorothiorate

SEQ ID NO: 6764 - RNA, 86 nt, synthetic construct; identical to SEQ ID NO: 3290
  source 1..86: mol_type = other RNA
  modified_base 11: mod_base = OTHER; note = 2'-fluorocytosine

SEQ ID NO: 6765 - RNA, 76 nt, synthetic construct; identical to SEQ ID NO: 3318
  source 1..76: mol_type = other RNA
  modified_base 1: mod_base = OTHER; note = 2'-Omethylcytosine
  modified_base 13: mod_base = OTHER; note = 2'-Omethylcytosine
  modified_base 14: mod_base = OTHER; note = 2'-Omethyladenosine
  modified_base 15: mod_base = OTHER; note = 2'-Omethylguanosine
  modified_base 16: mod_base = OTHER; note = 2'-Omethyluridine
  modified_base 18: mod_base = OTHER; note = 2'-Omethylguanosine
  modified_base 19: mod_base = OTHER; note = 2'-Omethylguanosine
  modified_base 20: mod_base = OTHER; note = Uridine phosphorothiorate
  modified_base 21: mod_base = OTHER; note = Adenosine phosphorothiorate
  modified_base 25: mod_base = OTHER; note = 2'-Omethylcytosine
  modified_base 41: mod_base = OTHER; note = 2'-fluorocytosine
  modified_base 42: mod_base = OTHER; note = 2'-Omethyluridine
  modified_base 43: mod_base = OTHER; note = 2'-Omethyluridine
  modified_base 44: mod_base = OTHER; note = 2'-fluoroadenosine
  modified_base 49: mod_base = OTHER; note = 2'-Omethylguanosine
  modified_base 50: mod_base = OTHER; note = 2'-Omethylcytosine
  modified_base 51: mod_base = OTHER; note = 2'-Omethyluridine
  modified_base 52: mod_base = OTHER; note = 2'-Omethylguanosine
  modified_base 53: mod_base = OTHER; note = 2'-Omethylguanosine
  modified_base 54: mod_base = OTHER; note = Uridine phosphorothiorate
  modified_base 55: mod_base = OTHER; note = Uridine phosphorothiorate
  modified_base 61: mod_base = OTHER; note = 2'-Omethylcytosine
  modified_base 65: mod_base = OTHER; note = 2'-Omethylcytosine
  modified_base 73: mod_base = OTHER; note = 2'-Omethyladenosine

SEQ ID NO: 6766 - RNA, 86 nt, synthetic construct; identical to SEQ ID NO: 3290
  source 1..86: mol_type = other RNA
  modified_base 84: mod_base = OTHER; note = Cytosine phosphorothiorate

SEQ ID NO: 6767 - RNA, 86 nt, synthetic construct
  source 1..86: mol_type = other RNA
gctggtttgcccgagtggttaagggggaagacttcagatcttctgcacataagtgcgcgtgggttcgaaccccacagccagcacca

SEQ ID NO: 6768 - RNA, 76 nt, synthetic construct; identical to SEQ ID NO: 3490
  source 1..76: mol_type = other RNA
  modified_base 1: mod_base = OTHER; note = 2'-Omethylguanosine
  modified_base 2: mod_base = OTHER; note = 2'-Omethylguanosine
  modified_base 3: mod_base = OTHER; note = 2'-Omethylcytosine
  modified_base 4: mod_base = OTHER; note = 2'-Omethyluridine
  modified_base 5: mod_base = OTHER; note = 2'-Omethylcytosine
  modified_base 6: mod_base = OTHER; note = 2'-Omethylcytosine
  modified_base 14: mod_base = OTHER; note = 2'-Omethyladenosine
  modified_base 15: mod_base = OTHER; note = 2'-Omethyladenosine
  modified_base 16: mod_base = OTHER; note = 2'-Omethyluridine
  modified_base 17: mod_base = OTHER; note = 2'-Omethylguanosine
  modified_base 18: mod_base = OTHER; note = 2'-Omethylguanosine
  modified_base 20: mod_base = OTHER; note = 2'-Omethyluridine
  modified_base 25: mod_base = OTHER; note = 2'-Omethylcytosine
  modified_base 33: mod_base = OTHER; note = 2'-fluorouridine
  modified_base 35: mod_base = OTHER; note = Cytosine phosphorothiorate
  modified_base 37: mod_base = OTHER; note = Adenosine phosphorothiorate
  modified_base 38: mod_base = OTHER; note = Adenosine phosphorothiorate
  modified_base 41: mod_base = OTHER; note = 2'-fluorocytosine
  modified_base 42: mod_base = OTHER; note = 2'-Omethyladenosine
  modified_base 43: mod_base = OTHER; note = 2'-Omethyladenosine
  modified_base 44: mod_base = OTHER; note = 2'-fluoroadenosine
  modified_base 49: mod_base = OTHER; note = 2'-Omethylguanosine
  modified_base 50: mod_base = OTHER; note = 2'-Omethylcytosine
  modified_base 52: mod_base = OTHER; note = 2'-Omethylguanosine
  modified_base 54: mod_base = OTHER; note = 2'-Omethyluridine
  modified_base 55: mod_base = OTHER; note = Uridine phosphorothiorate
  modified_base 56: mod_base = OTHER; note = 2'-Omethylcytosine
  modified_base 57: mod_base = OTHER; note = 2'-fluoroguanosine
  modified_base 59: mod_base = OTHER; note = 2'-Omethylguanosine
  modified_base 61: mod_base = OTHER; note = 2'-Omethylcytosine
  modified_base 62: mod_base = OTHER; note = 2'-Omethylcytosine
  modified_base 63: mod_base = OTHER; note = 2'-fluorocytosine
  modified_base 64: mod_base = OTHER; note = 2'-Omethylguanosine
  modified_base 65: mod_base = OTHER; note = 2'-Omethylcytosine
  modified_base 73: mod_base = OTHER; note = 2'-Omethylguanosine

SEQ ID NO: 6769 - RNA, 75 nt, synthetic construct; identical to SEQ ID NO: 3306
  source 1..75: mol_type = other RNA
  modified_base 1: mod_base = OTHER; note = 2'-Omethylguanosine
  modified_base 2: mod_base = OTHER; note = 2'-Omethyladenosine
  modified_base 3: mod_base = OTHER; note = 2'-Omethylcytosine
  modified_base 4: mod_base = OTHER; note = 2'-Omethylcytosine
  modified_base 5: mod_base = OTHER; note = 2'-Omethyluridine
  modified_base 6: mod_base = OTHER; note = 2'-Omethylcytosine
  modified_base 48: mod_base = OTHER; note = 2'-Omethylguanosine
  modified_base 49: mod_base = OTHER; note = 2'-Omethylcytosine
  modified_base 50: mod_base = OTHER; note = 2'-Omethylguanosine
  modified_base 51: mod_base = OTHER; note = 2'-Omethyluridine
  modified_base 52: mod_base = OTHER; note = 2'-Omethylguanosine

SEQ ID NO: 6770 - RNA, 75 nt, synthetic construct; identical to SEQ ID NO: 3306
  source 1..75: mol_type = other RNA
  modified_base 1: mod_base = OTHER; note = 2'-Omethylguanosine
  modified_base 2: mod_base = OTHER; note = 2'-Omethyladenosine
  modified_base 3: mod_base = OTHER; note = 2'-Omethylcytosine
  modified_base 4: mod_base = OTHER; note = 2'-Omethylcytosine
  modified_base 5: mod_base = OTHER; note = 2'-Omethyluridine
  modified_base 6: mod_base = OTHER; note = 2'-Omethylcytosine
  modified_base 48: mod_base = OTHER; note = 2'-Omethylguanosine
  modified_base 49: mod_base = OTHER; note = 2'-Omethylcytosine
  modified_base 50: mod_base = OTHER; note = 2'-Omethylguanosine
  modified_base 51: mod_base = OTHER; note = 2'-Omethyluridine
  modified_base 52: mod_base = OTHER; note = 2'-Omethylguanosine
  modified_base 72: mod_base = OTHER; note = 2'-Omethyladenosine

SEQ ID NO: 6771 - RNA, 76 nt, synthetic construct; identical to SEQ ID NO: 625
  source 1..76: mol_type = other RNA
  modified_base 1: mod_base = OTHER; note = 2'-Omethylguanosine
  modified_base 2: mod_base = OTHER; note = 2'-Omethylguanosine
  modified_base 3: mod_base = OTHER; note = 2'-Omethylcytosine
  modified_base 10: mod_base = OTHER; note = 2'-Omethylguanosine
  modified_base 11: mod_base = OTHER; note = 2'-Omethylcytosine
  modified_base 12: mod_base = OTHER; note = 2'-Omethylguanosine
  modified_base 13: mod_base = OTHER; note = 2'-Omethylcytosine
  modified_base 14: mod_base = OTHER; note = 2'-Omethyladenosine
  modified_base 15: mod_base = OTHER; note = 2'-fluoroadenosine
  modified_base 16: mod_base = OTHER; note = 2'-Omethyluridine
  modified_base 17: mod_base = OTHER; note = 2'-Omethylguanosine
  modified_base 18: mod_base = OTHER; note = 2'-Omethylguanosine
  modified_base 19: mod_base = OTHER; note = 2'-fluoroadenosine
  modified_base 20: mod_base = OTHER; note = 2'-Omethyluridine
  modified_base 21: mod_base = OTHER; note = 2'-fluoroadenosine
  modified_base 22: mod_base = OTHER; note = 2'-Omethylguanosine
  modified_base 23: mod_base = OTHER; note = 2'-Omethylcytosine
  modified_base 24: mod_base = OTHER; note = 2'-Omethylguanosine
  modified_base 25: mod_base = OTHER; note = 2'-Omethylcytosine
  modified_base 38: mod_base = OTHER; note = Adenosine phosphorothiorate
  modified_base 39: mod_base = OTHER; note = Uridine phosphorothiorate
  modified_base 40: mod_base = OTHER; note = 2'-fluorouridine
  modified_base 43: mod_base = OTHER; note = 2'-Omethyladenosine
  modified_base 44: mod_base = OTHER; note = 2'-Omethyladenosine
  modified_base 45: mod_base = OTHER; note = 2'-Omethylguanosine
  modified_base 46: mod_base = OTHER; note = 2'-fluoroguanosine
  modified_base 48: mod_base = OTHER; note = 2'-fluorouridine
  modified_base 49: mod_base = OTHER; note = 2'-Omethylcytosine
  modified_base 50: mod_base = OTHER; note = 2'-Omethylcytosine
  modified_base 54: mod_base = OTHER; note = 2'-Omethyluridine phosphorothiorate
  modified_base 55: mod_base = OTHER; note = Uridine phosphorothiorate
  modified_base 56: mod_base = OTHER; note = 2'-Omethylcytosine
  modified_base 57: mod_base = OTHER; note = 2'-fluoroguanosine
  modified_base 61: mod_base = OTHER; note = 2'-Omethylcytosine
  modified_base 62: mod_base = OTHER; note = 2'-Omethylcytosine
  modified_base 63: mod_base = OTHER; note = 2'-fluorocytosine
  modified_base 64: mod_base = OTHER; note = 2'-Omethylguanosine
  modified_base 65: mod_base = OTHER; note = 2'-Omethylguanosine
  modified_base 66: mod_base = OTHER; note = 2'-Omethylcytosine
  modified_base 67: mod_base = OTHER; note = 2'-Omethylguanosine
  modified_base 68: mod_base = OTHER; note = 2'-Omethylguanosine
  modified_base 69: mod_base = OTHER; note = 2'-fluoroadenosine
  modified_base 70: mod_base = OTHER; note = 2'-fluoroguanosine

SEQ ID NO: 6772 - RNA, 86 nt, synthetic construct; identical to SEQ ID NO: 3290
  source 1..86: mol_type = other RNA
  modified_base 1: mod_base = OTHER; note = 2'-Omethyladenosine phosphorothiorate
  modified_base 2: mod_base = OTHER; note = 2'-Omethylcytosine phosphorothiorate
  modified_base 69: mod_base = OTHER; note = 2'-Omethyladenosine
  modified_base 85: mod_base = OTHER; note = Cytosine phosphorothiorate
  modified_base 86: mod_base = OTHER; note = 2'-Omethyladenosine

SEQ ID NO: 6773 - RNA, 76 nt, synthetic construct; identical to SEQ ID NO: 625
  source 1..76: mol_type = other RNA
  modified_base 3: mod_base = OTHER; note = Cytosine phosphorothiorate
  modified_base 4: mod_base = OTHER; note = 2'-Omethyluridine
  modified_base 6: mod_base = OTHER; note = 2'-Omethylcytosine
  modified_base 7: mod_base = OTHER; note = Guanosine phosphorothiorate
  modified_base 8: mod_base = OTHER; note = Uridine phosphorothiorate
  modified_base 14: mod_base = OTHER; note = 2'-Omethyladenosine
  modified_base 15: mod_base = OTHER; note = 2'-fluoroadenosine
  modified_base 17: mod_base = OTHER; note = 2'-Omethylguanosine
  modified_base 23: mod_base = OTHER; note = 2'-fluorocytosine
  modified_base 24: mod_base = OTHER; note = 2'-Omethylguanosine phosphorothiorate
  modified_base 25: mod_base = OTHER; note = 2'-Omethylcytosine phosphorothiorate
  modified_base 26: mod_base = OTHER; note = Adenosine phosphorothiorate
  modified_base 28: mod_base = OTHER; note = Uridine phosphorothiorate
  modified_base 33: mod_base = OTHER; note = 2'-fluorouridine
  modified_base 37: mod_base = OTHER; note = Adenosine phosphorothiorate
  modified_base 38: mod_base = OTHER; note = 2'-fluoroadenosine
  modified_base 39: mod_base = OTHER; note = 2'-Omethyluridine phosphorothiorate
  modified_base 40: mod_base = OTHER; note = 2'-Omethyluridine
  modified_base 42: mod_base = OTHER; note = 2'-fluoroadenosine phosphorothiorate
  modified_base 43: mod_base = OTHER; note = 2'-fluoroadenosine
  modified_base 44: mod_base = OTHER; note = 2'-Omethyladenosine
  modified_base 47: mod_base = OTHER; note = 2'-fluorouridine
  modified_base 51: mod_base = OTHER; note = 2'-Omethylguanosine
  modified_base 52: mod_base = OTHER; note = 2'-fluoroguanosine phosphorothiorate
  modified_base 61: mod_base = OTHER; note = 2'-fluorocytosine
  modified_base 64: mod_base = OTHER; note = 2'-fluoroguanosine
  modified_base 70: mod_base = OTHER; note = 2'-fluoroguanosine
  modified_base 71: mod_base = OTHER; note = 2'-fluorouridine
  modified_base 75: mod_base = OTHER; note = Cytosine phosphorothiorate
  modified_base 76: mod_base = OTHER; note = 2'-Omethyladenosine

SEQ ID NO: 6774 - RNA, 85 nt, synthetic construct; identical to SEQ ID NO: 3310
  source 1..85: mol_type = other RNA
  modified_base 1: mod_base = OTHER; note = 2'-Omethylcytosine
  modified_base 11: mod_base = OTHER; note = Cytosine phosphorothiorate
  modified_base 27: mod_base = OTHER; note = Uridine phosphorothiorate
  modified_base 43: mod_base = OTHER; note = Uridine phosphorothiorate
  modified_base 49: mod_base = OTHER; note = 2'-Omethyluridine
  modified_base 51: mod_base = OTHER; note = 2'-Omethyluridine
  modified_base 58: mod_base = OTHER; note = 2'-fluoroguanosine
  modified_base 72: mod_base = OTHER; note = 2'-fluorocytosine

SEQ ID NO: 6775 - RNA, 85 nt, synthetic construct; identical to SEQ ID NO: 3288
  source 1..85: mol_type = other RNA
  modified_base 1: mod_base = OTHER; note = 2'-Omethylcytosine
  modified_base 9: mod_base = OTHER; note = Guanosine phosphorothiorate
  modified_base 26: mod_base = OTHER; note = 2'-fluorouridine
  modified_base 28: mod_base = OTHER; note = 2'-fluoroguanosine
  modified_base 38: mod_base = OTHER; note = Uridine phosphorothiorate
  modified_base 41: mod_base = OTHER; note = Adenosine phosphorothiorate
  modified_base 47: mod_base = OTHER; note = 2'-Omethylcytosine
  modified_base 73: mod_base = OTHER; note = Adenosine phosphorothiorate
  modified_base 84: mod_base = OTHER; note = Cytosine phosphorothiorate
  modified_base 85: mod_base = OTHER; note = 2'-Omethyladenosine

SEQ ID NO: 6776 - RNA, 85 nt, synthetic construct; identical to SEQ ID NO: 3317
  source 1..85: mol_type = other RNA
  modified_base 2: mod_base = OTHER; note = Cytosine phosphorothiorate
  modified_base 10: mod_base = OTHER; note = 2'-Omethylguanosine
  modified_base 29: mod_base = OTHER; note = 2'-fluoroguanosine
  modified_base 55: mod_base = OTHER; note = 2'-Omethylcytosine phosphorothiorate
  modified_base 67: mod_base = OTHER; note = Adenosine phosphorothiorate
  modified_base 82: mod_base = OTHER; note = 2'-Omethylguanosine

SEQ ID NO: 6777 - RNA, 85 nt, synthetic construct; identical to SEQ ID NO: 3297
  source 1..85: mol_type = other RNA
  modified_base 1: mod_base = OTHER; note = 2'-Omethylguanosine phosphorothiorate
  modified_base 2: mod_base = OTHER; note = 2'-Omethylcytosine phosphorothiorate
  modified_base 83: mod_base = OTHER; note = 2'-Omethylcytosine phosphorothiorate
  modified_base 84: mod_base = OTHER; note = 2'-Omethylcytosine phosphorothiorate
  modified_base 85: mod_base = OTHER; note = 2'-Omethyladenosine

SEQ ID NO: 6778 - RNA, 76 nt, synthetic construct; identical to SEQ ID NO: 3289
  source 1..76: mol_type = other RNA
  modified_base 74: mod_base = OTHER; note = 2'-Omethylcytosine
  modified_base 75: mod_base = OTHER; note = 2'-Omethylcytosine

SEQ ID NO: 6779 - RNA, 85 nt, synthetic construct; identical to SEQ ID NO: 3297
  source 1..85: mol_type = other RNA
  modified_base 1: mod_base = OTHER; note = 2'-Omethylguanosine phosphorothiorate
  modified_base 2: mod_base = OTHER; note = 2'-Omethylcytosine phosphorothiorate
  modified_base 3: mod_base = OTHER; note = 2'-Omethyluridine
  modified_base 4: mod_base = OTHER; note = 2'-Omethylguanosine
  modified_base 5: mod_base = OTHER; note = 2'-Omethyluridine
  modified_base 6: mod_base = OTHER; note = 2'-Omethylguanosine
  modified_base 16: mod_base = OTHER; note = 2'-Omethyluridine
  modified_base 17: mod_base = OTHER; note = 2'-Omethylguanosine
  modified_base 18: mod_base = OTHER; note = 2'-Omethylguanosine
  modified_base 33: mod_base = OTHER; note = 2'-fluorouridine
  modified_base 35: mod_base = OTHER; note = Cytosine phosphorothiorate
  modified_base 37: mod_base = OTHER; note = Adenosine phosphorothiorate
  modified_base 38: mod_base = OTHER; note = Adenosine phosphorothiorate
  modified_base 44: mod_base = OTHER; note = 2'-Omethyluridine
  modified_base 56: mod_base = OTHER; note = 2'-fluoroguanosine
  modified_base 57: mod_base = OTHER; note = 2'-fluorocytosine
  modified_base 65: mod_base = OTHER; note = 2'-Omethylcytosine
  modified_base 68: mod_base = OTHER; note = 2'-Omethyladenosine
  modified_base 70: mod_base = OTHER; note = 2'-Omethylcytosine
  modified_base 71: mod_base = OTHER; note = 2'-Omethylcytosine
  modified_base 72: mod_base = OTHER; note = 2'-fluorouridine
  modified_base 73: mod_base = OTHER; note = 2'-Omethylguanosine
  modified_base 74: mod_base = OTHER; note = 2'-Omethylcytosine
  modified_base 75: mod_base = OTHER; note = 2'-Omethyluridine
  modified_base 76: mod_base = OTHER; note = 2'-Omethylcytosine
  modified_base 77: mod_base = OTHER; note = 2'-Omethyladenosine
  modified_base 82: mod_base = OTHER; note = 2'-Omethylguanosine

SEQ ID NO: 6780 - RNA, 85 nt, synthetic construct; identical to SEQ ID NO: 3317
  source 1..85: mol_type = other RNA
  modified_base 1: mod_base = OTHER; note = 2'-Omethylguanosine phosphorothiorate
  modified_base 2: mod_base = OTHER; note = Cytosine phosphorothiorate
  modified_base 28: mod_base = OTHER; note = 2'-fluorouridine
  modified_base 57: mod_base = OTHER; note = 2'-Omethylcytosine phosphorothiorate
  modified_base 74: mod_base = OTHER; note = 2'-fluorocytosine phosphorothiorate
  modified_base 83: mod_base = OTHER; note = Cytosine phosphorothiorate

SEQ ID NO: 6781 - RNA, 76 nt, synthetic construct; identical to SEQ ID NO: 3295
  source 1..76: mol_type = other RNA
  modified_base 1: mod_base = OTHER; note = 2'-Omethylcytosine
  modified_base 2: mod_base = OTHER; note = 2'-Omethylcytosine phosphorothiorate
  modified_base 3: mod_base = OTHER; note = Uridine phosphorothiorate
  modified_base 6: mod_base = OTHER; note = Guanosine phosphorothiorate
  modified_base 9: mod_base = OTHER; note = 2'-fluoroadenosine phosphorothiorate
  modified_base 16: mod_base = OTHER; note = Uridine phosphorothiorate
  modified_base 17: mod_base = OTHER; note = 2'-Omethyluridine
  modified_base 21: mod_base = OTHER; note = 2'-Omethyladenosine
  modified_base 26: mod_base = OTHER; note = 2'-Omethylguanosine phosphorothiorate
  modified_base 30: mod_base = OTHER; note = 2'-fluoroguanosine
  modified_base 36: mod_base = OTHER; note = 2'-fluoroadenosine phosphorothiorate
  modified_base 37: mod_base = OTHER; note = 2'-fluoroguanosine
  modified_base 52: mod_base = OTHER; note = 2'-Omethylguanosine
  modified_base 58: mod_base = OTHER; note = 2'-fluoroadenosine phosphorothiorate
  modified_base 66: mod_base = OTHER; note = 2'-fluorouridine
  modified_base 75: mod_base = OTHER; note = 2'-fluorocytosine

SEQ ID NO: 6782 - RNA, 75 nt, synthetic construct; identical to SEQ ID NO: 3311
  source 1..75: mol_type = other RNA
  modified_base 1: mod_base = OTHER; note = Guanosine phosphorothiorate
  modified_base 2: mod_base = OTHER; note = 2'-Omethylguanosine phosphorothiorate
  modified_base 14: mod_base = OTHER; note = 2'-Omethyladenosine
  modified_base 17: mod_base = OTHER; note = 2'-Omethylguanosine
  modified_base 18: mod_base = OTHER; note = Guanosine phosphorothiorate
  modified_base 27: mod_base = OTHER; note = 2'-fluorocytosine
  modified_base 30: mod_base = OTHER; note = Guanosine phosphorothiorate
  modified_base 35: mod_base = OTHER; note = 2'-fluorouridine
  modified_base 36: mod_base = OTHER; note = 2'-fluoroadenosine phosphorothiorate
  modified_base 41: mod_base = OTHER; note = 2'-fluorocytosine
  modified_base 59: mod_base = OTHER; note = 2'-fluorouridine
  modified_base 68: mod_base = OTHER; note = 2'-fluoroadenosine
  modified_base 74: mod_base = OTHER; note = Cytosine phosphorothiorate
  modified_base 75: mod_base = OTHER; note = 2'-fluoroadenosine

SEQ ID NO: 6783 - RNA, 75 nt, synthetic construct; identical to SEQ ID NO: 3306
  source 1..75: mol_type = other RNA
  modified_base 1: mod_base = OTHER; note = 2'-Omethylguanosine
  modified_base 2: mod_base = OTHER; note = 2'-Omethyladenosine
  modified_base 3: mod_base = OTHER; note = 2'-Omethylcytosine
  modified_base 4: mod_base = OTHER; note = 2'-Omethylcytosine
  modified_base 5: mod_base = OTHER; note = 2'-Omethyluridine
  modified_base 6: mod_base = OTHER; note = 2'-Omethylcytosine
  modified_base 10: mod_base = OTHER; note = 2'-Omethylguanosine
  modified_base 11: mod_base = OTHER; note = 2'-Omethylcytosine
  modified_base 12: mod_base = OTHER; note = 2'-Omethylguanosine
  modified_base 13: mod_base = OTHER; note = 2'-Omethylcytosine
  modified_base 21: mod_base = OTHER; note = 2'-Omethylguanosine
  modified_base 22: mod_base = OTHER; note = 2'-Omethylcytosine
  modified_base 23: mod_base = OTHER; note = 2'-Omethylguanosine
  modified_base 24: mod_base = OTHER; note = 2'-Omethylcytosine
  modified_base 48: mod_base = OTHER; note = 2'-Omethylguanosine
  modified_base 49: mod_base = OTHER; note = 2'-Omethylcytosine
  modified_base 50: mod_base = OTHER; note = 2'-Omethylguanosine
  modified_base 51: mod_base = OTHER; note = 2'-Omethyluridine
  modified_base 52: mod_base = OTHER; note = 2'-Omethylguanosine
  modified_base 65: mod_base = OTHER; note = 2'-Omethylcytosine
  modified_base 66: mod_base = OTHER; note = 2'-Omethylguanosine
  modified_base 67: mod_base = OTHER; note = 2'-Omethylguanosine
  modified_base 72: mod_base = OTHER; note = 2'-Omethyladenosine

SEQ ID NO: 6784 - RNA, 75 nt, synthetic construct; identical to SEQ ID NO: 3311
  source 1..75: mol_type = other RNA
  modified_base 1: mod_base = OTHER; note = 2'-Omethylguanosine phosphorothiorate
  modified_base 4: mod_base = OTHER; note = 2'-Omethyluridine phosphorothiorate
  modified_base 5: mod_base = OTHER; note = 2'-Omethylcytosine
  modified_base 22: mod_base = OTHER; note = Guanosine phosphorothiorate
  modified_base 23: mod_base = OTHER; note = 2'-fluorocytosine
  modified_base 24: mod_base = OTHER; note = 2'-fluoroadenosine
  modified_base 26: mod_base = OTHER; note = Uridine phosphorothiorate
  modified_base 35: mod_base = OTHER; note = 2'-fluorouridine
  modified_base 45: mod_base = OTHER; note = 2'-Omethylguanosine phosphorothiorate
  modified_base 48: mod_base = OTHER; note = 2'-fluorocytosine
  modified_base 52: mod_base = OTHER; note = Guanosine phosphorothiorate
  modified_base 54: mod_base = OTHER; note = 2'-fluorouridine phosphorothiorate
  modified_base 66: mod_base = OTHER; note = 2'-fluoroguanosine
  modified_base 67: mod_base = OTHER; note = 2'-fluoroguanosine
  modified_base 74: mod_base = OTHER; note = Cytosine phosphorothiorate

SEQ ID NO: 6785 - RNA, 74 nt, synthetic construct; identical to SEQ ID NO: 3293
  source 1..74: mol_type = other RNA
  modified_base 1: mod_base = OTHER; note = Adenosine phosphorothiorate
  modified_base 4: mod_base = OTHER; note = 2'-Omethyluridine
  modified_base 15: mod_base = OTHER; note = Cytosine phosphorothiorate
  modified_base 24: mod_base = OTHER; note = 2'-fluoroguanosine
  modified_base 26: mod_base = OTHER; note = 2'-Omethylcytosine phosphorothiorate
  modified_base 48: mod_base = OTHER; note = Cytosine phosphorothiorate
  modified_base 50: mod_base = OTHER; note = Uridine phosphorothiorate
  modified_base 73: mod_base = OTHER; note = 2'-Omethylcytosine phosphorothiorate

SEQ ID NO: 6786 - RNA, 76 nt, synthetic construct; identical to SEQ ID NO: 625
  source 1..76: mol_type = other RNA
  modified_base 1: mod_base = OTHER; note = 2'-Omethylguanosine phosphorothiorate
  modified_base 2: mod_base = OTHER; note = 2'-Omethylguanosine
  modified_base 3: mod_base = OTHER; note = 2'-Omethylcytosine
  modified_base 4: mod_base = OTHER; note = 2'-Omethyluridine
  modified_base 5: mod_base = OTHER; note = 2'-Omethylcytosine
  modified_base 6: mod_base = OTHER; note = 2'-Omethylcytosine
  modified_base 10: mod_base = OTHER; note = 2'-Omethylguanosine
  modified_base 11: mod_base = OTHER; note = 2'-Omethylcytosine
  modified_base 12: mod_base = OTHER; note = 2'-Omethylguanosine
  modified_base 13: mod_base = OTHER; note = 2'-Omethylcytosine
  modified_base 49: mod_base = OTHER; note = 2'-Omethylcytosine
  modified_base 50: mod_base = OTHER; note = 2'-Omethylcytosine
  modified_base 51: mod_base = OTHER; note = 2'-Omethylguanosine
  modified_base 52: mod_base = OTHER; note = 2'-Omethylguanosine
  modified_base 53: mod_base = OTHER; note = 2'-Omethylguanosine
  modified_base 61: mod_base = OTHER; note = 2'-Omethylcytosine
  modified_base 62: mod_base = OTHER; note = 2'-Omethylcytosine
  modified_base 63: mod_base = OTHER; note = 2'-fluorocytosine
  modified_base 64: mod_base = OTHER; note = 2'-Omethylguanosine
  modified_base 65: mod_base = OTHER; note = 2'-Omethylguanosine
  modified_base 66: mod_base = OTHER; note = 2'-Omethylcytosine
  modified_base 67: mod_base = OTHER; note = 2'-Omethylguanosine
  modified_base 68: mod_base = OTHER; note = 2'-Omethylguanosine
  modified_base 69: mod_base = OTHER; note = 2'-fluoroadenosine
  modified_base 71: mod_base = OTHER; note = 2'-Omethyluridine

SEQ ID NO: 6787 - RNA, 76 nt, synthetic construct; identical to SEQ ID NO: 625
  source 1..76: mol_type = other RNA
  modified_base 10: mod_base = OTHER; note = Guanosine phosphorothiorate
  modified_base 11: mod_base = OTHER; note = Cytosine phosphorothiorate
  modified_base 12: mod_base = OTHER; note = Guanosine phosphorothiorate
  modified_base 13: mod_base = OTHER; note = Cytosine phosphorothiorate
  modified_base 22: mod_base = OTHER; note = Guanosine phosphorothiorate
  modified_base 23: mod_base = OTHER; note = Cytosine phosphorothiorate
  modified_base 24: mod_base = OTHER; note = Guanosine phosphorothiorate
  modified_base 25: mod_base = OTHER; note = Cytosine phosphorothiorate

SEQ ID NO: 6788 - RNA, 75 nt, synthetic construct; identical to SEQ ID NO: 3311
  source 1..75: mol_type = other RNA
  modified_base 1: mod_base = OTHER; note = 2'-Omethylguanosine phosphorothiorate
  modified_base 2: mod_base = OTHER; note = 2'-Omethylguanosine phosphorothiorate
  modified_base 8: mod_base = OTHER; note = 2'-fluorouridine phosphorothiorate
  modified_base 20: mod_base = OTHER; note = 2'-fluoroadenosine
  modified_base 23: mod_base = OTHER; note = Cytosine phosphorothiorate
  modified_base 27: mod_base = OTHER; note = 2'-Omethylcytosine
  modified_base 28: mod_base = OTHER; note = 2'-fluorouridine
  modified_base 29: mod_base = OTHER; note = 2'-Omethylguanosine
  modified_base 42: mod_base = OTHER; note = 2'-fluoroadenosine
  modified_base 44: mod_base = OTHER; note = 2'-fluorocytosine
  modified_base 52: mod_base = OTHER; note = 2'-Omethylguanosine
  modified_base 56: mod_base = OTHER; note = 2'-Omethylguanosine
  modified_base 57: mod_base = OTHER; note = 2'-fluoroadenosine
  modified_base 58: mod_base = OTHER; note = 2'-Omethylguanosine
  modified_base 65: mod_base = OTHER; note = Uridine phosphorothiorate
  modified_base 67: mod_base = OTHER; note = Guanosine phosphorothiorate
  modified_base 69: mod_base = OTHER; note = 2'-fluoroadenosine

SEQ ID NO: 6789 - RNA, 76 nt, synthetic construct; identical to SEQ ID NO: 3447
  source 1..76: mol_type = other RNA
  modified_base 1: mod_base = OTHER; note = 2'-Omethylguanosine phosphorothiorate
  modified_base 2: mod_base = OTHER; note = 2'-Omethylcytosine phosphorothiorate
  modified_base 13: mod_base = OTHER; note = 2'-fluorocytosine
  modified_base 14: mod_base = OTHER; note = 2'-fluoroadenosine
  modified_base 54: mod_base = OTHER; note = 2'-fluorouridine
  modified_base 59: mod_base = OTHER; note = 2'-Omethylguanosine
  modified_base 75: mod_base = OTHER; note = Cytosine phosphorothiorate
  modified_base 76: mod_base = OTHER; note = 2'-Omethyladenosine

SEQ ID NO: 6790 - RNA, 76 nt, synthetic construct; identical to SEQ ID NO: 3332
  source 1..76: mol_type = other RNA
  modified_base 1: mod_base = OTHER; note = 2'-Omethylguanosine
  modified_base 2: mod_base = OTHER; note = 2'-Omethylguanosine
  modified_base 3: mod_base = OTHER; note = 2'-Omethylcytosine
  modified_base 4: mod_base = OTHER; note = 2'-Omethylcytosine
  modified_base 5: mod_base = OTHER; note = 2'-Omethylcytosine
  modified_base 6: mod_base = OTHER; note = 2'-Omethylcytosine
  modified_base 13: mod_base = OTHER; note = 2'-Omethylcytosine
  modified_base 14: mod_base = OTHER; note = 2'-Omethyladenosine
  modified_base 15: mod_base = OTHER; note = 2'-Omethyladenosine
  modified_base 16: mod_base = OTHER; note = 2'-Omethyluridine
  modified_base 17: mod_base = OTHER; note = 2'-Omethylguanosine
  modified_base 18: mod_base = OTHER; note = 2'-Omethylguanosine
  modified_base 19: mod_base = OTHER; note = Adenosine phosphorothiorate
  modified_base 20: mod_base = OTHER; note = 2'-Omethyluridine
  modified_base 21: mod_base = OTHER; note = Adenosine phosphorothiorate
  modified_base 25: mod_base = OTHER; note = 2'-Omethylcytosine
  modified_base 33: mod_base = OTHER; note = Uridine phosphorothiorate
  modified_base 34: mod_base = OTHER; note = 2'-Omethyluridine
  modified_base 35: mod_base = OTHER; note = Cytosine phosphorothiorate
  modified_base 37: mod_base = OTHER; note = Adenosine phosphorothiorate
  modified_base 38: mod_base = OTHER; note = Adenosine phosphorothiorate
  modified_base 49: mod_base = OTHER; note = 2'-Omethylguanosine
  modified_base 50: mod_base = OTHER; note = 2'-Omethylcytosine
  modified_base 51: mod_base = OTHER; note = 2'-Omethylguanosine
  modified_base 52: mod_base = OTHER; note = 2'-Omethylguanosine
  modified_base 53: mod_base = OTHER; note = 2'-Omethylguanosine
  modified_base 54: mod_base = OTHER; note = Uridine phosphorothiorate
  modified_base 55: mod_base = OTHER; note = Uridine phosphorothiorate
  modified_base 61: mod_base = OTHER; note = 2'-Omethylcytosine
  modified_base 65: mod_base = OTHER; note = 2'-Omethylcytosine
  modified_base 73: mod_base = OTHER; note = 2'-Omethylguanosine

SEQ ID NO: 6791 - RNA, 86 nt, synthetic construct; identical to SEQ ID NO: 3290
  source 1..86: mol_type = other RNA
  modified_base 2: mod_base = OTHER; note = 2'-fluorocytosine

SEQ ID NO: 6792 - RNA, 85 nt, synthetic construct; identical to SEQ ID NO: 3297
  source 1..85: mol_type = other RNA
  modified_base 1: mod_base = OTHER; note = 2'-Omethylguanosine phosphorothiorate
  modified_base 2: mod_base = OTHER; note = 2'-Omethylcytosine phosphorothiorate
  modified_base 15: mod_base = OTHER; note = 2'-fluoroguanosine phosphorothiorate
  modified_base 36: mod_base = OTHER; note = 2'-Omethyladenosine phosphorothiorate
  modified_base 46: mod_base = OTHER; note = 2'-Omethylguanosine phosphorothiorate
  modified_base 60: mod_base = OTHER; note = 2'-fluoroadenosine
  modified_base 71: mod_base = OTHER; note = 2'-fluorocytosine

SEQ ID NO: 6793 - RNA, 76 nt, synthetic construct; identical to SEQ ID NO: 625
  source 1..76: mol_type = other RNA
  modified_base 1: mod_base = OTHER; note = 2'-Omethylguanosine phosphorothiorate
  modified_base 2: mod_base = OTHER; note = 2'-Omethylguanosine phosphorothiorate
  modified_base 3: mod_base = OTHER; note = 2'-Omethylcytosine
  modified_base 4: mod_base = OTHER; note = 2'-Omethyluridine
  modified_base 5: mod_base = OTHER; note = 2'-Omethylcytosine
  modified_base 6: mod_base = OTHER; note = 2'-Omethylcytosine
  modified_base 14: mod_base = OTHER; note = 2'-Omethyladenosine
  modified_base 15: mod_base = OTHER; note = 2'-Omethyladenosine
  modified_base 16: mod_base = OTHER; note = 2'-Omethyluridine
  modified_base 17: mod_base = OTHER; note = 2'-Omethylguanosine
  modified_base 18: mod_base = OTHER; note = 2'-Omethylguanosine
  modified_base 20: mod_base = OTHER; note = 2'-Omethyluridine
  modified_base 22: mod_base = OTHER; note = 2'-Omethylguanosine
  modified_base 23: mod_base = OTHER; note = 2'-Omethylcytosine
  modified_base 24: mod_base = OTHER; note = 2'-Omethylguanosine
  modified_base 25: mod_base = OTHER; note = 2'-Omethylcytosine
  modified_base 33: mod_base = OTHER; note = 2'-fluorouridine
  modified_base 35: mod_base = OTHER; note = Cytosine phosphorothiorate
  modified_base 37: mod_base = OTHER; note = Adenosine phosphorothiorate
  modified_base 38: mod_base = OTHER; note = Adenosine phosphorothiorate
  modified_base 41: mod_base = OTHER; note = 2'-Omethylcytosine
  modified_base 42: mod_base = OTHER; note = 2'-Omethyladenosine
  modified_base 43: mod_base = OTHER; note = 2'-Omethyladenosine
  modified_base 44: mod_base = OTHER; note = 2'-Omethyladenosine
  modified_base 49: mod_base = OTHER; note = 2'-Omethylcytosine
  modified_base 50: mod_base = OTHER; note = 2'-Omethylcytosine
  modified_base 52: mod_base = OTHER; note = 2'-Omethylguanosine
  modified_base 54: mod_base = OTHER; note = 2'-Omethyluridine
  modified_base 55: mod_base = OTHER; note = Uridine phosphorothiorate
  modified_base 56: mod_base = OTHER; note = 2'-Omethylcytosine
  modified_base 57: mod_base = OTHER; note = 2'-fluoroguanosine
  modified_base 59: mod_base = OTHER; note = 2'-Omethylguanosine
  modified_base 61: mod_base = OTHER; note = 2'-Omethylcytosine
  modified_base 62: mod_base = OTHER; note = 2'-Omethylcytosine
  modified_base 63: mod_base = OTHER; note = 2'-fluorocytosine
  modified_base 64: mod_base = OTHER; note = 2'-Omethylguanosine
  modified_base 65: mod_base = OTHER; note = 2'-Omethylguanosine
  modified_base 73: mod_base = OTHER; note = 2'-Omethylguanosine

SEQ ID NO: 6794 - RNA, 76 nt, synthetic construct; identical to SEQ ID NO: 625
  source 1..76: mol_type = other RNA
  modified_base 4: mod_base = OTHER; note = 2'-Omethyluridine
  modified_base 5: mod_base = OTHER; note = 2'-fluorocytosine
  modified_base 6: mod_base = OTHER; note = Cytosine phosphorothiorate
  modified_base 9: mod_base = OTHER; note = Guanosine phosphorothiorate
  modified_base 10: mod_base = OTHER; note = 2'-fluoroguanosine
  modified_base 11: mod_base = OTHER; note = 2'-Omethylcytosine
  modified_base 13: mod_base = OTHER; note = 2'-Omethylcytosine
  modified_base 18: mod_base = OTHER; note = Guanosine phosphorothiorate
  modified_base 23: mod_base = OTHER; note = Cytosine phosphorothiorate
  modified_base 24: mod_base = OTHER; note = 2'-fluoroguanosine
  modified_base 29: mod_base = OTHER; note = 2'-Omethylguanosine phosphorothiorate
  modified_base 33: mod_base = OTHER; note = 2'-fluorouridine
  modified_base 34: mod_base = OTHER; note = Uridine phosphorothiorate
  modified_base 38: mod_base = OTHER; note = 2'-fluoroadenosine phosphorothiorate
  modified_base 39: mod_base = OTHER; note = 2'-Omethyluridine
  modified_base 40: mod_base = OTHER; note = Uridine phosphorothiorate
  modified_base 42: mod_base = OTHER; note = 2'-Omethyladenosine
  modified_base 43: mod_base = OTHER; note = 2'-Omethyladenosine
  modified_base 44: mod_base = OTHER; note = Adenosine phosphorothiorate
  modified_base 45: mod_base = OTHER; note = 2'-fluoroguanosine
  modified_base 46: mod_base = OTHER; note = Guanosine phosphorothiorate
  modified_base 47: mod_base = OTHER; note = 2'-Omethyluridine
  modified_base 50: mod_base = OTHER; note = 2'-fluorocytosine
  modified_base 51: mod_base = OTHER; note = 2'-Omethylguanosine
  modified_base 53: mod_base = OTHER; note = 2'-Omethylguanosine
  modified_base 54: mod_base = OTHER; note = 2'-fluorouridine
  modified_base 56: mod_base = OTHER; note = Cytosine phosphorothiorate
  modified_base 58: mod_base = OTHER; note = Adenosine phosphorothiorate
  modified_base 59: mod_base = OTHER; note = 2'-Omethylguanosine
  modified_base 62: mod_base = OTHER; note = 2'-Omethylcytosine
  modified_base 65: mod_base = OTHER; note = 2'-Omethylguanosine
  modified_base 69: mod_base = OTHER; note = 2'-Omethyladenosine
  modified_base 74: mod_base = OTHER; note = 2'-fluorocytosine
  modified_base 75: mod_base = OTHER; note = 2'-fluorocytosine
  modified_base 76: mod_base = OTHER; note = 2'-fluoroadenosine

SEQ ID NO: 6795 - RNA, 76 nt, synthetic construct; identical to SEQ ID NO: 625
  source 1..76: mol_type = other RNA
  modified_base 4: mod_base = OTHER; note = 2'-Omethyluridine
  modified_base 5: mod_base = OTHER; note = 2'-fluorocytosine
  modified_base 9: mod_base = OTHER; note = Guanosine phosphorothiorate
  modified_base 11: mod_base = OTHER; note = 2'-Omethylcytosine
  modified_base 13: mod_base = OTHER; note = 2'-Omethylcytosine
  modified_base 15: mod_base = OTHER; note = Adenosine phosphorothiorate
  modified_base 16: mod_base = OTHER; note = 2'-Omethyluridine
  modified_base 20: mod_base = OTHER; note = Uridine phosphorothiorate
  modified_base 24: mod_base = OTHER; note = 2'-fluoroguanosine
  modified_base 25: mod_base = OTHER; note = Cytosine phosphorothiorate
  modified_base 26: mod_base = OTHER; note = 2'-Omethyladenosine phosphorothiorate
  modified_base 27: mod_base = OTHER; note = 2'-fluorouridine
  modified_base 28: mod_base = OTHER; note = 2'-fluorouridine phosphorothiorate
  modified_base 29: mod_base = OTHER; note = 2'-Omethylguanosine
  modified_base 33: mod_base = OTHER; note = Uridine phosphorothiorate
  modified_base 34: mod_base = OTHER; note = 2'-fluorouridine
  modified_base 36: mod_base = OTHER; note = Adenosine phosphorothiorate
  modified_base 37: mod_base = OTHER; note = Adenosine phosphorothiorate
  modified_base 47: mod_base = OTHER; note = Uridine phosphorothiorate
  modified_base 49: mod_base = OTHER; note = 2'-Omethylcytosine
  modified_base 54: mod_base = OTHER; note = 2'-Omethyluridine
  modified_base 56: mod_base = OTHER; note = 2'-Omethylcytosine phosphorothiorate
  modified_base 57: mod_base = OTHER; note = Guanosine phosphorothiorate
  modified_base 58: mod_base = OTHER; note = 2'-fluoroadenosine
  modified_base 59: mod_base = OTHER; note = 2'-Omethylguanosine
  modified_base 62: mod_base = OTHER; note = 2'-fluorocytosine
  modified_base 63: mod_base = OTHER; note = Cytosine phosphorothiorate
  modified_base 64: mod_base = OTHER; note = 2'-fluoroguanosine
  modified_base 65: mod_base = OTHER; note = 2'-Omethylguanosine phosphorothiorate
  modified_base 66: mod_base = OTHER; note = 2'-Omethylcytosine
  modified_base 67: mod_base = OTHER; note = 2'-Omethylguanosine
  modified_base 70: mod_base = OTHER; note = 2'-Omethylguanosine
  modified_base 71: mod_base = OTHER; note = Uridine phosphorothiorate
  modified_base 74: mod_base = OTHER; note = 2'-Omethylcytosine
  modified_base 75: mod_base = OTHER; note = Cytosine phosphorothiorate
  modified_base 76: mod_base = OTHER; note = 2'-Omethyladenosine

SEQ ID NO: 6796 - RNA, 74 nt, synthetic construct; identical to SEQ ID NO: 3293
  source 1..74: mol_type = other RNA
  modified_base 1: mod_base = OTHER; note = 2'-fluoroadenosine
  modified_base 5: mod_base = OTHER; note = 2'-fluorocytosine
  modified_base 12: mod_base = OTHER; note = 2'-fluorocytosine
  modified_base 18: mod_base = OTHER; note = 2'-Omethyluridine
  modified_base 24: mod_base = OTHER; note = Guanosine phosphorothiorate
  modified_base 27: mod_base = OTHER; note = 2'-Omethyluridine
  modified_base 41: mod_base = OTHER; note = 2'-fluoroadenosine
  modified_base 43: mod_base = OTHER; note = 2'-fluoroguanosine
  modified_base 62: mod_base = OTHER; note = Guanosine phosphorothiorate
  modified_base 73: mod_base = OTHER; note = 2'-Omethylcytosine
  modified_base 74: mod_base = OTHER; note = 2'-Omethyladenosine

SEQ ID NO: 6797 - RNA, 76 nt, synthetic construct; identical to SEQ ID NO: 625
  source 1..76: mol_type = other RNA
  modified_base 1: mod_base = OTHER; note = 2'-Omethylguanosine
  modified_base 10: mod_base = OTHER; note = 2'-Omethylguanosine
  modified_base 13: mod_base = OTHER; note = 2'-Omethylcytosine
  modified_base 17: mod_base = OTHER; note = Guanosine phosphorothiorate
  modified_base 18: mod_base = OTHER; note = 2'-Omethylguanosine
  modified_base 19: mod_base = OTHER; note = Adenosine phosphorothiorate
  modified_base 20: mod_base = OTHER; note = 2'-Omethyluridine
  modified_base 25: mod_base = OTHER; note = 2'-Omethylcytosine
  modified_base 29: mod_base = OTHER; note = 2'-Omethylguanosine
  modified_base 33: mod_base = OTHER; note = 2'-fluorouridine
  modified_base 35: mod_base = OTHER; note = Cytosine phosphorothiorate
  modified_base 37: mod_base = OTHER; note = Adenosine phosphorothiorate
  modified_base 38: mod_base = OTHER; note = Adenosine phosphorothiorate
  modified_base 43: mod_base = OTHER; note = 2'-Omethyladenosine
  modified_base 44: mod_base = OTHER; note = 2'-fluoroadenosine
  modified_base 46: mod_base = OTHER; note = Guanosine phosphorothiorate
  modified_base 50: mod_base = OTHER; note = 2'-Omethylcytosine
  modified_base 52: mod_base = OTHER; note = 2'-fluoroguanosine
  modified_base 54: mod_base = OTHER; note = Uridine phosphorothiorate
  modified_base 55: mod_base = OTHER; note = Uridine phosphorothiorate
  modified_base 56: mod_base = OTHER; note = 2'-Omethylcytosine
  modified_base 57: mod_base = OTHER; note = Guanosine phosphorothiorate
  modified_base 62: mod_base = OTHER; note = 2'-Omethylcytosine
  modified_base 63: mod_base = OTHER; note = 2'-fluorocytosine
  modified_base 65: mod_base = OTHER; note = 2'-Omethylguanosine
  modified_base 71: mod_base = OTHER; note = 2'-Omethyluridine
  modified_base 73: mod_base = OTHER; note = 2'-Omethylguanosine

SEQ ID NO: 6798 - RNA, 86 nt, synthetic construct; identical to SEQ ID NO: 3290
  source 1..86: mol_type = other RNA
  modified_base 56: mod_base = OTHER; note = 2'-fluorocytosine

SEQ ID NO: 6799 - RNA, 76 nt, synthetic construct; identical to SEQ ID NO: 625
  source 1..76: mol_type = other RNA
  modified_base 1: mod_base = OTHER; note = Guanosine phosphorothiorate
  modified_base 2: mod_base = OTHER; note = 2'-fluoroguanosine
  modified_base 3: mod_base = OTHER; note = Cytosine phosphorothiorate
  modified_base 4: mod_base = OTHER; note = 2'-Omethyluridine
  modified_base 6: mod_base = OTHER; note = 2'-Omethylcytosine phosphorothiorate
  modified_base 8: mod_base = OTHER; note = Uridine phosphorothiorate
  modified_base 12: mod_base = OTHER; note = 2'-fluoroguanosine
  modified_base 14: mod_base = OTHER; note = 2'-fluoroadenosine
  modified_base 16: mod_base = OTHER; note = 2'-fluorouridine
  modified_base 22: mod_base = OTHER; note = 2'-fluoroguanosine phosphorothiorate
  modified_base 23: mod_base = OTHER; note = 2'-fluorocytosine phosphorothiorate
  modified_base 25: mod_base = OTHER; note = Cytosine phosphorothiorate
  modified_base 26: mod_base = OTHER; note = 2'-Omethyladenosine
  modified_base 27: mod_base = OTHER; note = 2'-Omethyluridine
  modified_base 28: mod_base = OTHER; note = Uridine phosphorothiorate
  modified_base 29: mod_base = OTHER; note = 2'-Omethylguanosine phosphorothiorate
  modified_base 30: mod_base = OTHER; note = 2'-Omethylguanosine
  modified_base 38: mod_base = OTHER; note = 2'-Omethyladenosine phosphorothiorate
  modified_base 44: mod_base = OTHER; note = 2'-Omethyladenosine
  modified_base 46: mod_base = OTHER; note = Guanosine phosphorothiorate
  modified_base 47: mod_base = OTHER; note = 2'-Omethyluridine
  modified_base 49: mod_base = OTHER; note = 2'-fluorocytosine
  modified_base 50: mod_base = OTHER; note = 2'-Omethylcytosine
  modified_base 55: mod_base = OTHER; note = Uridine phosphorothiorate
  modified_base 61: mod_base = OTHER; note = 2'-Omethylcytosine
  modified_base 62: mod_base = OTHER; note = 2'-fluorocytosine
  modified_base 66: mod_base = OTHER; note = 2'-Omethylcytosine
  modified_base 67: mod_base = OTHER; note = 2'-Omethylguanosine
  modified_base 72: mod_base = OTHER; note = 2'-fluorocytosine
  modified_base 73: mod_base = OTHER; note = 2'-fluoroguanosine phosphorothiorate
  modified_base 74: mod_base = OTHER; note = 2'-fluorocytosine
  modified_base 75: mod_base = OTHER; note = 2'-fluorocytosine
  modified_base 76: mod_base = OTHER; note = 2'-fluoroadenosine

SEQ ID NO: 6800 - RNA, 76 nt, synthetic construct; identical to SEQ ID NO: 625
  source 1..76: mol_type = other RNA
  modified_base 1: mod_base = OTHER; note = 2'-Omethylguanosine phosphorothiorate
  modified_base 2: mod_base = OTHER; note = 2'-Omethylguanosine
  modified_base 13: mod_base = OTHER; note = 2'-Omethylcytosine
  modified_base 33: mod_base = OTHER; note = 2'-fluorouridine
  modified_base 35: mod_base = OTHER; note = Cytosine phosphorothiorate
  modified_base 37: mod_base = OTHER; note = Adenosine phosphorothiorate
  modified_base 38: mod_base = OTHER; note = Adenosine phosphorothiorate
  modified_base 52: mod_base = OTHER; note = 2'-Omethylguanosine
  modified_base 68: mod_base = OTHER; note = 2'-Omethylguanosine
  modified_base 73: mod_base = OTHER; note = 2'-Omethylguanosine
  modified_base 75: mod_base = OTHER; note = 2'-fluorocytosine phosphorothiorate

SEQ ID NO: 6801 - RNA, 75 nt, synthetic construct; identical to SEQ ID NO: 3299
  source 1..75: mol_type = other RNA
  modified_base 13: mod_base = OTHER; note = 2'-Omethyladenosine
  modified_base 15: mod_base = OTHER; note = 2'-Omethyluridine
  modified_base 17: mod_base = OTHER; note = 2'-Omethylguanosine
  modified_base 21: mod_base = OTHER; note = 2'-Omethylguanosine phosphorothiorate
  modified_base 22: mod_base = OTHER; note = 2'-fluoroadenosine
  modified_base 23: mod_base = OTHER; note = 2'-fluoroguanosine
  modified_base 26: mod_base = OTHER; note = Uridine phosphorothiorate
  modified_base 28: mod_base = OTHER; note = 2'-fluoroadenosine phosphorothiorate
  modified_base 29: mod_base = OTHER; note = 2'-fluoroguanosine
  modified_base 34: mod_base = OTHER; note = 2'-fluorouridine
  modified_base 40: mod_base = OTHER; note = Uridine phosphorothiorate
  modified_base 47: mod_base = OTHER; note = 2'-fluorocytosine
  modified_base 48: mod_base = OTHER; note = 2'-fluorocytosine
  modified_base 50: mod_base = OTHER; note = 2'-Omethylguanosine phosphorothiorate
  modified_base 56: mod_base = OTHER; note = 2'-fluoroadenosine phosphorothiorate
  modified_base 58: mod_base = OTHER; note = Guanosine phosphorothiorate
  modified_base 68: mod_base = OTHER; note = 2'-fluoroadenosine phosphorothiorate
  modified_base 69: mod_base = OTHER; note = Guanosine phosphorothiorate
  modified_base 74: mod_base = OTHER; note = Cytosine phosphorothiorate
  modified_base 75: mod_base = OTHER; note = 2'-fluoroadenosine

SEQ ID NO: 6802 - RNA, 75 nt, synthetic construct; identical to SEQ ID NO: 3299
  source 1..75: mol_type = other RNA
  modified_base 1: mod_base = OTHER; note = 2'-Omethylcytosine phosphorothiorate
  modified_base 5: mod_base = OTHER; note = 2'-fluoroguanosine
  modified_base 11: mod_base = OTHER; note = 2'-Omethyluridine
  modified_base 13: mod_base = OTHER; note = 2'-fluoroadenosine
  modified_base 18: mod_base = OTHER; note = 2'-fluoroguanosine
  modified_base 21: mod_base = OTHER; note = 2'-fluoroguanosine phosphorothiorate
  modified_base 26: mod_base = OTHER; note = Uridine phosphorothiorate
  modified_base 28: mod_base = OTHER; note = 2'-Omethyladenosine
  modified_base 35: mod_base = OTHER; note = 2'-Omethyladenosine phosphorothiorate
  modified_base 36: mod_base = OTHER; note = 2'-fluoroadenosine phosphorothiorate
  modified_base 40: mod_base = OTHER; note = 2'-fluorouridine
  modified_base 42: mod_base = OTHER; note = 2'-fluoroadenosine
  modified_base 46: mod_base = OTHER; note = Uridine phosphorothiorate
  modified_base 48: mod_base = OTHER; note = 2'-fluorocytosine
  modified_base 55: mod_base = OTHER; note = 2'-fluorocytosine
  modified_base 73: mod_base = OTHER; note = Cytosine phosphorothiorate
  modified_base 74: mod_base = OTHER; note = 2'-Omethylcytosine

SEQ ID NO: 6803 - RNA, 75 nt, synthetic construct; identical to SEQ ID NO: 1045
  source 1..75: mol_type = other RNA
  modified_base 1: mod_base = OTHER; note = 2'-Omethylguanosine
  modified_base 2: mod_base = OTHER; note = 2'-Omethylguanosine
  modified_base 4: mod_base = OTHER; note = 2'-Omethyluridine
  modified_base 10: mod_base = OTHER; note = 2'-Omethylguanosine
  modified_base 16: mod_base = OTHER; note = 2'-Omethyluridine phosphorothiorate
  modified_base 28: mod_base = OTHER; note = Uridine phosphorothiorate
  modified_base 29: mod_base = OTHER; note = 2'-Omethylguanosine
  modified_base 38: mod_base = OTHER; note = 2'-fluoroadenosine phosphorothiorate
  modified_base 39: mod_base = OTHER; note = 2'-Omethyluridine
  modified_base 45: mod_base = OTHER; note = 2'-fluoroguanosine phosphorothiorate
  modified_base 55: mod_base = OTHER; note = Cytosine phosphorothiorate
  modified_base 57: mod_base = OTHER; note = 2'-Omethyladenosine phosphorothiorate
  modified_base 58: mod_base = OTHER; note = 2'-Omethylguanosine phosphorothiorate
  modified_base 60: mod_base = OTHER; note = 2'-Omethylcytosine phosphorothiorate
  modified_base 72: mod_base = OTHER; note = 2'-Omethyluridine
  modified_base 74: mod_base = OTHER; note = 2'-Omethylcytosine phosphorothiorate

SEQ ID NO: 6804 - RNA, 75 nt, synthetic construct; identical to SEQ ID NO: 1045
  source 1..75: mol_type = other RNA
  modified_base 2: mod_base = OTHER; note = 2'-Omethylguanosine phosphorothiorate
  modified_base 13: mod_base = OTHER; note = 2'-fluorouridine
  modified_base 15: mod_base = OTHER; note = 2'-Omethyladenosine
  modified_base 25: mod_base = OTHER; note = 2'-Omethylcytosine phosphorothiorate
  modified_base 26: mod_base = OTHER; note = Uridine phosphorothiorate
  modified_base 44: mod_base = OTHER; note = 2'-Omethylcytosine phosphorothiorate
  modified_base 49: mod_base = OTHER; note = 2'-Omethylcytosine
  modified_base 52: mod_base = OTHER; note = 2'-Omethylguanosine phosphorothiorate
  modified_base 53: mod_base = OTHER; note = 2'-Omethyluridine
  modified_base 64: mod_base = OTHER; note = 2'-fluoroguanosine phosphorothiorate
  modified_base 72: mod_base = OTHER; note = 2'-Omethyluridine
  modified_base 73: mod_base = OTHER; note = 2'-fluorocytosine phosphorothiorate
  modified_base 74: mod_base = OTHER; note = 2'-Omethylcytosine phosphorothiorate
  modified_base 75: mod_base = OTHER; note = 2'-Omethyladenosine

SEQ ID NO: 6805 - RNA, 76 nt, synthetic construct; identical to SEQ ID NO: 625
  source 1..76: mol_type = other RNA
  modified_base 1: mod_base = OTHER; note = 2'-Omethylguanosine phosphorothiorate
  modified_base 2: mod_base = OTHER; note = 2'-Omethylguanosine
  modified_base 3: mod_base = OTHER; note = 2'-Omethylcytosine
  modified_base 4: mod_base = OTHER; note = 2'-Omethyluridine
  modified_base 5: mod_base = OTHER; note = 2'-Omethylcytosine
  modified_base 6: mod_base = OTHER; note = 2'-Omethylcytosine
  modified_base 10: mod_base = OTHER; note = 2'-Omethylguanosine
  modified_base 11: mod_base = OTHER; note = 2'-Omethylcytosine
  modified_base 12: mod_base = OTHER; note = 2'-Omethylguanosine
  modified_base 13: mod_base = OTHER; note = 2'-Omethylcytosine
  modified_base 14: mod_base = OTHER; note = 2'-Omethyladenosine
  modified_base 15: mod_base = OTHER; note = 2'-fluoroadenosine
  modified_base 16: mod_base = OTHER; note = 2'-Omethyluridine
  modified_base 17: mod_base = OTHER; note = 2'-Omethylguanosine
  modified_base 18: mod_base = OTHER; note = 2'-Omethylguanosine
  modified_base 19: mod_base = OTHER; note = 2'-fluoroadenosine
  modified_base 20: mod_base = OTHER; note = 2'-Omethyluridine
  modified_base 21: mod_base = OTHER; note = 2'-fluoroadenosine
  modified_base 22: mod_base = OTHER; note = 2'-Omethylguanosine
  modified_base 23: mod_base = OTHER; note = 2'-Omethylcytosine
  modified_base 24: mod_base = OTHER; note = 2'-Omethylguanosine
  modified_base 25: mod_base = OTHER; note = 2'-Omethylcytosine
  modified_base 38: mod_base = OTHER; note = Adenosine phosphorothiorate
  modified_base 39: mod_base = OTHER; note = Uridine phosphorothiorate
  modified_base 40: mod_base = OTHER; note = 2'-fluorouridine
  modified_base 43: mod_base = OTHER; note = 2'-Omethyladenosine
  modified_base 44: mod_base = OTHER; note = 2'-Omethyladenosine
  modified_base 45: mod_base = OTHER; note = 2'-Omethylguanosine
  modified_base 46: mod_base = OTHER; note = 2'-fluoroguanosine
  modified_base 48: mod_base = OTHER; note = 2'-fluorouridine
  modified_base 49: mod_base = OTHER; note = 2'-Omethylcytosine
  modified_base 50: mod_base = OTHER; note = 2'-Omethylcytosine
  modified_base 54: mod_base = OTHER; note = Uridine phosphorothiorate
  modified_base 55: mod_base = OTHER; note = Uridine phosphorothiorate
  modified_base 56: mod_base = OTHER; note = 2'-Omethylcytosine
  modified_base 57: mod_base = OTHER; note = Guanosine phosphorothiorate
  modified_base 61: mod_base = OTHER; note = 2'-Omethylcytosine
  modified_base 62: mod_base = OTHER; note = 2'-Omethylcytosine
  modified_base 63: mod_base = OTHER; note = 2'-fluorocytosine
  modified_base 64: mod_base = OTHER; note = 2'-Omethylguanosine
  modified_base 65: mod_base = OTHER; note = 2'-Omethylguanosine
  modified_base 66: mod_base = OTHER; note = 2'-Omethylcytosine
  modified_base 67: mod_base = OTHER; note = 2'-Omethylguanosine
  modified_base 68: mod_base = OTHER; note = 2'-Omethylguanosine

SEQ ID NO: 6806 - RNA, 75 nt, synthetic construct; identical to SEQ ID NO: 3299
  source 1..75: mol_type = other RNA
  modified_base 1: mod_base = OTHER; note = 2'-fluorocytosine
  modified_base 8: mod_base = OTHER; note = Adenosine phosphorothiorate
  modified_base 15: mod_base = OTHER; note = 2'-fluorouridine
  modified_base 16: mod_base = OTHER; note = 2'-fluorocytosine
  modified_base 20: mod_base = OTHER; note = 2'-fluoroadenosine
  modified_base 27: mod_base = OTHER; note = 2'-fluorocytosine phosphorothiorate
  modified_base 50: mod_base = OTHER; note = 2'-fluoroguanosine
  modified_base 72: mod_base = OTHER; note = 2'-fluoroguanosine phosphorothiorate

SEQ ID NO: 6807 - RNA, 76 nt, synthetic construct; identical to SEQ ID NO: 625
  source 1..76: mol_type = other RNA
  modified_base 1: mod_base = OTHER; note = 2'-Omethylguanosine phosphorothiorate
  modified_base 2: mod_base = OTHER; note = 2'-Omethylguanosine
  modified_base 3: mod_base = OTHER; note = 2'-Omethylcytosine
  modified_base 4: mod_base = OTHER; note = 2'-Omethyluridine
  modified_base 5: mod_base = OTHER; note = 2'-Omethylcytosine
  modified_base 6: mod_base = OTHER; note = 2'-Omethylcytosine
  modified_base 14: mod_base = OTHER; note = 2'-Omethyladenosine
  modified_base 15: mod_base = OTHER; note = 2'-fluoroadenosine
  modified_base 16: mod_base = OTHER; note = 2'-Omethyluridine
  modified_base 17: mod_base = OTHER; note = 2'-Omethylguanosine
  modified_base 18: mod_base = OTHER; note = 2'-Omethylguanosine
  modified_base 19: mod_base = OTHER; note = 2'-fluoroadenosine
  modified_base 20: mod_base = OTHER; note = 2'-Omethyluridine
  modified_base 21: mod_base = OTHER; note = 2'-fluoroadenosine
  modified_base 25: mod_base = OTHER; note = 2'-Omethylcytosine
  modified_base 33: mod_base = OTHER; note = 2'-fluorouridine
  modified_base 35: mod_base = OTHER; note = Cytosine phosphorothiorate
  modified_base 37: mod_base = OTHER; note = Adenosine phosphorothiorate
  modified_base 38: mod_base = OTHER; note = Adenosine phosphorothiorate
  modified_base 49: mod_base = OTHER; note = 2'-Omethylcytosine
  modified_base 50: mod_base = OTHER; note = 2'-Omethylcytosine
  modified_base 51: mod_base = OTHER; note = 2'-Omethylguanosine
  modified_base 52: mod_base = OTHER; note = 2'-Omethylguanosine
  modified_base 53: mod_base = OTHER; note = 2'-Omethylguanosine
  modified_base 56: mod_base = OTHER; note = 2'-Omethylcytosine
  modified_base 61: mod_base = OTHER; note = 2'-Omethylcytosine
  modified_base 62: mod_base = OTHER; note = 2'-Omethylcytosine
  modified_base 63: mod_base = OTHER; note = 2'-fluorocytosine
  modified_base 64: mod_base = OTHER; note = 2'-Omethylguanosine
  modified_base 65: mod_base = OTHER; note = 2'-Omethylguanosine
  modified_base 66: mod_base = OTHER; note = 2'-Omethylcytosine
  modified_base 67: mod_base = OTHER; note = 2'-Omethylguanosine
  modified_base 68: mod_base = OTHER; note = 2'-Omethylguanosine
  modified_base 69: mod_base = OTHER; note = 2'-fluoroadenosine
  modified_base 71: mod_base = OTHER; note = 2'-Omethyluridine
  modified_base 73: mod_base = OTHER; note = 2'-Omethylguanosine
  modified_base 75: mod_base = OTHER; note = 2'-fluorocytosine phosphorothiorate

SEQ ID NO: 6808 - RNA, 76 nt, synthetic construct
  source 1..76: mol_type = other RNA
ggctccgtggcgcaatggatagcgcgctggacttcaaattcagaggttccgggttcgagtcccggcggagtcgcca

SEQ ID NO: 6809 - RNA, 76 nt, synthetic construct; identical to SEQ ID NO: 3795
  source 1..76: mol_type = other RNA
  modified_base 1: mod_base = OTHER; note = 2'-Omethylguanosine
  modified_base 2: mod_base = OTHER; note = 2'-Omethylcytosine
  modified_base 3: mod_base = OTHER; note = 2'-Omethylcytosine
  modified_base 4: mod_base = OTHER; note = 2'-Omethyluridine
  modified_base 5: mod_base = OTHER; note = 2'-Omethylcytosine
  modified_base 6: mod_base = OTHER; note = 2'-Omethylcytosine
  modified_base 14: mod_base = OTHER; note = 2'-Omethyladenosine
  modified_base 15: mod_base = OTHER; note = 2'-Omethyladenosine
  modified_base 16: mod_base = OTHER; note = 2'-Omethyluridine
  modified_base 17: mod_base = OTHER; note = 2'-Omethylguanosine
  modified_base 18: mod_base = OTHER; note = 2'-Omethylguanosine
  modified_base 20: mod_base = OTHER; note = 2'-Omethyluridine
  modified_base 25: mod_base = OTHER; note = 2'-Omethylcytosine
  modified_base 33: mod_base = OTHER; note = 2'-fluorouridine
  modified_base 35: mod_base = OTHER; note = Cytosine phosphorothiorate
  modified_base 37: mod_base = OTHER; note = Adenosine phosphorothiorate
  modified_base 38: mod_base = OTHER; note = Adenosine phosphorothiorate
  modified_base 41: mod_base = OTHER; note = 2'-fluorocytosine
  modified_base 42: mod_base = OTHER; note = 2'-Omethylguanosine
  modified_base 43: mod_base = OTHER; note = 2'-Omethylguanosine
  modified_base 44: mod_base = OTHER; note = 2'-fluoroguanosine
  modified_base 49: mod_base = OTHER; note = 2'-Omethylguanosine
  modified_base 50: mod_base = OTHER; note = 2'-Omethylcytosine
  modified_base 52: mod_base = OTHER; note = 2'-Omethylguanosine
  modified_base 54: mod_base = OTHER; note = 2'-Omethyluridine
  modified_base 55: mod_base = OTHER; note = Uridine phosphorothiorate
  modified_base 56: mod_base = OTHER; note = 2'-Omethylcytosine
  modified_base 57: mod_base = OTHER; note = 2'-fluoroguanosine
  modified_base 59: mod_base = OTHER; note = 2'-Omethylguanosine
  modified_base 61: mod_base = OTHER; note = 2'-Omethylcytosine
  modified_base 62: mod_base = OTHER; note = 2'-Omethylcytosine
  modified_base 63: mod_base = OTHER; note = 2'-fluorocytosine
  modified_base 64: mod_base = OTHER; note = 2'-Omethylguanosine
  modified_base 65: mod_base = OTHER; note = 2'-Omethyluridine
  modified_base 73: mod_base = OTHER; note = 2'-Omethylguanosine

SEQ ID NO: 6810 - RNA, 85 nt, synthetic construct; identical to SEQ ID NO: 3317
  source 1..85: mol_type = other RNA
  modified_base 1: mod_base = OTHER; note = 2'-Omethylguanosine phosphorothiorate
  modified_base 2: mod_base = OTHER; note = 2'-Omethylcytosine
  modified_base 14: mod_base = OTHER; note = 2'-fluoroadenosine
  modified_base 27: mod_base = OTHER; note = 2'-fluorouridine phosphorothiorate
  modified_base 49: mod_base = OTHER; note = 2'-Omethyluridine phosphorothiorate
  modified_base 54: mod_base = OTHER; note = Cytosine phosphorothiorate
  modified_base 59: mod_base = OTHER; note = Cytosine phosphorothiorate
  modified_base 82: mod_base = OTHER; note = 2'-Omethylguanosine

SEQ ID NO: 6811 - RNA, 75 nt, synthetic construct; identical to SEQ ID NO: 1045
  source 1..75: mol_type = other RNA
  modified_base 1: mod_base = OTHER; note = 2'-Omethylguanosine
  modified_base 2: mod_base = OTHER; note = 2'-Omethylguanosine
  modified_base 3: mod_base = OTHER; note = 2'-Omethyluridine
  modified_base 4: mod_base = OTHER; note = 2'-Omethyluridine
  modified_base 5: mod_base = OTHER; note = 2'-Omethylcytosine
  modified_base 6: mod_base = OTHER; note = 2'-Omethylcytosine
  modified_base 13: mod_base = OTHER; note = 2'-Omethyluridine
  modified_base 17: mod_base = OTHER; note = 2'-Omethylguanosine
  modified_base 18: mod_base = OTHER; note = 2'-Omethylguanosine
  modified_base 25: mod_base = OTHER; note = 2'-Omethylcytosine
  modified_base 33: mod_base = OTHER; note = Uridine phosphorothiorate
  modified_base 34: mod_base = OTHER; note = 2'-Omethyluridine
  modified_base 35: mod_base = OTHER; note = Uridine phosphorothiorate
  modified_base 37: mod_base = OTHER; note = Adenosine phosphorothiorate
  modified_base 38: mod_base = OTHER; note = Adenosine phosphorothiorate
  modified_base 41: mod_base = OTHER; note = 2'-fluorocytosine
  modified_base 42: mod_base = OTHER; note = 2'-Omethyladenosine
  modified_base 43: mod_base = OTHER; note = 2'-Omethylguanosine
  modified_base 44: mod_base = OTHER; note = 2'-fluorocytosine
  modified_base 48: mod_base = OTHER; note = 2'-Omethylcytosine
  modified_base 49: mod_base = OTHER; note = 2'-Omethylcytosine
  modified_base 50: mod_base = OTHER; note = 2'-Omethylguanosine
  modified_base 51: mod_base = OTHER; note = 2'-Omethyladenosine
  modified_base 52: mod_base = OTHER; note = 2'-Omethylguanosine
  modified_base 53: mod_base = OTHER; note = Uridine phosphorothiorate
  modified_base 54: mod_base = OTHER; note = Uridine phosphorothiorate
  modified_base 60: mod_base = OTHER; note = 2'-Omethylcytosine
  modified_base 64: mod_base = OTHER; note = 2'-Omethylguanosine
  modified_base 72: mod_base = OTHER; note = 2'-Omethyluridine

SEQ ID NO: 6812 - RNA, 75 nt, synthetic construct; identical to SEQ ID NO: 3306
  source 1..75: mol_type = other RNA
  modified_base 1: mod_base = OTHER; note = 2'-Omethylguanosine
  modified_base 2: mod_base = OTHER; note = 2'-Omethyladenosine
  modified_base 3: mod_base = OTHER; note = 2'-Omethylcytosine
  modified_base 4: mod_base = OTHER; note = 2'-Omethylcytosine
  modified_base 5: mod_base = OTHER; note = 2'-Omethyluridine
  modified_base 6: mod_base = OTHER; note = 2'-Omethylcytosine
  modified_base 13: mod_base = OTHER; note = 2'-Omethylcytosine
  modified_base 17: mod_base = OTHER; note = 2'-Omethylguanosine
  modified_base 18: mod_base = OTHER; note = 2'-Omethylguanosine
  modified_base 24: mod_base = OTHER; note = 2'-Omethylcytosine
  modified_base 32: mod_base = OTHER; note = 2'-fluorouridine
  modified_base 33: mod_base = OTHER; note = 2'-Omethylcytosine
  modified_base 34: mod_base = OTHER; note = Uridine phosphorothiorate
  modified_base 36: mod_base = OTHER; note = Guanosine phosphorothiorate
  modified_base 37: mod_base = OTHER; note = Adenosine phosphorothiorate
  modified_base 40: mod_base = OTHER; note = 2'-Omethyladenosine
  modified_base 41: mod_base = OTHER; note = 2'-Omethylguanosine
  modified_base 42: mod_base = OTHER; note = 2'-Omethyladenosine
  modified_base 43: mod_base = OTHER; note = 2'-Omethyladenosine
  modified_base 48: mod_base = OTHER; note = 2'-Omethylguanosine
  modified_base 49: mod_base = OTHER; note = 2'-Omethylcytosine
  modified_base 50: mod_base = OTHER; note = 2'-Omethylguanosine
  modified_base 51: mod_base = OTHER; note = 2'-Omethyluridine
  modified_base 52: mod_base = OTHER; note = 2'-Omethylguanosine
  modified_base 53: mod_base = OTHER; note = Uridine phosphorothiorate
  modified_base 54: mod_base = OTHER; note = Uridine phosphorothiorate
  modified_base 60: mod_base = OTHER; note = 2'-Omethylcytosine
  modified_base 64: mod_base = OTHER; note = 2'-Omethyluridine
  modified_base 72: mod_base = OTHER; note = 2'-Omethyladenosine

SEQ ID NO: 6813 - RNA, 76 nt, synthetic construct; identical to SEQ ID NO: 625
  source 1..76: mol_type = other RNA
  modified_base 1: mod_base = OTHER; note = 2'-Omethylguanosine phosphorothiorate
  modified_base 2: mod_base = OTHER; note = 2'-Omethylguanosine
  modified_base 3: mod_base = OTHER; note = 2'-Omethylcytosine
  modified_base 4: mod_base = OTHER; note = 2'-Omethyluridine
  modified_base 5: mod_base = OTHER; note = 2'-Omethylcytosine
  modified_base 6: mod_base = OTHER; note = 2'-Omethylcytosine
  modified_base 10: mod_base = OTHER; note = 2'-Omethylguanosine
  modified_base 11: mod_base = OTHER; note = 2'-Omethylcytosine
  modified_base 12: mod_base = OTHER; note = 2'-Omethylguanosine
  modified_base 13: mod_base = OTHER; note = 2'-Omethylcytosine
  modified_base 14: mod_base = OTHER; note = 2'-Omethyladenosine
  modified_base 15: mod_base = OTHER; note = 2'-Omethyladenosine
  modified_base 16: mod_base = OTHER; note = 2'-Omethyluridine
  modified_base 17: mod_base = OTHER; note = 2'-Omethylguanosine
  modified_base 18: mod_base = OTHER; note = 2'-Omethylguanosine
  modified_base 19: mod_base = OTHER; note = 2'-Omethyladenosine
  modified_base 20: mod_base = OTHER; note = 2'-Omethyluridine
  modified_base 22: mod_base = OTHER; note = 2'-Omethylguanosine
  modified_base 23: mod_base = OTHER; note = 2'-Omethylcytosine
  modified_base 24: mod_base = OTHER; note = 2'-Omethylguanosine
  modified_base 25: mod_base = OTHER; note = 2'-Omethylcytosine
  modified_base 40: mod_base = OTHER; note = 2'-fluorouridine
  modified_base 41: mod_base = OTHER; note = 2'-fluorocytosine
  modified_base 42: mod_base = OTHER; note = 2'-fluoroadenosine
  modified_base 43: mod_base = OTHER; note = 2'-fluoroadenosine
  modified_base 49: mod_base = OTHER; note = 2'-Omethylcytosine
  modified_base 50: mod_base = OTHER; note = 2'-Omethylcytosine
  modified_base 51: mod_base = OTHER; note = 2'-Omethylguanosine
  modified_base 52: mod_base = OTHER; note = 2'-Omethylguanosine
  modified_base 53: mod_base = OTHER; note = 2'-Omethylguanosine
  modified_base 61: mod_base = OTHER; note = 2'-Omethylcytosine
  modified_base 62: mod_base = OTHER; note = 2'-Omethylcytosine
  modified_base 63: mod_base = OTHER; note = 2'-fluorocytosine
  modified_base 64: mod_base = OTHER; note = 2'-Omethylguanosine
  modified_base 65: mod_base = OTHER; note = 2'-Omethylguanosine
  modified_base 66: mod_base = OTHER; note = 2'-Omethylcytosine
  modified_base 67: mod_base = OTHER; note = 2'-Omethylguanosine
  modified_base 68: mod_base = OTHER; note = 2'-Omethylguanosine
  modified_base 69: mod_base = OTHER; note = 2'-Omethyladenosine
  modified_base 71: mod_base = OTHER; note = 2'-Omethyluridine
  modified_base 72: mod_base = OTHER; note = 2'-Omethylcytosine

SEQ ID NO: 6814 - RNA, 75 nt, synthetic construct; identical to SEQ ID NO: 3299
  source 1..75: mol_type = other RNA
  modified_base 5: mod_base = OTHER; note = 2'-Omethylguanosine phosphorothiorate
  modified_base 15: mod_base = OTHER; note = 2'-fluorouridine
  modified_base 22: mod_base = OTHER; note = 2'-fluoroadenosine
  modified_base 29: mod_base = OTHER; note = 2'-fluoroguanosine
  modified_base 41: mod_base = OTHER; note = 2'-Omethylguanosine phosphorothiorate
  modified_base 63: mod_base = OTHER; note = 2'-Omethyluridine phosphorothiorate
  modified_base 73: mod_base = OTHER; note = Cytosine phosphorothiorate
  modified_base 74: mod_base = OTHER; note = Cytosine phosphorothiorate

SEQ ID NO: 6815 - RNA, 85 nt, synthetic construct
  source 1..85: mol_type = other RNA
accaggatggccgagtggttaaggcgttggacttcagatccaatggacatatgtccgcgtggttcgaaccccactcctggtacca

SEQ ID NO: 6816 - RNA, 76 nt, synthetic construct; identical to SEQ ID NO: 625
  source 1..76: mol_type = other RNA
  modified_base 49: mod_base = OTHER; note = 2'-O-(2-Methoxyethyl) 5-methylcytosine

SEQ ID NO: 6817 - RNA, 76 nt, synthetic construct; identical to SEQ ID NO: 3795
  source 1..76: mol_type = other RNA
  modified_base 1: mod_base = OTHER; note = 2'-Omethylguanosine
  modified_base 61: mod_base = OTHER; note = 2'-Omethylcytosine
  modified_base 62: mod_base = OTHER; note = 2'-Omethylcytosine
  modified_base 64: mod_base = OTHER; note = 2'-Omethylguanosine
  modified_base 65: mod_base = OTHER; note = 2'-Omethyluridine
  modified_base 66: mod_base = OTHER; note = 2'-Omethylcytosine
  modified_base 67: mod_base = OTHER; note = 2'-Omethylguanosine
  modified_base 68: mod_base = OTHER; note = 2'-Omethylguanosine
  modified_base 69: mod_base = OTHER; note = 2'-Omethyladenosine
  modified_base 70: mod_base = OTHER; note = 2'-fluoroguanosine
  modified_base 71: mod_base = OTHER; note = 2'-Omethylguanosine
  modified_base 72: mod_base = OTHER; note = 2'-Omethyluridine
  modified_base 73: mod_base = OTHER; note = 2'-Omethylguanosine

SEQ ID NO: 6818 - RNA, 75 nt, synthetic construct; identical to SEQ ID NO: 3299
  source 1..75: mol_type = other RNA
  modified_base 1: mod_base = OTHER; note = 2'-Omethylcytosine
  modified_base 17: mod_base = OTHER; note = Guanosine phosphorothiorate
  modified_base 19: mod_base = OTHER; note = 2'-Omethyluridine phosphorothiorate
  modified_base 27: mod_base = OTHER; note = Cytosine phosphorothiorate
  modified_base 37: mod_base = OTHER; note = 2'-Omethyladenosine phosphorothiorate
  modified_base 48: mod_base = OTHER; note = Cytosine phosphorothiorate
  modified_base 49: mod_base = OTHER; note = Adenosine phosphorothiorate
  modified_base 73: mod_base = OTHER; note = Cytosine phosphorothiorate
  modified_base 74: mod_base = OTHER; note = 2'-Omethylcytosine

SEQ ID NO: 6819 - RNA, 85 nt, synthetic construct; identical to SEQ ID NO: 3288
  source 1..85: mol_type = other RNA
  modified_base 1: mod_base = OTHER; note = 2'-Omethylcytosine
  modified_base 5: mod_base = OTHER; note = 2'-fluoroguanosine phosphorothiorate
  modified_base 17: mod_base = OTHER; note = 2'-Omethylguanosine
  modified_base 25: mod_base = OTHER; note = Guanosine phosphorothiorate
  modified_base 26: mod_base = OTHER; note = 2'-fluorouridine
  modified_base 28: mod_base = OTHER; note = 2'-fluoroguanosine
  modified_base 30: mod_base = OTHER; note = 2'-fluoroadenosine
  modified_base 34: mod_base = OTHER; note = 2'-fluorocytosine
  modified_base 39: mod_base = OTHER; note = Cytosine phosphorothiorate
  modified_base 43: mod_base = OTHER; note = 2'-Omethyluridine
  modified_base 46: mod_base = OTHER; note = Adenosine phosphorothiorate
  modified_base 47: mod_base = OTHER; note = 2'-fluorocytosine
  modified_base 48: mod_base = OTHER; note = 2'-Omethyladenosine
  modified_base 51: mod_base = OTHER; note = 2'-Omethyluridine
  modified_base 53: mod_base = OTHER; note = 2'-fluorouridine
  modified_base 54: mod_base = OTHER; note = 2'-Omethylcytosine
  modified_base 56: mod_base = OTHER; note = 2'-fluoroguanosine
  modified_base 57: mod_base = OTHER; note = 2'-Omethylcytosine
  modified_base 58: mod_base = OTHER; note = 2'-Omethylguanosine
  modified_base 66: mod_base = OTHER; note = Guanosine phosphorothiorate
  modified_base 71: mod_base = OTHER; note = Cytosine phosphorothiorate
  modified_base 73: mod_base = OTHER; note = 2'-fluoroadenosine phosphorothiorate
  modified_base 79: mod_base = OTHER; note = Guanosine phosphorothiorate
  modified_base 84: mod_base = OTHER; note = Cytosine phosphorothiorate
  modified_base 85: mod_base = OTHER; note = 2'-Omethyladenosine

SEQ ID NO: 6820 - RNA, 75 nt, synthetic construct; identical to SEQ ID NO: 3299
  source 1..75: mol_type = other RNA
  modified_base 15: mod_base = OTHER; note = Uridine phosphorothiorate
  modified_base 28: mod_base = OTHER; note = 2'-fluoroadenosine
  modified_base 45: mod_base = OTHER; note = 2'-fluoroguanosine
  modified_base 49: mod_base = OTHER; note = 2'-fluoroadenosine
  modified_base 58: mod_base = OTHER; note = Guanosine phosphorothiorate
  modified_base 70: mod_base = OTHER; note = Guanosine phosphorothiorate
  modified_base 74: mod_base = OTHER; note = 2'-Omethylcytosine

SEQ ID NO: 6821 - RNA, 76 nt, synthetic construct; identical to SEQ ID NO: 625
  source 1..76: mol_type = other RNA
  modified_base 1: mod_base = OTHER; note = 2'-fluoroguanosine
  modified_base 2: mod_base = OTHER; note = 2'-Omethylguanosine
  modified_base 3: mod_base = OTHER; note = Cytosine phosphorothiorate
  modified_base 4: mod_base = OTHER; note = 2'-fluorouridine
  modified_base 8: mod_base = OTHER; note = Uridine phosphorothiorate
  modified_base 10: mod_base = OTHER; note = 2'-Omethylguanosine
  modified_base 12: mod_base = OTHER; note = 2'-fluoroguanosine
  modified_base 13: mod_base = OTHER; note = 2'-Omethylcytosine
  modified_base 16: mod_base = OTHER; note = Uridine phosphorothiorate
  modified_base 17: mod_base = OTHER; note = 2'-Omethylguanosine
  modified_base 18: mod_base = OTHER; note = Guanosine phosphorothiorate
  modified_base 20: mod_base = OTHER; note = Uridine phosphorothiorate
  modified_base 23: mod_base = OTHER; note = 2'-Omethylcytosine
  modified_base 24: mod_base = OTHER; note = 2'-Omethylguanosine
  modified_base 25: mod_base = OTHER; note = 2'-Omethylcytosine phosphorothiorate
  modified_base 26: mod_base = OTHER; note = Adenosine phosphorothiorate
  modified_base 30: mod_base = OTHER; note = 2'-fluoroguanosine
  modified_base 32: mod_base = OTHER; note = 2'-fluorocytosine
  modified_base 39: mod_base = OTHER; note = Uridine phosphorothiorate
  modified_base 45: mod_base = OTHER; note = 2'-fluoroguanosine
  modified_base 46: mod_base = OTHER; note = 2'-fluoroguanosine
  modified_base 48: mod_base = OTHER; note = 2'-fluorouridine
  modified_base 51: mod_base = OTHER; note = 2'-Omethylguanosine
  modified_base 54: mod_base = OTHER; note = Uridine phosphorothiorate
  modified_base 59: mod_base = OTHER; note = 2'-Omethylguanosine
  modified_base 60: mod_base = OTHER; note = 2'-Omethyluridine
  modified_base 62: mod_base = OTHER; note = Cytosine phosphorothiorate
  modified_base 66: mod_base = OTHER; note = 2'-Omethylcytosine
  modified_base 69: mod_base = OTHER; note = 2'-Omethyladenosine
  modified_base 70: mod_base = OTHER; note = 2'-Omethylguanosine
  modified_base 73: mod_base = OTHER; note = 2'-Omethylguanosine
  modified_base 76: mod_base = OTHER; note = 2'-fluoroadenosine

SEQ ID NO: 6822 - DNA, 76 bp, synthetic construct; identical to SEQ ID NO: 1924
  source 1..76: mol_type = other DNA
  modified_base 1: mod_base = OTHER; note = 2'-Omethylguanosine phosphorothiorate
  modified_base 2: mod_base = OTHER; note = 2'-Omethylguanosine phosphorothiorate
  modified_base 4: mod_base = OTHER; note = Uridine phosphorothiorate
  modified_base 8: mod_base = OTHER; note = Uridine phosphorothiorate
  modified_base 11: mod_base = OTHER; note = 2'-O-(2-Methoxyethyl) 5-methylcytosine phosphorothiorate
  modified_base 12: mod_base = OTHER; note = 2'-Omethylguanosine phosphorothiorate
  modified_base 13: mod_base = OTHER; note = 2'-O-(2-Methoxyethyl) 5-methylcytosine
  modified_base 17: mod_base = OTHER; note = Guanosine phosphorothiorate
  modified_base 18: mod_base = OTHER; note = deoxyguanosine phosphorothiorate
  modified_base 21: mod_base = OTHER; note = Adenosine phosphorothiorate
  modified_base 22: mod_base = OTHER; note = deoxyguanosine phosphorothiorate
  modified_base 23: mod_base = OTHER; note = 2'-O-(2-Methoxyethyl) 5-methylcytosine
  modified_base 25: mod_base = OTHER; note = 2'-O-(2-Methoxyethyl) 5-methylcytosine
  modified_base 26: mod_base = OTHER; note = Adenosine phosphorothiorate
  modified_base 28: mod_base = OTHER; note = 2'-O-(2-Methoxyethyl) thymine
  modified_base 29: mod_base = OTHER; note = Guanosine phosphorothiorate
  modified_base 38: mod_base = OTHER; note = Adenosine phosphorothiorate
  modified_base 41: mod_base = OTHER; note = 2'-O-(2-Methoxyethyl) 5-methylcytosine
  modified_base 48: mod_base = OTHER; note = Uridine phosphorothiorate
  modified_base 49: mod_base = OTHER; note = 2'-fluorocytosine phosphorothiorate
  modified_base 51: mod_base = OTHER; note = 2'-O-(2-Methoxyethyl) guanosine
  modified_base 53: mod_base = OTHER; note = 2'-O-(2-Methoxyethyl) guanosine
  modified_base 55: mod_base = OTHER; note = Uridine phosphorothiorate
  modified_base 56: mod_base = OTHER; note = Cytosine phosphorothiorate
  modified_base 59: mod_base = OTHER; note = Guanosine phosphorothiorate
  modified_base 62: mod_base = OTHER; note = 2'-fluorocytosine phosphorothiorate
  modified_base 63: mod_base = OTHER; note = Cytosine phosphorothiorate
  modified_base 64: mod_base = OTHER; note = 2'-O-(2-Methoxyethyl) guanosine
  modified_base 66: mod_base = OTHER; note = Cytosine phosphorothiorate
  modified_base 71: mod_base = OTHER; note = 2'-Omethyluridine
  modified_base 75: mod_base = OTHER; note = 2'-fluorocytosine
  modified_base 76: mod_base = OTHER; note = 2'-O-(2-Methoxyethyl) adenosine
  misc_feature 1..8: note = RNA
  misc_feature 9: note = DNA
  misc_feature 10..17: note = RNA
  misc_feature 18: note = DNA
  misc_feature 19..21: note = RNA
  misc_feature 22: note = DNA
  misc_feature 23..26: note = RNA
  misc_feature 27: note = DNA
  misc_feature 28..29: note = RNA
  misc_feature 30: note = DNA
  misc_feature 31..43: note = RNA
  misc_feature 44: note = DNA
  misc_feature 45..56: note = RNA
  misc_feature 57: note = DNA
  misc_feature 58..66: note = RNA
  misc_feature 67: note = DNA
  misc_feature 68..76: note = RNA

SEQ ID NO: 6823 - RNA, 85 nt, synthetic construct; identical to SEQ ID NO: 3286
  source 1..85: mol_type = other RNA
  modified_base 1: mod_base = OTHER; note = 2'-Omethylcytosine
  modified_base 2: mod_base = OTHER; note = 2'-Omethylcytosine
  modified_base 3: mod_base = OTHER; note = 2'-fluoroadenosine phosphorothiorate
  modified_base 6: mod_base = OTHER; note = Adenosine phosphorothiorate
  modified_base 25: mod_base = OTHER; note = Guanosine phosphorothiorate
  modified_base 26: mod_base = OTHER; note = 2'-fluorouridine
  modified_base 28: mod_base = OTHER; note = 2'-Omethylguanosine
  modified_base 30: mod_base = OTHER; note = 2'-fluoroadenosine
  modified_base 34: mod_base = OTHER; note = 2'-fluorouridine
  modified_base 39: mod_base = OTHER; note = Cytosine phosphorothiorate
  modified_base 45: mod_base = OTHER; note = Guanosine phosphorothiorate
  modified_base 47: mod_base = OTHER; note = Cytosine phosphorothiorate
  modified_base 54: mod_base = OTHER; note = 2'-Omethylcytosine
  modified_base 55: mod_base = OTHER; note = Cytosine phosphorothiorate
  modified_base 57: mod_base = OTHER; note = 2'-Omethylcytosine
  modified_base 58: mod_base = OTHER; note = 2'-Omethylguanosine
  modified_base 75: mod_base = OTHER; note = 2'-fluorouridine
  modified_base 77: mod_base = OTHER; note = Cytosine phosphorothiorate
  modified_base 84: mod_base = OTHER; note = Cytosine phosphorothiorate
  modified_base 85: mod_base = OTHER; note = 2'-Omethyladenosine

SEQ ID NO: 6824 - RNA, 75 nt, synthetic construct; identical to SEQ ID NO: 1045
  source 1..75: mol_type = other RNA
  modified_base 1: mod_base = OTHER; note = 2'-Omethylguanosine
  modified_base 13: mod_base = OTHER; note = 2'-Omethyluridine
  modified_base 17: mod_base = OTHER; note = 2'-Omethylguanosine
  modified_base 18: mod_base = OTHER; note = 2'-Omethylguanosine
  modified_base 25: mod_base = OTHER; note = 2'-Omethylcytosine
  modified_base 33: mod_base = OTHER; note = 2'-fluorouridine
  modified_base 34: mod_base = OTHER; note = 2'-Omethyluridine
  modified_base 35: mod_base = OTHER; note = Uridine phosphorothiorate
  modified_base 37: mod_base = OTHER; note = Adenosine phosphorothiorate
  modified_base 38: mod_base = OTHER; note = Adenosine phosphorothiorate
  modified_base 41: mod_base = OTHER; note = 2'-Omethylcytosine
  modified_base 42: mod_base = OTHER; note = 2'-Omethyladenosine
  modified_base 43: mod_base = OTHER; note = 2'-Omethylguanosine
  modified_base 44: mod_base = OTHER; note = 2'-Omethylcytosine
  modified_base 48: mod_base = OTHER; note = 2'-Omethylcytosine
  modified_base 49: mod_base = OTHER; note = 2'-Omethylcytosine
  modified_base 51: mod_base = OTHER; note = 2'-Omethyladenosine
  modified_base 53: mod_base = OTHER; note = Uridine phosphorothiorate
  modified_base 54: mod_base = OTHER; note = Uridine phosphorothiorate
  modified_base 55: mod_base = OTHER; note = 2'-Omethylcytosine
  modified_base 56: mod_base = OTHER; note = Guanosine phosphorothiorate
  modified_base 57: mod_base = OTHER; note = Adenosine phosphorothiorate
  modified_base 58: mod_base = OTHER; note = 2'-Omethylguanosine
  modified_base 60: mod_base = OTHER; note = 2'-Omethylcytosine
  modified_base 64: mod_base = OTHER; note = 2'-Omethylguanosine
  modified_base 72: mod_base = OTHER; note = 2'-Omethyluridine

SEQ ID NO: 6825 - RNA, 76 nt, synthetic construct; identical to SEQ ID NO: 3289
  source 1..76: mol_type = other RNA
  modified_base 1: mod_base = OTHER; note = 2'-Omethylguanosine
  modified_base 10: mod_base = OTHER; note = 2'-Omethylguanosine
  modified_base 13: mod_base = OTHER; note = 2'-Omethylcytosine
  modified_base 18: mod_base = OTHER; note = Guanosine phosphorothiorate
  modified_base 19: mod_base = OTHER; note = 2'-Omethylguanosine
  modified_base 20: mod_base = OTHER; note = Uridine phosphorothiorate
  modified_base 25: mod_base = OTHER; note = 2'-Omethylcytosine
  modified_base 29: mod_base = OTHER; note = 2'-Omethyladenosine
  modified_base 33: mod_base = OTHER; note = 2'-fluorouridine
  modified_base 35: mod_base = OTHER; note = Uridine phosphorothiorate
  modified_base 37: mod_base = OTHER; note = Adenosine phosphorothiorate
  modified_base 38: mod_base = OTHER; note = Adenosine phosphorothiorate
  modified_base 41: mod_base = OTHER; note = 2'-fluorouridine phosphorothiorate
  modified_base 43: mod_base = OTHER; note = 2'-Omethyladenosine
  modified_base 44: mod_base = OTHER; note = 2'-fluoroguanosine
  modified_base 46: mod_base = OTHER; note = Guanosine phosphorothiorate
  modified_base 50: mod_base = OTHER; note = 2'-Omethyladenosine
  modified_base 52: mod_base = OTHER; note = 2'-Omethylguanosine
  modified_base 54: mod_base = OTHER; note = Uridine phosphorothiorate
  modified_base 55: mod_base = OTHER; note = Uridine phosphorothiorate
  modified_base 56: mod_base = OTHER; note = 2'-Omethylcytosine
  modified_base 57: mod_base = OTHER; note = Adenosine phosphorothiorate
  modified_base 62: mod_base = OTHER; note = 2'-Omethylcytosine
  modified_base 63: mod_base = OTHER; note = 2'-fluorocytosine
  modified_base 65: mod_base = OTHER; note = 2'-Omethylguanosine
  modified_base 71: mod_base = OTHER; note = 2'-Omethylguanosine
  modified_base 73: mod_base = OTHER; note = 2'-Omethylguanosine

SEQ ID NO: 6826 - RNA, 76 nt, synthetic construct; identical to SEQ ID NO: 625
  source 1..76: mol_type = other RNA
  modified_base 3: mod_base = OTHER; note = 2'-Omethylcytosine
  modified_base 5: mod_base = OTHER; note = Cytosine phosphorothiorate
  modified_base 6: mod_base = OTHER; note = 2'-Omethylcytosine
  modified_base 15: mod_base = OTHER; note = 2'-fluoroadenosine
  modified_base 16: mod_base = OTHER; note = 2'-Omethyluridine
  modified_base 17: mod_base = OTHER; note = Guanosine phosphorothiorate
  modified_base 22: mod_base = OTHER; note = 2'-Omethylguanosine phosphorothiorate
  modified_base 32: mod_base = OTHER; note = 2'-fluorocytosine
  modified_base 40: mod_base = OTHER; note = 2'-Omethyluridine phosphorothiorate
  modified_base 41: mod_base = OTHER; note = 2'-Omethylcytosine phosphorothiorate
  modified_base 42: mod_base = OTHER; note = 2'-fluoroadenosine
  modified_base 43: mod_base = OTHER; note = 2'-Omethyladenosine
  modified_base 47: mod_base = OTHER; note = Uridine phosphorothiorate
  modified_base 49: mod_base = OTHER; note = Cytosine phosphorothiorate
  modified_base 50: mod_base = OTHER; note = 2'-Omethylcytosine
  modified_base 52: mod_base = OTHER; note = 2'-fluoroguanosine
  modified_base 53: mod_base = OTHER; note = 2'-Omethylguanosine
  modified_base 54: mod_base = OTHER; note = 2'-Omethyluridine phosphorothiorate
  modified_base 56: mod_base = OTHER; note = 2'-fluorocytosine
  modified_base 57: mod_base = OTHER; note = 2'-fluoroguanosine phosphorothiorate
  modified_base 59: mod_base = OTHER; note = 2'-Omethylguanosine
  modified_base 62: mod_base = OTHER; note = 2'-Omethylcytosine
  modified_base 63: mod_base = OTHER; note = 2'-fluorocytosine phosphorothiorate
  modified_base 64: mod_base = OTHER; note = 2'-Omethylguanosine
  modified_base 65: mod_base = OTHER; note = 2'-Omethylguanosine
  modified_base 67: mod_base = OTHER; note = 2'-fluoroguanosine
  modified_base 68: mod_base = OTHER; note = Guanosine phosphorothiorate
  modified_base 69: mod_base = OTHER; note = 2'-fluoroadenosine
  modified_base 72: mod_base = OTHER; note = Cytosine phosphorothiorate
  modified_base 73: mod_base = OTHER; note = 2'-fluoroguanosine phosphorothiorate
  modified_base 74: mod_base = OTHER; note = 2'-Omethylcytosine
  modified_base 76: mod_base = OTHER; note = 2'-fluoroadenosine

SEQ ID NO: 6827 - RNA, 75 nt, synthetic construct; identical to SEQ ID NO: 3299
  source 1..75: mol_type = other RNA
  modified_base 14: mod_base = OTHER; note = 2'-fluoroguanosine phosphorothiorate
  modified_base 19: mod_base = OTHER; note = 2'-Omethyluridine phosphorothiorate
  modified_base 20: mod_base = OTHER; note = Adenosine phosphorothiorate
  modified_base 35: mod_base = OTHER; note = 2'-Omethyladenosine phosphorothiorate
  modified_base 55: mod_base = OTHER; note = 2'-fluorocytosine
  modified_base 72: mod_base = OTHER; note = 2'-fluoroguanosine phosphorothiorate
  modified_base 73: mod_base = OTHER; note = Cytosine phosphorothiorate

SEQ ID NO: 6828 - RNA, 76 nt, synthetic construct; identical to SEQ ID NO: 3295
  source 1..76: mol_type = other RNA
  modified_base 1: mod_base = OTHER; note = 2'-Omethylcytosine
  modified_base 2: mod_base = OTHER; note = 2'-Omethylcytosine
  modified_base 3: mod_base = OTHER; note = 2'-Omethyluridine
  modified_base 5: mod_base = OTHER; note = 2'-fluorocytosine
  modified_base 6: mod_base = OTHER; note = 2'-fluoroguanosine phosphorothiorate
  modified_base 8: mod_base = OTHER; note = 2'-fluorouridine phosphorothiorate
  modified_base 10: mod_base = OTHER; note = 2'-Omethylguanosine phosphorothiorate
  modified_base 15: mod_base = OTHER; note = 2'-fluoroguanosine
  modified_base 20: mod_base = OTHER; note = 2'-Omethyluridine
  modified_base 27: mod_base = OTHER; note = 2'-fluoroguanosine phosphorothiorate
  modified_base 31: mod_base = OTHER; note = 2'-Omethyladenosine phosphorothiorate
  modified_base 40: mod_base = OTHER; note = 2'-fluorocytosine
  modified_base 48: mod_base = OTHER; note = Cytosine phosphorothiorate
  modified_base 52: mod_base = OTHER; note = 2'-fluoroguanosine phosphorothiorate
  modified_base 53: mod_base = OTHER; note = 2'-Omethylguanosine
  modified_base 55: mod_base = OTHER; note = 2'-fluorouridine phosphorothiorate
  modified_base 61: mod_base = OTHER; note = Cytosine phosphorothiorate
  modified_base 71: mod_base = OTHER; note = 2'-fluoroguanosine
  modified_base 74: mod_base = OTHER; note = 2'-Omethylcytosine phosphorothiorate
  modified_base 75: mod_base = OTHER; note = 2'-Omethylcytosine phosphorothiorate

SEQ ID NO: 6829 - RNA, 76 nt, synthetic construct; identical to SEQ ID NO: 3318
  source 1..76: mol_type = other RNA
  modified_base 1: mod_base = OTHER; note = 2'-Omethylcytosine
  modified_base 2: mod_base = OTHER; note = 2'-Omethylcytosine
  modified_base 3: mod_base = OTHER; note = 2'-Omethyluridine
  modified_base 4: mod_base = OTHER; note = 2'-Omethyluridine
  modified_base 5: mod_base = OTHER; note = 2'-Omethylcytosine
  modified_base 6: mod_base = OTHER; note = 2'-Omethylguanosine
  modified_base 14: mod_base = OTHER; note = 2'-Omethyladenosine
  modified_base 15: mod_base = OTHER; note = 2'-Omethylguanosine
  modified_base 16: mod_base = OTHER; note = 2'-Omethyluridine
  modified_base 18: mod_base = OTHER; note = 2'-Omethylguanosine
  modified_base 19: mod_base = OTHER; note = 2'-Omethylguanosine
  modified_base 22: mod_base = OTHER; note = 2'-Omethylguanosine
  modified_base 23: mod_base = OTHER; note = 2'-Omethyladenosine
  modified_base 24: mod_base = OTHER; note = 2'-Omethylguanosine
  modified_base 25: mod_base = OTHER; note = 2'-Omethylcytosine
  modified_base 33: mod_base = OTHER; note = 2'-fluorouridine
  modified_base 35: mod_base = OTHER; note = Uridine phosphorothiorate
  modified_base 37: mod_base = OTHER; note = Guanosine phosphorothiorate
  modified_base 38: mod_base = OTHER; note = Adenosine phosphorothiorate
  modified_base 41: mod_base = OTHER; note = 2'-Omethylcytosine
  modified_base 42: mod_base = OTHER; note = 2'-Omethyluridine
  modified_base 43: mod_base = OTHER; note = 2'-Omethyluridine
  modified_base 44: mod_base = OTHER; note = 2'-Omethyladenosine
  modified_base 49: mod_base = OTHER; note = 2'-Omethylguanosine
  modified_base 50: mod_base = OTHER; note = 2'-Omethylcytosine
  modified_base 52: mod_base = OTHER; note = 2'-Omethylguanosine
  modified_base 54: mod_base = OTHER; note = 2'-Omethyluridine
  modified_base 55: mod_base = OTHER; note = Uridine phosphorothiorate
  modified_base 56: mod_base = OTHER; note = 2'-Omethylcytosine
  modified_base 57: mod_base = OTHER; note = 2'-fluoroguanosine
  modified_base 59: mod_base = OTHER; note = 2'-Omethyladenosine
  modified_base 61: mod_base = OTHER; note = 2'-Omethylcytosine
  modified_base 65: mod_base = OTHER; note = 2'-Omethylcytosine
  modified_base 73: mod_base = OTHER; note = 2'-Omethyladenosine

SEQ ID NO: 6830 - RNA, 74 nt, synthetic construct; identical to SEQ ID NO: 3293
  source 1..74: mol_type = other RNA
  modified_base 1: mod_base = OTHER; note = Adenosine phosphorothiorate
  modified_base 11: mod_base = OTHER; note = 2'-fluoroguanosine
  modified_base 14: mod_base = OTHER; note = 2'-Omethyladenosine
  modified_base 26: mod_base = OTHER; note = Cytosine phosphorothiorate
  modified_base 43: mod_base = OTHER; note = 2'-fluoroguanosine
  modified_base 74: mod_base = OTHER; note = 2'-Omethyladenosine

SEQ ID NO: 6831 - RNA, 75 nt, synthetic construct; identical to SEQ ID NO: 3306
  source 1..75: mol_type = other RNA
  modified_base 1: mod_base = OTHER; note = 2'-Omethylguanosine
  modified_base 10: mod_base = OTHER; note = 2'-Omethylguanosine
  modified_base 11: mod_base = OTHER; note = 2'-Omethylcytosine
  modified_base 12: mod_base = OTHER; note = 2'-Omethylguanosine
  modified_base 13: mod_base = OTHER; note = 2'-Omethylcytosine
  modified_base 17: mod_base = OTHER; note = 2'-Omethylguanosine
  modified_base 18: mod_base = OTHER; note = 2'-Omethylguanosine
  modified_base 24: mod_base = OTHER; note = 2'-Omethylcytosine
  modified_base 32: mod_base = OTHER; note = Uridine phosphorothiorate
  modified_base 33: mod_base = OTHER; note = 2'-Omethylcytosine
  modified_base 34: mod_base = OTHER; note = Uridine phosphorothiorate
  modified_base 36: mod_base = OTHER; note = Guanosine phosphorothiorate
  modified_base 37: mod_base = OTHER; note = Adenosine phosphorothiorate
  modified_base 40: mod_base = OTHER; note = 2'-Omethyladenosine
  modified_base 41: mod_base = OTHER; note = 2'-Omethylguanosine
  modified_base 42: mod_base = OTHER; note = 2'-Omethyladenosine
  modified_base 43: mod_base = OTHER; note = 2'-Omethyladenosine
  modified_base 48: mod_base = OTHER; note = 2'-Omethylguanosine
  modified_base 49: mod_base = OTHER; note = 2'-Omethylcytosine
  modified_base 51: mod_base = OTHER; note = 2'-Omethyluridine
  modified_base 53: mod_base = OTHER; note = Uridine phosphorothiorate
  modified_base 54: mod_base = OTHER; note = Uridine phosphorothiorate
  modified_base 60: mod_base = OTHER; note = 2'-Omethylcytosine
  modified_base 64: mod_base = OTHER; note = 2'-Omethyluridine
  modified_base 72: mod_base = OTHER; note = 2'-Omethyladenosine

SEQ ID NO: 6832 - RNA, 86 nt, synthetic construct; identical to SEQ ID NO: 3290
  source 1..86: mol_type = other RNA
  modified_base 1: mod_base = OTHER; note = 2'-Omethyladenosine
  modified_base 10: mod_base = OTHER; note = 2'-Omethylguanosine
  modified_base 13: mod_base = OTHER; note = 2'-Omethylguanosine
  modified_base 17: mod_base = OTHER; note = Guanosine phosphorothiorate
  modified_base 18: mod_base = OTHER; note = 2'-Omethylguanosine
  modified_base 19: mod_base = OTHER; note = Uridine phosphorothiorate
  modified_base 20: mod_base = OTHER; note = 2'-Omethyluridine
  modified_base 25: mod_base = OTHER; note = 2'-Omethylcytosine
  modified_base 29: mod_base = OTHER; note = 2'-Omethylguanosine
  modified_base 33: mod_base = OTHER; note = 2'-fluorouridine
  modified_base 35: mod_base = OTHER; note = Cytosine phosphorothiorate
  modified_base 37: mod_base = OTHER; note = Guanosine phosphorothiorate
  modified_base 38: mod_base = OTHER; note = Adenosine phosphorothiorate
  modified_base 41: mod_base = OTHER; note = 2'-fluorocytosine phosphorothiorate
  modified_base 43: mod_base = OTHER; note = 2'-Omethyladenosine
  modified_base 44: mod_base = OTHER; note = 2'-fluorouridine
  modified_base 57: mod_base = OTHER; note = Guanosine phosphorothiorate
  modified_base 60: mod_base = OTHER; note = 2'-Omethyluridine
  modified_base 62: mod_base = OTHER; note = 2'-Omethylguanosine
  modified_base 64: mod_base = OTHER; note = Uridine phosphorothiorate
  modified_base 65: mod_base = OTHER; note = Uridine phosphorothiorate
  modified_base 66: mod_base = OTHER; note = 2'-Omethylcytosine
  modified_base 67: mod_base = OTHER; note = Guanosine phosphorothiorate
  modified_base 72: mod_base = OTHER; note = 2'-Omethylcytosine
  modified_base 73: mod_base = OTHER; note = 2'-fluorocytosine
  modified_base 75: mod_base = OTHER; note = 2'-Omethylcytosine
  modified_base 81: mod_base = OTHER; note = 2'-Omethylguanosine
  modified_base 83: mod_base = OTHER; note = 2'-Omethyladenosine

SEQ ID NO: 6833 - RNA, 76 nt, synthetic construct; identical to SEQ ID NO: 625
  source 1..76: mol_type = other RNA
  modified_base 1: mod_base = OTHER; note = 2'-Omethylguanosine
  modified_base 40: mod_base = OTHER; note = 2'-fluorouridine phosphorothiorate
  modified_base 41: mod_base = OTHER; note = 2'-O-(2-Methoxyethyl) 5-methylcytosine
  modified_base 42: mod_base = OTHER; note = 2'-Omethyladenosine
  modified_base 43: mod_base = OTHER; note = 2'-Omethyladenosine phosphorothiorate
  modified_base 73: mod_base = OTHER; note = 2'-Omethylguanosine

SEQ ID NO: 6834 - RNA, 86 nt, synthetic construct; identical to SEQ ID NO: 3290
  source 1..86: mol_type = other RNA
  modified_base 1: mod_base = OTHER; note = 2'-Omethyladenosine phosphorothiorate
  modified_base 2: mod_base = OTHER; note = 2'-Omethylcytosine phosphorothiorate
  modified_base 3: mod_base = OTHER; note = 2'-Omethylcytosine
  modified_base 4: mod_base = OTHER; note = 2'-Omethyladenosine
  modified_base 5: mod_base = OTHER; note = 2'-Omethylguanosine
  modified_base 6: mod_base = OTHER; note = 2'-Omethylguanosine
  modified_base 10: mod_base = OTHER; note = 2'-Omethylguanosine
  modified_base 11: mod_base = OTHER; note = 2'-Omethylcytosine
  modified_base 12: mod_base = OTHER; note = 2'-Omethylcytosine
  modified_base 13: mod_base = OTHER; note = 2'-Omethylguanosine
  modified_base 17: mod_base = OTHER; note = Guanosine phosphorothiorate
  modified_base 18: mod_base = OTHER; note = 2'-Omethylguanosine
  modified_base 19: mod_base = OTHER; note = Uridine phosphorothiorate
  modified_base 20: mod_base = OTHER; note = 2'-Omethyluridine
  modified_base 22: mod_base = OTHER; note = 2'-Omethyladenosine
  modified_base 23: mod_base = OTHER; note = 2'-Omethylguanosine
  modified_base 24: mod_base = OTHER; note = 2'-Omethylguanosine
  modified_base 25: mod_base = OTHER; note = 2'-Omethylcytosine
  modified_base 29: mod_base = OTHER; note = 2'-Omethylguanosine
  modified_base 33: mod_base = OTHER; note = 2'-fluorouridine
  modified_base 35: mod_base = OTHER; note = Cytosine phosphorothiorate
  modified_base 37: mod_base = OTHER; note = Guanosine phosphorothiorate
  modified_base 38: mod_base = OTHER; note = Adenosine phosphorothiorate
  modified_base 41: mod_base = OTHER; note = 2'-fluorocytosine phosphorothiorate
  modified_base 43: mod_base = OTHER; note = 2'-Omethyladenosine
  modified_base 44: mod_base = OTHER; note = 2'-fluorouridine
  modified_base 57: mod_base = OTHER; note = Guanosine phosphorothiorate
  modified_base 59: mod_base = OTHER; note = 2'-Omethylguanosine
  modified_base 60: mod_base = OTHER; note = 2'-Omethyluridine
  modified_base 61: mod_base = OTHER; note = 2'-Omethylguanosine
  modified_base 62: mod_base = OTHER; note = 2'-Omethylguanosine
  modified_base 63: mod_base = OTHER; note = 2'-Omethylguanosine
  modified_base 64: mod_base = OTHER; note = Uridine phosphorothiorate
  modified_base 65: mod_base = OTHER; note = Uridine phosphorothiorate
  modified_base 66: mod_base = OTHER; note = 2'-Omethylcytosine
  modified_base 67: mod_base = OTHER; note = Guanosine phosphorothiorate
  modified_base 71: mod_base = OTHER; note = 2'-Omethylcytosine
  modified_base 72: mod_base = OTHER; note = 2'-Omethylcytosine
  modified_base 73: mod_base = OTHER; note = 2'-fluorocytosine
  modified_base 74: mod_base = OTHER; note = 2'-Omethyladenosine
  modified_base 75: mod_base = OTHER; note = 2'-Omethylcytosine
  modified_base 76: mod_base = OTHER; note = 2'-Omethyluridine
  modified_base 77: mod_base = OTHER; note = 2'-Omethylcytosine
  modified_base 78: mod_base = OTHER; note = 2'-Omethylcytosine
  modified_base 81: mod_base = OTHER; note = 2'-Omethylguanosine
  modified_base 83: mod_base = OTHER; note = 2'-Omethyladenosine

SEQ ID NO: 6835 - RNA, 76 nt, synthetic construct; identical to SEQ ID NO: 3316
  source 1..76: mol_type = other RNA
  modified_base 1: mod_base = OTHER; note = 2'-Omethyladenosine
  modified_base 2: mod_base = OTHER; note = 2'-Omethylcytosine
  modified_base 3: mod_base = OTHER; note = 2'-Omethylcytosine
  modified_base 4: mod_base = OTHER; note = 2'-Omethyladenosine
  modified_base 5: mod_base = OTHER; note = 2'-Omethyladenosine
  modified_base 6: mod_base = OTHER; note = 2'-Omethylcytosine
  modified_base 16: mod_base = OTHER; note = 2'-Omethyluridine
  modified_base 17: mod_base = OTHER; note = 2'-Omethylguanosine
  modified_base 18: mod_base = OTHER; note = 2'-Omethylguanosine
  modified_base 33: mod_base = OTHER; note = 2'-fluorouridine
  modified_base 35: mod_base = OTHER; note = Cytosine phosphorothiorate
  modified_base 37: mod_base = OTHER; note = Adenosine phosphorothiorate
  modified_base 38: mod_base = OTHER; note = Adenosine phosphorothiorate
  modified_base 44: mod_base = OTHER; note = 2'-Omethyladenosine
  modified_base 45: mod_base = OTHER; note = 2'-Omethylguanosine
  modified_base 46: mod_base = OTHER; note = 2'-fluoroguanosine
  modified_base 47: mod_base = OTHER; note = 2'-fluorouridine
  modified_base 48: mod_base = OTHER; note = 2'-fluorouridine
  modified_base 56: mod_base = OTHER; note = 2'-Omethylcytosine
  modified_base 59: mod_base = OTHER; note = 2'-Omethylguanosine
  modified_base 61: mod_base = OTHER; note = 2'-Omethylcytosine
  modified_base 62: mod_base = OTHER; note = 2'-Omethylcytosine
  modified_base 63: mod_base = OTHER; note = 2'-fluorocytosine
  modified_base 64: mod_base = OTHER; note = 2'-Omethylguanosine
  modified_base 65: mod_base = OTHER; note = 2'-Omethylguanosine
  modified_base 66: mod_base = OTHER; note = 2'-Omethylcytosine
  modified_base 67: mod_base = OTHER; note = 2'-Omethylguanosine
  modified_base 68: mod_base = OTHER; note = 2'-Omethyluridine
  modified_base 73: mod_base = OTHER; note = 2'-Omethylguanosine

SEQ ID NO: 6836 - RNA, 85 nt, synthetic construct; identical to SEQ ID NO: 3297
  source 1..85: mol_type = other RNA
  modified_base 1: mod_base = OTHER; note = 2'-Omethylguanosine
  modified_base 61: mod_base = OTHER; note = 2'-Omethylguanosine

SEQ ID NO: 6837 - RNA, 76 nt, synthetic construct; identical to SEQ ID NO: 625
  source 1..76: mol_type = other RNA
  modified_base 1: mod_base = OTHER; note = 2'-Omethylguanosine phosphorothiorate
  modified_base 2: mod_base = OTHER; note = 2'-Omethylguanosine phosphorothiorate
  modified_base 3: mod_base = OTHER; note = 2'-Omethylcytosine
  modified_base 4: mod_base = OTHER; note = 2'-Omethyluridine
  modified_base 5: mod_base = OTHER; note = 2'-Omethylcytosine
  modified_base 6: mod_base = OTHER; note = 2'-Omethylcytosine
  modified_base 10: mod_base = OTHER; note = 2'-Omethylguanosine
  modified_base 11: mod_base = OTHER; note = 2'-Omethylcytosine
  modified_base 12: mod_base = OTHER; note = 2'-Omethylguanosine
  modified_base 13: mod_base = OTHER; note = 2'-Omethylcytosine
  modified_base 14: mod_base = OTHER; note = 2'-Omethyladenosine
  modified_base 15: mod_base = OTHER; note = 2'-fluoroadenosine
  modified_base 16: mod_base = OTHER; note = 2'-Omethyluridine
  modified_base 17: mod_base = OTHER; note = 2'-Omethylguanosine
  modified_base 18: mod_base = OTHER; note = 2'-Omethylguanosine
  modified_base 19: mod_base = OTHER; note = 2'-fluoroadenosine
  modified_base 20: mod_base = OTHER; note = 2'-Omethyluridine
  modified_base 22: mod_base = OTHER; note = 2'-Omethylguanosine
  modified_base 23: mod_base = OTHER; note = 2'-Omethylcytosine
  modified_base 24: mod_base = OTHER; note = 2'-Omethylguanosine
  modified_base 25: mod_base = OTHER; note = 2'-Omethylcytosine
  modified_base 33: mod_base = OTHER; note = 2'-fluorouridine
  modified_base 35: mod_base = OTHER; note = Cytosine phosphorothiorate
  modified_base 37: mod_base = OTHER; note = Adenosine phosphorothiorate
  modified_base 38: mod_base = OTHER; note = Adenosine phosphorothiorate
  modified_base 40: mod_base = OTHER; note = 2'-fluorouridine
  modified_base 41: mod_base = OTHER; note = 2'-fluorocytosine
  modified_base 42: mod_base = OTHER; note = 2'-fluoroadenosine
  modified_base 43: mod_base = OTHER; note = 2'-fluoroadenosine
  modified_base 44: mod_base = OTHER; note = 2'-Omethyladenosine
  modified_base 45: mod_base = OTHER; note = 2'-Omethylguanosine
  modified_base 46: mod_base = OTHER; note = 2'-fluoroguanosine
  modified_base 47: mod_base = OTHER; note = 2'-fluorouridine
  modified_base 48: mod_base = OTHER; note = 2'-fluorouridine
  modified_base 56: mod_base = OTHER; note = 2'-Omethylcytosine
  modified_base 59: mod_base = OTHER; note = 2'-Omethylguanosine
  modified_base 61: mod_base = OTHER; note = 2'-Omethylcytosine
  modified_base 62: mod_base = OTHER; note = 2'-Omethylcytosine
  modified_base 63: mod_base = OTHER; note = 2'-fluorocytosine
  modified_base 64: mod_base = OTHER; note = 2'-Omethylguanosine
  modified_base 65: mod_base = OTHER; note = 2'-Omethylguanosine
  modified_base 66: mod_base = OTHER; note = 2'-Omethylcytosine
  modified_base 67: mod_base = OTHER; note = 2'-Omethylguanosine
  modified_base 68: mod_base = OTHER; note = 2'-Omethylguanosine
  modified_base 73: mod_base = OTHER; note = 2'-Omethylguanosine

SEQ ID NO: 6838 - RNA, 85 nt, synthetic construct; identical to SEQ ID NO: 3286
  source 1..85: mol_type = other RNA
  modified_base 1: mod_base = OTHER; note = 2'-Omethylcytosine
  modified_base 3: mod_base = OTHER; note = 2'-fluoroadenosine phosphorothiorate
  modified_base 27: mod_base = OTHER; note = 2'-fluorouridine
  modified_base 29: mod_base = OTHER; note = 2'-fluoroguanosine
  modified_base 32: mod_base = OTHER; note = 2'-fluorouridine
  modified_base 36: mod_base = OTHER; note = Guanosine phosphorothiorate
  modified_base 37: mod_base = OTHER; note = 2'-fluoroadenosine phosphorothiorate
  modified_base 45: mod_base = OTHER; note = 2'-fluoroguanosine phosphorothiorate
  modified_base 48: mod_base = OTHER; note = Adenosine phosphorothiorate
  modified_base 51: mod_base = OTHER; note = Uridine phosphorothiorate
  modified_base 58: mod_base = OTHER; note = Guanosine phosphorothiorate
  modified_base 65: mod_base = OTHER; note = 2'-fluorocytosine phosphorothiorate
  modified_base 72: mod_base = OTHER; note = Cytosine phosphorothiorate
  modified_base 73: mod_base = OTHER; note = 2'-fluoroadenosine
  modified_base 77: mod_base = OTHER; note = 2'-fluorocytosine

SEQ ID NO: 6839 - RNA, 76 nt, synthetic construct; identical to SEQ ID NO: 625
  source 1..76: mol_type = other RNA
  modified_base 1: mod_base = OTHER; note = 2'-Omethylguanosine phosphorothiorate
  modified_base 2: mod_base = OTHER; note = 2'-Omethylguanosine
  modified_base 3: mod_base = OTHER; note = 2'-Omethylcytosine
  modified_base 4: mod_base = OTHER; note = 2'-Omethyluridine
  modified_base 5: mod_base = OTHER; note = 2'-Omethylcytosine
  modified_base 6: mod_base = OTHER; note = 2'-Omethylcytosine
  modified_base 10: mod_base = OTHER; note = 2'-Omethylguanosine
  modified_base 11: mod_base = OTHER; note = 2'-Omethylcytosine
  modified_base 12: mod_base = OTHER; note = 2'-Omethylguanosine
  modified_base 13: mod_base = OTHER; note = 2'-Omethylcytosine
  modified_base 14: mod_base = OTHER; note = 2'-Omethyladenosine
  modified_base 15: mod_base = OTHER; note = 2'-fluoroadenosine
  modified_base 16: mod_base = OTHER; note = 2'-Omethyluridine
  modified_base 17: mod_base = OTHER; note = 2'-Omethylguanosine
  modified_base 18: mod_base = OTHER; note = 2'-Omethylguanosine
  modified_base 19: mod_base = OTHER; note = 2'-fluoroadenosine
  modified_base 20: mod_base = OTHER; note = 2'-Omethyluridine
  modified_base 21: mod_base = OTHER; note = 2'-fluoroadenosine
  modified_base 22: mod_base = OTHER; note = 2'-Omethylguanosine
  modified_base 23: mod_base = OTHER; note = 2'-Omethylcytosine
  modified_base 24: mod_base = OTHER; note = 2'-Omethylguanosine
  modified_base 25: mod_base = OTHER; note = 2'-Omethylcytosine
  modified_base 29: mod_base = OTHER; note = 2'-Omethylguanosine
  modified_base 33: mod_base = OTHER; note = 2'-fluorouridine
  modified_base 35: mod_base = OTHER; note = Cytosine phosphorothiorate
  modified_base 37: mod_base = OTHER; note = Adenosine phosphorothiorate
  modified_base 38: mod_base = OTHER; note = Adenosine phosphorothiorate
  modified_base 41: mod_base = OTHER; note = 2'-fluorocytosine phosphorothiorate
  modified_base 43: mod_base = OTHER; note = 2'-Omethyladenosine
  modified_base 44: mod_base = OTHER; note = 2'-Omethyladenosine
  modified_base 45: mod_base = OTHER; note = 2'-Omethylguanosine
  modified_base 46: mod_base = OTHER; note = 2'-fluoroguanosine
  modified_base 48: mod_base = OTHER; note = 2'-fluorouridine
  modified_base 49: mod_base = OTHER; note = 2'-Omethylcytosine
  modified_base 50: mod_base = OTHER; note = 2'-Omethylcytosine
  modified_base 51: mod_base = OTHER; note = 2'-Omethylguanosine
  modified_base 52: mod_base = OTHER; note = 2'-Omethylguanosine
  modified_base 53: mod_base = OTHER; note = 2'-Omethylguanosine
  modified_base 54: mod_base = OTHER; note = Uridine phosphorothiorate
  modified_base 55: mod_base = OTHER; note = Uridine phosphorothiorate
  modified_base 56: mod_base = OTHER; note = 2'-Omethylcytosine
  modified_base 57: mod_base = OTHER; note = 2'-Omethylguanosine
  modified_base 59: mod_base = OTHER; note = 2'-Omethylguanosine
  modified_base 61: mod_base = OTHER; note = 2'-Omethylcytosine
  modified_base 62: mod_base = OTHER; note = 2'-Omethylcytosine
  modified_base 63: mod_base = OTHER; note = 2'-fluorocytosine
  modified_base 64: mod_base = OTHER; note = 2'-Omethylguanosine
  modified_base 65: mod_base = OTHER; note = 2'-Omethylguanosine
  modified_base 66: mod_base = OTHER; note = 2'-Omethylcytosine
  modified_base 67: mod_base = OTHER; note = 2'-Omethylguanosine
  modified_base 68: mod_base = OTHER; note = 2'-Omethylguanosine
  modified_base 69: mod_base = OTHER; note = 2'-Omethyladenosine
  modified_base 70: mod_base = OTHER; note = 2'-fluoroguanosine
  modified_base 71: mod_base = OTHER; note = 2'-Omethyluridine
  modified_base 73: mod_base = OTHER; note = 2'-Omethylguanosine
  modified_base 75: mod_base = OTHER; note = 2'-fluorocytosine phosphorothiorate

SEQ ID NO: 6840 - RNA, 86 nt, synthetic construct; identical to SEQ ID NO: 3290
  source 1..86: mol_type = other RNA
  modified_base 13: mod_base = OTHER; note = 2'-Omethylguanosine
  modified_base 83: mod_base = OTHER; note = 2'-Omethyladenosine

SEQ ID NO: 6841 - RNA, 76 nt, synthetic construct; identical to SEQ ID NO: 625
  source 1..76: mol_type = other RNA
  modified_base 3: mod_base = OTHER; note = 2'-fluorocytosine phosphorothiorate
  modified_base 4: mod_base = OTHER; note = 2'-fluorouridine
  modified_base 5: mod_base = OTHER; note = 2'-fluorocytosine
  modified_base 6: mod_base = OTHER; note = 2'-Omethylcytosine
  modified_base 13: mod_base = OTHER; note = 2'-Omethylcytosine phosphorothiorate
  modified_base 20: mod_base = OTHER; note = 2'-Omethyluridine
  modified_base 23: mod_base = OTHER; note = Cytosine phosphorothiorate
  modified_base 24: mod_base = OTHER; note = 2'-Omethylguanosine
  modified_base 27: mod_base = OTHER; note = 2'-fluorouridine
  modified_base 28: mod_base = OTHER; note = 2'-fluorouridine phosphorothiorate
  modified_base 29: mod_base = OTHER; note = 2'-fluoroguanosine
  modified_base 30: mod_base = OTHER; note = 2'-Omethylguanosine
  modified_base 31: mod_base = OTHER; note = 2'-Omethyladenosine
  modified_base 34: mod_base = OTHER; note = 2'-fluorouridine
  modified_base 36: mod_base = OTHER; note = Adenosine phosphorothiorate
  modified_base 37: mod_base = OTHER; note = Adenosine phosphorothiorate
  modified_base 38: mod_base = OTHER; note = 2'-Omethyladenosine phosphorothiorate
  modified_base 39: mod_base = OTHER; note = 2'-fluorouridine
  modified_base 41: mod_base = OTHER; note = 2'-fluorocytosine
  modified_base 42: mod_base = OTHER; note = 2'-fluoroadenosine
  modified_base 44: mod_base = OTHER; note = 2'-fluoroadenosine
  modified_base 46: mod_base = OTHER; note = Guanosine phosphorothiorate
  modified_base 52: mod_base = OTHER; note = 2'-Omethylguanosine
  modified_base 53: mod_base = OTHER; note = Guanosine phosphorothiorate
  modified_base 54: mod_base = OTHER; note = 2'-Omethyluridine
  modified_base 57: mod_base = OTHER; note = Guanosine phosphorothiorate
  modified_base 58: mod_base = OTHER; note = 2'-fluoroadenosine
  modified_base 60: mod_base = OTHER; note = 2'-Omethyluridine
  modified_base 63: mod_base = OTHER; note = 2'-fluorocytosine phosphorothiorate
  modified_base 65: mod_base = OTHER; note = 2'-Omethylguanosine phosphorothiorate
  modified_base 66: mod_base = OTHER; note = 2'-fluorocytosine
  modified_base 67: mod_base = OTHER; note = 2'-Omethylguanosine
  modified_base 70: mod_base = OTHER; note = 2'-fluoroguanosine phosphorothiorate

SEQ ID NO: 6842 - RNA, 85 nt, synthetic construct; identical to SEQ ID NO: 3297
  source 1..85: mol_type = other RNA
  modified_base 1: mod_base = OTHER; note = 2'-Omethylguanosine phosphorothiorate
  modified_base 2: mod_base = OTHER; note = 2'-Omethylcytosine
  modified_base 12: mod_base = OTHER; note = 2'-Omethylcytosine phosphorothiorate
  modified_base 18: mod_base = OTHER; note = 2'-Omethylguanosine phosphorothiorate
  modified_base 31: mod_base = OTHER; note = 2'-fluoroadenosine
  modified_base 44: mod_base = OTHER; note = 2'-Omethyluridine phosphorothiorate
  modified_base 52: mod_base = OTHER; note = 2'-Omethylcytosine
  modified_base 58: mod_base = OTHER; note = 2'-Omethylguanosine phosphorothiorate
  modified_base 61: mod_base = OTHER; note = 2'-Omethylguanosine
  modified_base 80: mod_base = OTHER; note = 2'-Omethylguanosine

SEQ ID NO: 6843 - RNA, 75 nt, synthetic construct; identical to SEQ ID NO: 1045
  source 1..75: mol_type = other RNA
  modified_base 1: mod_base = OTHER; note = 2'-Omethylguanosine phosphorothiorate
  modified_base 3: mod_base = OTHER; note = 2'-Omethyluridine phosphorothiorate
  modified_base 13: mod_base = OTHER; note = 2'-fluorouridine phosphorothiorate
  modified_base 14: mod_base = OTHER; note = 2'-fluoroadenosine
  modified_base 21: mod_base = OTHER; note = 2'-fluoroadenosine
  modified_base 24: mod_base = OTHER; note = 2'-fluoroadenosine
  modified_base 33: mod_base = OTHER; note = Uridine phosphorothiorate
  modified_base 43: mod_base = OTHER; note = 2'-fluoroguanosine phosphorothiorate
  modified_base 44: mod_base = OTHER; note = 2'-fluorocytosine
  modified_base 53: mod_base = OTHER; note = 2'-fluorouridine
  modified_base 56: mod_base = OTHER; note = 2'-Omethylguanosine
  modified_base 60: mod_base = OTHER; note = 2'-fluorocytosine
  modified_base 63: mod_base = OTHER; note = Guanosine phosphorothiorate
  modified_base 73: mod_base = OTHER; note = Cytosine phosphorothiorate
  modified_base 74: mod_base = OTHER; note = Cytosine phosphorothiorate

SEQ ID NO: 6844 - RNA, 76 nt, synthetic construct; identical to SEQ ID NO: 625
  source 1..76: mol_type = other RNA
  modified_base 1: mod_base = OTHER; note = 2'-Omethylguanosine phosphorothiorate
  modified_base 2: mod_base = OTHER; note = 2'-Omethylguanosine
  modified_base 3: mod_base = OTHER; note = 2'-Omethylcytosine
  modified_base 4: mod_base = OTHER; note = 2'-Omethyluridine
  modified_base 5: mod_base = OTHER; note = 2'-Omethylcytosine
  modified_base 6: mod_base = OTHER; note = 2'-Omethylcytosine
  modified_base 13: mod_base = OTHER; note = 2'-Omethylcytosine
  modified_base 17: mod_base = OTHER; note = 2'-Omethylguanosine
  modified_base 33: mod_base = OTHER; note = 2'-fluorouridine
  modified_base 35: mod_base = OTHER; note = Cytosine phosphorothiorate
  modified_base 37: mod_base = OTHER; note = Adenosine phosphorothiorate
  modified_base 38: mod_base = OTHER; note = Adenosine phosphorothiorate
  modified_base 49: mod_base = OTHER; note = 2'-Omethylcytosine
  modified_base 50: mod_base = OTHER; note = 2'-Omethylcytosine
  modified_base 51: mod_base = OTHER; note = 2'-Omethylguanosine
  modified_base 52: mod_base = OTHER; note = 2'-fluoroguanosine
  modified_base 53: mod_base = OTHER; note = 2'-Omethylguanosine
  modified_base 56: mod_base = OTHER; note = 2'-Omethylcytosine
  modified_base 61: mod_base = OTHER; note = 2'-Omethylcytosine
  modified_base 62: mod_base = OTHER; note = 2'-Omethylcytosine
  modified_base 63: mod_base = OTHER; note = 2'-fluorocytosine
  modified_base 64: mod_base = OTHER; note = 2'-Omethylguanosine
  modified_base 65: mod_base = OTHER; note = 2'-Omethylguanosine
  modified_base 66: mod_base = OTHER; note = 2'-Omethylcytosine
  modified_base 67: mod_base = OTHER; note = 2'-Omethylguanosine
  modified_base 68: mod_base = OTHER; note = 2'-Omethylguanosine
  modified_base 69: mod_base = OTHER; note = 2'-fluoroadenosine
  modified_base 71: mod_base = OTHER; note = 2'-Omethyluridine
  modified_base 73: mod_base = OTHER; note = 2'-Omethylguanosine
  modified_base 75: mod_base = OTHER; note = 2'-fluorocytosine phosphorothiorate

SEQ ID NO: 6845 - RNA, 76 nt, synthetic construct; identical to SEQ ID NO: 3342
  source 1..76: mol_type = other RNA
  modified_base 1: mod_base = OTHER; note = 2'-Omethylguanosine
  modified_base 17: mod_base = OTHER; note = 2'-Omethylguanosine
  modified_base 18: mod_base = OTHER; note = 2'-Omethylguanosine
  modified_base 50: mod_base = OTHER; note = 2'-Omethylcytosine
  modified_base 52: mod_base = OTHER; note = 2'-Omethylguanosine
  modified_base 73: mod_base = OTHER; note = 2'-Omethylguanosine

SEQ ID NO: 6846 - DNA, 76 bp, synthetic construct; identical to SEQ ID NO: 1924
  source 1..76: mol_type = other DNA
  modified_base 1: mod_base = OTHER; note = 2'-Omethylguanosine phosphorothiorate
  modified_base 2: mod_base = OTHER; note = 2'-Omethylguanosine
  modified_base 27: mod_base = OTHER; note = 2'-O-(2-Methoxyethyl) thymine
  modified_base 49: mod_base = OTHER; note = 2'-Omethylcytosine
  modified_base 55: mod_base = OTHER; note = Uridine phosphorothiorate
  modified_base 56: mod_base = OTHER; note = 2'-O-(2-Methoxyethyl) 5-methylcytosine
  modified_base 63: mod_base = OTHER; note = 2'-fluorocytosine
  modified_base 74: mod_base = OTHER; note = Cytosine phosphorothiorate
  modified_base 75: mod_base = OTHER; note = 2'-Omethylcytosine phosphorothiorate
  modified_base 76: mod_base = OTHER; note = 2'-Omethyladenosine
  misc_feature 1..2: note = RNA
  misc_feature 3: note = DNA
  misc_feature 4..76: note = RNA

SEQ ID NO: 6847 - RNA, 76 nt, synthetic construct; identical to SEQ ID NO: 625
  source 1..76: mol_type = other RNA
  modified_base 1: mod_base = OTHER; note = 2'-Omethylguanosine
  modified_base 8: mod_base = OTHER; note = Thymine
  modified_base 17: mod_base = OTHER; note = 2'-Omethylguanosine
  modified_base 18: mod_base = OTHER; note = 2'-Omethylguanosine
  modified_base 33: mod_base = OTHER; note = 2'-fluorouridine
  modified_base 50: mod_base = OTHER; note = 2'-Omethylcytosine
  modified_base 52: mod_base = OTHER; note = 2'-Omethylguanosine
  modified_base 55: mod_base = OTHER; note = Uridine phosphorothiorate
  modified_base 73: mod_base = OTHER; note = 2'-Omethylguanosine

SEQ ID NO: 6848 - RNA, 76 nt, synthetic construct; identical to SEQ ID NO: 3329
  source 1..76: mol_type = other RNA
  modified_base 1: mod_base = OTHER; note = 2'-Omethylguanosine
  modified_base 14: mod_base = OTHER; note = 2'-Omethyladenosine
  modified_base 15: mod_base = OTHER; note = 2'-Omethyladenosine
  modified_base 16: mod_base = OTHER; note = 2'-Omethyluridine
  modified_base 17: mod_base = OTHER; note = 2'-Omethylguanosine
  modified_base 18: mod_base = OTHER; note = 2'-Omethylguanosine
  modified_base 19: mod_base = OTHER; note = Adenosine phosphorothiorate
  modified_base 20: mod_base = OTHER; note = 2'-Omethyluridine
  modified_base 21: mod_base = OTHER; note = Adenosine phosphorothiorate
  modified_base 33: mod_base = OTHER; note = 2'-fluorouridine
  modified_base 34: mod_base = OTHER; note = 2'-Omethyluridine
  modified_base 35: mod_base = OTHER; note = Cytosine phosphorothiorate
  modified_base 37: mod_base = OTHER; note = Adenosine phosphorothiorate
  modified_base 38: mod_base = OTHER; note = Adenosine phosphorothiorate
  modified_base 41: mod_base = OTHER; note = 2'-Omethylcytosine
  modified_base 42: mod_base = OTHER; note = 2'-Omethyladenosine
  modified_base 43: mod_base = OTHER; note = 2'-Omethyladenosine
  modified_base 44: mod_base = OTHER; note = 2'-Omethyladenosine
  modified_base 50: mod_base = OTHER; note = 2'-Omethylcytosine
  modified_base 52: mod_base = OTHER; note = 2'-Omethylguanosine
  modified_base 73: mod_base = OTHER; note = 2'-Omethylguanosine

SEQ ID NO: 6849 - RNA, 76 nt, synthetic construct; identical to SEQ ID NO: 3329
  source 1..76: mol_type = other RNA
  modified_base 1: mod_base = OTHER; note = 2'-Omethylguanosine
  modified_base 2: mod_base = OTHER; note = 2'-Omethylguanosine
  modified_base 3: mod_base = OTHER; note = 2'-Omethylcytosine
  modified_base 4: mod_base = OTHER; note = 2'-Omethylcytosine
  modified_base 5: mod_base = OTHER; note = 2'-Omethylcytosine
  modified_base 6: mod_base = OTHER; note = 2'-Omethylcytosine
  modified_base 16: mod_base = OTHER; note = 2'-Omethyluridine
  modified_base 17: mod_base = OTHER; note = 2'-Omethylguanosine
  modified_base 18: mod_base = OTHER; note = 2'-Omethylguanosine
  modified_base 20: mod_base = OTHER; note = 2'-Omethyluridine
  modified_base 25: mod_base = OTHER; note = 2'-Omethylcytosine
  modified_base 33: mod_base = OTHER; note = 2'-fluorouridine
  modified_base 35: mod_base = OTHER; note = Cytosine phosphorothiorate
  modified_base 37: mod_base = OTHER; note = Adenosine phosphorothiorate
  modified_base 38: mod_base = OTHER; note = Adenosine phosphorothiorate
  modified_base 41: mod_base = OTHER; note = 2'-Omethylcytosine
  modified_base 42: mod_base = OTHER; note = 2'-Omethyladenosine
  modified_base 43: mod_base = OTHER; note = 2'-Omethyladenosine
  modified_base 44: mod_base = OTHER; note = 2'-Omethyladenosine
  modified_base 49: mod_base = OTHER; note = 2'-Omethylcytosine
  modified_base 50: mod_base = OTHER; note = 2'-Omethylcytosine
  modified_base 52: mod_base = OTHER; note = 2'-Omethylguanosine
  modified_base 54: mod_base = OTHER; note = Uridine phosphorothiorate
  modified_base 55: mod_base = OTHER; note = Uridine phosphorothiorate
  modified_base 61: mod_base = OTHER; note = 2'-Omethylcytosine
  modified_base 65: mod_base = OTHER; note = 2'-Omethylguanosine
  modified_base 73: mod_base = OTHER; note = 2'-Omethylguanosine

SEQ ID NO: 6850 - RNA, 85 nt, synthetic construct; identical to SEQ ID NO: 3317
  source 1..85: mol_type = other RNA
  modified_base 1: mod_base = OTHER; note = 2'-Omethylguanosine phosphorothiorate
  modified_base 2: mod_base = OTHER; note = Cytosine phosphorothiorate
  modified_base 4: mod_base = OTHER; note = 2'-Omethylguanosine
  modified_base 14: mod_base = OTHER; note = 2'-fluoroadenosine
  modified_base 18: mod_base = OTHER; note = 2'-Omethylguanosine
  modified_base 20: mod_base = OTHER; note = 2'-Omethyluridine
  modified_base 50: mod_base = OTHER; note = Cytosine phosphorothiorate
  modified_base 56: mod_base = OTHER; note = 2'-fluoroguanosine
  modified_base 59: mod_base = OTHER; note = 2'-fluorocytosine
  modified_base 82: mod_base = OTHER; note = Guanosine phosphorothiorate

SEQ ID NO: 6851 - RNA, 86 nt, synthetic construct; identical to SEQ ID NO: 3290
  source 1..86: mol_type = other RNA
  modified_base 1: mod_base = OTHER; note = 2'-Omethyladenosine
  modified_base 2: mod_base = OTHER; note = 2'-Omethylcytosine
  modified_base 3: mod_base = OTHER; note = 2'-Omethylcytosine
  modified_base 4: mod_base = OTHER; note = 2'-Omethyladenosine
  modified_base 5: mod_base = OTHER; note = 2'-Omethylguanosine
  modified_base 6: mod_base = OTHER; note = 2'-Omethylguanosine
  modified_base 13: mod_base = OTHER; note = 2'-Omethylguanosine
  modified_base 14: mod_base = OTHER; note = 2'-Omethyladenosine
  modified_base 15: mod_base = OTHER; note = 2'-Omethylguanosine
  modified_base 16: mod_base = OTHER; note = 2'-Omethyluridine
  modified_base 17: mod_base = OTHER; note = 2'-Omethylguanosine
  modified_base 18: mod_base = OTHER; note = 2'-Omethylguanosine
  modified_base 19: mod_base = OTHER; note = Uridine phosphorothiorate
  modified_base 20: mod_base = OTHER; note = 2'-Omethyluridine
  modified_base 21: mod_base = OTHER; note = Adenosine phosphorothiorate
  modified_base 25: mod_base = OTHER; note = 2'-Omethylcytosine
  modified_base 33: mod_base = OTHER; note = Uridine phosphorothiorate
  modified_base 34: mod_base = OTHER; note = 2'-Omethyluridine
  modified_base 35: mod_base = OTHER; note = Cytosine phosphorothiorate
  modified_base 37: mod_base = OTHER; note = Guanosine phosphorothiorate
  modified_base 38: mod_base = OTHER; note = Adenosine phosphorothiorate
  modified_base 59: mod_base = OTHER; note = 2'-Omethylguanosine
  modified_base 60: mod_base = OTHER; note = 2'-Omethyluridine
  modified_base 61: mod_base = OTHER; note = 2'-Omethylguanosine
  modified_base 62: mod_base = OTHER; note = 2'-Omethylguanosine
  modified_base 63: mod_base = OTHER; note = 2'-Omethylguanosine
  modified_base 64: mod_base = OTHER; note = Uridine phosphorothiorate
  modified_base 65: mod_base = OTHER; note = Uridine phosphorothiorate
  modified_base 71: mod_base = OTHER; note = 2'-Omethylcytosine
  modified_base 75: mod_base = OTHER; note = 2'-Omethylcytosine
  modified_base 83: mod_base = OTHER; note = 2'-Omethyladenosine

SEQ ID NO: 6852 - RNA, 76 nt, synthetic construct; identical to SEQ ID NO: 3289
  source 1..76: mol_type = other RNA
  modified_base 1: mod_base = OTHER; note = 2'-Omethylguanosine
  modified_base 16: mod_base = OTHER; note = 2'-Omethyluridine

SEQ ID NO: 6853 - RNA, 76 nt, synthetic construct; identical to SEQ ID NO: 3295
  source 1..76: mol_type = other RNA
  modified_base 1: mod_base = OTHER; note = 2'-Omethylcytosine
  modified_base 2: mod_base = OTHER; note = 2'-fluorocytosine phosphorothiorate
  modified_base 20: mod_base = OTHER; note = 2'-fluorouridine phosphorothiorate
  modified_base 26: mod_base = OTHER; note = Guanosine phosphorothiorate
  modified_base 27: mod_base = OTHER; note = 2'-fluoroguanosine phosphorothiorate
  modified_base 35: mod_base = OTHER; note = 2'-fluorouridine
  modified_base 41: mod_base = OTHER; note = 2'-fluorocytosine phosphorothiorate
  modified_base 52: mod_base = OTHER; note = 2'-Omethylguanosine
  modified_base 53: mod_base = OTHER; note = 2'-fluoroguanosine phosphorothiorate
  modified_base 74: mod_base = OTHER; note = 2'-Omethylcytosine phosphorothiorate
  modified_base 75: mod_base = OTHER; note = 2'-Omethylcytosine phosphorothiorate

SEQ ID NO: 6854 - RNA, 76 nt, synthetic construct; identical to SEQ ID NO: 3318
  source 1..76: mol_type = other RNA
  modified_base 1: mod_base = OTHER; note = 2'-Omethylcytosine
  modified_base 18: mod_base = OTHER; note = 2'-Omethylguanosine
  modified_base 19: mod_base = OTHER; note = 2'-Omethylguanosine
  modified_base 73: mod_base = OTHER; note = 2'-Omethyladenosine

SEQ ID NO: 6855 - RNA, 85 nt, synthetic construct; identical to SEQ ID NO: 3288
  source 1..85: mol_type = other RNA
  modified_base 4: mod_base = OTHER; note = 2'-Omethylguanosine
  modified_base 24: mod_base = OTHER; note = 2'-fluorocytosine
  modified_base 25: mod_base = OTHER; note = 2'-fluoroguanosine phosphorothiorate
  modified_base 30: mod_base = OTHER; note = 2'-fluoroadenosine
  modified_base 33: mod_base = OTHER; note = 2'-fluorouridine
  modified_base 40: mod_base = OTHER; note = 2'-Omethylcytosine
  modified_base 46: mod_base = OTHER; note = 2'-Omethyladenosine
  modified_base 48: mod_base = OTHER; note = 2'-Omethyladenosine
  modified_base 56: mod_base = OTHER; note = Guanosine phosphorothiorate
  modified_base 59: mod_base = OTHER; note = 2'-fluorouridine
  modified_base 71: mod_base = OTHER; note = 2'-fluorocytosine
  modified_base 80: mod_base = OTHER; note = Guanosine phosphorothiorate
  modified_base 84: mod_base = OTHER; note = Cytosine phosphorothiorate

SEQ ID NO: 6856 - RNA, 75 nt, synthetic construct; identical to SEQ ID NO: 3311
  source 1..75: mol_type = other RNA
  modified_base 1: mod_base = OTHER; note = 2'-Omethylguanosine phosphorothiorate
  modified_base 2: mod_base = OTHER; note = 2'-Omethylguanosine phosphorothiorate
  modified_base 11: mod_base = OTHER; note = Uridine phosphorothiorate
  modified_base 12: mod_base = OTHER; note = 2'-fluoroguanosine
  modified_base 15: mod_base = OTHER; note = 2'-fluoroadenosine
  modified_base 18: mod_base = OTHER; note = 2'-fluoroguanosine
  modified_base 19: mod_base = OTHER; note = 2'-fluorouridine
  modified_base 23: mod_base = OTHER; note = 2'-fluorocytosine
  modified_base 28: mod_base = OTHER; note = 2'-fluorouridine
  modified_base 29: mod_base = OTHER; note = 2'-Omethylguanosine
  modified_base 44: mod_base = OTHER; note = 2'-fluorocytosine
  modified_base 59: mod_base = OTHER; note = 2'-fluorouridine
  modified_base 60: mod_base = OTHER; note = Cytosine phosphorothiorate
  modified_base 61: mod_base = OTHER; note = Uridine phosphorothiorate
  modified_base 65: mod_base = OTHER; note = Uridine phosphorothiorate
  modified_base 66: mod_base = OTHER; note = Guanosine phosphorothiorate
  modified_base 73: mod_base = OTHER; note = Cytosine phosphorothiorate
  modified_base 74: mod_base = OTHER; note = 2'-Omethylcytosine

SEQ ID NO: 6857 - RNA, 76 nt, synthetic construct; identical to SEQ ID NO: 625
  source 1..76: mol_type = other RNA
  modified_base 1: mod_base = OTHER; note = 2'-Omethylguanosine phosphorothiorate
  modified_base 2: mod_base = OTHER; note = 2'-Omethylguanosine
  modified_base 3: mod_base = OTHER; note = 2'-Omethylcytosine
  modified_base 10: mod_base = OTHER; note = 2'-Omethylguanosine
  modified_base 11: mod_base = OTHER; note = 2'-Omethylcytosine
  modified_base 12: mod_base = OTHER; note = 2'-Omethylguanosine
  modified_base 13: mod_base = OTHER; note = 2'-Omethylcytosine
  modified_base 14: mod_base = OTHER; note = 2'-Omethyladenosine
  modified_base 15: mod_base = OTHER; note = 2'-fluoroadenosine
  modified_base 16: mod_base = OTHER; note = 2'-Omethyluridine
  modified_base 17: mod_base = OTHER; note = 2'-Omethylguanosine
  modified_base 18: mod_base = OTHER; note = 2'-Omethylguanosine
  modified_base 19: mod_base = OTHER; note = 2'-fluoroadenosine
  modified_base 20: mod_base = OTHER; note = 2'-Omethyluridine
  modified_base 22: mod_base = OTHER; note = 2'-Omethylguanosine
  modified_base 23: mod_base = OTHER; note = 2'-Omethylcytosine
  modified_base 24: mod_base = OTHER; note = 2'-Omethylguanosine
  modified_base 25: mod_base = OTHER; note = 2'-Omethylcytosine
  modified_base 38: mod_base = OTHER; note = Adenosine phosphorothiorate
  modified_base 39: mod_base = OTHER; note = Uridine phosphorothiorate
  modified_base 40: mod_base = OTHER; note = 2'-fluorouridine
  modified_base 43: mod_base = OTHER; note = 2'-Omethyladenosine
  modified_base 44: mod_base = OTHER; note = 2'-Omethyladenosine
  modified_base 45: mod_base = OTHER; note = 2'-Omethylguanosine
  modified_base 46: mod_base = OTHER; note = 2'-fluoroguanosine
  modified_base 48: mod_base = OTHER; note = 2'-fluorouridine
  modified_base 49: mod_base = OTHER; note = 2'-Omethylcytosine
  modified_base 50: mod_base = OTHER; note = 2'-Omethylcytosine
  modified_base 54: mod_base = OTHER; note = Uridine phosphorothiorate
  modified_base 55: mod_base = OTHER; note = Uridine phosphorothiorate
  modified_base 56: mod_base = OTHER; note = 2'-Omethylcytosine
  modified_base 57: mod_base = OTHER; note = Guanosine phosphorothiorate
  modified_base 61: mod_base = OTHER; note = 2'-Omethylcytosine
  modified_base 62: mod_base = OTHER; note = 2'-Omethylcytosine
  modified_base 63: mod_base = OTHER; note = 2'-fluorocytosine
  modified_base 64: mod_base = OTHER; note = 2'-Omethylguanosine
  modified_base 65: mod_base = OTHER; note = 2'-Omethylguanosine
  modified_base 66: mod_base = OTHER; note = 2'-Omethylcytosine
  modified_base 67: mod_base = OTHER; note = 2'-Omethylguanosine
  modified_base 68: mod_base = OTHER; note = 2'-Omethylguanosine

SEQ ID NO: 6858 - RNA, 75 nt, synthetic construct; identical to SEQ ID NO: 1045
  source 1..75: mol_type = other RNA
  modified_base 1: mod_base = OTHER; note = 2'-Omethylguanosine phosphorothiorate
  modified_base 2: mod_base = OTHER; note = 2'-Omethylguanosine
  modified_base 46: mod_base = OTHER; note = 2'-fluoroadenosine
  modified_base 58: mod_base = OTHER; note = 2'-Omethylguanosine
  modified_base 74: mod_base = OTHER; note = Cytosine phosphorothiorate
  modified_base 75: mod_base = OTHER; note = 2'-Omethyladenosine

SEQ ID NO: 6859 - RNA, 76 nt, synthetic construct; identical to SEQ ID NO: 625
  source 1..76: mol_type = other RNA
  modified_base 1: mod_base = OTHER; note = 2'-Omethylguanosine phosphorothiorate
  modified_base 2: mod_base = OTHER; note = 2'-Omethylguanosine
  modified_base 3: mod_base = OTHER; note = 2'-Omethylcytosine
  modified_base 4: mod_base = OTHER; note = 2'-Omethyluridine
  modified_base 5: mod_base = OTHER; note = 2'-Omethylcytosine
  modified_base 6: mod_base = OTHER; note = 2'-Omethylcytosine
  modified_base 7: mod_base = OTHER; note = Guanosine phosphorothiorate
  modified_base 10: mod_base = OTHER; note = 2'-Omethylguanosine
  modified_base 11: mod_base = OTHER; note = 2'-Omethylcytosine
  modified_base 12: mod_base = OTHER; note = 2'-Omethylguanosine
  modified_base 15: mod_base = OTHER; note = 2'-Omethyladenosine
  modified_base 16: mod_base = OTHER; note = 2'-Omethyluridine
  modified_base 17: mod_base = OTHER; note = 2'-Omethylguanosine
  modified_base 18: mod_base = OTHER; note = 2'-fluoroguanosine phosphorothiorate
  modified_base 19: mod_base = OTHER; note = 2'-fluoroadenosine phosphorothiorate
  modified_base 20: mod_base = OTHER; note = Uridine phosphorothiorate
  modified_base 21: mod_base = OTHER; note = 2'-fluoroadenosine phosphorothiorate
  modified_base 23: mod_base = OTHER; note = 2'-Omethylcytosine
  modified_base 24: mod_base = OTHER; note = 2'-Omethylguanosine
  modified_base 25: mod_base = OTHER; note = 2'-Omethylcytosine
  modified_base 26: mod_base = OTHER; note = Adenosine phosphorothiorate
  modified_base 28: mod_base = OTHER; note = 2'-Omethyluridine
  modified_base 29: mod_base = OTHER; note = 2'-fluoroguanosine phosphorothiorate
  modified_base 30: mod_base = OTHER; note = 2'-Omethylguanosine phosphorothiorate
  modified_base 31: mod_base = OTHER; note = 2'-Omethyladenosine phosphorothiorate
  modified_base 32: mod_base = OTHER; note = 2'-Omethylcytosine phosphorothiorate
  modified_base 33: mod_base = OTHER; note = 2'-fluorouridine
  modified_base 34: mod_base = OTHER; note = 2'-Omethyluridine phosphorothiorate
  modified_base 35: mod_base = OTHER; note = 2'-Omethylcytosine phosphorothiorate
  modified_base 37: mod_base = OTHER; note = Adenosine phosphorothiorate
  modified_base 38: mod_base = OTHER; note = Adenosine phosphorothiorate
  modified_base 39: mod_base = OTHER; note = 2'-Omethyluridine phosphorothiorate
  modified_base 40: mod_base = OTHER; note = 2'-Omethyluridine
  modified_base 41: mod_base = OTHER; note = 2'-fluorocytosine
  modified_base 44: mod_base = OTHER; note = 2'-Omethyladenosine
  modified_base 48: mod_base = OTHER; note = 2'-fluorouridine
  modified_base 49: mod_base = OTHER; note = 2'-Omethylcytosine
  modified_base 50: mod_base = OTHER; note = 2'-Omethylcytosine
  modified_base 51: mod_base = OTHER; note = 2'-Omethylguanosine phosphorothiorate
  modified_base 52: mod_base = OTHER; note = 2'-Omethylguanosine
  modified_base 53: mod_base = OTHER; note = 2'-Omethylguanosine phosphorothiorate
  modified_base 54: mod_base = OTHER; note = 2'-Omethyluridine
  modified_base 55: mod_base = OTHER; note = Uridine phosphorothiorate
  modified_base 56: mod_base = OTHER; note = 2'-Omethylcytosine
  modified_base 59: mod_base = OTHER; note = 2'-Omethylguanosine
  modified_base 60: mod_base = OTHER; note = 2'-Omethyluridine phosphorothiorate
  modified_base 62: mod_base = OTHER; note = 2'-Omethylcytosine
  modified_base 63: mod_base = OTHER; note = 2'-fluorocytosine
  modified_base 65: mod_base = OTHER; note = 2'-Omethylguanosine phosphorothiorate
  modified_base 66: mod_base = OTHER; note = 2'-Omethylcytosine
  modified_base 67: mod_base = OTHER; note = 2'-fluoroguanosine
  modified_base 68: mod_base = OTHER; note = 2'-Omethylguanosine
  modified_base 69: mod_base = OTHER; note = 2'-fluoroadenosine
  modified_base 70: mod_base = OTHER; note = 2'-fluoroguanosine
  modified_base 72: mod_base = OTHER; note = 2'-Omethylcytosine phosphorothiorate
  modified_base 73: mod_base = OTHER; note = 2'-fluoroguanosine phosphorothiorate
  modified_base 74: mod_base = OTHER; note = 2'-fluorocytosine phosphorothiorate
  modified_base 75: mod_base = OTHER; note = 2'-fluorocytosine phosphorothiorate
  modified_base 76: mod_base = OTHER; note = 2'-Omethyladenosine

SEQ ID NO: 6860 - RNA, 85 nt, synthetic construct; identical to SEQ ID NO: 3297
  source 1..85: mol_type = other RNA
  modified_base 1: mod_base = OTHER; note = 2'-Omethylguanosine
  modified_base 17: mod_base = OTHER; note = 2'-Omethylguanosine
  modified_base 18: mod_base = OTHER; note = 2'-Omethylguanosine
  modified_base 33: mod_base = OTHER; note = 2'-fluorouridine
  modified_base 34: mod_base = OTHER; note = 2'-Omethyluridine
  modified_base 35: mod_base = OTHER; note = Cytosine phosphorothiorate
  modified_base 37: mod_base = OTHER; note = Adenosine phosphorothiorate
  modified_base 38: mod_base = OTHER; note = Adenosine phosphorothiorate
  modified_base 41: mod_base = OTHER; note = 2'-fluorocytosine
  modified_base 42: mod_base = OTHER; note = 2'-Omethyladenosine
  modified_base 43: mod_base = OTHER; note = 2'-Omethyladenosine
  modified_base 44: mod_base = OTHER; note = 2'-fluorouridine
  modified_base 59: mod_base = OTHER; note = 2'-Omethylcytosine
  modified_base 61: mod_base = OTHER; note = 2'-Omethylguanosine
  modified_base 82: mod_base = OTHER; note = 2'-Omethylguanosine

SEQ ID NO: 6861 - RNA, 85 nt, synthetic construct; identical to SEQ ID NO: 3286
  source 1..85: mol_type = other RNA
  modified_base 1: mod_base = OTHER; note = 2'-Omethylcytosine
  modified_base 13: mod_base = OTHER; note = 2'-Omethyladenosine
  modified_base 28: mod_base = OTHER; note = 2'-fluoroguanosine
  modified_base 30: mod_base = OTHER; note = 2'-fluoroadenosine
  modified_base 44: mod_base = OTHER; note = 2'-Omethylguanosine
  modified_base 49: mod_base = OTHER; note = Uridine phosphorothiorate
  modified_base 54: mod_base = OTHER; note = 2'-fluorocytosine
  modified_base 72: mod_base = OTHER; note = 2'-fluorocytosine
  modified_base 84: mod_base = OTHER; note = 2'-fluorocytosine
  modified_base 85: mod_base = OTHER; note = 2'-Omethyladenosine

SEQ ID NO: 6862 - RNA, 76 nt, synthetic construct; identical to SEQ ID NO: 625
  source 1..76: mol_type = other RNA
  modified_base 44: mod_base = OTHER; note = 2'-Omethyladenosine
  modified_base 45: mod_base = OTHER; note = 2'-Omethylguanosine
  modified_base 46: mod_base = OTHER; note = 2'-Omethylguanosine
  modified_base 54: mod_base = OTHER; note = Uridine phosphorothiorate
  modified_base 55: mod_base = OTHER; note = Uridine phosphorothiorate
  modified_base 56: mod_base = OTHER; note = Cytosine phosphorothiorate
  modified_base 57: mod_base = OTHER; note = Guanosine phosphorothiorate

SEQ ID NO: 6863 - RNA, 75 nt, synthetic construct; identical to SEQ ID NO: 3336
  source 1..75: mol_type = other RNA
  modified_base 1: mod_base = OTHER; note = 2'-Omethylcytosine phosphorothiorate
  modified_base 2: mod_base = OTHER; note = 2'-fluorocytosine
  modified_base 4: mod_base = OTHER; note = 2'-Omethylguanosine phosphorothiorate
  modified_base 9: mod_base = OTHER; note = Guanosine phosphorothiorate
  modified_base 13: mod_base = OTHER; note = Adenosine phosphorothiorate
  modified_base 16: mod_base = OTHER; note = 2'-Omethylcytosine
  modified_base 20: mod_base = OTHER; note = 2'-fluoroadenosine
  modified_base 21: mod_base = OTHER; note = 2'-fluoroguanosine
  modified_base 22: mod_base = OTHER; note = 2'-Omethyladenosine
  modified_base 27: mod_base = OTHER; note = 2'-Omethylcytosine phosphorothiorate
  modified_base 39: mod_base = OTHER; note = 2'-Omethylcytosine
  modified_base 40: mod_base = OTHER; note = Uridine phosphorothiorate
  modified_base 48: mod_base = OTHER; note = 2'-fluorocytosine
  modified_base 49: mod_base = OTHER; note = 2'-fluoroadenosine
  modified_base 53: mod_base = OTHER; note = 2'-Omethyluridine phosphorothiorate
  modified_base 55: mod_base = OTHER; note = 2'-Omethylcytosine
  modified_base 61: mod_base = OTHER; note = 2'-Omethylcytosine phosphorothiorate
  modified_base 72: mod_base = OTHER; note = Guanosine phosphorothiorate
  modified_base 73: mod_base = OTHER; note = Cytosine phosphorothiorate
  modified_base 74: mod_base = OTHER; note = Cytosine phosphorothiorate

SEQ ID NO: 6864 - RNA, 76 nt, synthetic construct; identical to SEQ ID NO: 625
  source 1..76: mol_type = other RNA
  modified_base 1: mod_base = OTHER; note = 2'-Omethylguanosine phosphorothiorate
  modified_base 2: mod_base = OTHER; note = 2'-Omethylguanosine
  modified_base 3: mod_base = OTHER; note = 2'-Omethylcytosine
  modified_base 4: mod_base = OTHER; note = 2'-Omethyluridine
  modified_base 5: mod_base = OTHER; note = 2'-Omethylcytosine
  modified_base 6: mod_base = OTHER; note = 2'-Omethylcytosine
  modified_base 10: mod_base = OTHER; note = 2'-Omethylguanosine
  modified_base 11: mod_base = OTHER; note = 2'-Omethylcytosine
  modified_base 12: mod_base = OTHER; note = 2'-Omethylguanosine
  modified_base 13: mod_base = OTHER; note = 2'-Omethylcytosine
  modified_base 14: mod_base = OTHER; note = 2'-Omethyladenosine
  modified_base 15: mod_base = OTHER; note = 2'-fluoroadenosine
  modified_base 16: mod_base = OTHER; note = 2'-Omethyluridine
  modified_base 17: mod_base = OTHER; note = 2'-Omethylguanosine
  modified_base 18: mod_base = OTHER; note = 2'-Omethylguanosine
  modified_base 19: mod_base = OTHER; note = 2'-fluoroadenosine
  modified_base 20: mod_base = OTHER; note = 2'-Omethyluridine
  modified_base 21: mod_base = OTHER; note = 2'-fluoroadenosine
  modified_base 22: mod_base = OTHER; note = 2'-Omethylguanosine
  modified_base 23: mod_base = OTHER; note = 2'-Omethylcytosine
  modified_base 24: mod_base = OTHER; note = 2'-Omethylguanosine
  modified_base 25: mod_base = OTHER; note = 2'-Omethylcytosine
  modified_base 38: mod_base = OTHER; note = Adenosine phosphorothiorate
  modified_base 39: mod_base = OTHER; note = Uridine phosphorothiorate
  modified_base 40: mod_base = OTHER; note = 2'-fluorouridine
  modified_base 43: mod_base = OTHER; note = 2'-Omethyladenosine
  modified_base 44: mod_base = OTHER; note = 2'-Omethyladenosine
  modified_base 45: mod_base = OTHER; note = 2'-Omethylguanosine
  modified_base 46: mod_base = OTHER; note = 2'-fluoroguanosine
  modified_base 48: mod_base = OTHER; note = 2'-fluorouridine
  modified_base 49: mod_base = OTHER; note = 2'-Omethylcytosine
  modified_base 50: mod_base = OTHER; note = 2'-Omethylcytosine
  modified_base 51: mod_base = OTHER; note = 2'-Omethylguanosine
  modified_base 52: mod_base = OTHER; note = 2'-Omethylguanosine
  modified_base 53: mod_base = OTHER; note = 2'-Omethylguanosine
  modified_base 54: mod_base = OTHER; note = 2'-Omethyluridine
  modified_base 61: mod_base = OTHER; note = 2'-Omethylcytosine
  modified_base 62: mod_base = OTHER; note = 2'-Omethylcytosine
  modified_base 63: mod_base = OTHER; note = 2'-fluorocytosine
  modified_base 64: mod_base = OTHER; note = 2'-Omethylguanosine
  modified_base 65: mod_base = OTHER; note = 2'-Omethylguanosine
  modified_base 66: mod_base = OTHER; note = 2'-Omethylcytosine
  modified_base 67: mod_base = OTHER; note = 2'-Omethylguanosine
  modified_base 68: mod_base = OTHER; note = 2'-Omethylguanosine
  modified_base 69: mod_base = OTHER; note = 2'-fluoroadenosine
  modified_base 70: mod_base = OTHER; note = 2'-fluoroguanosine

SEQ ID NO: 6865 - RNA, 76 nt, synthetic construct; identical to SEQ ID NO: 625
  source 1..76: mol_type = other RNA
  modified_base 1: mod_base = OTHER; note = 2'-Omethylguanosine phosphorothiorate
  modified_base 2: mod_base = OTHER; note = 2'-Omethylguanosine
  modified_base 3: mod_base = OTHER; note = 2'-Omethylcytosine
  modified_base 4: mod_base = OTHER; note = 2'-Omethyluridine
  modified_base 5: mod_base = OTHER; note = 2'-Omethylcytosine
  modified_base 6: mod_base = OTHER; note = 2'-Omethylcytosine
  modified_base 16: mod_base = OTHER; note = 2'-Omethyluridine
  modified_base 17: mod_base = OTHER; note = 2'-Omethylguanosine
  modified_base 18: mod_base = OTHER; note = 2'-Omethylguanosine
  modified_base 20: mod_base = OTHER; note = 2'-Omethyluridine
  modified_base 22: mod_base = OTHER; note = 2'-Omethylguanosine
  modified_base 23: mod_base = OTHER; note = 2'-Omethylcytosine
  modified_base 24: mod_base = OTHER; note = 2'-Omethylguanosine
  modified_base 25: mod_base = OTHER; note = 2'-Omethylcytosine
  modified_base 33: mod_base = OTHER; note = 2'-fluorouridine
  modified_base 35: mod_base = OTHER; note = Cytosine phosphorothiorate
  modified_base 37: mod_base = OTHER; note = Adenosine phosphorothiorate
  modified_base 38: mod_base = OTHER; note = Adenosine phosphorothiorate
  modified_base 41: mod_base = OTHER; note = 2'-Omethylcytosine
  modified_base 42: mod_base = OTHER; note = 2'-Omethyladenosine
  modified_base 43: mod_base = OTHER; note = 2'-Omethyladenosine
  modified_base 44: mod_base = OTHER; note = 2'-Omethyladenosine
  modified_base 49: mod_base = OTHER; note = 2'-Omethylcytosine
  modified_base 50: mod_base = OTHER; note = 2'-Omethylcytosine
  modified_base 52: mod_base = OTHER; note = 2'-Omethylguanosine
  modified_base 54: mod_base = OTHER; note = 2'-Omethyluridine
  modified_base 55: mod_base = OTHER; note = Uridine phosphorothiorate
  modified_base 56: mod_base = OTHER; note = 2'-Omethylcytosine
  modified_base 57: mod_base = OTHER; note = 2'-fluoroguanosine
  modified_base 59: mod_base = OTHER; note = 2'-Omethylguanosine
  modified_base 61: mod_base = OTHER; note = 2'-Omethylcytosine
  modified_base 62: mod_base = OTHER; note = 2'-Omethylcytosine
  modified_base 63: mod_base = OTHER; note = 2'-fluorocytosine
  modified_base 64: mod_base = OTHER; note = 2'-Omethylguanosine
  modified_base 65: mod_base = OTHER; note = 2'-Omethylguanosine
  modified_base 73: mod_base = OTHER; note = 2'-Omethylguanosine

SEQ ID NO: 6866 - RNA, 76 nt, synthetic construct; identical to SEQ ID NO: 625
  source 1..76: mol_type = other RNA
  modified_base 4: mod_base = OTHER; note = 2'-Omethyluridine phosphorothiorate
  modified_base 7: mod_base = OTHER; note = Guanosine phosphorothiorate
  modified_base 10: mod_base = OTHER; note = 2'-Omethylguanosine
  modified_base 11: mod_base = OTHER; note = 2'-fluorocytosine
  modified_base 12: mod_base = OTHER; note = 2'-Omethylguanosine
  modified_base 13: mod_base = OTHER; note = 2'-Omethylcytosine phosphorothiorate
  modified_base 14: mod_base = OTHER; note = 2'-Omethyladenosine
  modified_base 15: mod_base = OTHER; note = Adenosine phosphorothiorate
  modified_base 16: mod_base = OTHER; note = 2'-Omethyluridine
  modified_base 18: mod_base = OTHER; note = 2'-fluoroguanosine
  modified_base 20: mod_base = OTHER; note = 2'-Omethyluridine phosphorothiorate
  modified_base 25: mod_base = OTHER; note = 2'-fluorocytosine phosphorothiorate
  modified_base 26: mod_base = OTHER; note = 2'-fluoroadenosine
  modified_base 29: mod_base = OTHER; note = Guanosine phosphorothiorate
  modified_base 33: mod_base = OTHER; note = Uridine phosphorothiorate
  modified_base 34: mod_base = OTHER; note = 2'-Omethyluridine
  modified_base 40: mod_base = OTHER; note = Uridine phosphorothiorate
  modified_base 41: mod_base = OTHER; note = 2'-fluorocytosine
  modified_base 42: mod_base = OTHER; note = 2'-fluoroadenosine phosphorothiorate
  modified_base 43: mod_base = OTHER; note = 2'-fluoroadenosine
  modified_base 44: mod_base = OTHER; note = Adenosine phosphorothiorate
  modified_base 45: mod_base = OTHER; note = 2'-fluoroguanosine phosphorothiorate
  modified_base 46: mod_base = OTHER; note = 2'-fluoroguanosine
  modified_base 49: mod_base = OTHER; note = 2'-fluorocytosine
  modified_base 53: mod_base = OTHER; note = 2'-fluoroguanosine
  modified_base 59: mod_base = OTHER; note = 2'-fluoroguanosine
  modified_base 62: mod_base = OTHER; note = 2'-Omethylcytosine phosphorothiorate
  modified_base 64: mod_base = OTHER; note = 2'-fluoroguanosine
  modified_base 69: mod_base = OTHER; note = 2'-Omethyladenosine
  modified_base 70: mod_base = OTHER; note = 2'-Omethylguanosine
  modified_base 71: mod_base = OTHER; note = 2'-Omethyluridine
  modified_base 73: mod_base = OTHER; note = 2'-fluoroguanosine
  modified_base 75: mod_base = OTHER; note = Cytosine phosphorothiorate

SEQ ID NO: 6867 - RNA, 86 nt, synthetic construct; identical to SEQ ID NO: 3290
  source 1..86: mol_type = other RNA
  modified_base 75: mod_base = OTHER; note = 2'-Omethylcytosine
  modified_base 83: mod_base = OTHER; note = 2'-Omethyladenosine

SEQ ID NO: 6868 - RNA, 75 nt, synthetic construct; identical to SEQ ID NO: 3311
  source 1..75: mol_type = other RNA
  modified_base 1: mod_base = OTHER; note = 2'-Omethylguanosine phosphorothiorate
  modified_base 2: mod_base = OTHER; note = 2'-Omethylguanosine
  modified_base 14: mod_base = OTHER; note = Adenosine phosphorothiorate
  modified_base 21: mod_base = OTHER; note = 2'-fluoroadenosine
  modified_base 36: mod_base = OTHER; note = 2'-fluoroadenosine
  modified_base 37: mod_base = OTHER; note = 2'-Omethyladenosine
  modified_base 47: mod_base = OTHER; note = 2'-fluorouridine
  modified_base 50: mod_base = OTHER; note = Guanosine phosphorothiorate
  modified_base 60: mod_base = OTHER; note = Cytosine phosphorothiorate
  modified_base 64: mod_base = OTHER; note = 2'-fluoroguanosine
  modified_base 67: mod_base = OTHER; note = Guanosine phosphorothiorate
  modified_base 71: mod_base = OTHER; note = 2'-fluorocytosine phosphorothiorate
  modified_base 72: mod_base = OTHER; note = Uridine phosphorothiorate
  modified_base 73: mod_base = OTHER; note = Cytosine phosphorothiorate
  modified_base 74: mod_base = OTHER; note = 2'-fluorocytosine phosphorothiorate
  modified_base 75: mod_base = OTHER; note = 2'-Omethyladenosine

SEQ ID NO: 6869 - RNA, 85 nt, synthetic construct; identical to SEQ ID NO: 3310
  source 1..85: mol_type = other RNA
  modified_base 1: mod_base = OTHER; note = 2'-Omethylcytosine phosphorothiorate
  modified_base 30: mod_base = OTHER; note = 2'-fluoroadenosine
  modified_base 43: mod_base = OTHER; note = 2'-Omethyluridine
  modified_base 57: mod_base = OTHER; note = 2'-Omethylcytosine
  modified_base 66: mod_base = OTHER; note = Guanosine phosphorothiorate
  modified_base 72: mod_base = OTHER; note = Cytosine phosphorothiorate

SEQ ID NO: 6870 - RNA, 85 nt, synthetic construct; identical to SEQ ID NO: 3317
  source 1..85: mol_type = other RNA
  modified_base 1: mod_base = OTHER; note = 2'-Omethylguanosine phosphorothiorate
  modified_base 2: mod_base = OTHER; note = 2'-Omethylcytosine phosphorothiorate
  modified_base 4: mod_base = OTHER; note = Guanosine phosphorothiorate
  modified_base 14: mod_base = OTHER; note = 2'-fluoroadenosine
  modified_base 19: mod_base = OTHER; note = 2'-fluorouridine
  modified_base 23: mod_base = OTHER; note = 2'-fluoroguanosine
  modified_base 24: mod_base = OTHER; note = 2'-fluoroguanosine phosphorothiorate
  modified_base 27: mod_base = OTHER; note = 2'-fluorouridine
  modified_base 29: mod_base = OTHER; note = 2'-fluoroguanosine
  modified_base 33: mod_base = OTHER; note = 2'-fluorouridine
  modified_base 37: mod_base = OTHER; note = Adenosine phosphorothiorate
  modified_base 44: mod_base = OTHER; note = 2'-fluorouridine
  modified_base 47: mod_base = OTHER; note = Guanosine phosphorothiorate
  modified_base 54: mod_base = OTHER; note = 2'-Omethylcytosine
  modified_base 56: mod_base = OTHER; note = 2'-Omethylguanosine phosphorothiorate
  modified_base 60: mod_base = OTHER; note = 2'-fluoroadenosine phosphorothiorate
  modified_base 72: mod_base = OTHER; note = Uridine phosphorothiorate
  modified_base 82: mod_base = OTHER; note = Guanosine phosphorothiorate
  modified_base 83: mod_base = OTHER; note = 2'-fluorocytosine phosphorothiorate

SEQ ID NO: 6871 - RNA, 75 nt, synthetic construct; identical to SEQ ID NO: 3311
  source 1..75: mol_type = other RNA
  modified_base 1: mod_base = OTHER; note = 2'-Omethylguanosine phosphorothiorate
  modified_base 2: mod_base = OTHER; note = 2'-Omethylguanosine phosphorothiorate
  modified_base 12: mod_base = OTHER; note = Guanosine phosphorothiorate
  modified_base 19: mod_base = OTHER; note = 2'-Omethyluridine phosphorothiorate
  modified_base 51: mod_base = OTHER; note = 2'-fluoroadenosine
  modified_base 58: mod_base = OTHER; note = Guanosine phosphorothiorate
  modified_base 59: mod_base = OTHER; note = 2'-fluorouridine
  modified_base 69: mod_base = OTHER; note = 2'-fluoroadenosine

SEQ ID NO: 6872 - RNA, 85 nt, synthetic construct; identical to SEQ ID NO: 3297
  source 1..85: mol_type = other RNA
  modified_base 1: mod_base = OTHER; note = 2'-Omethylguanosine
  modified_base 13: mod_base = OTHER; note = 2'-Omethylguanosine
  modified_base 14: mod_base = OTHER; note = 2'-Omethyladenosine
  modified_base 15: mod_base = OTHER; note = 2'-Omethylguanosine
  modified_base 16: mod_base = OTHER; note = 2'-Omethyluridine
  modified_base 17: mod_base = OTHER; note = 2'-Omethylguanosine
  modified_base 18: mod_base = OTHER; note = 2'-Omethylguanosine
  modified_base 19: mod_base = OTHER; note = Uridine phosphorothiorate
  modified_base 20: mod_base = OTHER; note = 2'-Omethyluridine
  modified_base 21: mod_base = OTHER; note = Adenosine phosphorothiorate
  modified_base 25: mod_base = OTHER; note = 2'-Omethylcytosine
  modified_base 33: mod_base = OTHER; note = 2'-fluorouridine
  modified_base 34: mod_base = OTHER; note = 2'-Omethyluridine
  modified_base 35: mod_base = OTHER; note = Cytosine phosphorothiorate
  modified_base 37: mod_base = OTHER; note = Adenosine phosphorothiorate
  modified_base 38: mod_base = OTHER; note = Adenosine phosphorothiorate
  modified_base 58: mod_base = OTHER; note = 2'-Omethylguanosine
  modified_base 59: mod_base = OTHER; note = 2'-Omethylcytosine
  modified_base 61: mod_base = OTHER; note = 2'-Omethylguanosine
  modified_base 63: mod_base = OTHER; note = Uridine phosphorothiorate
  modified_base 64: mod_base = OTHER; note = Uridine phosphorothiorate
  modified_base 65: mod_base = OTHER; note = 2'-Omethylcytosine
  modified_base 66: mod_base = OTHER; note = Guanosine phosphorothiorate
  modified_base 67: mod_base = OTHER; note = Adenosine phosphorothiorate
  modified_base 68: mod_base = OTHER; note = 2'-Omethyladenosine
  modified_base 70: mod_base = OTHER; note = 2'-Omethylcytosine
  modified_base 74: mod_base = OTHER; note = 2'-Omethylcytosine
  modified_base 82: mod_base = OTHER; note = 2'-Omethylguanosine

SEQ ID NO: 6873 - RNA, 75 nt, synthetic construct; identical to SEQ ID NO: 1045
  source 1..75: mol_type = other RNA
  modified_base 1: mod_base = OTHER; note = 2'-Omethylguanosine phosphorothiorate
  modified_base 12: mod_base = OTHER; note = 2'-Omethylguanosine
  modified_base 23: mod_base = OTHER; note = Cytosine phosphorothiorate
  modified_base 24: mod_base = OTHER; note = 2'-fluoroadenosine
  modified_base 32: mod_base = OTHER; note = 2'-Omethylcytosine phosphorothiorate
  modified_base 36: mod_base = OTHER; note = 2'-fluoroadenosine
  modified_base 44: mod_base = OTHER; note = 2'-fluorocytosine
  modified_base 61: mod_base = OTHER; note = 2'-fluorouridine

SEQ ID NO: 6874 - RNA, 76 nt, synthetic construct; identical to SEQ ID NO: 3329
  source 1..76: mol_type = other RNA
  modified_base 1: mod_base = OTHER; note = 2'-Omethylguanosine
  modified_base 61: mod_base = OTHER; note = 2'-Omethylcytosine
  modified_base 62: mod_base = OTHER; note = 2'-Omethylcytosine
  modified_base 64: mod_base = OTHER; note = 2'-Omethylguanosine
  modified_base 65: mod_base = OTHER; note = 2'-Omethylguanosine
  modified_base 66: mod_base = OTHER; note = 2'-Omethyluridine
  modified_base 67: mod_base = OTHER; note = 2'-Omethylguanosine
  modified_base 68: mod_base = OTHER; note = 2'-Omethylguanosine
  modified_base 69: mod_base = OTHER; note = 2'-Omethylguanosine
  modified_base 70: mod_base = OTHER; note = 2'-fluoroguanosine
  modified_base 71: mod_base = OTHER; note = 2'-Omethyluridine
  modified_base 72: mod_base = OTHER; note = 2'-Omethylcytosine
  modified_base 73: mod_base = OTHER; note = 2'-Omethylguanosine

SEQ ID NO: 6875 - RNA, 74 nt, synthetic construct; identical to SEQ ID NO: 3293
  source 1..74: mol_type = other RNA
  modified_base 1: mod_base = OTHER; note = 2'-fluoroadenosine phosphorothiorate
  modified_base 2: mod_base = OTHER; note = Cytosine phosphorothiorate
  modified_base 3: mod_base = OTHER; note = Cytosine phosphorothiorate
  modified_base 4: mod_base = OTHER; note = Uridine phosphorothiorate
  modified_base 6: mod_base = OTHER; note = Guanosine phosphorothiorate
  modified_base 7: mod_base = OTHER; note = Uridine phosphorothiorate
  modified_base 8: mod_base = OTHER; note = Guanosine phosphorothiorate
  modified_base 9: mod_base = OTHER; note = 2'-fluoroguanosine
  modified_base 11: mod_base = OTHER; note = 2'-Omethylguanosine
  modified_base 24: mod_base = OTHER; note = 2'-fluoroguanosine
  modified_base 25: mod_base = OTHER; note = 2'-fluorouridine phosphorothiorate
  modified_base 34: mod_base = OTHER; note = 2'-fluoroadenosine
  modified_base 40: mod_base = OTHER; note = 2'-fluoroguanosine
  modified_base 42: mod_base = OTHER; note = Adenosine phosphorothiorate
  modified_base 46: mod_base = OTHER; note = Uridine phosphorothiorate
  modified_base 48: mod_base = OTHER; note = Cytosine phosphorothiorate
  modified_base 51: mod_base = OTHER; note = 2'-fluoroguanosine
  modified_base 62: mod_base = OTHER; note = 2'-fluoroguanosine
  modified_base 63: mod_base = OTHER; note = Uridine phosphorothiorate
  modified_base 73: mod_base = OTHER; note = 2'-Omethylcytosine phosphorothiorate
  modified_base 74: mod_base = OTHER; note = 2'-fluoroadenosine

SEQ ID NO: 6876 - RNA, 85 nt, synthetic construct; identical to SEQ ID NO: 3288
  source 1..85: mol_type = other RNA
  modified_base 1: mod_base = OTHER; note = 2'-Omethylcytosine
  modified_base 11: mod_base = OTHER; note = Cytosine phosphorothiorate
  modified_base 21: mod_base = OTHER; note = 2'-fluoroadenosine
  modified_base 25: mod_base = OTHER; note = 2'-fluoroguanosine
  modified_base 32: mod_base = OTHER; note = 2'-fluorouridine
  modified_base 36: mod_base = OTHER; note = 2'-fluoroguanosine phosphorothiorate
  modified_base 39: mod_base = OTHER; note = Cytosine phosphorothiorate
  modified_base 50: mod_base = OTHER; note = 2'-Omethyladenosine
  modified_base 55: mod_base = OTHER; note = 2'-Omethylcytosine
  modified_base 73: mod_base = OTHER; note = 2'-Omethyladenosine phosphorothiorate
  modified_base 82: mod_base = OTHER; note = 2'-Omethyladenosine
  modified_base 84: mod_base = OTHER; note = Cytosine phosphorothiorate

SEQ ID NO: 6877 - RNA, 85 nt, synthetic construct; identical to SEQ ID NO: 3317
  source 1..85: mol_type = other RNA
  modified_base 1: mod_base = OTHER; note = 2'-Omethylguanosine phosphorothiorate
  modified_base 2: mod_base = OTHER; note = 2'-Omethylcytosine
  modified_base 12: mod_base = OTHER; note = 2'-Omethylcytosine phosphorothiorate
  modified_base 18: mod_base = OTHER; note = 2'-Omethylguanosine phosphorothiorate
  modified_base 31: mod_base = OTHER; note = 2'-fluoroadenosine
  modified_base 44: mod_base = OTHER; note = 2'-Omethyluridine phosphorothiorate
  modified_base 52: mod_base = OTHER; note = 2'-Omethylcytosine
  modified_base 58: mod_base = OTHER; note = 2'-Omethylguanosine phosphorothiorate
  modified_base 61: mod_base = OTHER; note = 2'-Omethylguanosine
  modified_base 80: mod_base = OTHER; note = 2'-Omethylguanosine

SEQ ID NO: 6878 - RNA, 76 nt, synthetic construct; identical to SEQ ID NO: 625
  source 1..76: mol_type = other RNA
  modified_base 1: mod_base = OTHER; note = 2'-Omethylguanosine phosphorothiorate
  modified_base 2: mod_base = OTHER; note = 2'-Omethylguanosine
  modified_base 3: mod_base = OTHER; note = 2'-Omethylcytosine
  modified_base 4: mod_base = OTHER; note = 2'-Omethyluridine
  modified_base 5: mod_base = OTHER; note = 2'-Omethylcytosine
  modified_base 6: mod_base = OTHER; note = 2'-Omethylcytosine
  modified_base 10: mod_base = OTHER; note = 2'-Omethylguanosine
  modified_base 11: mod_base = OTHER; note = 2'-Omethylcytosine
  modified_base 12: mod_base = OTHER; note = 2'-Omethylguanosine
  modified_base 13: mod_base = OTHER; note = 2'-Omethylcytosine
  modified_base 14: mod_base = OTHER; note = 2'-Omethyladenosine
  modified_base 15: mod_base = OTHER; note = 2'-Omethyladenosine
  modified_base 16: mod_base = OTHER; note = 2'-Omethyluridine
  modified_base 17: mod_base = OTHER; note = 2'-Omethylguanosine
  modified_base 18: mod_base = OTHER; note = 2'-Omethylguanosine
  modified_base 19: mod_base = OTHER; note = 2'-Omethyladenosine
  modified_base 20: mod_base = OTHER; note = 2'-Omethyluridine
  modified_base 49: mod_base = OTHER; note = 2'-Omethylcytosine
  modified_base 50: mod_base = OTHER; note = 2'-Omethylcytosine
  modified_base 51: mod_base = OTHER; note = 2'-Omethylguanosine
  modified_base 52: mod_base = OTHER; note = 2'-Omethylguanosine
  modified_base 53: mod_base = OTHER; note = 2'-Omethylguanosine
  modified_base 54: mod_base = OTHER; note = Uridine phosphorothiorate
  modified_base 55: mod_base = OTHER; note = Uridine phosphorothiorate
  modified_base 56: mod_base = OTHER; note = Cytosine phosphorothiorate
  modified_base 57: mod_base = OTHER; note = Guanosine phosphorothiorate
  modified_base 61: mod_base = OTHER; note = 2'-Omethylcytosine
  modified_base 62: mod_base = OTHER; note = 2'-Omethylcytosine
  modified_base 63: mod_base = OTHER; note = 2'-fluorocytosine
  modified_base 64: mod_base = OTHER; note = 2'-Omethylguanosine
  modified_base 65: mod_base = OTHER; note = 2'-Omethylguanosine
  modified_base 66: mod_base = OTHER; note = 2'-Omethylcytosine
  modified_base 67: mod_base = OTHER; note = 2'-Omethylguanosine
  modified_base 68: mod_base = OTHER; note = 2'-Omethylguanosine
  modified_base 69: mod_base = OTHER; note = 2'-fluoroadenosine
  modified_base 71: mod_base = OTHER; note = 2'-Omethyluridine

SEQ ID NO: 6879 - RNA, 76 nt, synthetic construct; identical to SEQ ID NO: 625
  source 1..76: mol_type = other RNA
  modified_base 1: mod_base = OTHER; note = 2'-Omethylguanosine phosphorothiorate
  modified_base 2: mod_base = OTHER; note = 2'-Omethylguanosine
  modified_base 3: mod_base = OTHER; note = 2'-Omethylcytosine
  modified_base 4: mod_base = OTHER; note = 2'-Omethyluridine
  modified_base 5: mod_base = OTHER; note = 2'-Omethylcytosine
  modified_base 6: mod_base = OTHER; note = 2'-Omethylcytosine
  modified_base 10: mod_base = OTHER; note = 2'-Omethylguanosine
  modified_base 11: mod_base = OTHER; note = 2'-Omethylcytosine
  modified_base 12: mod_base = OTHER; note = Guanosine phosphorothiorate
  modified_base 13: mod_base = OTHER; note = 2'-fluorocytosine
  modified_base 14: mod_base = OTHER; note = 2'-Omethyladenosine
  modified_base 15: mod_base = OTHER; note = 2'-fluoroadenosine
  modified_base 16: mod_base = OTHER; note = 2'-Omethyluridine
  modified_base 17: mod_base = OTHER; note = 2'-Omethylguanosine
  modified_base 18: mod_base = OTHER; note = 2'-Omethylguanosine
  modified_base 19: mod_base = OTHER; note = 2'-fluoroadenosine
  modified_base 20: mod_base = OTHER; note = 2'-Omethyluridine
  modified_base 21: mod_base = OTHER; note = 2'-fluoroadenosine
  modified_base 22: mod_base = OTHER; note = 2'-Omethylguanosine
  modified_base 23: mod_base = OTHER; note = 2'-Omethylcytosine
  modified_base 24: mod_base = OTHER; note = 2'-Omethylguanosine
  modified_base 25: mod_base = OTHER; note = Cytosine phosphorothiorate
  modified_base 29: mod_base = OTHER; note = 2'-Omethylguanosine
  modified_base 33: mod_base = OTHER; note = 2'-fluorouridine
  modified_base 35: mod_base = OTHER; note = Cytosine phosphorothiorate
  modified_base 37: mod_base = OTHER; note = Adenosine phosphorothiorate
  modified_base 38: mod_base = OTHER; note = Adenosine phosphorothiorate
  modified_base 40: mod_base = OTHER; note = 2'-fluorouridine
  modified_base 41: mod_base = OTHER; note = 2'-Omethylcytosine
  modified_base 42: mod_base = OTHER; note = 2'-Omethyladenosine
  modified_base 43: mod_base = OTHER; note = 2'-Omethyladenosine
  modified_base 44: mod_base = OTHER; note = Adenosine phosphorothiorate
  modified_base 45: mod_base = OTHER; note = 2'-O-(2-Methoxyethyl) guanosine
  modified_base 46: mod_base = OTHER; note = Guanosine phosphorothiorate
  modified_base 49: mod_base = OTHER; note = 2'-Omethylcytosine
  modified_base 50: mod_base = OTHER; note = 2'-Omethylcytosine
  modified_base 51: mod_base = OTHER; note = 2'-Omethylguanosine
  modified_base 52: mod_base = OTHER; note = 2'-fluoroguanosine
  modified_base 53: mod_base = OTHER; note = 2'-Omethylguanosine
  modified_base 54: mod_base = OTHER; note = 2'-Omethyluridine
  modified_base 55: mod_base = OTHER; note = Uridine phosphorothiorate
  modified_base 56: mod_base = OTHER; note = 2'-Omethylcytosine
  modified_base 57: mod_base = OTHER; note = 2'-Omethylguanosine
  modified_base 61: mod_base = OTHER; note = 2'-Omethylcytosine
  modified_base 62: mod_base = OTHER; note = 2'-Omethylcytosine
  modified_base 63: mod_base = OTHER; note = 2'-fluorocytosine
  modified_base 64: mod_base = OTHER; note = 2'-Omethylguanosine
  modified_base 65: mod_base = OTHER; note = 2'-Omethylguanosine
  modified_base 66: mod_base = OTHER; note = 2'-Omethylcytosine
  modified_base 67: mod_base = OTHER; note = 2'-Omethylguanosine
  modified_base 68: mod_base = OTHER; note = 2'-Omethylguanosine
  modified_base 69: mod_base = OTHER; note = 2'-Omethyladenosine
  modified_base 70: mod_base = OTHER; note = 2'-fluoroguanosine
  modified_base 71: mod_base = OTHER; note = 2'-Omethyluridine
  modified_base 73: mod_base = OTHER; note = 2'-Omethylguanosine
  modified_base 74: mod_base = OTHER; note = 2'-Omethylcytosine phosphorothiorate
  modified_base 75: mod_base = OTHER; note = 2'-fluorocytosine phosphorothiorate

SEQ ID NO: 6880 - RNA, 76 nt, synthetic construct; identical to SEQ ID NO: 625
  source 1..76: mol_type = other RNA
  modified_base 1: mod_base = OTHER; note = 2'-Omethylguanosine phosphorothiorate
  modified_base 2: mod_base = OTHER; note = 2'-Omethylguanosine
  modified_base 3: mod_base = OTHER; note = 2'-Omethylcytosine
  modified_base 4: mod_base = OTHER; note = 2'-Omethyluridine
  modified_base 5: mod_base = OTHER; note = 2'-Omethylcytosine
  modified_base 6: mod_base = OTHER; note = 2'-Omethylcytosine
  modified_base 14: mod_base = OTHER; note = 2'-Omethyladenosine
  modified_base 15: mod_base = OTHER; note = 2'-fluoroadenosine
  modified_base 16: mod_base = OTHER; note = 2'-Omethyluridine
  modified_base 17: mod_base = OTHER; note = 2'-Omethylguanosine
  modified_base 18: mod_base = OTHER; note = 2'-Omethylguanosine
  modified_base 19: mod_base = OTHER; note = 2'-fluoroadenosine
  modified_base 20: mod_base = OTHER; note = 2'-Omethyluridine
  modified_base 22: mod_base = OTHER; note = 2'-Omethylguanosine
  modified_base 23: mod_base = OTHER; note = 2'-Omethylcytosine
  modified_base 24: mod_base = OTHER; note = 2'-Omethylguanosine
  modified_base 25: mod_base = OTHER; note = 2'-Omethylcytosine
  modified_base 49: mod_base = OTHER; note = 2'-Omethylcytosine
  modified_base 50: mod_base = OTHER; note = 2'-Omethylcytosine
  modified_base 51: mod_base = OTHER; note = 2'-Omethylguanosine
  modified_base 52: mod_base = OTHER; note = 2'-Omethylguanosine
  modified_base 53: mod_base = OTHER; note = 2'-Omethylguanosine
  modified_base 54: mod_base = OTHER; note = 2'-Omethyluridine
  modified_base 56: mod_base = OTHER; note = 2'-Omethylcytosine
  modified_base 57: mod_base = OTHER; note = 2'-fluoroguanosine
  modified_base 59: mod_base = OTHER; note = 2'-Omethylguanosine
  modified_base 61: mod_base = OTHER; note = 2'-Omethylcytosine
  modified_base 62: mod_base = OTHER; note = 2'-Omethylcytosine
  modified_base 63: mod_base = OTHER; note = 2'-Omethylcytosine
  modified_base 64: mod_base = OTHER; note = 2'-Omethylguanosine
  modified_base 65: mod_base = OTHER; note = 2'-Omethylguanosine
  modified_base 66: mod_base = OTHER; note = 2'-Omethylcytosine
  modified_base 67: mod_base = OTHER; note = 2'-Omethylguanosine
  modified_base 68: mod_base = OTHER; note = 2'-Omethylguanosine
  modified_base 69: mod_base = OTHER; note = 2'-Omethyladenosine
  modified_base 73: mod_base = OTHER; note = 2'-Omethylguanosine

SEQ ID NO: 6881 - RNA, 75 nt, synthetic construct; identical to SEQ ID NO: 3306
  source 1..75: mol_type = other RNA
  modified_base 1: mod_base = OTHER; note = 2'-Omethylguanosine
  modified_base 2: mod_base = OTHER; note = 2'-Omethyladenosine
  modified_base 3: mod_base = OTHER; note = 2'-Omethylcytosine
  modified_base 4: mod_base = OTHER; note = 2'-Omethylcytosine
  modified_base 5: mod_base = OTHER; note = 2'-Omethyluridine
  modified_base 6: mod_base = OTHER; note = 2'-Omethylcytosine
  modified_base 60: mod_base = OTHER; note = 2'-Omethylcytosine
  modified_base 61: mod_base = OTHER; note = 2'-Omethyladenosine
  modified_base 62: mod_base = OTHER; note = 2'-fluorocytosine
  modified_base 63: mod_base = OTHER; note = 2'-Omethylguanosine
  modified_base 64: mod_base = OTHER; note = 2'-Omethyluridine
  modified_base 65: mod_base = OTHER; note = 2'-Omethylcytosine
  modified_base 66: mod_base = OTHER; note = 2'-Omethylguanosine
  modified_base 67: mod_base = OTHER; note = 2'-Omethylguanosine
  modified_base 72: mod_base = OTHER; note = 2'-Omethyladenosine

SEQ ID NO: 6882 - RNA, 76 nt, synthetic construct; identical to SEQ ID NO: 3675
  source 1..76: mol_type = other RNA
  modified_base 1: mod_base = OTHER; note = 2'-Omethylguanosine
  modified_base 14: mod_base = OTHER; note = 2'-Omethyladenosine
  modified_base 15: mod_base = OTHER; note = 2'-Omethyladenosine
  modified_base 16: mod_base = OTHER; note = 2'-Omethyluridine
  modified_base 17: mod_base = OTHER; note = 2'-Omethylguanosine
  modified_base 18: mod_base = OTHER; note = 2'-Omethylguanosine
  modified_base 19: mod_base = OTHER; note = Adenosine phosphorothiorate
  modified_base 20: mod_base = OTHER; note = 2'-Omethyluridine
  modified_base 21: mod_base = OTHER; note = Adenosine phosphorothiorate
  modified_base 33: mod_base = OTHER; note = 2'-fluorouridine
  modified_base 34: mod_base = OTHER; note = 2'-Omethyluridine
  modified_base 35: mod_base = OTHER; note = Cytosine phosphorothiorate
  modified_base 37: mod_base = OTHER; note = Adenosine phosphorothiorate
  modified_base 38: mod_base = OTHER; note = Adenosine phosphorothiorate
  modified_base 41: mod_base = OTHER; note = 2'-Omethylcytosine
  modified_base 42: mod_base = OTHER; note = 2'-Omethyladenosine
  modified_base 43: mod_base = OTHER; note = 2'-Omethylcytosine
  modified_base 44: mod_base = OTHER; note = 2'-Omethyladenosine
  modified_base 50: mod_base = OTHER; note = 2'-Omethylcytosine
  modified_base 52: mod_base = OTHER; note = 2'-Omethylguanosine
  modified_base 73: mod_base = OTHER; note = 2'-Omethylguanosine

SEQ ID NO: 6883 - RNA, 74 nt, synthetic construct; identical to SEQ ID NO: 3293
  source 1..74: mol_type = other RNA
  modified_base 1: mod_base = OTHER; note = 2'-Omethyladenosine
  modified_base 2: mod_base = OTHER; note = Cytosine phosphorothiorate
  modified_base 3: mod_base = OTHER; note = Cytosine phosphorothiorate
  modified_base 4: mod_base = OTHER; note = 2'-fluorouridine
  modified_base 6: mod_base = OTHER; note = 2'-fluoroguanosine
  modified_base 8: mod_base = OTHER; note = Guanosine phosphorothiorate
  modified_base 9: mod_base = OTHER; note = 2'-fluoroguanosine
  modified_base 12: mod_base = OTHER; note = 2'-fluorocytosine
  modified_base 21: mod_base = OTHER; note = 2'-fluorocytosine
  modified_base 26: mod_base = OTHER; note = 2'-fluorocytosine
  modified_base 29: mod_base = OTHER; note = Adenosine phosphorothiorate
  modified_base 40: mod_base = OTHER; note = 2'-fluoroguanosine
  modified_base 42: mod_base = OTHER; note = Adenosine phosphorothiorate
  modified_base 44: mod_base = OTHER; note = 2'-fluoroguanosine
  modified_base 48: mod_base = OTHER; note = Cytosine phosphorothiorate
  modified_base 50: mod_base = OTHER; note = Uridine phosphorothiorate
  modified_base 62: mod_base = OTHER; note = Guanosine phosphorothiorate
  modified_base 73: mod_base = OTHER; note = 2'-Omethylcytosine phosphorothiorate
  modified_base 74: mod_base = OTHER; note = 2'-Omethyladenosine

SEQ ID NO: 6884 - RNA, 76 nt, synthetic construct; identical to SEQ ID NO: 625
  source 1..76: mol_type = other RNA
  modified_base 1: mod_base = OTHER; note = 2'-Omethylguanosine phosphorothiorate
  modified_base 2: mod_base = OTHER; note = 2'-Omethylguanosine
  modified_base 3: mod_base = OTHER; note = 2'-Omethylcytosine
  modified_base 4: mod_base = OTHER; note = 2'-Omethyluridine
  modified_base 5: mod_base = OTHER; note = 2'-Omethylcytosine
  modified_base 6: mod_base = OTHER; note = 2'-Omethylcytosine
  modified_base 10: mod_base = OTHER; note = 2'-Omethylguanosine
  modified_base 11: mod_base = OTHER; note = 2'-Omethylcytosine
  modified_base 12: mod_base = OTHER; note = 2'-Omethylguanosine
  modified_base 13: mod_base = OTHER; note = 2'-Omethylcytosine
  modified_base 22: mod_base = OTHER; note = 2'-Omethylguanosine
  modified_base 23: mod_base = OTHER; note = 2'-Omethylcytosine
  modified_base 24: mod_base = OTHER; note = 2'-Omethylguanosine
  modified_base 25: mod_base = OTHER; note = 2'-Omethylcytosine
  modified_base 44: mod_base = OTHER; note = 2'-Omethyladenosine
  modified_base 45: mod_base = OTHER; note = 2'-Omethylguanosine
  modified_base 46: mod_base = OTHER; note = 2'-Omethylguanosine
  modified_base 49: mod_base = OTHER; note = 2'-Omethylcytosine
  modified_base 50: mod_base = OTHER; note = 2'-Omethylcytosine
  modified_base 51: mod_base = OTHER; note = 2'-Omethylguanosine
  modified_base 52: mod_base = OTHER; note = 2'-Omethylguanosine
  modified_base 53: mod_base = OTHER; note = 2'-Omethylguanosine
  modified_base 61: mod_base = OTHER; note = 2'-Omethylcytosine
  modified_base 62: mod_base = OTHER; note = 2'-Omethylcytosine
  modified_base 63: mod_base = OTHER; note = 2'-fluorocytosine
  modified_base 64: mod_base = OTHER; note = 2'-Omethylguanosine
  modified_base 65: mod_base = OTHER; note = 2'-Omethylguanosine
  modified_base 66: mod_base = OTHER; note = 2'-Omethylcytosine
  modified_base 67: mod_base = OTHER; note = 2'-Omethylguanosine
  modified_base 68: mod_base = OTHER; note = 2'-Omethylguanosine
  modified_base 69: mod_base = OTHER; note = 2'-fluoroadenosine
  modified_base 71: mod_base = OTHER; note = 2'-Omethyluridine

SEQ ID NO: 6885 - RNA, 86 nt, synthetic construct; identical to SEQ ID NO: 3290
  source 1..86: mol_type = other RNA
  modified_base 1: mod_base = OTHER; note = 2'-Omethyladenosine phosphorothiorate
  modified_base 2: mod_base = OTHER; note = 2'-Omethylcytosine phosphorothiorate
  modified_base 15: mod_base = OTHER; note = Guanosine phosphorothiorate
  modified_base 33: mod_base = OTHER; note = Uridine phosphorothiorate
  modified_base 34: mod_base = OTHER; note = 2'-fluorouridine
  modified_base 84: mod_base = OTHER; note = 2'-fluorocytosine phosphorothiorate
  modified_base 85: mod_base = OTHER; note = 2'-Omethylcytosine phosphorothiorate
  modified_base 86: mod_base = OTHER; note = 2'-Omethyladenosine

SEQ ID NO: 6886 - DNA, 76 bp, synthetic construct; identical to SEQ ID NO: 1924
  source 1..76: mol_type = other DNA
  modified_base 1: mod_base = OTHER; note = 2'-Omethylguanosine phosphorothiorate
  modified_base 2: mod_base = OTHER; note = 2'-Omethylguanosine phosphorothiorate
  modified_base 8: mod_base = OTHER; note = 2'-O-(2-Methoxyethyl) thymine
  modified_base 12: mod_base = OTHER; note = Guanosine phosphorothiorate
  modified_base 13: mod_base = OTHER; note = 2'-Omethylcytosine
  modified_base 15: mod_base = OTHER; note = Adenosine phosphorothiorate
  modified_base 16: mod_base = OTHER; note = 2'-O-(2-Methoxyethyl) thymine phosphorothiorate
  modified_base 18: mod_base = OTHER; note = Guanosine phosphorothiorate
  modified_base 19: mod_base = OTHER; note = 2'-O-(2-Methoxyethyl) adenosine
  modified_base 21: mod_base = OTHER; note = Adenosine phosphorothiorate
  modified_base 22: mod_base = OTHER; note = 2'-O-(2-Methoxyethyl) guanosine phosphorothiorate
  modified_base 23: mod_base = OTHER; note = 2'-O-(2-Methoxyethyl) 5-methylcytosine phosphorothiorate
  modified_base 24: mod_base = OTHER; note = 2'-fluoroguanosine phosphorothiorate
  modified_base 29: mod_base = OTHER; note = Guanosine phosphorothiorate
  modified_base 40: mod_base = OTHER; note = Uridine phosphorothiorate
  modified_base 41: mod_base = OTHER; note = 2'-O-(2-Methoxyethyl) 5-methylcytosine
  modified_base 43: mod_base = OTHER; note = Adenosine phosphorothiorate
  modified_base 44: mod_base = OTHER; note = 2'-O-(2-Methoxyethyl) adenosine phosphorothiorate
  modified_base 45: mod_base = OTHER; note = 2'-Omethylguanosine
  modified_base 48: mod_base = OTHER; note = Uridine phosphorothiorate
  modified_base 49: mod_base = OTHER; note = Cytosine phosphorothiorate
  modified_base 50: mod_base = OTHER; note = deoxycytosine phosphorothiorate
  modified_base 52: mod_base = OTHER; note = 2'-Omethylguanosine
  modified_base 53: mod_base = OTHER; note = Guanosine phosphorothiorate
  modified_base 55: mod_base = OTHER; note = Uridine phosphorothiorate
  modified_base 56: mod_base = OTHER; note = 2'-Omethylcytosine
  modified_base 58: mod_base = OTHER; note = Adenosine phosphorothiorate
  modified_base 63: mod_base = OTHER; note = 2'-O-(2-Methoxyethyl) 5-methylcytosine
  modified_base 65: mod_base = OTHER; note = 2'-O-(2-Methoxyethyl) guanosine
  modified_base 68: mod_base = OTHER; note = 2'-Omethylguanosine
  modified_base 69: mod_base = OTHER; note = 2'-O-(2-Methoxyethyl) adenosine
  modified_base 74: mod_base = OTHER; note = 2'-Omethylcytosine phosphorothiorate
  modified_base 75: mod_base = OTHER; note = Cytosine phosphorothiorate
  modified_base 76: mod_base = OTHER; note = 2'-Omethyladenosine
  misc_feature 1..25: note = RNA
  misc_feature 26: note = DNA
  misc_feature 27: note = RNA
  misc_feature 28: note = DNA
  misc_feature 29: note = RNA
  misc_feature 30: note = DNA
  misc_feature 31..38: note = RNA
  misc_feature 39: note = DNA
  misc_feature 40..49: note = RNA
  misc_feature 50: note = DNA
  misc_feature 51..53: note = RNA
  misc_feature 54: note = DNA
  misc_feature 55..59: note = RNA
  misc_feature 60: note = DNA
  misc_feature 61..76: note = RNA

SEQ ID NO: 6887 - RNA, 73 nt, synthetic construct; identical to SEQ ID NO: 935
  source 1..73: mol_type = other RNA
  modified_base 1: mod_base = OTHER; note = 2'-Omethylguanosine phosphorothiorate
  modified_base 2: mod_base = OTHER; note = 2'-Omethylguanosine
  modified_base 13: mod_base = OTHER; note = 2'-fluorocytosine
  modified_base 71: mod_base = OTHER; note = Uridine phosphorothiorate
  modified_base 72: mod_base = OTHER; note = 2'-Omethylcytosine

SEQ ID NO: 6888 - RNA, 75 nt, synthetic construct; identical to SEQ ID NO: 1045
  source 1..75: mol_type = other RNA
  modified_base 1: mod_base = OTHER; note = 2'-Omethylguanosine
  modified_base 13: mod_base = OTHER; note = 2'-Omethyluridine
  modified_base 14: mod_base = OTHER; note = 2'-Omethyladenosine
  modified_base 15: mod_base = OTHER; note = 2'-Omethyladenosine
  modified_base 16: mod_base = OTHER; note = 2'-Omethyluridine
  modified_base 17: mod_base = OTHER; note = 2'-Omethylguanosine
  modified_base 18: mod_base = OTHER; note = 2'-Omethylguanosine
  modified_base 19: mod_base = OTHER; note = Uridine phosphorothiorate
  modified_base 20: mod_base = OTHER; note = 2'-Omethyladenosine
  modified_base 21: mod_base = OTHER; note = Adenosine phosphorothiorate
  modified_base 25: mod_base = OTHER; note = 2'-Omethylcytosine
  modified_base 33: mod_base = OTHER; note = Uridine phosphorothiorate
  modified_base 34: mod_base = OTHER; note = 2'-Omethyluridine
  modified_base 35: mod_base = OTHER; note = Uridine phosphorothiorate
  modified_base 37: mod_base = OTHER; note = Adenosine phosphorothiorate
  modified_base 38: mod_base = OTHER; note = Adenosine phosphorothiorate
  modified_base 48: mod_base = OTHER; note = 2'-Omethylcytosine
  modified_base 49: mod_base = OTHER; note = 2'-Omethylcytosine
  modified_base 51: mod_base = OTHER; note = 2'-Omethyladenosine
  modified_base 53: mod_base = OTHER; note = Uridine phosphorothiorate
  modified_base 54: mod_base = OTHER; note = Uridine phosphorothiorate
  modified_base 55: mod_base = OTHER; note = 2'-Omethylcytosine
  modified_base 56: mod_base = OTHER; note = Guanosine phosphorothiorate
  modified_base 57: mod_base = OTHER; note = Adenosine phosphorothiorate
  modified_base 58: mod_base = OTHER; note = 2'-Omethylguanosine
  modified_base 60: mod_base = OTHER; note = 2'-Omethylcytosine
  modified_base 64: mod_base = OTHER; note = 2'-Omethylguanosine
  modified_base 72: mod_base = OTHER; note = 2'-Omethyluridine

SEQ ID NO: 6889 - RNA, 76 nt, synthetic construct; identical to SEQ ID NO: 625
  source 1..76: mol_type = other RNA
  modified_base 1: mod_base = OTHER; note = 2'-Omethylguanosine phosphorothiorate
  modified_base 2: mod_base = OTHER; note = 2'-Omethylguanosine
  modified_base 3: mod_base = OTHER; note = 2'-Omethylcytosine
  modified_base 4: mod_base = OTHER; note = 2'-Omethyluridine
  modified_base 5: mod_base = OTHER; note = 2'-Omethylcytosine
  modified_base 6: mod_base = OTHER; note = 2'-Omethylcytosine
  modified_base 10: mod_base = OTHER; note = 2'-Omethylguanosine
  modified_base 11: mod_base = OTHER; note = 2'-Omethylcytosine
  modified_base 12: mod_base = OTHER; note = 2'-Omethylguanosine
  modified_base 13: mod_base = OTHER; note = 2'-Omethylcytosine
  modified_base 16: mod_base = OTHER; note = 2'-Omethyluridine
  modified_base 17: mod_base = OTHER; note = 2'-Omethylguanosine
  modified_base 18: mod_base = OTHER; note = 2'-Omethylguanosine
  modified_base 20: mod_base = OTHER; note = 2'-Omethyluridine
  modified_base 22: mod_base = OTHER; note = 2'-Omethylguanosine
  modified_base 23: mod_base = OTHER; note = 2'-Omethylcytosine
  modified_base 24: mod_base = OTHER; note = 2'-Omethylguanosine
  modified_base 25: mod_base = OTHER; note = 2'-Omethylcytosine
  modified_base 33: mod_base = OTHER; note = 2'-fluorouridine
  modified_base 35: mod_base = OTHER; note = Cytosine phosphorothiorate
  modified_base 37: mod_base = OTHER; note = Adenosine phosphorothiorate
  modified_base 38: mod_base = OTHER; note = Adenosine phosphorothiorate
  modified_base 41: mod_base = OTHER; note = 2'-fluorocytosine
  modified_base 42: mod_base = OTHER; note = 2'-Omethyladenosine
  modified_base 43: mod_base = OTHER; note = 2'-Omethyladenosine
  modified_base 44: mod_base = OTHER; note = 2'-fluoroadenosine
  modified_base 49: mod_base = OTHER; note = 2'-Omethylcytosine
  modified_base 50: mod_base = OTHER; note = 2'-Omethylcytosine
  modified_base 52: mod_base = OTHER; note = 2'-Omethylguanosine
  modified_base 54: mod_base = OTHER; note = 2'-Omethyluridine
  modified_base 55: mod_base = OTHER; note = Uridine phosphorothiorate
  modified_base 56: mod_base = OTHER; note = 2'-Omethylcytosine
  modified_base 57: mod_base = OTHER; note = 2'-fluoroguanosine
  modified_base 59: mod_base = OTHER; note = 2'-Omethylguanosine
  modified_base 61: mod_base = OTHER; note = 2'-Omethylcytosine
  modified_base 65: mod_base = OTHER; note = 2'-Omethylguanosine
  modified_base 73: mod_base = OTHER; note = 2'-Omethylguanosine

SEQ ID NO: 6890 - RNA, 86 nt, synthetic construct; identical to SEQ ID NO: 3290
  source 1..86: mol_type = other RNA
  modified_base 76: mod_base = OTHER; note = Uridine phosphorothiorate

SEQ ID NO: 6891 - RNA, 75 nt, synthetic construct; identical to SEQ ID NO: 3306
  source 1..75: mol_type = other RNA
  modified_base 1: mod_base = OTHER; note = 2'-Omethylguanosine phosphorothiorate
  modified_base 2: mod_base = OTHER; note = 2'-Omethyladenosine phosphorothiorate
  modified_base 25: mod_base = OTHER; note = 2'-Omethylguanosine
  modified_base 41: mod_base = OTHER; note = Guanosine phosphorothiorate
  modified_base 42: mod_base = OTHER; note = 2'-fluoroadenosine
  modified_base 65: mod_base = OTHER; note = Cytosine phosphorothiorate
  modified_base 66: mod_base = OTHER; note = 2'-fluoroguanosine
  modified_base 69: mod_base = OTHER; note = 2'-fluoroguanosine
  modified_base 73: mod_base = OTHER; note = Cytosine phosphorothiorate
  modified_base 74: mod_base = OTHER; note = 2'-Omethylcytosine phosphorothiorate
  modified_base 75: mod_base = OTHER; note = 2'-Omethyladenosine

SEQ ID NO: 6892 - RNA, 76 nt, synthetic construct; identical to SEQ ID NO: 625
  source 1..76: mol_type = other RNA
  modified_base 10: mod_base = OTHER; note = 2'-Omethylguanosine
  modified_base 11: mod_base = OTHER; note = 2'-Omethylcytosine
  modified_base 12: mod_base = OTHER; note = 2'-Omethylguanosine
  modified_base 13: mod_base = OTHER; note = 2'-Omethylcytosine
  modified_base 40: mod_base = OTHER; note = 2'-fluorouridine
  modified_base 41: mod_base = OTHER; note = 2'-fluorocytosine
  modified_base 42: mod_base = OTHER; note = 2'-fluoroadenosine
  modified_base 43: mod_base = OTHER; note = 2'-fluoroadenosine
  modified_base 49: mod_base = OTHER; note = 2'-Omethylcytosine
  modified_base 50: mod_base = OTHER; note = 2'-Omethylcytosine
  modified_base 51: mod_base = OTHER; note = 2'-Omethylguanosine
  modified_base 52: mod_base = OTHER; note = 2'-Omethylguanosine
  modified_base 53: mod_base = OTHER; note = 2'-Omethylguanosine
  modified_base 54: mod_base = OTHER; note = Uridine phosphorothiorate
  modified_base 55: mod_base = OTHER; note = Uridine phosphorothiorate
  modified_base 56: mod_base = OTHER; note = Cytosine phosphorothiorate
  modified_base 57: mod_base = OTHER; note = Guanosine phosphorothiorate
  modified_base 61: mod_base = OTHER; note = 2'-Omethylcytosine
  modified_base 62: mod_base = OTHER; note = 2'-Omethylcytosine
  modified_base 63: mod_base = OTHER; note = 2'-Omethylcytosine
  modified_base 64: mod_base = OTHER; note = 2'-Omethylguanosine
  modified_base 65: mod_base = OTHER; note = 2'-Omethylguanosine
  modified_base 66: mod_base = OTHER; note = 2'-Omethylcytosine
  modified_base 67: mod_base = OTHER; note = 2'-Omethylguanosine
  modified_base 68: mod_base = OTHER; note = 2'-Omethylguanosine
  modified_base 69: mod_base = OTHER; note = 2'-Omethyladenosine

SEQ ID NO: 6893 - RNA, 86 nt, synthetic construct; identical to SEQ ID NO: 3290
  source 1..86: mol_type = other RNA
  modified_base 78: mod_base = OTHER; note = 2'-Omethylcytosine

SEQ ID NO: 6894 - RNA, 85 nt, synthetic construct; identical to SEQ ID NO: 3297
  source 1..85: mol_type = other RNA
  modified_base 1: mod_base = OTHER; note = 2'-Omethylguanosine phosphorothiorate
  modified_base 2: mod_base = OTHER; note = 2'-Omethylcytosine phosphorothiorate
  modified_base 26: mod_base = OTHER; note = 2'-Omethylguanosine
  modified_base 42: mod_base = OTHER; note = Adenosine phosphorothiorate
  modified_base 43: mod_base = OTHER; note = 2'-fluoroadenosine
  modified_base 75: mod_base = OTHER; note = Uridine phosphorothiorate
  modified_base 76: mod_base = OTHER; note = 2'-fluorocytosine
  modified_base 79: mod_base = OTHER; note = 2'-fluoroadenosine
  modified_base 83: mod_base = OTHER; note = Cytosine phosphorothiorate
  modified_base 84: mod_base = OTHER; note = 2'-Omethylcytosine phosphorothiorate
  modified_base 85: mod_base = OTHER; note = 2'-Omethyladenosine

SEQ ID NO: 6895 - RNA, 73 nt, synthetic construct
  source 1..73: mol_type = other RNA
  modified_base 1: mod_base = OTHER; note = 2'-Omethylguanosine
  modified_base 17: mod_base = OTHER; note = 2'-Omethylguanosine
  modified_base 18: mod_base = OTHER; note = 2'-Omethylguanosine
  modified_base 49: mod_base = OTHER; note = 2'-Omethylcytosine
  modified_base 51: mod_base = OTHER; note = 2'-Omethyluridine
  modified_base 72: mod_base = OTHER; note = 2'-Omethyladenosine
gacctcgtggcgcaacggtagcgcgtctgactctagatcagaaggttgcgtgttcaaatcacgtcggggtcac

SEQ ID NO: 6896 - DNA, 76 bp, synthetic construct; identical to SEQ ID NO: 1924
  source 1..76: mol_type = other DNA
  modified_base 1: mod_base = OTHER; note = 2'-Omethylguanosine phosphorothiorate
  modified_base 2: mod_base = OTHER; note = 2'-Omethylguanosine
  modified_base 3: mod_base = OTHER; note = 2'-Omethylcytosine
  modified_base 4: mod_base = OTHER; note = 2'-Omethyluridine
  modified_base 5: mod_base = OTHER; note = 2'-Omethylcytosine
  modified_base 6: mod_base = OTHER; note = 2'-Omethylcytosine
  modified_base 43: mod_base = OTHER; note = 2'-Omethyladenosine
  modified_base 44: mod_base = OTHER; note = 2'-Omethyladenosine
  modified_base 45: mod_base = OTHER; note = 2'-Omethylguanosine
  modified_base 46: mod_base = OTHER; note = 2'-fluoroguanosine
  modified_base 48: mod_base = OTHER; note = 2'-Omethyluridine
  modified_base 49: mod_base = OTHER; note = 2'-Omethylcytosine
  modified_base 50: mod_base = OTHER; note = 2'-Omethylcytosine
  modified_base 73: mod_base = OTHER; note = 2'-Omethylguanosine
  misc_feature 1..46: note = RNA
  misc_feature 47: note = DNA
  misc_feature 48..76: note = RNA

SEQ ID NO: 6897 - RNA, 76 nt, synthetic construct
  source 1..76: mol_type = other RNA
gcgtgtgtggcgcaatggatagcgcattggacttcaaattcaaaggttccgggttcgagtcccggcacacgcgcca

SEQ ID NO: 6898 - RNA, 85 nt, synthetic construct; identical to SEQ ID NO: 3301
  source 1..85: mol_type = other RNA
  modified_base 1: mod_base = OTHER; note = 2'-Omethylguanosine phosphorothiorate
  modified_base 2: mod_base = OTHER; note = 2'-Omethylcytosine phosphorothiorate
  modified_base 5: mod_base = OTHER; note = Uridine phosphorothiorate
  modified_base 11: mod_base = OTHER; note = 2'-fluorocytosine
  modified_base 12: mod_base = OTHER; note = 2'-fluorocytosine
  modified_base 18: mod_base = OTHER; note = 2'-Omethylguanosine phosphorothiorate
  modified_base 25: mod_base = OTHER; note = Cytosine phosphorothiorate
  modified_base 37: mod_base = OTHER; note = 2'-fluoroadenosine
  modified_base 46: mod_base = OTHER; note = 2'-Omethylguanosine
  modified_base 48: mod_base = OTHER; note = 2'-Omethylguanosine phosphorothiorate
  modified_base 51: mod_base = OTHER; note = 2'-Omethyluridine
  modified_base 55: mod_base = OTHER; note = 2'-fluorocytosine phosphorothiorate
  modified_base 56: mod_base = OTHER; note = 2'-fluoroguanosine
  modified_base 60: mod_base = OTHER; note = 2'-Omethyladenosine
  modified_base 70: mod_base = OTHER; note = 2'-fluorocytosine phosphorothiorate
  modified_base 74: mod_base = OTHER; note = 2'-fluorocytosine
  modified_base 77: mod_base = OTHER; note = 2'-fluoroadenosine
  modified_base 82: mod_base = OTHER; note = 2'-Omethylguanosine
  modified_base 84: mod_base = OTHER; note = 2'-fluorocytosine phosphorothiorate

SEQ ID NO: 6899 - RNA, 76 nt, synthetic construct; identical to SEQ ID NO: 625
  source 1..76: mol_type = other RNA
  modified_base 1: mod_base = OTHER; note = 2'-Omethylguanosine
  modified_base 10: mod_base = OTHER; note = 2'-Omethylguanosine
  modified_base 13: mod_base = OTHER; note = 2'-Omethylcytosine
  modified_base 17: mod_base = OTHER; note = Guanosine phosphorothiorate
  modified_base 18: mod_base = OTHER; note = 2'-Omethylguanosine
  modified_base 19: mod_base = OTHER; note = Adenosine phosphorothiorate
  modified_base 20: mod_base = OTHER; note = 2'-Omethyluridine
  modified_base 25: mod_base = OTHER; note = 2'-Omethylcytosine
  modified_base 29: mod_base = OTHER; note = 2'-Omethylguanosine
  modified_base 33: mod_base = OTHER; note = 2'-fluorouridine
  modified_base 35: mod_base = OTHER; note = Cytosine phosphorothiorate
  modified_base 37: mod_base = OTHER; note = Adenosine phosphorothiorate
  modified_base 38: mod_base = OTHER; note = Adenosine phosphorothiorate
  modified_base 41: mod_base = OTHER; note = 2'-fluorocytosine
  modified_base 43: mod_base = OTHER; note = 2'-Omethyladenosine
  modified_base 44: mod_base = OTHER; note = 2'-fluoroadenosine
  modified_base 46: mod_base = OTHER; note = 2'-fluoroguanosine phosphorothiorate
  modified_base 50: mod_base = OTHER; note = 2'-Omethylcytosine
  modified_base 52: mod_base = OTHER; note = 2'-Omethylguanosine
  modified_base 54: mod_base = OTHER; note = Uridine phosphorothiorate
  modified_base 55: mod_base = OTHER; note = Uridine phosphorothiorate
  modified_base 56: mod_base = OTHER; note = 2'-Omethylcytosine
  modified_base 57: mod_base = OTHER; note = Guanosine phosphorothiorate
  modified_base 62: mod_base = OTHER; note = 2'-Omethylcytosine
  modified_base 63: mod_base = OTHER; note = 2'-fluorocytosine
  modified_base 65: mod_base = OTHER; note = 2'-Omethylguanosine
  modified_base 71: mod_base = OTHER; note = 2'-Omethyluridine
  modified_base 73: mod_base = OTHER; note = 2'-Omethylguanosine

SEQ ID NO: 6900 - RNA, 86 nt, synthetic construct; identical to SEQ ID NO: 3290
  source 1..86: mol_type = other RNA
  modified_base 1: mod_base = OTHER; note = 2'-Omethyladenosine
  modified_base 13: mod_base = OTHER; note = 2'-Omethylguanosine
  modified_base 14: mod_base = OTHER; note = 2'-Omethyladenosine
  modified_base 15: mod_base = OTHER; note = 2'-Omethylguanosine
  modified_base 16: mod_base = OTHER; note = 2'-Omethyluridine
  modified_base 17: mod_base = OTHER; note = 2'-Omethylguanosine
  modified_base 18: mod_base = OTHER; note = 2'-Omethylguanosine
  modified_base 19: mod_base = OTHER; note = Uridine phosphorothiorate
  modified_base 20: mod_base = OTHER; note = 2'-Omethyluridine
  modified_base 21: mod_base = OTHER; note = Adenosine phosphorothiorate
  modified_base 25: mod_base = OTHER; note = 2'-Omethylcytosine
  modified_base 33: mod_base = OTHER; note = Uridine phosphorothiorate
  modified_base 34: mod_base = OTHER; note = 2'-Omethyluridine
  modified_base 35: mod_base = OTHER; note = Cytosine phosphorothiorate
  modified_base 37: mod_base = OTHER; note = Guanosine phosphorothiorate
  modified_base 38: mod_base = OTHER; note = Adenosine phosphorothiorate
  modified_base 41: mod_base = OTHER; note = 2'-fluorocytosine
  modified_base 42: mod_base = OTHER; note = 2'-Omethyladenosine
  modified_base 43: mod_base = OTHER; note = 2'-Omethyladenosine
  modified_base 44: mod_base = OTHER; note = 2'-fluorouridine
  modified_base 59: mod_base = OTHER; note = 2'-Omethylguanosine
  modified_base 60: mod_base = OTHER; note = 2'-Omethyluridine
  modified_base 62: mod_base = OTHER; note = 2'-Omethylguanosine
  modified_base 64: mod_base = OTHER; note = Uridine phosphorothiorate
  modified_base 65: mod_base = OTHER; note = Uridine phosphorothiorate
  modified_base 71: mod_base = OTHER; note = 2'-Omethylcytosine
  modified_base 75: mod_base = OTHER; note = 2'-Omethylcytosine
  modified_base 83: mod_base = OTHER; note = 2'-Omethyladenosine

SEQ ID NO: 6901 - DNA, 76 bp, synthetic construct; identical to SEQ ID NO: 1924
  source 1..76: mol_type = other DNA
  modified_base 1: mod_base = OTHER; note = 2'-Omethylguanosine phosphorothiorate
  modified_base 2: mod_base = OTHER; note = 2'-Omethylguanosine phosphorothiorate
  modified_base 3: mod_base = OTHER; note = 2'-Omethylcytosine
  modified_base 4: mod_base = OTHER; note = 2'-Omethyluridine
  modified_base 5: mod_base = OTHER; note = 2'-Omethylcytosine
  modified_base 6: mod_base = OTHER; note = 2'-Omethylcytosine
  modified_base 10: mod_base = OTHER; note = 2'-Omethylguanosine
  modified_base 12: mod_base = OTHER; note = 2'-Omethylguanosine
  modified_base 13: mod_base = OTHER; note = 2'-Omethylcytosine
  modified_base 17: mod_base = OTHER; note = 2'-Omethylguanosine
  modified_base 18: mod_base = OTHER; note = 2'-Omethylguanosine
  modified_base 19: mod_base = OTHER; note = Adenosine phosphorothiorate
  modified_base 20: mod_base = OTHER; note = 2'-Omethyluridine
  modified_base 21: mod_base = OTHER; note = Adenosine phosphorothiorate
  modified_base 25: mod_base = OTHER; note = 2'-Omethylcytosine
  modified_base 29: mod_base = OTHER; note = 2'-Omethylguanosine
  modified_base 33: mod_base = OTHER; note = 2'-fluorouridine
  modified_base 35: mod_base = OTHER; note = Cytosine phosphorothiorate
  modified_base 37: mod_base = OTHER; note = Adenosine phosphorothiorate
  modified_base 38: mod_base = OTHER; note = Adenosine phosphorothiorate
  modified_base 41: mod_base = OTHER; note = 2'-Omethylcytosine
  modified_base 43: mod_base = OTHER; note = 2'-Omethyladenosine
  modified_base 44: mod_base = OTHER; note = Adenosine phosphorothiorate
  modified_base 45: mod_base = OTHER; note = 2'-fluoroguanosine
  modified_base 46: mod_base = OTHER; note = Guanosine phosphorothiorate
  modified_base 49: mod_base = OTHER; note = 2'-Omethylcytosine
  modified_base 50: mod_base = OTHER; note = 2'-Omethylcytosine
  modified_base 51: mod_base = OTHER; note = 2'-Omethylguanosine
  modified_base 52: mod_base = OTHER; note = 2'-Omethylguanosine
  modified_base 53: mod_base = OTHER; note = 2'-Omethylguanosine
  modified_base 54: mod_base = OTHER; note = Uridine phosphorothiorate
  modified_base 55: mod_base = OTHER; note = Uridine phosphorothiorate
  modified_base 56: mod_base = OTHER; note = 2'-Omethylcytosine
  modified_base 57: mod_base = OTHER; note = Guanosine phosphorothiorate
  modified_base 59: mod_base = OTHER; note = 2'-Omethylguanosine
  modified_base 61: mod_base = OTHER; note = 2'-Omethylcytosine
  modified_base 62: mod_base = OTHER; note = 2'-Omethylcytosine
  modified_base 63: mod_base = OTHER; note = 2'-fluorocytosine
  modified_base 64: mod_base = OTHER; note = 2'-Omethylguanosine
  modified_base 65: mod_base = OTHER; note = 2'-Omethylguanosine
  modified_base 66: mod_base = OTHER; note = 2'-Omethylcytosine
  modified_base 67: mod_base = OTHER; note = 2'-Omethylguanosine
  modified_base 68: mod_base = OTHER; note = 2'-Omethylguanosine
  modified_base 69: mod_base = OTHER; note = 2'-fluoroadenosine
  modified_base 70: mod_base = OTHER; note = 2'-fluoroguanosine
  modified_base 71: mod_base = OTHER; note = 2'-Omethyluridine
  modified_base 73: mod_base = OTHER; note = 2'-Omethylguanosine
  modified_base 74: mod_base = OTHER; note = Cytosine phosphorothiorate
  modified_base 75: mod_base = OTHER; note = 2'-Omethylcytosine
  misc_feature 1..21: note = RNA
  misc_feature 22: note = DNA
  misc_feature 23..76: note = RNA

SEQ ID NO: 6902 - RNA, 75 nt, synthetic construct; identical to SEQ ID NO: 1045
  source 1..75: mol_type = other RNA
  modified_base 1: mod_base = OTHER; note = 2'-fluoroguanosine phosphorothiorate
  modified_base 2: mod_base = OTHER; note = 2'-Omethylguanosine phosphorothiorate
  modified_base 12: mod_base = OTHER; note = Guanosine phosphorothiorate
  modified_base 13: mod_base = OTHER; note = 2'-fluorouridine
  modified_base 18: mod_base = OTHER; note = 2'-Omethylguanosine phosphorothiorate
  modified_base 21: mod_base = OTHER; note = 2'-Omethyladenosine phosphorothiorate
  modified_base 22: mod_base = OTHER; note = 2'-fluoroguanosine
  modified_base 28: mod_base = OTHER; note = 2'-fluorouridine
  modified_base 40: mod_base = OTHER; note = 2'-Omethylcytosine
  modified_base 48: mod_base = OTHER; note = 2'-fluorocytosine
  modified_base 60: mod_base = OTHER; note = Cytosine phosphorothiorate
  modified_base 67: mod_base = OTHER; note = Guanosine phosphorothiorate
  modified_base 73: mod_base = OTHER; note = Cytosine phosphorothiorate
  modified_base 74: mod_base = OTHER; note = 2'-Omethylcytosine

SEQ ID NO: 6903 - RNA, 75 nt, synthetic construct; identical to SEQ ID NO: 1045
  source 1..75: mol_type = other RNA
  modified_base 1: mod_base = OTHER; note = 2'-Omethylguanosine phosphorothiorate
  modified_base 2: mod_base = OTHER; note = 2'-Omethylguanosine phosphorothiorate
  modified_base 12: mod_base = OTHER; note = Guanosine phosphorothiorate
  modified_base 13: mod_base = OTHER; note = 2'-fluorouridine phosphorothiorate
  modified_base 23: mod_base = OTHER; note = Cytosine phosphorothiorate
  modified_base 24: mod_base = OTHER; note = 2'-fluoroadenosine
  modified_base 43: mod_base = OTHER; note = 2'-fluoroguanosine
  modified_base 51: mod_base = OTHER; note = Adenosine phosphorothiorate
  modified_base 58: mod_base = OTHER; note = 2'-Omethylguanosine phosphorothiorate
  modified_base 60: mod_base = OTHER; note = 2'-fluorocytosine
  modified_base 67: mod_base = OTHER; note = 2'-fluoroguanosine
  modified_base 69: mod_base = OTHER; note = 2'-fluoroadenosine
  modified_base 73: mod_base = OTHER; note = Cytosine phosphorothiorate
  modified_base 74: mod_base = OTHER; note = 2'-Omethylcytosine

SEQ ID NO: 6904 - RNA, 74 nt, synthetic construct; identical to SEQ ID NO: 3293
  source 1..74: mol_type = other RNA
  modified_base 1: mod_base = OTHER; note = 2'-fluoroadenosine
  modified_base 2: mod_base = OTHER; note = 2'-fluorocytosine
  modified_base 4: mod_base = OTHER; note = 2'-fluorouridine
  modified_base 8: mod_base = OTHER; note = Guanosine phosphorothiorate
  modified_base 10: mod_base = OTHER; note = 2'-Omethylcytosine
  modified_base 19: mod_base = OTHER; note = 2'-Omethyladenosine
  modified_base 24: mod_base = OTHER; note = Guanosine phosphorothiorate
  modified_base 25: mod_base = OTHER; note = 2'-Omethyluridine phosphorothiorate
  modified_base 33: mod_base = OTHER; note = 2'-Omethyluridine
  modified_base 37: mod_base = OTHER; note = 2'-fluorouridine
  modified_base 39: mod_base = OTHER; note = Adenosine phosphorothiorate
  modified_base 44: mod_base = OTHER; note = Guanosine phosphorothiorate
  modified_base 50: mod_base = OTHER; note = Uridine phosphorothiorate
  modified_base 62: mod_base = OTHER; note = Guanosine phosphorothiorate
  modified_base 73: mod_base = OTHER; note = 2'-Omethylcytosine phosphorothiorate

SEQ ID NO: 6905 - RNA, 76 nt, synthetic construct; identical to SEQ ID NO: 3295
  source 1..76: mol_type = other RNA
  modified_base 1: mod_base = OTHER; note = 2'-fluorocytosine
  modified_base 2: mod_base = OTHER; note = Cytosine phosphorothiorate
  modified_base 17: mod_base = OTHER; note = 2'-Omethyluridine
  modified_base 41: mod_base = OTHER; note = 2'-Omethylcytosine
  modified_base 45: mod_base = OTHER; note = 2'-Omethylguanosine phosphorothiorate
  modified_base 48: mod_base = OTHER; note = 2'-Omethylcytosine
  modified_base 53: mod_base = OTHER; note = 2'-Omethylguanosine
  modified_base 75: mod_base = OTHER; note = Cytosine phosphorothiorate
  modified_base 76: mod_base = OTHER; note = 2'-Omethyladenosine

SEQ ID NO: 6906 - RNA, 74 nt, synthetic construct; identical to SEQ ID NO: 766
  source 1..74: mol_type = other RNA
  modified_base 1: mod_base = OTHER; note = 2'-Omethylguanosine phosphorothiorate
  modified_base 2: mod_base = OTHER; note = 2'-Omethylguanosine
  modified_base 16: mod_base = OTHER; note = 2'-fluorouridine
  modified_base 72: mod_base = OTHER; note = 2'-Omethylcytosine
  modified_base 73: mod_base = OTHER; note = 2'-Omethylguanosine

SEQ ID NO: 6907 - RNA, 76 nt, synthetic construct; identical to SEQ ID NO: 625
  source 1..76: mol_type = other RNA
  modified_base 1: mod_base = OTHER; note = 2'-Omethylguanosine phosphorothiorate
  modified_base 2: mod_base = OTHER; note = 2'-Omethylguanosine
  modified_base 3: mod_base = OTHER; note = 2'-Omethylcytosine
  modified_base 4: mod_base = OTHER; note = 2'-Omethyluridine
  modified_base 5: mod_base = OTHER; note = 2'-Omethylcytosine
  modified_base 6: mod_base = OTHER; note = 2'-Omethylcytosine
  modified_base 10: mod_base = OTHER; note = 2'-Omethylguanosine
  modified_base 11: mod_base = OTHER; note = 2'-Omethylcytosine
  modified_base 12: mod_base = OTHER; note = 2'-Omethylguanosine
  modified_base 13: mod_base = OTHER; note = 2'-Omethylcytosine
  modified_base 16: mod_base = OTHER; note = 2'-Omethyluridine
  modified_base 17: mod_base = OTHER; note = 2'-Omethylguanosine
  modified_base 18: mod_base = OTHER; note = 2'-Omethylguanosine
  modified_base 22: mod_base = OTHER; note = 2'-Omethylguanosine
  modified_base 23: mod_base = OTHER; note = 2'-Omethylcytosine
  modified_base 24: mod_base = OTHER; note = 2'-Omethylguanosine
  modified_base 25: mod_base = OTHER; note = 2'-Omethylcytosine
  modified_base 49: mod_base = OTHER; note = 2'-Omethylcytosine
  modified_base 50: mod_base = OTHER; note = 2'-Omethylcytosine
  modified_base 51: mod_base = OTHER; note = 2'-Omethylguanosine
  modified_base 52: mod_base = OTHER; note = 2'-Omethylguanosine
  modified_base 53: mod_base = OTHER; note = 2'-Omethylguanosine
  modified_base 54: mod_base = OTHER; note = 2'-Omethyluridine phosphorothiorate
  modified_base 55: mod_base = OTHER; note = Uridine phosphorothiorate
  modified_base 56: mod_base = OTHER; note = 2'-Omethylcytosine
  modified_base 57: mod_base = OTHER; note = 2'-fluoroguanosine
  modified_base 59: mod_base = OTHER; note = 2'-Omethylguanosine
  modified_base 61: mod_base = OTHER; note = 2'-Omethylcytosine
  modified_base 62: mod_base = OTHER; note = 2'-Omethylcytosine
  modified_base 63: mod_base = OTHER; note = 2'-Omethylcytosine
  modified_base 64: mod_base = OTHER; note = 2'-Omethylguanosine
  modified_base 65: mod_base = OTHER; note = 2'-Omethylguanosine
  modified_base 66: mod_base = OTHER; note = 2'-Omethylcytosine
  modified_base 67: mod_base = OTHER; note = 2'-Omethylguanosine
  modified_base 68: mod_base = OTHER; note = 2'-Omethylguanosine
  modified_base 69: mod_base = OTHER; note = 2'-Omethyladenosine
  modified_base 73: mod_base = OTHER; note = 2'-Omethylguanosine

SEQ ID NO: 6908 - DNA, 76 bp, synthetic construct; identical to SEQ ID NO: 1924
  source 1..76: mol_type = other DNA
  misc_feature 1..13: note = RNA
  misc_feature 14..21: note = DNA
  misc_feature 22..76: note = RNA

SEQ ID NO: 6909 - RNA, 76 nt, synthetic construct; identical to SEQ ID NO: 625
  source 1..76: mol_type = other RNA
  modified_base 8: mod_base = OTHER; note = Uridine phosphorothiorate
  modified_base 11: mod_base = OTHER; note = 2'-fluorocytosine
  modified_base 14: mod_base = OTHER; note = Adenosine phosphorothiorate
  modified_base 15: mod_base = OTHER; note = 2'-fluoroadenosine
  modified_base 16: mod_base = OTHER; note = 2'-Omethyluridine
  modified_base 17: mod_base = OTHER; note = 2'-Omethylguanosine phosphorothiorate
  modified_base 18: mod_base = OTHER; note = 2'-Omethylguanosine
  modified_base 19: mod_base = OTHER; note = Adenosine phosphorothiorate
  modified_base 20: mod_base = OTHER; note = 2'-fluorouridine phosphorothiorate
  modified_base 23: mod_base = OTHER; note = 2'-Omethylcytosine
  modified_base 25: mod_base = OTHER; note = Cytosine phosphorothiorate
  modified_base 26: mod_base = OTHER; note = 2'-Omethyladenosine
  modified_base 27: mod_base = OTHER; note = 2'-fluorouridine phosphorothiorate
  modified_base 38: mod_base = OTHER; note = 2'-Omethyladenosine phosphorothiorate
  modified_base 40: mod_base = OTHER; note = Uridine phosphorothiorate
  modified_base 41: mod_base = OTHER; note = 2'-Omethylcytosine
  modified_base 44: mod_base = OTHER; note = 2'-Omethyladenosine
  modified_base 45: mod_base = OTHER; note = 2'-fluoroguanosine
  modified_base 47: mod_base = OTHER; note = 2'-fluorouridine
  modified_base 48: mod_base = OTHER; note = 2'-fluorouridine
  modified_base 50: mod_base = OTHER; note = Cytosine phosphorothiorate
  modified_base 59: mod_base = OTHER; note = 2'-Omethylguanosine
  modified_base 60: mod_base = OTHER; note = Uridine phosphorothiorate
  modified_base 61: mod_base = OTHER; note = 2'-fluorocytosine
  modified_base 62: mod_base = OTHER; note = 2'-Omethylcytosine
  modified_base 64: mod_base = OTHER; note = 2'-fluoroguanosine
  modified_base 65: mod_base = OTHER; note = 2'-Omethylguanosine phosphorothiorate
  modified_base 66: mod_base = OTHER; note = 2'-fluorocytosine
  modified_base 68: mod_base = OTHER; note = 2'-fluoroguanosine
  modified_base 70: mod_base = OTHER; note = 2'-Omethylguanosine phosphorothiorate
  modified_base 71: mod_base = OTHER; note = 2'-fluorouridine
  modified_base 72: mod_base = OTHER; note = 2'-fluorocytosine
  modified_base 73: mod_base = OTHER; note = 2'-Omethylguanosine
  modified_base 74: mod_base = OTHER; note = 2'-fluorocytosine

SEQ ID NO: 6910 - RNA, 86 nt, synthetic construct; identical to SEQ ID NO: 3290
  source 1..86: mol_type = other RNA
  modified_base 58: mod_base = OTHER; note = 2'-Omethylcytosine

SEQ ID NO: 6911 - RNA, 76 nt, synthetic construct; identical to SEQ ID NO: 625
  source 1..76: mol_type = other RNA
  modified_base 1: mod_base = OTHER; note = 2'-Omethylguanosine phosphorothiorate
  modified_base 2: mod_base = OTHER; note = 2'-Omethylguanosine phosphorothiorate
  modified_base 33: mod_base = OTHER; note = 2'-O-(2-Methoxyethyl) thymine
  modified_base 41: mod_base = OTHER; note = Cytosine phosphorothiorate
  modified_base 42: mod_base = OTHER; note = 2'-fluoroadenosine
  modified_base 54: mod_base = OTHER; note = 2'-fluorouridine
  modified_base 69: mod_base = OTHER; note = 2'-fluoroadenosine
  modified_base 74: mod_base = OTHER; note = Cytosine phosphorothiorate
  modified_base 75: mod_base = OTHER; note = 2'-Omethylcytosine

SEQ ID NO: 6912 - RNA, 76 nt, synthetic construct; identical to SEQ ID NO: 625
  source 1..76: mol_type = other RNA
  modified_base 1: mod_base = OTHER; note = Guanosine phosphorothiorate
  modified_base 2: mod_base = OTHER; note = 2'-Omethylguanosine
  modified_base 3: mod_base = OTHER; note = 2'-fluorocytosine
  modified_base 4: mod_base = OTHER; note = 2'-Omethyluridine
  modified_base 5: mod_base = OTHER; note = 2'-Omethylcytosine
  modified_base 6: mod_base = OTHER; note = 2'-Omethylcytosine
  modified_base 9: mod_base = OTHER; note = Guanosine phosphorothiorate
  modified_base 11: mod_base = OTHER; note = Cytosine phosphorothiorate
  modified_base 12: mod_base = OTHER; note = 2'-fluoroguanosine
  modified_base 13: mod_base = OTHER; note = 2'-Omethylcytosine
  modified_base 15: mod_base = OTHER; note = Adenosine phosphorothiorate
  modified_base 18: mod_base = OTHER; note = 2'-Omethylguanosine
  modified_base 26: mod_base = OTHER; note = Adenosine phosphorothiorate
  modified_base 27: mod_base = OTHER; note = Uridine phosphorothiorate
  modified_base 28: mod_base = OTHER; note = 2'-fluorouridine
  modified_base 32: mod_base = OTHER; note = 2'-fluorocytosine
  modified_base 34: mod_base = OTHER; note = 2'-fluorouridine
  modified_base 36: mod_base = OTHER; note = Adenosine phosphorothiorate
  modified_base 37: mod_base = OTHER; note = Adenosine phosphorothiorate
  modified_base 38: mod_base = OTHER; note = 2'-Omethyladenosine
  modified_base 39: mod_base = OTHER; note = Uridine phosphorothiorate
  modified_base 40: mod_base = OTHER; note = 2'-fluorouridine phosphorothiorate
  modified_base 41: mod_base = OTHER; note = 2'-fluorocytosine
  modified_base 45: mod_base = OTHER; note = 2'-Omethylguanosine
  modified_base 46: mod_base = OTHER; note = 2'-Omethylguanosine phosphorothiorate
  modified_base 51: mod_base = OTHER; note = 2'-Omethylguanosine
  modified_base 52: mod_base = OTHER; note = 2'-fluoroguanosine
  modified_base 53: mod_base = OTHER; note = 2'-fluoroguanosine
  modified_base 54: mod_base = OTHER; note = Uridine phosphorothiorate
  modified_base 57: mod_base = OTHER; note = 2'-Omethylguanosine
  modified_base 62: mod_base = OTHER; note = 2'-Omethylcytosine
  modified_base 65: mod_base = OTHER; note = 2'-Omethylguanosine phosphorothiorate
  modified_base 66: mod_base = OTHER; note = 2'-fluorocytosine
  modified_base 67: mod_base = OTHER; note = 2'-Omethylguanosine
  modified_base 73: mod_base = OTHER; note = Guanosine phosphorothiorate
  modified_base 74: mod_base = OTHER; note = 2'-Omethylcytosine
  modified_base 75: mod_base = OTHER; note = 2'-fluorocytosine

SEQ ID NO: 6913 - RNA, 75 nt, synthetic construct; identical to SEQ ID NO: 1045
  source 1..75: mol_type = other RNA
  modified_base 1: mod_base = OTHER; note = 2'-Omethylguanosine phosphorothiorate
  modified_base 2: mod_base = OTHER; note = 2'-Omethylguanosine phosphorothiorate
  modified_base 13: mod_base = OTHER; note = Uridine phosphorothiorate
  modified_base 19: mod_base = OTHER; note = Uridine phosphorothiorate
  modified_base 20: mod_base = OTHER; note = 2'-fluoroadenosine
  modified_base 21: mod_base = OTHER; note = 2'-fluoroadenosine
  modified_base 28: mod_base = OTHER; note = 2'-fluorouridine
  modified_base 41: mod_base = OTHER; note = 2'-fluorocytosine
  modified_base 43: mod_base = OTHER; note = 2'-fluoroguanosine
  modified_base 47: mod_base = OTHER; note = 2'-fluorouridine
  modified_base 65: mod_base = OTHER; note = Uridine phosphorothiorate
  modified_base 66: mod_base = OTHER; note = 2'-fluoroguanosine
  modified_base 73: mod_base = OTHER; note = Cytosine phosphorothiorate
  modified_base 74: mod_base = OTHER; note = 2'-Omethylcytosine

SEQ ID NO: 6914 - RNA, 76 nt, synthetic construct; identical to SEQ ID NO: 3615
  source 1..76: mol_type = other RNA
  modified_base 1: mod_base = OTHER; note = 2'-Omethylguanosine
  modified_base 2: mod_base = OTHER; note = 2'-Omethylguanosine
  modified_base 3: mod_base = OTHER; note = 2'-Omethylcytosine
  modified_base 4: mod_base = OTHER; note = 2'-Omethyluridine
  modified_base 5: mod_base = OTHER; note = 2'-Omethylcytosine
  modified_base 6: mod_base = OTHER; note = 2'-Omethylcytosine
  modified_base 16: mod_base = OTHER; note = 2'-Omethyluridine
  modified_base 17: mod_base = OTHER; note = 2'-Omethylguanosine
  modified_base 18: mod_base = OTHER; note = 2'-Omethylguanosine
  modified_base 20: mod_base = OTHER; note = 2'-Omethyluridine
  modified_base 25: mod_base = OTHER; note = 2'-Omethylcytosine
  modified_base 33: mod_base = OTHER; note = 2'-fluorouridine
  modified_base 35: mod_base = OTHER; note = Cytosine phosphorothiorate
  modified_base 37: mod_base = OTHER; note = Adenosine phosphorothiorate
  modified_base 38: mod_base = OTHER; note = Adenosine phosphorothiorate
  modified_base 41: mod_base = OTHER; note = 2'-fluorocytosine
  modified_base 42: mod_base = OTHER; note = 2'-Omethyladenosine
  modified_base 43: mod_base = OTHER; note = 2'-Omethyladenosine
  modified_base 44: mod_base = OTHER; note = 2'-fluoroguanosine
  modified_base 49: mod_base = OTHER; note = 2'-Omethylcytosine
  modified_base 50: mod_base = OTHER; note = 2'-Omethylcytosine
  modified_base 52: mod_base = OTHER; note = 2'-Omethylguanosine
  modified_base 54: mod_base = OTHER; note = 2'-Omethyluridine
  modified_base 55: mod_base = OTHER; note = Uridine phosphorothiorate
  modified_base 56: mod_base = OTHER; note = 2'-Omethylcytosine
  modified_base 57: mod_base = OTHER; note = 2'-fluoroguanosine
  modified_base 59: mod_base = OTHER; note = 2'-Omethylguanosine
  modified_base 61: mod_base = OTHER; note = 2'-Omethylcytosine
  modified_base 62: mod_base = OTHER; note = 2'-Omethylcytosine
  modified_base 63: mod_base = OTHER; note = 2'-fluorocytosine
  modified_base 64: mod_base = OTHER; note = 2'-Omethylguanosine
  modified_base 65: mod_base = OTHER; note = 2'-Omethylguanosine
  modified_base 73: mod_base = OTHER; note = 2'-Omethylguanosine

SEQ ID NO: 6915 - RNA, 75 nt, synthetic construct; identical to SEQ ID NO: 1045
  source 1..75: mol_type = other RNA
  modified_base 1: mod_base = OTHER; note = 2'-Omethylguanosine phosphorothiorate
  modified_base 2: mod_base = OTHER; note = 2'-Omethylguanosine phosphorothiorate
  modified_base 3: mod_base = OTHER; note = 2'-Omethyluridine
  modified_base 4: mod_base = OTHER; note = 2'-Omethyluridine
  modified_base 5: mod_base = OTHER; note = 2'-Omethylcytosine
  modified_base 6: mod_base = OTHER; note = 2'-Omethylcytosine
  modified_base 16: mod_base = OTHER; note = 2'-Omethyluridine
  modified_base 17: mod_base = OTHER; note = 2'-Omethylguanosine
  modified_base 18: mod_base = OTHER; note = 2'-Omethylguanosine
  modified_base 33: mod_base = OTHER; note = 2'-fluorouridine
  modified_base 35: mod_base = OTHER; note = Uridine phosphorothiorate
  modified_base 37: mod_base = OTHER; note = Adenosine phosphorothiorate
  modified_base 38: mod_base = OTHER; note = Adenosine phosphorothiorate
  modified_base 44: mod_base = OTHER; note = 2'-Omethylcytosine
  modified_base 45: mod_base = OTHER; note = 2'-Omethylguanosine
  modified_base 46: mod_base = OTHER; note = 2'-fluoroadenosine
  modified_base 47: mod_base = OTHER; note = 2'-fluorouridine
  modified_base 51: mod_base = OTHER; note = 2'-Omethyladenosine
  modified_base 52: mod_base = OTHER; note = 2'-Omethylguanosine
  modified_base 53: mod_base = OTHER; note = 2'-Omethyluridine
  modified_base 55: mod_base = OTHER; note = 2'-Omethylcytosine
  modified_base 58: mod_base = OTHER; note = 2'-Omethylguanosine
  modified_base 60: mod_base = OTHER; note = 2'-Omethylcytosine
  modified_base 61: mod_base = OTHER; note = 2'-Omethyluridine
  modified_base 62: mod_base = OTHER; note = 2'-fluorocytosine
  modified_base 63: mod_base = OTHER; note = 2'-Omethylguanosine
  modified_base 64: mod_base = OTHER; note = 2'-Omethylguanosine
  modified_base 65: mod_base = OTHER; note = 2'-Omethyluridine
  modified_base 66: mod_base = OTHER; note = 2'-Omethylguanosine
  modified_base 67: mod_base = OTHER; note = 2'-Omethylguanosine
  modified_base 72: mod_base = OTHER; note = 2'-Omethyluridine

SEQ ID NO: 6916 - RNA, 75 nt, synthetic construct; identical to SEQ ID NO: 3299
  source 1..75: mol_type = other RNA
  modified_base 2: mod_base = OTHER; note = 2'-Omethylcytosine phosphorothiorate
  modified_base 6: mod_base = OTHER; note = 2'-Omethylguanosine phosphorothiorate
  modified_base 9: mod_base = OTHER; note = 2'-fluoroguanosine
  modified_base 15: mod_base = OTHER; note = 2'-fluorouridine phosphorothiorate
  modified_base 19: mod_base = OTHER; note = 2'-Omethyluridine phosphorothiorate
  modified_base 21: mod_base = OTHER; note = Guanosine phosphorothiorate
  modified_base 23: mod_base = OTHER; note = 2'-fluoroguanosine
  modified_base 27: mod_base = OTHER; note = 2'-Omethylcytosine
  modified_base 28: mod_base = OTHER; note = Adenosine phosphorothiorate
  modified_base 29: mod_base = OTHER; note = 2'-Omethylguanosine phosphorothiorate
  modified_base 30: mod_base = OTHER; note = 2'-fluoroadenosine
  modified_base 39: mod_base = OTHER; note = 2'-fluorocytosine
  modified_base 40: mod_base = OTHER; note = 2'-fluorouridine
  modified_base 46: mod_base = OTHER; note = 2'-fluorouridine
  modified_base 47: mod_base = OTHER; note = 2'-fluorocytosine
  modified_base 50: mod_base = OTHER; note = 2'-fluoroguanosine phosphorothiorate
  modified_base 55: mod_base = OTHER; note = 2'-fluorocytosine phosphorothiorate
  modified_base 59: mod_base = OTHER; note = Uridine phosphorothiorate
  modified_base 60: mod_base = OTHER; note = 2'-fluorocytosine
  modified_base 70: mod_base = OTHER; note = 2'-fluoroguanosine phosphorothiorate
  modified_base 73: mod_base = OTHER; note = Cytosine phosphorothiorate
  modified_base 74: mod_base = OTHER; note = Cytosine phosphorothiorate

SEQ ID NO: 6917 - RNA, 76 nt, synthetic construct; identical to SEQ ID NO: 3289
  source 1..76: mol_type = other RNA
  modified_base 1: mod_base = OTHER; note = 2'-Omethylguanosine
  modified_base 61: mod_base = OTHER; note = 2'-Omethylcytosine
  modified_base 62: mod_base = OTHER; note = 2'-Omethylcytosine
  modified_base 63: mod_base = OTHER; note = 2'-fluorocytosine
  modified_base 64: mod_base = OTHER; note = 2'-Omethyluridine
  modified_base 65: mod_base = OTHER; note = 2'-Omethylguanosine
  modified_base 66: mod_base = OTHER; note = 2'-Omethyluridine
  modified_base 67: mod_base = OTHER; note = 2'-Omethylcytosine
  modified_base 68: mod_base = OTHER; note = 2'-Omethylcytosine
  modified_base 69: mod_base = OTHER; note = 2'-Omethyladenosine
  modified_base 70: mod_base = OTHER; note = 2'-fluoroguanosine
  modified_base 71: mod_base = OTHER; note = 2'-Omethylguanosine
  modified_base 72: mod_base = OTHER; note = 2'-Omethylcytosine
  modified_base 73: mod_base = OTHER; note = 2'-Omethylguanosine

SEQ ID NO: 6918 - RNA, 76 nt, synthetic construct; identical to SEQ ID NO: 3318
  source 1..76: mol_type = other RNA
  modified_base 1: mod_base = OTHER; note = 2'-Omethylcytosine phosphorothiorate
  modified_base 2: mod_base = OTHER; note = 2'-Omethylcytosine
  modified_base 3: mod_base = OTHER; note = 2'-Omethyluridine
  modified_base 4: mod_base = OTHER; note = 2'-Omethyluridine
  modified_base 5: mod_base = OTHER; note = 2'-Omethylcytosine
  modified_base 6: mod_base = OTHER; note = 2'-Omethylguanosine
  modified_base 44: mod_base = OTHER; note = 2'-Omethyladenosine
  modified_base 45: mod_base = OTHER; note = 2'-Omethylguanosine
  modified_base 46: mod_base = OTHER; note = 2'-fluoroguanosine
  modified_base 47: mod_base = OTHER; note = 2'-fluorouridine
  modified_base 48: mod_base = OTHER; note = 2'-Omethylcytosine
  modified_base 49: mod_base = OTHER; note = 2'-Omethylguanosine
  modified_base 73: mod_base = OTHER; note = 2'-Omethyladenosine

SEQ ID NO: 6919 - RNA, 75 nt, synthetic construct; identical to SEQ ID NO: 1045
  source 1..75: mol_type = other RNA
  modified_base 1: mod_base = OTHER; note = 2'-fluoroguanosine phosphorothiorate
  modified_base 2: mod_base = OTHER; note = 2'-Omethylguanosine phosphorothiorate
  modified_base 11: mod_base = OTHER; note = Uridine phosphorothiorate
  modified_base 12: mod_base = OTHER; note = Guanosine phosphorothiorate
  modified_base 26: mod_base = OTHER; note = 2'-fluorouridine phosphorothiorate
  modified_base 37: mod_base = OTHER; note = 2'-fluoroadenosine
  modified_base 40: mod_base = OTHER; note = 2'-Omethylcytosine
  modified_base 51: mod_base = OTHER; note = 2'-fluoroadenosine phosphorothiorate
  modified_base 66: mod_base = OTHER; note = Guanosine phosphorothiorate
  modified_base 67: mod_base = OTHER; note = 2'-fluoroguanosine
  modified_base 72: mod_base = OTHER; note = Uridine phosphorothiorate
  modified_base 73: mod_base = OTHER; note = 2'-fluorocytosine phosphorothiorate

SEQ ID NO: 6920 - RNA, 76 nt, synthetic construct; identical to SEQ ID NO: 3318
  source 1..76: mol_type = other RNA
  modified_base 1: mod_base = OTHER; note = 2'-Omethylcytosine phosphorothiorate
  modified_base 2: mod_base = OTHER; note = 2'-Omethylcytosine phosphorothiorate
  modified_base 14: mod_base = OTHER; note = Adenosine phosphorothiorate
  modified_base 21: mod_base = OTHER; note = 2'-fluoroadenosine
  modified_base 74: mod_base = OTHER; note = Cytosine phosphorothiorate
  modified_base 75: mod_base = OTHER; note = 2'-Omethylcytosine phosphorothiorate
  modified_base 76: mod_base = OTHER; note = 2'-Omethyladenosine

SEQ ID NO: 6921 - RNA, 76 nt, synthetic construct; identical to SEQ ID NO: 3289
  source 1..76: mol_type = other RNA
  modified_base 1: mod_base = OTHER; note = 2'-Omethylguanosine
  modified_base 20: mod_base = OTHER; note = 2'-fluorouridine
  modified_base 21: mod_base = OTHER; note = 2'-Omethyladenosine
  modified_base 22: mod_base = OTHER; note = 2'-Omethylguanosine
  modified_base 73: mod_base = OTHER; note = 2'-Omethylguanosine

SEQ ID NO: 6922 - RNA, 75 nt, synthetic construct; identical to SEQ ID NO: 3311
  source 1..75: mol_type = other RNA
  modified_base 1: mod_base = OTHER; note = 2'-Omethylguanosine phosphorothiorate
  modified_base 2: mod_base = OTHER; note = 2'-Omethylguanosine phosphorothiorate
  modified_base 12: mod_base = OTHER; note = 2'-fluoroguanosine
  modified_base 19: mod_base = OTHER; note = 2'-Omethyluridine
  modified_base 20: mod_base = OTHER; note = 2'-fluoroadenosine
  modified_base 21: mod_base = OTHER; note = 2'-Omethyladenosine
  modified_base 28: mod_base = OTHER; note = 2'-fluorouridine
  modified_base 40: mod_base = OTHER; note = Cytosine phosphorothiorate
  modified_base 41: mod_base = OTHER; note = 2'-fluorocytosine
  modified_base 43: mod_base = OTHER; note = 2'-fluoroguanosine
  modified_base 44: mod_base = OTHER; note = 2'-fluorocytosine
  modified_base 57: mod_base = OTHER; note = Adenosine phosphorothiorate
  modified_base 58: mod_base = OTHER; note = 2'-fluoroguanosine
  modified_base 65: mod_base = OTHER; note = Uridine phosphorothiorate
  modified_base 73: mod_base = OTHER; note = Cytosine phosphorothiorate
  modified_base 74: mod_base = OTHER; note = Cytosine phosphorothiorate
  modified_base 75: mod_base = OTHER; note = 2'-fluoroadenosine

SEQ ID NO: 6923 - RNA, 76 nt, synthetic construct; identical to SEQ ID NO: 625
  source 1..76: mol_type = other RNA
  modified_base 1: mod_base = OTHER; note = Guanosine phosphorothiorate
  modified_base 2: mod_base = OTHER; note = 2'-Omethylguanosine
  modified_base 11: mod_base = OTHER; note = 2'-fluorocytosine
  modified_base 12: mod_base = OTHER; note = 2'-Omethylguanosine
  modified_base 15: mod_base = OTHER; note = 2'-Omethyladenosine
  modified_base 16: mod_base = OTHER; note = 2'-Omethyluridine
  modified_base 20: mod_base = OTHER; note = 2'-Omethyluridine phosphorothiorate
  modified_base 22: mod_base = OTHER; note = 2'-Omethylguanosine
  modified_base 24: mod_base = OTHER; note = Guanosine phosphorothiorate
  modified_base 25: mod_base = OTHER; note = 2'-Omethylcytosine
  modified_base 30: mod_base = OTHER; note = 2'-fluoroguanosine
  modified_base 31: mod_base = OTHER; note = 2'-fluoroadenosine
  modified_base 34: mod_base = OTHER; note = 2'-Omethyluridine phosphorothiorate
  modified_base 38: mod_base = OTHER; note = Adenosine phosphorothiorate
  modified_base 41: mod_base = OTHER; note = 2'-Omethylcytosine
  modified_base 45: mod_base = OTHER; note = 2'-Omethylguanosine
  modified_base 47: mod_base = OTHER; note = 2'-fluorouridine
  modified_base 48: mod_base = OTHER; note = 2'-Omethyluridine phosphorothiorate
  modified_base 49: mod_base = OTHER; note = 2'-fluorocytosine
  modified_base 52: mod_base = OTHER; note = 2'-fluoroguanosine
  modified_base 54: mod_base = OTHER; note = 2'-Omethyluridine
  modified_base 55: mod_base = OTHER; note = Uridine phosphorothiorate
  modified_base 57: mod_base = OTHER; note = 2'-fluoroguanosine
  modified_base 58: mod_base = OTHER; note = Adenosine phosphorothiorate
  modified_base 60: mod_base = OTHER; note = 2'-Omethyluridine
  modified_base 62: mod_base = OTHER; note = 2'-Omethylcytosine
  modified_base 63: mod_base = OTHER; note = 2'-fluorocytosine
  modified_base 64: mod_base = OTHER; note = 2'-Omethylguanosine
  modified_base 65: mod_base = OTHER; note = 2'-fluoroguanosine
  modified_base 68: mod_base = OTHER; note = 2'-fluoroguanosine
  modified_base 69: mod_base = OTHER; note = 2'-fluoroadenosine
  modified_base 70: mod_base = OTHER; note = Guanosine phosphorothiorate
  modified_base 71: mod_base = OTHER; note = 2'-Omethyluridine phosphorothiorate
  modified_base 73: mod_base = OTHER; note = 2'-Omethylguanosine
  modified_base 74: mod_base = OTHER; note = 2'-Omethylcytosine

SEQ ID NO: 6924 - RNA, 75 nt, synthetic construct; identical to SEQ ID NO: 3311
  source 1..75: mol_type = other RNA
  modified_base 1: mod_base = OTHER; note = Guanosine phosphorothiorate
  modified_base 3: mod_base = OTHER; note = Uridine phosphorothiorate
  modified_base 9: mod_base = OTHER; note = 2'-fluoroguanosine
  modified_base 10: mod_base = OTHER; note = 2'-fluoroguanosine phosphorothiorate
  modified_base 11: mod_base = OTHER; note = Uridine phosphorothiorate
  modified_base 17: mod_base = OTHER; note = 2'-Omethylguanosine phosphorothiorate
  modified_base 20: mod_base = OTHER; note = Adenosine phosphorothiorate
  modified_base 21: mod_base = OTHER; note = 2'-fluoroadenosine
  modified_base 24: mod_base = OTHER; note = Adenosine phosphorothiorate
  modified_base 25: mod_base = OTHER; note = 2'-fluorocytosine
  modified_base 35: mod_base = OTHER; note = 2'-Omethyluridine
  modified_base 64: mod_base = OTHER; note = 2'-fluoroguanosine
  modified_base 72: mod_base = OTHER; note = Uridine phosphorothiorate
  modified_base 74: mod_base = OTHER; note = Cytosine phosphorothiorate

SEQ ID NO: 6925 - RNA, 75 nt, synthetic construct; identical to SEQ ID NO: 3299
  source 1..75: mol_type = other RNA
  modified_base 14: mod_base = OTHER; note = 2'-fluoroguanosine
  modified_base 19: mod_base = OTHER; note = 2'-Omethyluridine phosphorothiorate
  modified_base 25: mod_base = OTHER; note = Adenosine phosphorothiorate
  modified_base 27: mod_base = OTHER; note = Cytosine phosphorothiorate
  modified_base 39: mod_base = OTHER; note = Cytosine phosphorothiorate
  modified_base 45: mod_base = OTHER; note = 2'-fluoroguanosine
  modified_base 56: mod_base = OTHER; note = 2'-Omethyladenosine phosphorothiorate
  modified_base 68: mod_base = OTHER; note = Adenosine phosphorothiorate
  modified_base 74: mod_base = OTHER; note = 2'-Omethylcytosine

SEQ ID NO: 6926 - RNA, 85 nt, synthetic construct; identical to SEQ ID NO: 3297
  source 1..85: mol_type = other RNA
  modified_base 1: mod_base = OTHER; note = 2'-Omethylguanosine phosphorothiorate
  modified_base 2: mod_base = OTHER; note = 2'-Omethylcytosine
  modified_base 3: mod_base = OTHER; note = 2'-Omethyluridine
  modified_base 4: mod_base = OTHER; note = 2'-Omethylguanosine
  modified_base 5: mod_base = OTHER; note = 2'-Omethyluridine
  modified_base 6: mod_base = OTHER; note = 2'-Omethylguanosine
  modified_base 16: mod_base = OTHER; note = 2'-Omethyluridine
  modified_base 17: mod_base = OTHER; note = 2'-Omethylguanosine
  modified_base 18: mod_base = OTHER; note = 2'-Omethylguanosine
  modified_base 63: mod_base = OTHER; note = 2'-Omethyluridine phosphorothiorate
  modified_base 64: mod_base = OTHER; note = Uridine phosphorothiorate
  modified_base 65: mod_base = OTHER; note = 2'-Omethylcytosine
  modified_base 66: mod_base = OTHER; note = 2'-fluoroguanosine
  modified_base 68: mod_base = OTHER; note = 2'-Omethyladenosine
  modified_base 82: mod_base = OTHER; note = 2'-Omethylguanosine

SEQ ID NO: 6927 - RNA, 76 nt, synthetic construct; identical to SEQ ID NO: 3289
  source 1..76: mol_type = other RNA
  modified_base 1: mod_base = OTHER; note = 2'-Omethylguanosine
  modified_base 52: mod_base = OTHER; note = 2'-Omethylguanosine

SEQ ID NO: 6928 - RNA, 75 nt, synthetic construct; identical to SEQ ID NO: 3311
  source 1..75: mol_type = other RNA
  modified_base 1: mod_base = OTHER; note = 2'-Omethylguanosine phosphorothiorate
  modified_base 2: mod_base = OTHER; note = 2'-Omethylguanosine phosphorothiorate
  modified_base 12: mod_base = OTHER; note = Guanosine phosphorothiorate
  modified_base 13: mod_base = OTHER; note = 2'-fluorouridine phosphorothiorate
  modified_base 23: mod_base = OTHER; note = Cytosine phosphorothiorate
  modified_base 24: mod_base = OTHER; note = 2'-fluoroadenosine
  modified_base 43: mod_base = OTHER; note = 2'-fluoroguanosine
  modified_base 51: mod_base = OTHER; note = Adenosine phosphorothiorate
  modified_base 58: mod_base = OTHER; note = 2'-Omethylguanosine phosphorothiorate
  modified_base 60: mod_base = OTHER; note = 2'-fluorocytosine
  modified_base 67: mod_base = OTHER; note = 2'-fluoroguanosine
  modified_base 69: mod_base = OTHER; note = 2'-fluoroadenosine
  modified_base 73: mod_base = OTHER; note = Cytosine phosphorothiorate
  modified_base 74: mod_base = OTHER; note = 2'-Omethylcytosine

SEQ ID NO: 6929 - RNA, 76 nt, synthetic construct; identical to SEQ ID NO: 625
  source 1..76: mol_type = other RNA
  modified_base 1: mod_base = OTHER; note = 2'-Omethylguanosine phosphorothiorate
  modified_base 2: mod_base = OTHER; note = 2'-Omethylguanosine
  modified_base 13: mod_base = OTHER; note = 2'-Omethylcytosine
  modified_base 33: mod_base = OTHER; note = 2'-fluorouridine
  modified_base 37: mod_base = OTHER; note = Adenosine phosphorothiorate
  modified_base 52: mod_base = OTHER; note = 2'-Omethylguanosine
  modified_base 62: mod_base = OTHER; note = 2'-Omethylcytosine
  modified_base 68: mod_base = OTHER; note = 2'-Omethylguanosine
  modified_base 73: mod_base = OTHER; note = 2'-Omethylguanosine
  modified_base 75: mod_base = OTHER; note = 2'-fluorocytosine phosphorothiorate

SEQ ID NO: 6930 - RNA, 76 nt, synthetic construct; identical to SEQ ID NO: 625
  source 1..76: mol_type = other RNA
  modified_base 2: mod_base = OTHER; note = Guanosine phosphorothiorate
  modified_base 4: mod_base = OTHER; note = Uridine phosphorothiorate
  modified_base 6: mod_base = OTHER; note = Cytosine phosphorothiorate
  modified_base 11: mod_base = OTHER; note = 2'-fluorocytosine phosphorothiorate
  modified_base 12: mod_base = OTHER; note = Guanosine phosphorothiorate
  modified_base 15: mod_base = OTHER; note = 2'-fluoroadenosine
  modified_base 16: mod_base = OTHER; note = Uridine phosphorothiorate
  modified_base 19: mod_base = OTHER; note = Adenosine phosphorothiorate
  modified_base 20: mod_base = OTHER; note = 2'-fluorouridine
  modified_base 25: mod_base = OTHER; note = 2'-Omethylcytosine phosphorothiorate
  modified_base 26: mod_base = OTHER; note = 2'-Omethyladenosine
  modified_base 29: mod_base = OTHER; note = 2'-Omethylguanosine
  modified_base 31: mod_base = OTHER; note = 2'-Omethyladenosine
  modified_base 32: mod_base = OTHER; note = 2'-fluorocytosine
  modified_base 38: mod_base = OTHER; note = 2'-Omethyladenosine phosphorothiorate
  modified_base 39: mod_base = OTHER; note = 2'-Omethyluridine
  modified_base 41: mod_base = OTHER; note = 2'-Omethylcytosine
  modified_base 45: mod_base = OTHER; note = 2'-fluoroguanosine phosphorothiorate
  modified_base 48: mod_base = OTHER; note = 2'-fluorouridine
  modified_base 52: mod_base = OTHER; note = 2'-fluoroguanosine
  modified_base 53: mod_base = OTHER; note = 2'-fluoroguanosine phosphorothiorate
  modified_base 56: mod_base = OTHER; note = 2'-Omethylcytosine
  modified_base 57: mod_base = OTHER; note = 2'-Omethylguanosine
  modified_base 59: mod_base = OTHER; note = Guanosine phosphorothiorate
  modified_base 60: mod_base = OTHER; note = 2'-Omethyluridine
  modified_base 65: mod_base = OTHER; note = 2'-fluoroguanosine
  modified_base 66: mod_base = OTHER; note = 2'-fluorocytosine
  modified_base 69: mod_base = OTHER; note = Adenosine phosphorothiorate
  modified_base 70: mod_base = OTHER; note = 2'-Omethylguanosine
  modified_base 71: mod_base = OTHER; note = 2'-Omethyluridine
  modified_base 73: mod_base = OTHER; note = Guanosine phosphorothiorate
  modified_base 74: mod_base = OTHER; note = 2'-Omethylcytosine
  modified_base 75: mod_base = OTHER; note = Cytosine phosphorothiorate
  modified_base 76: mod_base = OTHER; note = 2'-fluoroadenosine

SEQ ID NO: 6931 - RNA, 75 nt, synthetic construct; identical to SEQ ID NO: 3311
  source 1..75: mol_type = other RNA
  modified_base 1: mod_base = OTHER; note = 2'-Omethylguanosine phosphorothiorate
  modified_base 3: mod_base = OTHER; note = 2'-fluorouridine phosphorothiorate
  modified_base 11: mod_base = OTHER; note = 2'-Omethyluridine
  modified_base 12: mod_base = OTHER; note = 2'-fluoroguanosine
  modified_base 20: mod_base = OTHER; note = Adenosine phosphorothiorate
  modified_base 22: mod_base = OTHER; note = 2'-fluoroguanosine
  modified_base 30: mod_base = OTHER; note = 2'-fluoroguanosine
  modified_base 40: mod_base = OTHER; note = 2'-Omethylcytosine
  modified_base 43: mod_base = OTHER; note = Guanosine phosphorothiorate
  modified_base 49: mod_base = OTHER; note = Cytosine phosphorothiorate
  modified_base 50: mod_base = OTHER; note = 2'-fluoroguanosine
  modified_base 58: mod_base = OTHER; note = 2'-Omethylguanosine
  modified_base 62: mod_base = OTHER; note = Cytosine phosphorothiorate
  modified_base 68: mod_base = OTHER; note = 2'-fluoroadenosine
  modified_base 70: mod_base = OTHER; note = Cytosine phosphorothiorate
  modified_base 71: mod_base = OTHER; note = Cytosine phosphorothiorate
  modified_base 72: mod_base = OTHER; note = Uridine phosphorothiorate
  modified_base 74: mod_base = OTHER; note = Cytosine phosphorothiorate

SEQ ID NO: 6932 - RNA, 76 nt, synthetic construct; identical to SEQ ID NO: 625
  source 1..76: mol_type = other RNA
  modified_base 1: mod_base = OTHER; note = 2'-Omethylguanosine phosphorothiorate
  modified_base 2: mod_base = OTHER; note = 2'-Omethylguanosine phosphorothiorate
  modified_base 3: mod_base = OTHER; note = 2'-Omethylcytosine
  modified_base 4: mod_base = OTHER; note = 2'-Omethyluridine
  modified_base 5: mod_base = OTHER; note = 2'-Omethylcytosine
  modified_base 6: mod_base = OTHER; note = 2'-Omethylcytosine
  modified_base 10: mod_base = OTHER; note = 2'-Omethylguanosine
  modified_base 11: mod_base = OTHER; note = 2'-Omethylcytosine
  modified_base 12: mod_base = OTHER; note = 2'-Omethylguanosine
  modified_base 13: mod_base = OTHER; note = 2'-Omethylcytosine
  modified_base 16: mod_base = OTHER; note = 2'-Omethyluridine
  modified_base 17: mod_base = OTHER; note = 2'-Omethylguanosine
  modified_base 18: mod_base = OTHER; note = 2'-Omethylguanosine
  modified_base 20: mod_base = OTHER; note = 2'-Omethyluridine
  modified_base 25: mod_base = OTHER; note = 2'-Omethylcytosine
  modified_base 33: mod_base = OTHER; note = 2'-fluorouridine
  modified_base 35: mod_base = OTHER; note = Cytosine phosphorothiorate
  modified_base 37: mod_base = OTHER; note = Adenosine phosphorothiorate
  modified_base 38: mod_base = OTHER; note = Adenosine phosphorothiorate
  modified_base 41: mod_base = OTHER; note = 2'-fluorocytosine
  modified_base 42: mod_base = OTHER; note = 2'-Omethyladenosine
  modified_base 43: mod_base = OTHER; note = 2'-Omethyladenosine
  modified_base 44: mod_base = OTHER; note = 2'-fluoroadenosine
  modified_base 49: mod_base = OTHER; note = 2'-Omethylcytosine
  modified_base 50: mod_base = OTHER; note = 2'-Omethylcytosine
  modified_base 52: mod_base = OTHER; note = 2'-Omethylguanosine
  modified_base 54: mod_base = OTHER; note = 2'-Omethyluridine
  modified_base 55: mod_base = OTHER; note = Uridine phosphorothiorate
  modified_base 56: mod_base = OTHER; note = 2'-Omethylcytosine
  modified_base 57: mod_base = OTHER; note = 2'-fluoroguanosine
  modified_base 59: mod_base = OTHER; note = 2'-Omethylguanosine
  modified_base 61: mod_base = OTHER; note = 2'-Omethylcytosine
  modified_base 65: mod_base = OTHER; note = 2'-Omethylguanosine
  modified_base 73: mod_base = OTHER; note = 2'-Omethylguanosine

SEQ ID NO: 6933 - RNA, 76 nt, synthetic construct; identical to SEQ ID NO: 3289
  source 1..76: mol_type = other RNA
  modified_base 1: mod_base = OTHER; note = 2'-Omethylguanosine phosphorothiorate
  modified_base 2: mod_base = OTHER; note = 2'-Omethylcytosine phosphorothiorate
  modified_base 3: mod_base = OTHER; note = 2'-Omethylcytosine
  modified_base 4: mod_base = OTHER; note = 2'-Omethyluridine
  modified_base 5: mod_base = OTHER; note = 2'-Omethylguanosine
  modified_base 6: mod_base = OTHER; note = 2'-Omethylguanosine
  modified_base 10: mod_base = OTHER; note = 2'-Omethylguanosine
  modified_base 11: mod_base = OTHER; note = 2'-Omethylcytosine
  modified_base 12: mod_base = OTHER; note = 2'-Omethyluridine
  modified_base 13: mod_base = OTHER; note = 2'-Omethylcytosine
  modified_base 14: mod_base = OTHER; note = 2'-Omethyladenosine
  modified_base 15: mod_base = OTHER; note = 2'-fluoroguanosine
  modified_base 16: mod_base = OTHER; note = 2'-Omethyluridine
  modified_base 18: mod_base = OTHER; note = 2'-Omethylguanosine
  modified_base 19: mod_base = OTHER; note = 2'-Omethylguanosine
  modified_base 20: mod_base = OTHER; note = 2'-fluorouridine
  modified_base 22: mod_base = OTHER; note = 2'-Omethylguanosine
  modified_base 23: mod_base = OTHER; note = 2'-Omethyladenosine
  modified_base 24: mod_base = OTHER; note = 2'-Omethylguanosine
  modified_base 25: mod_base = OTHER; note = 2'-Omethylcytosine
  modified_base 33: mod_base = OTHER; note = 2'-fluorouridine
  modified_base 35: mod_base = OTHER; note = Uridine phosphorothiorate
  modified_base 37: mod_base = OTHER; note = Adenosine phosphorothiorate
  modified_base 38: mod_base = OTHER; note = Adenosine phosphorothiorate
  modified_base 44: mod_base = OTHER; note = 2'-Omethylguanosine
  modified_base 45: mod_base = OTHER; note = 2'-Omethylguanosine
  modified_base 46: mod_base = OTHER; note = 2'-fluoroguanosine
  modified_base 47: mod_base = OTHER; note = 2'-fluorouridine
  modified_base 48: mod_base = OTHER; note = 2'-fluorocytosine
  modified_base 56: mod_base = OTHER; note = 2'-Omethylcytosine
  modified_base 59: mod_base = OTHER; note = 2'-Omethylguanosine
  modified_base 61: mod_base = OTHER; note = 2'-Omethylcytosine
  modified_base 62: mod_base = OTHER; note = 2'-Omethylcytosine
  modified_base 63: mod_base = OTHER; note = 2'-fluorocytosine
  modified_base 64: mod_base = OTHER; note = 2'-Omethyluridine
  modified_base 65: mod_base = OTHER; note = 2'-Omethylguanosine
  modified_base 66: mod_base = OTHER; note = 2'-Omethyluridine
  modified_base 67: mod_base = OTHER; note = 2'-Omethylcytosine
  modified_base 68: mod_base = OTHER; note = 2'-Omethylcytosine
  modified_base 73: mod_base = OTHER; note = 2'-Omethylguanosine

SEQ ID NO: 6934 - RNA, 74 nt, synthetic construct; identical to SEQ ID NO: 766
  source 1..74: mol_type = other RNA
  modified_base 1: mod_base = OTHER; note = 2'-Omethylguanosine phosphorothiorate
  modified_base 2: mod_base = OTHER; note = 2'-Omethylguanosine phosphorothiorate
  modified_base 22: mod_base = OTHER; note = Guanosine phosphorothiorate
  modified_base 23: mod_base = OTHER; note = 2'-Omethylcytosine
  modified_base 66: mod_base = OTHER; note = Cytosine phosphorothiorate
  modified_base 67: mod_base = OTHER; note = 2'-Omethylguanosine
  modified_base 73: mod_base = OTHER; note = 2'-Omethylguanosine

SEQ ID NO: 6935 - RNA, 76 nt, synthetic construct; identical to SEQ ID NO: 625
  source 1..76: mol_type = other RNA
  modified_base 44: mod_base = OTHER; note = 2'-Omethyladenosine
  modified_base 45: mod_base = OTHER; note = 2'-Omethylguanosine
  modified_base 46: mod_base = OTHER; note = 2'-fluoroguanosine
  modified_base 47: mod_base = OTHER; note = Uridine phosphorothiorate
  modified_base 48: mod_base = OTHER; note = 2'-fluorouridine
  modified_base 49: mod_base = OTHER; note = 2'-Omethylcytosine

SEQ ID NO: 6936 - RNA, 76 nt, synthetic construct; identical to SEQ ID NO: 3332
  source 1..76: mol_type = other RNA
  modified_base 1: mod_base = OTHER; note = 2'-Omethylguanosine
  modified_base 14: mod_base = OTHER; note = 2'-Omethyladenosine
  modified_base 15: mod_base = OTHER; note = 2'-fluoroadenosine
  modified_base 16: mod_base = OTHER; note = 2'-Omethyluridine
  modified_base 17: mod_base = OTHER; note = 2'-Omethylguanosine
  modified_base 18: mod_base = OTHER; note = 2'-Omethylguanosine
  modified_base 19: mod_base = OTHER; note = 2'-fluoroadenosine
  modified_base 20: mod_base = OTHER; note = 2'-Omethyluridine
  modified_base 54: mod_base = OTHER; note = 2'-Omethyluridine phosphorothiorate
  modified_base 55: mod_base = OTHER; note = Uridine phosphorothiorate
  modified_base 56: mod_base = OTHER; note = 2'-Omethylcytosine
  modified_base 57: mod_base = OTHER; note = 2'-Omethylguanosine
  modified_base 59: mod_base = OTHER; note = 2'-Omethylguanosine
  modified_base 73: mod_base = OTHER; note = 2'-Omethylguanosine

SEQ ID NO: 6937 - RNA, 76 nt, synthetic construct; identical to SEQ ID NO: 3318
  source 1..76: mol_type = other RNA
  modified_base 1: mod_base = OTHER; note = 2'-Omethylcytosine phosphorothiorate
  modified_base 2: mod_base = OTHER; note = 2'-Omethylcytosine phosphorothiorate
  modified_base 3: mod_base = OTHER; note = 2'-Omethyluridine
  modified_base 4: mod_base = OTHER; note = 2'-Omethyluridine
  modified_base 5: mod_base = OTHER; note = 2'-Omethylcytosine
  modified_base 6: mod_base = OTHER; note = 2'-Omethylguanosine
  modified_base 10: mod_base = OTHER; note = 2'-Omethylguanosine
  modified_base 11: mod_base = OTHER; note = 2'-Omethylcytosine
  modified_base 12: mod_base = OTHER; note = 2'-Omethyluridine
  modified_base 13: mod_base = OTHER; note = 2'-Omethylcytosine
  modified_base 22: mod_base = OTHER; note = 2'-Omethylguanosine
  modified_base 23: mod_base = OTHER; note = 2'-Omethyladenosine
  modified_base 24: mod_base = OTHER; note = 2'-Omethylguanosine
  modified_base 25: mod_base = OTHER; note = 2'-Omethylcytosine
  modified_base 49: mod_base = OTHER; note = 2'-Omethylguanosine
  modified_base 50: mod_base = OTHER; note = 2'-Omethylcytosine
  modified_base 51: mod_base = OTHER; note = 2'-Omethyluridine
  modified_base 52: mod_base = OTHER; note = 2'-Omethylguanosine
  modified_base 53: mod_base = OTHER; note = 2'-Omethylguanosine
  modified_base 54: mod_base = OTHER; note = 2'-Omethyluridine
  modified_base 61: mod_base = OTHER; note = 2'-Omethylcytosine
  modified_base 62: mod_base = OTHER; note = 2'-Omethylcytosine
  modified_base 63: mod_base = OTHER; note = 2'-fluoroguanosine
  modified_base 64: mod_base = OTHER; note = 2'-Omethylguanosine
  modified_base 65: mod_base = OTHER; note = 2'-Omethylcytosine
  modified_base 66: mod_base = OTHER; note = 2'-Omethyluridine
  modified_base 67: mod_base = OTHER; note = 2'-Omethylcytosine
  modified_base 68: mod_base = OTHER; note = 2'-Omethylguanosine
  modified_base 73: mod_base = OTHER; note = 2'-Omethyladenosine

SEQ ID NO: 6938 - DNA, 76 bp, synthetic construct; identical to SEQ ID NO: 1924
  source 1..76: mol_type = other DNA
  modified_base 1: mod_base = OTHER; note = 2'-Omethylguanosine phosphorothiorate
  modified_base 2: mod_base = OTHER; note = 2'-Omethylguanosine
  modified_base 6: mod_base = OTHER; note = 2'-fluorocytosine
  modified_base 9: mod_base = OTHER; note = 2'-Omethylguanosine phosphorothiorate
  modified_base 11: mod_base = OTHER; note = Cytosine phosphorothiorate
  modified_base 13: mod_base = OTHER; note = 2'-fluorocytosine
  modified_base 14: mod_base = OTHER; note = Adenosine phosphorothiorate
  modified_base 15: mod_base = OTHER; note = 2'-fluoroadenosine
  modified_base 18: mod_base = OTHER; note = 2'-Omethylguanosine phosphorothiorate
  modified_base 19: mod_base = OTHER; note = 2'-fluoroadenosine
  modified_base 21: mod_base = OTHER; note = Adenosine phosphorothiorate
  modified_base 22: mod_base = OTHER; note = 2'-Omethylguanosine
  modified_base 25: mod_base = OTHER; note = 2'-O-(2-Methoxyethyl) 5-methylcytosine phosphorothiorate
  modified_base 26: mod_base = OTHER; note = 2'-Omethyladenosine
  modified_base 28: mod_base = OTHER; note = Uridine phosphorothiorate
  modified_base 29: mod_base = OTHER; note = 2'-O-(2-Methoxyethyl) guanosine phosphorothiorate
  modified_base 31: mod_base = OTHER; note = 2'-Omethyladenosine phosphorothiorate
  modified_base 35: mod_base = OTHER; note = Cytosine phosphorothiorate
  modified_base 37: mod_base = OTHER; note = Adenosine phosphorothiorate
  modified_base 38: mod_base = OTHER; note = 2'-O-(2-Methoxyethyl) adenosine
  modified_base 43: mod_base = OTHER; note = Adenosine phosphorothiorate
  modified_base 44: mod_base = OTHER; note = deoxyadenosine phosphorothiorate
  modified_base 46: mod_base = OTHER; note = Guanosine phosphorothiorate
  modified_base 47: mod_base = OTHER; note = 2'-fluorouridine
  modified_base 50: mod_base = OTHER; note = deoxycytosine phosphorothiorate
  modified_base 51: mod_base = OTHER; note = 2'-O-(2-Methoxyethyl) guanosine phosphorothiorate
  modified_base 52: mod_base = OTHER; note = 2'-fluoroguanosine
  modified_base 59: mod_base = OTHER; note = 2'-fluoroguanosine
  modified_base 61: mod_base = OTHER; note = deoxycytosine phosphorothiorate
  modified_base 62: mod_base = OTHER; note = 2'-fluorocytosine
  modified_base 65: mod_base = OTHER; note = 2'-Omethylguanosine
  modified_base 66: mod_base = OTHER; note = Cytosine phosphorothiorate
  modified_base 71: mod_base = OTHER; note = Uridine phosphorothiorate
  modified_base 73: mod_base = OTHER; note = 2'-O-(2-Methoxyethyl) guanosine
  modified_base 74: mod_base = OTHER; note = 2'-fluorocytosine
  modified_base 75: mod_base = OTHER; note = Cytosine phosphorothiorate
  modified_base 76: mod_base = OTHER; note = 2'-Omethyladenosine
  misc_feature 1..9: note = RNA
  misc_feature 10: note = DNA
  misc_feature 11..43: note = RNA
  misc_feature 44: note = DNA
  misc_feature 45..47: note = RNA
  misc_feature 48: note = DNA
  misc_feature 49: note = RNA
  misc_feature 50: note = DNA
  misc_feature 51..56: note = RNA
  misc_feature 57: note = DNA
  misc_feature 58..60: note = RNA
  misc_feature 61: note = DNA
  misc_feature 62..76: note = RNA

SEQ ID NO: 6939 - RNA, 85 nt, synthetic construct; identical to SEQ ID NO: 3286
  source 1..85: mol_type = other RNA
  modified_base 1: mod_base = OTHER; note = 2'-Omethylcytosine
  modified_base 11: mod_base = OTHER; note = 2'-Omethylcytosine
  modified_base 20: mod_base = OTHER; note = 2'-Omethyladenosine
  modified_base 23: mod_base = OTHER; note = 2'-fluoroguanosine
  modified_base 27: mod_base = OTHER; note = 2'-fluorouridine
  modified_base 29: mod_base = OTHER; note = 2'-fluoroguanosine
  modified_base 33: mod_base = OTHER; note = 2'-fluorouridine
  modified_base 40: mod_base = OTHER; note = Cytosine phosphorothiorate
  modified_base 49: mod_base = OTHER; note = 2'-fluorouridine
  modified_base 50: mod_base = OTHER; note = 2'-fluoroadenosine phosphorothiorate
  modified_base 51: mod_base = OTHER; note = 2'-Omethyluridine
  modified_base 53: mod_base = OTHER; note = 2'-fluorouridine phosphorothiorate
  modified_base 55: mod_base = OTHER; note = 2'-Omethylcytosine
  modified_base 57: mod_base = OTHER; note = 2'-Omethylcytosine
  modified_base 65: mod_base = OTHER; note = Cytosine phosphorothiorate
  modified_base 73: mod_base = OTHER; note = 2'-fluoroadenosine
  modified_base 75: mod_base = OTHER; note = Uridine phosphorothiorate
  modified_base 77: mod_base = OTHER; note = 2'-fluorocytosine
  modified_base 84: mod_base = OTHER; note = 2'-Omethylcytosine

SEQ ID NO: 6940 - RNA, 76 nt, synthetic construct; identical to SEQ ID NO: 3318
  source 1..76: mol_type = other RNA
  modified_base 1: mod_base = OTHER; note = 2'-Omethylcytosine phosphorothiorate
  modified_base 2: mod_base = OTHER; note = 2'-Omethylcytosine phosphorothiorate
  modified_base 3: mod_base = OTHER; note = 2'-Omethyluridine
  modified_base 4: mod_base = OTHER; note = 2'-Omethyluridine
  modified_base 5: mod_base = OTHER; note = 2'-Omethylcytosine
  modified_base 6: mod_base = OTHER; note = 2'-Omethylguanosine
  modified_base 16: mod_base = OTHER; note = 2'-Omethyluridine
  modified_base 18: mod_base = OTHER; note = 2'-Omethylguanosine
  modified_base 19: mod_base = OTHER; note = 2'-Omethylguanosine
  modified_base 33: mod_base = OTHER; note = 2'-fluorouridine
  modified_base 35: mod_base = OTHER; note = Uridine phosphorothiorate
  modified_base 37: mod_base = OTHER; note = Guanosine phosphorothiorate
  modified_base 38: mod_base = OTHER; note = Adenosine phosphorothiorate
  modified_base 44: mod_base = OTHER; note = 2'-Omethyladenosine
  modified_base 45: mod_base = OTHER; note = 2'-Omethylguanosine
  modified_base 46: mod_base = OTHER; note = 2'-fluoroguanosine
  modified_base 47: mod_base = OTHER; note = 2'-fluorouridine
  modified_base 48: mod_base = OTHER; note = 2'-fluorocytosine
  modified_base 49: mod_base = OTHER; note = 2'-Omethylguanosine
  modified_base 50: mod_base = OTHER; note = 2'-Omethylcytosine
  modified_base 51: mod_base = OTHER; note = 2'-Omethyluridine
  modified_base 54: mod_base = OTHER; note = 2'-Omethyluridine
  modified_base 56: mod_base = OTHER; note = 2'-Omethylcytosine
  modified_base 59: mod_base = OTHER; note = 2'-Omethyladenosine
  modified_base 61: mod_base = OTHER; note = 2'-Omethylcytosine
  modified_base 62: mod_base = OTHER; note = 2'-Omethylcytosine
  modified_base 63: mod_base = OTHER; note = 2'-fluoroguanosine
  modified_base 64: mod_base = OTHER; note = 2'-Omethylguanosine
  modified_base 65: mod_base = OTHER; note = 2'-Omethylcytosine
  modified_base 66: mod_base = OTHER; note = 2'-Omethyluridine
  modified_base 67: mod_base = OTHER; note = 2'-Omethylcytosine
  modified_base 68: mod_base = OTHER; note = 2'-Omethylguanosine
  modified_base 73: mod_base = OTHER; note = 2'-Omethyladenosine

SEQ ID NO: 6941 - RNA, 75 nt, synthetic construct; identical to SEQ ID NO: 3336
  source 1..75: mol_type = other RNA
  modified_base 1: mod_base = OTHER; note = 2'-Omethylcytosine phosphorothiorate
  modified_base 3: mod_base = OTHER; note = Uridine phosphorothiorate
  modified_base 10: mod_base = OTHER; note = Cytosine phosphorothiorate
  modified_base 11: mod_base = OTHER; note = Uridine phosphorothiorate
  modified_base 13: mod_base = OTHER; note = Adenosine phosphorothiorate
  modified_base 16: mod_base = OTHER; note = 2'-Omethylcytosine
  modified_base 19: mod_base = OTHER; note = 2'-fluorouridine
  modified_base 20: mod_base = OTHER; note = 2'-fluoroadenosine phosphorothiorate
  modified_base 21: mod_base = OTHER; note = 2'-fluoroguanosine
  modified_base 25: mod_base = OTHER; note = Adenosine phosphorothiorate
  modified_base 26: mod_base = OTHER; note = Uridine phosphorothiorate
  modified_base 37: mod_base = OTHER; note = 2'-fluoroadenosine
  modified_base 40: mod_base = OTHER; note = 2'-fluorouridine
  modified_base 44: mod_base = OTHER; note = 2'-fluoroguanosine phosphorothiorate
  modified_base 47: mod_base = OTHER; note = 2'-Omethylcytosine phosphorothiorate
  modified_base 52: mod_base = OTHER; note = Guanosine phosphorothiorate
  modified_base 53: mod_base = OTHER; note = 2'-fluorouridine phosphorothiorate
  modified_base 61: mod_base = OTHER; note = 2'-fluorocytosine
  modified_base 62: mod_base = OTHER; note = 2'-fluorocytosine
  modified_base 73: mod_base = OTHER; note = Cytosine phosphorothiorate
  modified_base 74: mod_base = OTHER; note = 2'-Omethylcytosine

SEQ ID NO: 6942 - RNA, 76 nt, synthetic construct; identical to SEQ ID NO: 3318
  source 1..76: mol_type = other RNA
  modified_base 1: mod_base = OTHER; note = 2'-Omethylcytosine
  modified_base 13: mod_base = OTHER; note = 2'-Omethylcytosine
  modified_base 18: mod_base = OTHER; note = 2'-Omethylguanosine
  modified_base 19: mod_base = OTHER; note = 2'-Omethylguanosine
  modified_base 25: mod_base = OTHER; note = 2'-Omethylcytosine
  modified_base 33: mod_base = OTHER; note = 2'-fluorouridine
  modified_base 34: mod_base = OTHER; note = 2'-Omethylcytosine
  modified_base 35: mod_base = OTHER; note = Uridine phosphorothiorate
  modified_base 37: mod_base = OTHER; note = Guanosine phosphorothiorate
  modified_base 38: mod_base = OTHER; note = Adenosine phosphorothiorate
  modified_base 41: mod_base = OTHER; note = 2'-Omethylcytosine
  modified_base 42: mod_base = OTHER; note = 2'-Omethyluridine
  modified_base 43: mod_base = OTHER; note = 2'-Omethyluridine
  modified_base 44: mod_base = OTHER; note = 2'-Omethyladenosine
  modified_base 49: mod_base = OTHER; note = 2'-Omethylguanosine
  modified_base 50: mod_base = OTHER; note = 2'-Omethylcytosine
  modified_base 52: mod_base = OTHER; note = 2'-Omethylguanosine
  modified_base 54: mod_base = OTHER; note = Uridine phosphorothiorate
  modified_base 55: mod_base = OTHER; note = Uridine phosphorothiorate
  modified_base 56: mod_base = OTHER; note = 2'-Omethylcytosine
  modified_base 57: mod_base = OTHER; note = Guanosine phosphorothiorate
  modified_base 58: mod_base = OTHER; note = Adenosine phosphorothiorate
  modified_base 59: mod_base = OTHER; note = 2'-Omethyladenosine
  modified_base 61: mod_base = OTHER; note = 2'-Omethylcytosine
  modified_base 65: mod_base = OTHER; note = 2'-Omethylcytosine
  modified_base 73: mod_base = OTHER; note = 2'-Omethyladenosine

SEQ ID NO: 6943 - RNA, 76 nt, synthetic construct; identical to SEQ ID NO: 3318
  source 1..76: mol_type = other RNA
  modified_base 1: mod_base = OTHER; note = 2'-Omethylcytosine phosphorothiorate
  modified_base 2: mod_base = OTHER; note = Cytosine phosphorothiorate
  modified_base 75: mod_base = OTHER; note = 2'-Omethylcytosine phosphorothiorate

SEQ ID NO: 6944 - RNA, 75 nt, synthetic construct; identical to SEQ ID NO: 1045
  source 1..75: mol_type = other RNA
  modified_base 1: mod_base = OTHER; note = 2'-Omethylguanosine
  modified_base 2: mod_base = OTHER; note = 2'-Omethylguanosine
  modified_base 3: mod_base = OTHER; note = 2'-Omethyluridine
  modified_base 4: mod_base = OTHER; note = 2'-Omethyluridine
  modified_base 5: mod_base = OTHER; note = 2'-Omethylcytosine
  modified_base 6: mod_base = OTHER; note = 2'-Omethylcytosine
  modified_base 14: mod_base = OTHER; note = 2'-Omethyladenosine
  modified_base 17: mod_base = OTHER; note = 2'-Omethylguanosine
  modified_base 18: mod_base = OTHER; note = 2'-Omethylguanosine
  modified_base 20: mod_base = OTHER; note = 2'-Omethyladenosine
  modified_base 22: mod_base = OTHER; note = 2'-Omethylguanosine
  modified_base 25: mod_base = OTHER; note = 2'-Omethylcytosine
  modified_base 27: mod_base = OTHER; note = 2'-Omethylcytosine
  modified_base 33: mod_base = OTHER; note = 2'-fluorouridine
  modified_base 41: mod_base = OTHER; note = 2'-Omethylcytosine
  modified_base 44: mod_base = OTHER; note = 2'-Omethylcytosine
  modified_base 45: mod_base = OTHER; note = 2'-Omethylguanosine
  modified_base 46: mod_base = OTHER; note = 2'-fluoroadenosine
  modified_base 47: mod_base = OTHER; note = 2'-fluorouridine
  modified_base 51: mod_base = OTHER; note = 2'-Omethyladenosine
  modified_base 54: mod_base = OTHER; note = Uridine phosphorothiorate
  modified_base 72: mod_base = OTHER; note = 2'-Omethyluridine

SEQ ID NO: 6945 - RNA, 76 nt, synthetic construct; identical to SEQ ID NO: 625
  source 1..76: mol_type = other RNA
  modified_base 1: mod_base = OTHER; note = 2'-Omethylguanosine
  modified_base 2: mod_base = OTHER; note = 2'-Omethylguanosine
  modified_base 4: mod_base = OTHER; note = 2'-fluorouridine
  modified_base 5: mod_base = OTHER; note = 2'-Omethylcytosine phosphorothiorate
  modified_base 6: mod_base = OTHER; note = 2'-Omethylcytosine
  modified_base 10: mod_base = OTHER; note = 2'-Omethylguanosine
  modified_base 11: mod_base = OTHER; note = Cytosine phosphorothiorate
  modified_base 13: mod_base = OTHER; note = 2'-fluorocytosine
  modified_base 17: mod_base = OTHER; note = 2'-Omethylguanosine
  modified_base 19: mod_base = OTHER; note = Adenosine phosphorothiorate
  modified_base 24: mod_base = OTHER; note = 2'-Omethylguanosine
  modified_base 25: mod_base = OTHER; note = Cytosine phosphorothiorate
  modified_base 26: mod_base = OTHER; note = 2'-Omethyladenosine
  modified_base 28: mod_base = OTHER; note = 2'-Omethyluridine
  modified_base 38: mod_base = OTHER; note = 2'-fluoroadenosine phosphorothiorate
  modified_base 39: mod_base = OTHER; note = 2'-Omethyluridine
  modified_base 40: mod_base = OTHER; note = 2'-Omethyluridine
  modified_base 41: mod_base = OTHER; note = 2'-Omethylcytosine
  modified_base 43: mod_base = OTHER; note = Adenosine phosphorothiorate
  modified_base 46: mod_base = OTHER; note = 2'-fluoroguanosine
  modified_base 47: mod_base = OTHER; note = Uridine phosphorothiorate
  modified_base 48: mod_base = OTHER; note = 2'-fluorouridine
  modified_base 49: mod_base = OTHER; note = Cytosine phosphorothiorate
  modified_base 50: mod_base = OTHER; note = 2'-Omethylcytosine
  modified_base 54: mod_base = OTHER; note = 2'-fluorouridine
  modified_base 57: mod_base = OTHER; note = 2'-fluoroguanosine
  modified_base 59: mod_base = OTHER; note = 2'-Omethylguanosine
  modified_base 63: mod_base = OTHER; note = 2'-fluorocytosine
  modified_base 65: mod_base = OTHER; note = 2'-fluoroguanosine phosphorothiorate
  modified_base 66: mod_base = OTHER; note = 2'-Omethylcytosine
  modified_base 67: mod_base = OTHER; note = Guanosine phosphorothiorate
  modified_base 68: mod_base = OTHER; note = 2'-Omethylguanosine
  modified_base 69: mod_base = OTHER; note = 2'-Omethyladenosine
  modified_base 71: mod_base = OTHER; note = 2'-Omethyluridine
  modified_base 74: mod_base = OTHER; note = 2'-Omethylcytosine

SEQ ID NO: 6946 - RNA, 74 nt, synthetic construct; identical to SEQ ID NO: 766
  source 1..74: mol_type = other RNA
  modified_base 1: mod_base = OTHER; note = 2'-Omethylguanosine phosphorothiorate
  modified_base 2: mod_base = OTHER; note = 2'-Omethylguanosine
  modified_base 3: mod_base = OTHER; note = 2'-Omethylcytosine
  modified_base 4: mod_base = OTHER; note = 2'-Omethyluridine
  modified_base 5: mod_base = OTHER; note = 2'-Omethylcytosine
  modified_base 6: mod_base = OTHER; note = 2'-Omethylcytosine
  modified_base 43: mod_base = OTHER; note = 2'-Omethyladenosine
  modified_base 44: mod_base = OTHER; note = 2'-Omethyladenosine
  modified_base 45: mod_base = OTHER; note = 2'-Omethylguanosine
  modified_base 46: mod_base = OTHER; note = 2'-fluoroguanosine
  modified_base 48: mod_base = OTHER; note = 2'-fluorouridine
  modified_base 49: mod_base = OTHER; note = 2'-Omethylcytosine
  modified_base 50: mod_base = OTHER; note = 2'-Omethylcytosine
  modified_base 73: mod_base = OTHER; note = 2'-Omethylguanosine

SEQ ID NO: 6947 - DNA, 76 bp, synthetic construct; identical to SEQ ID NO: 1924
  source 1..76: mol_type = other DNA
  modified_base 1: mod_base = OTHER; note = 2'-Omethylguanosine phosphorothiorate
  modified_base 2: mod_base = OTHER; note = 2'-Omethylguanosine phosphorothiorate
  modified_base 3: mod_base = OTHER; note = 2'-fluorocytosine phosphorothiorate
  modified_base 7: mod_base = OTHER; note = 2'-O-(2-Methoxyethyl) guanosine
  modified_base 11: mod_base = OTHER; note = Cytosine phosphorothiorate
  modified_base 12: mod_base = OTHER; note = 2'-fluoroguanosine phosphorothiorate
  modified_base 15: mod_base = OTHER; note = 2'-fluoroadenosine phosphorothiorate
  modified_base 18: mod_base = OTHER; note = Guanosine phosphorothiorate
  modified_base 19: mod_base = OTHER; note = 2'-Omethyladenosine
  modified_base 22: mod_base = OTHER; note = 2'-fluoroguanosine phosphorothiorate
  modified_base 23: mod_base = OTHER; note = 2'-Omethylcytosine
  modified_base 25: mod_base = OTHER; note = Cytosine phosphorothiorate
  modified_base 26: mod_base = OTHER; note = 2'-fluoroadenosine phosphorothiorate
  modified_base 27: mod_base = OTHER; note = 2'-O-(2-Methoxyethyl) thymine
  modified_base 29: mod_base = OTHER; note = Guanosine phosphorothiorate
  modified_base 30: mod_base = OTHER; note = 2'-fluoroguanosine phosphorothiorate
  modified_base 31: mod_base = OTHER; note = 2'-fluoroadenosine
  modified_base 39: mod_base = OTHER; note = Uridine phosphorothiorate
  modified_base 46: mod_base = OTHER; note = 2'-fluoroguanosine phosphorothiorate
  modified_base 49: mod_base = OTHER; note = Cytosine phosphorothiorate
  modified_base 50: mod_base = OTHER; note = 2'-O-(2-Methoxyethyl) 5-methylcytosine phosphorothiorate
  modified_base 52: mod_base = OTHER; note = Guanosine phosphorothiorate
  modified_base 53: mod_base = OTHER; note = 2'-Omethylguanosine
  modified_base 54: mod_base = OTHER; note = Uridine phosphorothiorate
  modified_base 55: mod_base = OTHER; note = 2'-O-(2-Methoxyethyl) thymine
  modified_base 59: mod_base = OTHER; note = Guanosine phosphorothiorate
  modified_base 61: mod_base = OTHER; note = Cytosine phosphorothiorate
  modified_base 63: mod_base = OTHER; note = Cytosine phosphorothiorate
  modified_base 65: mod_base = OTHER; note = 2'-Omethylguanosine phosphorothiorate
  modified_base 66: mod_base = OTHER; note = 2'-O-(2-Methoxyethyl) 5-methylcytosine phosphorothiorate
  modified_base 67: mod_base = OTHER; note = 2'-Omethylguanosine
  modified_base 69: mod_base = OTHER; note = Adenosine phosphorothiorate
  modified_base 74: mod_base = OTHER; note = 2'-O-(2-Methoxyethyl) 5-methylcytosine
  modified_base 75: mod_base = OTHER; note = deoxycytosine phosphorothiorate
  modified_base 76: mod_base = OTHER; note = 2'-Omethyladenosine
  misc_feature 1..39: note = RNA
  misc_feature 40: note = DNA
  misc_feature 41..61: note = RNA
  misc_feature 62: note = DNA
  misc_feature 63..71: note = RNA
  misc_feature 72: note = DNA
  misc_feature 73..74: note = RNA
  misc_feature 75: note = DNA
  misc_feature 76: note = RNA

SEQ ID NO: 6948 - RNA, 85 nt, synthetic construct; identical to SEQ ID NO: 3301
  source 1..85: mol_type = other RNA
  modified_base 1: mod_base = OTHER; note = 2'-Omethylguanosine phosphorothiorate
  modified_base 2: mod_base = OTHER; note = 2'-Omethylcytosine phosphorothiorate
  modified_base 3: mod_base = OTHER; note = Uridine phosphorothiorate
  modified_base 12: mod_base = OTHER; note = 2'-Omethylcytosine
  modified_base 18: mod_base = OTHER; note = 2'-Omethylguanosine phosphorothiorate
  modified_base 21: mod_base = OTHER; note = 2'-Omethyladenosine phosphorothiorate
  modified_base 27: mod_base = OTHER; note = Uridine phosphorothiorate
  modified_base 30: mod_base = OTHER; note = 2'-fluoroguanosine
  modified_base 37: mod_base = OTHER; note = 2'-fluoroadenosine
  modified_base 41: mod_base = OTHER; note = 2'-Omethylcytosine phosphorothiorate
  modified_base 45: mod_base = OTHER; note = 2'-Omethylguanosine
  modified_base 46: mod_base = OTHER; note = 2'-fluoroguanosine phosphorothiorate
  modified_base 48: mod_base = OTHER; note = Guanosine phosphorothiorate
  modified_base 57: mod_base = OTHER; note = 2'-fluorocytosine
  modified_base 58: mod_base = OTHER; note = 2'-fluoroguanosine
  modified_base 71: mod_base = OTHER; note = 2'-Omethylcytosine phosphorothiorate
  modified_base 72: mod_base = OTHER; note = 2'-fluorouridine
  modified_base 73: mod_base = OTHER; note = 2'-fluoroguanosine
  modified_base 82: mod_base = OTHER; note = 2'-Omethylguanosine
  modified_base 85: mod_base = OTHER; note = 2'-fluoroadenosine

SEQ ID NO: 6949 - RNA, 75 nt, synthetic construct; identical to SEQ ID NO: 3336
  source 1..75: mol_type = other RNA
  modified_base 4: mod_base = OTHER; note = 2'-Omethylguanosine phosphorothiorate
  modified_base 10: mod_base = OTHER; note = Cytosine phosphorothiorate
  modified_base 20: mod_base = OTHER; note = 2'-fluoroadenosine
  modified_base 25: mod_base = OTHER; note = 2'-fluoroadenosine
  modified_base 26: mod_base = OTHER; note = 2'-Omethyluridine phosphorothiorate
  modified_base 36: mod_base = OTHER; note = 2'-fluoroadenosine
  modified_base 39: mod_base = OTHER; note = 2'-fluorocytosine phosphorothiorate
  modified_base 53: mod_base = OTHER; note = 2'-fluorouridine
  modified_base 68: mod_base = OTHER; note = 2'-fluoroadenosine phosphorothiorate

SEQ ID NO: 6950 - RNA, 85 nt, synthetic construct; identical to SEQ ID NO: 3317
  source 1..85: mol_type = other RNA
  modified_base 1: mod_base = OTHER; note = 2'-Omethylguanosine phosphorothiorate
  modified_base 2: mod_base = OTHER; note = 2'-Omethylcytosine phosphorothiorate
  modified_base 18: mod_base = OTHER; note = 2'-Omethylguanosine
  modified_base 28: mod_base = OTHER; note = Uridine phosphorothiorate
  modified_base 39: mod_base = OTHER; note = 2'-fluorouridine
  modified_base 41: mod_base = OTHER; note = 2'-Omethylcytosine
  modified_base 60: mod_base = OTHER; note = Adenosine phosphorothiorate

SEQ ID NO: 6951 - RNA, 75 nt, synthetic construct; identical to SEQ ID NO: 1045
  source 1..75: mol_type = other RNA
  modified_base 1: mod_base = OTHER; note = 2'-Omethylguanosine phosphorothiorate
  modified_base 2: mod_base = OTHER; note = 2'-Omethylguanosine phosphorothiorate
  modified_base 3: mod_base = OTHER; note = 2'-Omethyluridine
  modified_base 4: mod_base = OTHER; note = 2'-Omethyluridine
  modified_base 5: mod_base = OTHER; note = 2'-Omethylcytosine
  modified_base 6: mod_base = OTHER; note = 2'-Omethylcytosine
  modified_base 16: mod_base = OTHER; note = 2'-Omethyluridine
  modified_base 17: mod_base = OTHER; note = 2'-Omethylguanosine
  modified_base 18: mod_base = OTHER; note = 2'-Omethylguanosine
  modified_base 33: mod_base = OTHER; note = 2'-fluorouridine
  modified_base 35: mod_base = OTHER; note = Uridine phosphorothiorate
  modified_base 37: mod_base = OTHER; note = Adenosine phosphorothiorate
  modified_base 38: mod_base = OTHER; note = Adenosine phosphorothiorate
  modified_base 44: mod_base = OTHER; note = 2'-Omethylcytosine
  modified_base 45: mod_base = OTHER; note = 2'-Omethylguanosine
  modified_base 46: mod_base = OTHER; note = 2'-fluoroadenosine
  modified_base 47: mod_base = OTHER; note = 2'-fluorouridine
  modified_base 53: mod_base = OTHER; note = 2'-Omethyluridine
  modified_base 55: mod_base = OTHER; note = 2'-Omethylcytosine
  modified_base 58: mod_base = OTHER; note = 2'-Omethylguanosine
  modified_base 60: mod_base = OTHER; note = 2'-Omethylcytosine
  modified_base 61: mod_base = OTHER; note = 2'-Omethyluridine
  modified_base 62: mod_base = OTHER; note = 2'-fluorocytosine
  modified_base 63: mod_base = OTHER; note = 2'-Omethylguanosine
  modified_base 64: mod_base = OTHER; note = 2'-Omethylguanosine
  modified_base 65: mod_base = OTHER; note = 2'-Omethyluridine
  modified_base 66: mod_base = OTHER; note = 2'-Omethylguanosine
  modified_base 67: mod_base = OTHER; note = 2'-Omethylguanosine
  modified_base 72: mod_base = OTHER; note = 2'-Omethyluridine

SEQ ID NO: 6952 - RNA, 76 nt, synthetic construct; identical to SEQ ID NO: 3615
  source 1..76: mol_type = other RNA
  modified_base 1: mod_base = OTHER; note = 2'-Omethylguanosine
  modified_base 2: mod_base = OTHER; note = 2'-Omethylguanosine
  modified_base 3: mod_base = OTHER; note = 2'-Omethylcytosine
  modified_base 4: mod_base = OTHER; note = 2'-Omethyluridine
  modified_base 5: mod_base = OTHER; note = 2'-Omethylcytosine
  modified_base 6: mod_base = OTHER; note = 2'-Omethylcytosine
  modified_base 14: mod_base = OTHER; note = 2'-Omethyladenosine
  modified_base 15: mod_base = OTHER; note = 2'-Omethyladenosine
  modified_base 16: mod_base = OTHER; note = 2'-Omethyluridine
  modified_base 17: mod_base = OTHER; note = 2'-Omethylguanosine
  modified_base 18: mod_base = OTHER; note = 2'-Omethylguanosine
  modified_base 20: mod_base = OTHER; note = 2'-Omethyluridine
  modified_base 25: mod_base = OTHER; note = 2'-Omethylcytosine
  modified_base 41: mod_base = OTHER; note = 2'-Omethylcytosine
  modified_base 42: mod_base = OTHER; note = 2'-Omethyladenosine
  modified_base 43: mod_base = OTHER; note = 2'-Omethyladenosine
  modified_base 44: mod_base = OTHER; note = 2'-Omethylguanosine
  modified_base 49: mod_base = OTHER; note = 2'-Omethylcytosine
  modified_base 50: mod_base = OTHER; note = 2'-Omethylcytosine
  modified_base 52: mod_base = OTHER; note = 2'-Omethylguanosine
  modified_base 54: mod_base = OTHER; note = 2'-Omethyluridine
  modified_base 55: mod_base = OTHER; note = Uridine phosphorothiorate
  modified_base 56: mod_base = OTHER; note = 2'-Omethylcytosine
  modified_base 57: mod_base = OTHER; note = 2'-fluoroguanosine
  modified_base 59: mod_base = OTHER; note = 2'-Omethylguanosine
  modified_base 61: mod_base = OTHER; note = 2'-Omethylcytosine
  modified_base 65: mod_base = OTHER; note = 2'-Omethylguanosine
  modified_base 73: mod_base = OTHER; note = 2'-Omethylguanosine

SEQ ID NO: 6953 - RNA, 76 nt, synthetic construct; identical to SEQ ID NO: 3318
  source 1..76: mol_type = other RNA
  modified_base 13: mod_base = OTHER; note = 2'-Omethylcytosine
  modified_base 52: mod_base = OTHER; note = 2'-Omethylguanosine

SEQ ID NO: 6954 - RNA, 76 nt, synthetic construct; identical to SEQ ID NO: 3318
  source 1..76: mol_type = other RNA
  modified_base 1: mod_base = OTHER; note = 2'-Omethylcytosine
  modified_base 2: mod_base = OTHER; note = 2'-Omethylcytosine
  modified_base 3: mod_base = OTHER; note = 2'-Omethyluridine
  modified_base 4: mod_base = OTHER; note = 2'-Omethyluridine
  modified_base 5: mod_base = OTHER; note = 2'-Omethylcytosine
  modified_base 6: mod_base = OTHER; note = 2'-Omethylguanosine
  modified_base 14: mod_base = OTHER; note = 2'-Omethyladenosine
  modified_base 15: mod_base = OTHER; note = 2'-Omethylguanosine
  modified_base 16: mod_base = OTHER; note = 2'-Omethyluridine
  modified_base 18: mod_base = OTHER; note = 2'-Omethylguanosine
  modified_base 19: mod_base = OTHER; note = 2'-Omethylguanosine
  modified_base 25: mod_base = OTHER; note = 2'-Omethylcytosine
  modified_base 33: mod_base = OTHER; note = 2'-fluorouridine
  modified_base 35: mod_base = OTHER; note = Uridine phosphorothiorate
  modified_base 37: mod_base = OTHER; note = Guanosine phosphorothiorate
  modified_base 38: mod_base = OTHER; note = Adenosine phosphorothiorate
  modified_base 49: mod_base = OTHER; note = 2'-Omethylguanosine
  modified_base 50: mod_base = OTHER; note = 2'-Omethylcytosine
  modified_base 52: mod_base = OTHER; note = 2'-Omethylguanosine
  modified_base 54: mod_base = OTHER; note = 2'-Omethyluridine
  modified_base 55: mod_base = OTHER; note = Uridine phosphorothiorate
  modified_base 56: mod_base = OTHER; note = 2'-Omethylcytosine
  modified_base 57: mod_base = OTHER; note = 2'-fluoroguanosine
  modified_base 59: mod_base = OTHER; note = 2'-Omethyladenosine
  modified_base 61: mod_base = OTHER; note = 2'-Omethylcytosine
  modified_base 62: mod_base = OTHER; note = 2'-Omethylcytosine
  modified_base 63: mod_base = OTHER; note = 2'-fluoroguanosine
  modified_base 64: mod_base = OTHER; note = 2'-Omethylguanosine
  modified_base 65: mod_base = OTHER; note = 2'-Omethylcytosine
  modified_base 73: mod_base = OTHER; note = 2'-Omethyladenosine

SEQ ID NO: 6955 - RNA, 75 nt, synthetic construct; identical to SEQ ID NO: 1045
  source 1..75: mol_type = other RNA
  modified_base 1: mod_base = OTHER; note = 2'-Omethylguanosine phosphorothiorate
  modified_base 2: mod_base = OTHER; note = 2'-Omethylguanosine phosphorothiorate
  modified_base 26: mod_base = OTHER; note = 2'-Omethyluridine
  modified_base 42: mod_base = OTHER; note = Adenosine phosphorothiorate
  modified_base 43: mod_base = OTHER; note = 2'-fluoroguanosine
  modified_base 65: mod_base = OTHER; note = Uridine phosphorothiorate
  modified_base 66: mod_base = OTHER; note = 2'-fluoroguanosine
  modified_base 69: mod_base = OTHER; note = 2'-fluoroadenosine
  modified_base 73: mod_base = OTHER; note = Cytosine phosphorothiorate
  modified_base 74: mod_base = OTHER; note = 2'-Omethylcytosine phosphorothiorate
  modified_base 75: mod_base = OTHER; note = 2'-Omethyladenosine

SEQ ID NO: 6956 - RNA, 76 nt, synthetic construct; identical to SEQ ID NO: 625
  source 1..76: mol_type = other RNA
  modified_base 44: mod_base = OTHER; note = 2'-Omethyladenosine
  modified_base 45: mod_base = OTHER; note = 2'-Omethylguanosine
  modified_base 46: mod_base = OTHER; note = 2'-Omethylguanosine
  modified_base 49: mod_base = OTHER; note = 2'-Omethylcytosine
  modified_base 50: mod_base = OTHER; note = 2'-Omethylcytosine
  modified_base 51: mod_base = OTHER; note = 2'-Omethylguanosine
  modified_base 52: mod_base = OTHER; note = 2'-Omethylguanosine
  modified_base 53: mod_base = OTHER; note = 2'-Omethylguanosine

SEQ ID NO: 6957 - RNA, 76 nt, synthetic construct; identical to SEQ ID NO: 3295
  source 1..76: mol_type = other RNA
  modified_base 1: mod_base = OTHER; note = 2'-fluorocytosine phosphorothiorate
  modified_base 2: mod_base = OTHER; note = 2'-Omethylcytosine phosphorothiorate
  modified_base 25: mod_base = OTHER; note = 2'-Omethylcytosine
  modified_base 41: mod_base = OTHER; note = 2'-Omethylcytosine phosphorothiorate
  modified_base 42: mod_base = OTHER; note = 2'-fluorouridine
  modified_base 51: mod_base = OTHER; note = 2'-fluorouridine
  modified_base 52: mod_base = OTHER; note = 2'-Omethylguanosine

SEQ ID NO: 6958 - RNA, 76 nt, synthetic construct
  source 1..76: mol_type = other RNA
ggctctgtagcgcaatggatagcgcattggacttcaaattcaaaggttgcgggttcgagtcccgccagagtcgcca

SEQ ID NO: 6959 - RNA, 74 nt, synthetic construct; identical to SEQ ID NO: 3293
  source 1..74: mol_type = other RNA
  modified_base 2: mod_base = OTHER; note = 2'-fluorocytosine phosphorothiorate
  modified_base 8: mod_base = OTHER; note = Guanosine phosphorothiorate
  modified_base 13: mod_base = OTHER; note = 2'-fluoroadenosine
  modified_base 34: mod_base = OTHER; note = Adenosine phosphorothiorate
  modified_base 51: mod_base = OTHER; note = 2'-fluoroguanosine
  modified_base 63: mod_base = OTHER; note = 2'-fluorouridine
  modified_base 73: mod_base = OTHER; note = 2'-Omethylcytosine phosphorothiorate
  modified_base 74: mod_base = OTHER; note = 2'-fluoroadenosine

SEQ ID NO: 6960 - RNA, 85 nt, synthetic construct; identical to SEQ ID NO: 3297
  source 1..85: mol_type = other RNA
  modified_base 1: mod_base = OTHER; note = 2'-Omethylguanosine
  modified_base 10: mod_base = OTHER; note = 2'-Omethylguanosine
  modified_base 13: mod_base = OTHER; note = 2'-Omethylguanosine
  modified_base 16: mod_base = OTHER; note = Uridine phosphorothiorate
  modified_base 17: mod_base = OTHER; note = Guanosine phosphorothiorate
  modified_base 18: mod_base = OTHER; note = 2'-Omethylguanosine phosphorothiorate
  modified_base 19: mod_base = OTHER; note = Uridine phosphorothiorate
  modified_base 20: mod_base = OTHER; note = 2'-Omethyluridine phosphorothiorate
  modified_base 25: mod_base = OTHER; note = 2'-Omethylcytosine
  modified_base 29: mod_base = OTHER; note = 2'-Omethylguanosine
  modified_base 33: mod_base = OTHER; note = 2'-fluorouridine
  modified_base 35: mod_base = OTHER; note = Cytosine phosphorothiorate
  modified_base 37: mod_base = OTHER; note = Adenosine phosphorothiorate
  modified_base 38: mod_base = OTHER; note = Adenosine phosphorothiorate
  modified_base 41: mod_base = OTHER; note = 2'-fluorocytosine
  modified_base 42: mod_base = OTHER; note = Adenosine phosphorothiorate
  modified_base 43: mod_base = OTHER; note = 2'-Omethyladenosine
  modified_base 44: mod_base = OTHER; note = 2'-fluorouridine
  modified_base 56: mod_base = OTHER; note = Guanosine phosphorothiorate
  modified_base 59: mod_base = OTHER; note = 2'-Omethylcytosine
  modified_base 61: mod_base = OTHER; note = 2'-Omethylguanosine
  modified_base 63: mod_base = OTHER; note = Uridine phosphorothiorate
  modified_base 64: mod_base = OTHER; note = Uridine phosphorothiorate
  modified_base 65: mod_base = OTHER; note = 2'-Omethylcytosine
  modified_base 66: mod_base = OTHER; note = Guanosine phosphorothiorate
  modified_base 67: mod_base = OTHER; note = Adenosine phosphorothiorate
  modified_base 71: mod_base = OTHER; note = 2'-Omethylcytosine
  modified_base 72: mod_base = OTHER; note = 2'-fluorouridine
  modified_base 74: mod_base = OTHER; note = 2'-Omethylcytosine
  modified_base 80: mod_base = OTHER; note = 2'-Omethylguanosine
  modified_base 82: mod_base = OTHER; note = 2'-Omethylguanosine

SEQ ID NO: 6961 - RNA, 85 nt, synthetic construct; identical to SEQ ID NO: 3317
  source 1..85: mol_type = other RNA
  modified_base 1: mod_base = OTHER; note = 2'-Omethylguanosine phosphorothiorate
  modified_base 2: mod_base = OTHER; note = Cytosine phosphorothiorate
  modified_base 3: mod_base = OTHER; note = 2'-Omethyluridine phosphorothiorate
  modified_base 6: mod_base = OTHER; note = 2'-fluoroguanosine
  modified_base 15: mod_base = OTHER; note = 2'-Omethylguanosine
  modified_base 17: mod_base = OTHER; note = 2'-Omethylguanosine
  modified_base 34: mod_base = OTHER; note = 2'-fluorocytosine
  modified_base 50: mod_base = OTHER; note = Cytosine phosphorothiorate
  modified_base 54: mod_base = OTHER; note = Cytosine phosphorothiorate
  modified_base 56: mod_base = OTHER; note = 2'-fluoroguanosine
  modified_base 70: mod_base = OTHER; note = 2'-Omethylcytosine phosphorothiorate
  modified_base 72: mod_base = OTHER; note = 2'-fluorouridine
  modified_base 82: mod_base = OTHER; note = 2'-Omethylguanosine

SEQ ID NO: 6962 - RNA, 76 nt, synthetic construct; identical to SEQ ID NO: 625
  source 1..76: mol_type = other RNA
  modified_base 1: mod_base = OTHER; note = 2'-Omethylguanosine phosphorothiorate
  modified_base 2: mod_base = OTHER; note = 2'-fluoroguanosine
  modified_base 3: mod_base = OTHER; note = 2'-fluorocytosine
  modified_base 9: mod_base = OTHER; note = Guanosine phosphorothiorate
  modified_base 10: mod_base = OTHER; note = 2'-Omethylguanosine
  modified_base 13: mod_base = OTHER; note = 2'-Omethylcytosine
  modified_base 14: mod_base = OTHER; note = 2'-fluoroadenosine
  modified_base 15: mod_base = OTHER; note = 2'-fluoroadenosine
  modified_base 24: mod_base = OTHER; note = 2'-fluoroguanosine
  modified_base 29: mod_base = OTHER; note = 2'-fluoroguanosine
  modified_base 30: mod_base = OTHER; note = 2'-fluoroguanosine phosphorothiorate
  modified_base 32: mod_base = OTHER; note = 2'-fluorocytosine
  modified_base 39: mod_base = OTHER; note = 2'-fluorouridine
  modified_base 41: mod_base = OTHER; note = 2'-Omethylcytosine phosphorothiorate
  modified_base 42: mod_base = OTHER; note = 2'-fluoroadenosine
  modified_base 44: mod_base = OTHER; note = Adenosine phosphorothiorate
  modified_base 45: mod_base = OTHER; note = 2'-Omethylguanosine
  modified_base 50: mod_base = OTHER; note = 2'-fluorocytosine
  modified_base 52: mod_base = OTHER; note = 2'-fluoroguanosine phosphorothiorate
  modified_base 53: mod_base = OTHER; note = 2'-Omethylguanosine
  modified_base 54: mod_base = OTHER; note = Uridine phosphorothiorate
  modified_base 55: mod_base = OTHER; note = Uridine phosphorothiorate
  modified_base 56: mod_base = OTHER; note = Cytosine phosphorothiorate
  modified_base 63: mod_base = OTHER; note = 2'-fluorocytosine
  modified_base 65: mod_base = OTHER; note = 2'-Omethylguanosine
  modified_base 67: mod_base = OTHER; note = 2'-fluoroguanosine
  modified_base 68: mod_base = OTHER; note = 2'-fluoroguanosine
  modified_base 71: mod_base = OTHER; note = 2'-fluorouridine
  modified_base 72: mod_base = OTHER; note = Cytosine phosphorothiorate
  modified_base 73: mod_base = OTHER; note = Guanosine phosphorothiorate
  modified_base 75: mod_base = OTHER; note = 2'-fluorocytosine

SEQ ID NO: 6963 - RNA, 86 nt, synthetic construct; identical to SEQ ID NO: 3290
  source 1..86: mol_type = other RNA
  modified_base 3: mod_base = OTHER; note = 2'-Omethylcytosine

SEQ ID NO: 6964 - RNA, 76 nt, synthetic construct; identical to SEQ ID NO: 625
  source 1..76: mol_type = other RNA
  modified_base 2: mod_base = OTHER; note = 2'-fluoroguanosine
  modified_base 4: mod_base = OTHER; note = 2'-fluorouridine
  modified_base 5: mod_base = OTHER; note = 2'-fluorocytosine
  modified_base 6: mod_base = OTHER; note = 2'-fluorocytosine
  modified_base 7: mod_base = OTHER; note = Guanosine phosphorothiorate
  modified_base 12: mod_base = OTHER; note = 2'-fluoroguanosine
  modified_base 14: mod_base = OTHER; note = 2'-Omethyladenosine
  modified_base 15: mod_base = OTHER; note = 2'-fluoroadenosine
  modified_base 16: mod_base = OTHER; note = Uridine phosphorothiorate
  modified_base 17: mod_base = OTHER; note = 2'-Omethylguanosine
  modified_base 21: mod_base = OTHER; note = Adenosine phosphorothiorate
  modified_base 22: mod_base = OTHER; note = 2'-fluoroguanosine
  modified_base 29: mod_base = OTHER; note = 2'-Omethylguanosine
  modified_base 30: mod_base = OTHER; note = Guanosine phosphorothiorate
  modified_base 32: mod_base = OTHER; note = 2'-fluorocytosine
  modified_base 33: mod_base = OTHER; note = Uridine phosphorothiorate
  modified_base 34: mod_base = OTHER; note = 2'-fluorouridine
  modified_base 36: mod_base = OTHER; note = Adenosine phosphorothiorate
  modified_base 40: mod_base = OTHER; note = 2'-Omethyluridine phosphorothiorate
  modified_base 41: mod_base = OTHER; note = 2'-fluorocytosine
  modified_base 43: mod_base = OTHER; note = 2'-fluoroadenosine
  modified_base 44: mod_base = OTHER; note = 2'-fluoroadenosine
  modified_base 45: mod_base = OTHER; note = 2'-fluoroguanosine phosphorothiorate
  modified_base 46: mod_base = OTHER; note = 2'-fluoroguanosine
  modified_base 48: mod_base = OTHER; note = 2'-Omethyluridine
  modified_base 53: mod_base = OTHER; note = Guanosine phosphorothiorate
  modified_base 54: mod_base = OTHER; note = 2'-Omethyluridine
  modified_base 56: mod_base = OTHER; note = 2'-Omethylcytosine
  modified_base 60: mod_base = OTHER; note = 2'-Omethyluridine phosphorothiorate
  modified_base 61: mod_base = OTHER; note = 2'-fluorocytosine
  modified_base 63: mod_base = OTHER; note = 2'-Omethylcytosine
  modified_base 67: mod_base = OTHER; note = 2'-Omethylguanosine
  modified_base 68: mod_base = OTHER; note = 2'-Omethylguanosine
  modified_base 69: mod_base = OTHER; note = Adenosine phosphorothiorate
  modified_base 71: mod_base = OTHER; note = 2'-Omethyluridine
  modified_base 72: mod_base = OTHER; note = 2'-Omethylcytosine
  modified_base 73: mod_base = OTHER; note = 2'-fluoroguanosine phosphorothiorate
  modified_base 74: mod_base = OTHER; note = 2'-fluorocytosine

SEQ ID NO: 6965 - RNA, 75 nt, synthetic construct; identical to SEQ ID NO: 1045
  source 1..75: mol_type = other RNA
  modified_base 3: mod_base = OTHER; note = 2'-fluorouridine
  modified_base 4: mod_base = OTHER; note = 2'-Omethyluridine phosphorothiorate
  modified_base 5: mod_base = OTHER; note = 2'-fluorocytosine
  modified_base 14: mod_base = OTHER; note = 2'-Omethyladenosine phosphorothiorate
  modified_base 15: mod_base = OTHER; note = 2'-Omethyladenosine
  modified_base 16: mod_base = OTHER; note = Uridine phosphorothiorate
  modified_base 18: mod_base = OTHER; note = 2'-Omethylguanosine
  modified_base 21: mod_base = OTHER; note = 2'-fluoroadenosine phosphorothiorate
  modified_base 26: mod_base = OTHER; note = 2'-fluorouridine phosphorothiorate
  modified_base 43: mod_base = OTHER; note = 2'-Omethylguanosine phosphorothiorate
  modified_base 44: mod_base = OTHER; note = 2'-Omethylcytosine phosphorothiorate
  modified_base 45: mod_base = OTHER; note = 2'-Omethylguanosine phosphorothiorate
  modified_base 51: mod_base = OTHER; note = 2'-Omethyladenosine
  modified_base 72: mod_base = OTHER; note = 2'-Omethyluridine
  modified_base 74: mod_base = OTHER; note = 2'-Omethylcytosine phosphorothiorate

SEQ ID NO: 6966 - RNA, 76 nt, synthetic construct; identical to SEQ ID NO: 3295
  source 1..76: mol_type = other RNA
  modified_base 1: mod_base = OTHER; note = 2'-Omethylcytosine
  modified_base 2: mod_base = OTHER; note = 2'-fluorocytosine
  modified_base 3: mod_base = OTHER; note = 2'-Omethyluridine phosphorothiorate
  modified_base 5: mod_base = OTHER; note = 2'-fluorocytosine
  modified_base 16: mod_base = OTHER; note = 2'-Omethyluridine
  modified_base 23: mod_base = OTHER; note = 2'-fluoroadenosine
  modified_base 25: mod_base = OTHER; note = 2'-fluorocytosine phosphorothiorate
  modified_base 26: mod_base = OTHER; note = 2'-Omethylguanosine
  modified_base 27: mod_base = OTHER; note = 2'-Omethylguanosine phosphorothiorate
  modified_base 28: mod_base = OTHER; note = 2'-fluoroadenosine phosphorothiorate
  modified_base 29: mod_base = OTHER; note = 2'-fluoroguanosine
  modified_base 30: mod_base = OTHER; note = 2'-Omethylguanosine phosphorothiorate
  modified_base 37: mod_base = OTHER; note = 2'-fluoroguanosine
  modified_base 40: mod_base = OTHER; note = 2'-fluorocytosine
  modified_base 47: mod_base = OTHER; note = 2'-Omethyluridine
  modified_base 52: mod_base = OTHER; note = 2'-Omethylguanosine
  modified_base 53: mod_base = OTHER; note = Guanosine phosphorothiorate
  modified_base 64: mod_base = OTHER; note = 2'-fluoroguanosine
  modified_base 70: mod_base = OTHER; note = 2'-fluoroadenosine
  modified_base 74: mod_base = OTHER; note = 2'-Omethylcytosine phosphorothiorate
  modified_base 75: mod_base = OTHER; note = Cytosine phosphorothiorate
  modified_base 76: mod_base = OTHER; note = 2'-Omethyladenosine

SEQ ID NO: 6967 - RNA, 76 nt, synthetic construct; identical to SEQ ID NO: 3289
  source 1..76: mol_type = other RNA

SEQ ID NO: 6968 - RNA, 76 nt, synthetic construct; identical to SEQ ID NO: 3329
  source 1..76: mol_type = other RNA
  modified_base 1: mod_base = OTHER; note = 2'-Omethylguanosine
  modified_base 2: mod_base = OTHER; note = 2'-Omethylguanosine
  modified_base 3: mod_base = OTHER; note = 2'-Omethylcytosine
  modified_base 4: mod_base = OTHER; note = 2'-Omethylcytosine
  modified_base 5: mod_base = OTHER; note = 2'-Omethylcytosine
  modified_base 6: mod_base = OTHER; note = 2'-Omethylcytosine
  modified_base 14: mod_base = OTHER; note = 2'-Omethyladenosine
  modified_base 17: mod_base = OTHER; note = 2'-Omethylguanosine
  modified_base 18: mod_base = OTHER; note = 2'-Omethylguanosine
  modified_base 20: mod_base = OTHER; note = 2'-Omethyluridine
  modified_base 22: mod_base = OTHER; note = 2'-Omethylguanosine
  modified_base 25: mod_base = OTHER; note = 2'-Omethylcytosine
  modified_base 27: mod_base = OTHER; note = 2'-Omethyluridine
  modified_base 33: mod_base = OTHER; note = 2'-fluorouridine
  modified_base 71: mod_base = OTHER; note = 2'-Omethyluridine
  modified_base 73: mod_base = OTHER; note = 2'-Omethylguanosine

SEQ ID NO: 6969 - RNA, 75 nt, synthetic construct; identical to SEQ ID NO: 3336
  source 1..75: mol_type = other RNA
  modified_base 1: mod_base = OTHER; note = 2'-fluorocytosine
  modified_base 9: mod_base = OTHER; note = Guanosine phosphorothiorate
  modified_base 11: mod_base = OTHER; note = 2'-fluorouridine
  modified_base 15: mod_base = OTHER; note = 2'-fluorouridine phosphorothiorate
  modified_base 16: mod_base = OTHER; note = Cytosine phosphorothiorate
  modified_base 21: mod_base = OTHER; note = 2'-Omethylguanosine phosphorothiorate
  modified_base 23: mod_base = OTHER; note = 2'-fluoroguanosine
  modified_base 24: mod_base = OTHER; note = 2'-fluorocytosine phosphorothiorate
  modified_base 28: mod_base = OTHER; note = 2'-fluoroadenosine
  modified_base 29: mod_base = OTHER; note = 2'-fluoroguanosine
  modified_base 34: mod_base = OTHER; note = 2'-fluorouridine
  modified_base 39: mod_base = OTHER; note = 2'-fluorocytosine phosphorothiorate
  modified_base 46: mod_base = OTHER; note = 2'-fluorouridine
  modified_base 51: mod_base = OTHER; note = 2'-Omethylguanosine phosphorothiorate
  modified_base 61: mod_base = OTHER; note = 2'-fluorocytosine
  modified_base 71: mod_base = OTHER; note = 2'-fluorocytosine phosphorothiorate
  modified_base 74: mod_base = OTHER; note = Cytosine phosphorothiorate

SEQ ID NO: 6970 - RNA, 85 nt, synthetic construct; identical to SEQ ID NO: 3297
  source 1..85: mol_type = other RNA
  modified_base 1: mod_base = OTHER; note = 2'-Omethylguanosine
  modified_base 2: mod_base = OTHER; note = 2'-Omethylcytosine
  modified_base 3: mod_base = OTHER; note = 2'-Omethyluridine
  modified_base 4: mod_base = OTHER; note = 2'-Omethylguanosine
  modified_base 5: mod_base = OTHER; note = 2'-Omethyluridine
  modified_base 6: mod_base = OTHER; note = 2'-Omethylguanosine
  modified_base 22: mod_base = OTHER; note = 2'-Omethyladenosine
  modified_base 23: mod_base = OTHER; note = 2'-Omethylguanosine
  modified_base 24: mod_base = OTHER; note = 2'-Omethylguanosine
  modified_base 25: mod_base = OTHER; note = 2'-Omethylcytosine

SEQ ID NO: 6971 - RNA, 76 nt, synthetic construct; identical to SEQ ID NO: 625
  source 1..76: mol_type = other RNA
  modified_base 1: mod_base = OTHER; note = Guanosine phosphorothiorate
  modified_base 2: mod_base = OTHER; note = 2'-Omethylguanosine
  modified_base 3: mod_base = OTHER; note = 2'-Omethylcytosine
  modified_base 6: mod_base = OTHER; note = 2'-Omethylcytosine
  modified_base 7: mod_base = OTHER; note = Guanosine phosphorothiorate
  modified_base 8: mod_base = OTHER; note = Uridine phosphorothiorate
  modified_base 14: mod_base = OTHER; note = Adenosine phosphorothiorate
  modified_base 15: mod_base = OTHER; note = 2'-Omethyladenosine
  modified_base 17: mod_base = OTHER; note = 2'-Omethylguanosine
  modified_base 18: mod_base = OTHER; note = 2'-fluoroguanosine
  modified_base 22: mod_base = OTHER; note = 2'-fluoroguanosine
  modified_base 24: mod_base = OTHER; note = 2'-Omethylguanosine phosphorothiorate
  modified_base 25: mod_base = OTHER; note = 2'-Omethylcytosine phosphorothiorate
  modified_base 27: mod_base = OTHER; note = 2'-fluorouridine
  modified_base 28: mod_base = OTHER; note = 2'-Omethyluridine
  modified_base 29: mod_base = OTHER; note = 2'-fluoroguanosine
  modified_base 34: mod_base = OTHER; note = Uridine phosphorothiorate
  modified_base 36: mod_base = OTHER; note = Adenosine phosphorothiorate
  modified_base 38: mod_base = OTHER; note = 2'-fluoroadenosine
  modified_base 42: mod_base = OTHER; note = 2'-Omethyladenosine
  modified_base 43: mod_base = OTHER; note = 2'-fluoroadenosine
  modified_base 45: mod_base = OTHER; note = Guanosine phosphorothiorate
  modified_base 50: mod_base = OTHER; note = 2'-fluorocytosine
  modified_base 52: mod_base = OTHER; note = Guanosine phosphorothiorate
  modified_base 54: mod_base = OTHER; note = Uridine phosphorothiorate
  modified_base 56: mod_base = OTHER; note = 2'-fluorocytosine
  modified_base 57: mod_base = OTHER; note = 2'-Omethylguanosine
  modified_base 61: mod_base = OTHER; note = Cytosine phosphorothiorate
  modified_base 62: mod_base = OTHER; note = 2'-Omethylcytosine
  modified_base 63: mod_base = OTHER; note = 2'-Omethylcytosine
  modified_base 70: mod_base = OTHER; note = 2'-Omethylguanosine
  modified_base 72: mod_base = OTHER; note = Cytosine phosphorothiorate
  modified_base 73: mod_base = OTHER; note = 2'-fluoroguanosine
  modified_base 74: mod_base = OTHER; note = 2'-Omethylcytosine phosphorothiorate
  modified_base 75: mod_base = OTHER; note = 2'-fluorocytosine

SEQ ID NO: 6972 - RNA, 86 nt, synthetic construct; identical to SEQ ID NO: 3290
  source 1..86: mol_type = other RNA
  modified_base 62: mod_base = OTHER; note = 2'-Omethylguanosine
  modified_base 75: mod_base = OTHER; note = 2'-Omethylcytosine

SEQ ID NO: 6973 - RNA, 76 nt, synthetic construct; identical to SEQ ID NO: 625
  source 1..76: mol_type = other RNA
  modified_base 1: mod_base = OTHER; note = 2'-Omethylguanosine phosphorothiorate
  modified_base 2: mod_base = OTHER; note = 2'-Omethylguanosine
  modified_base 3: mod_base = OTHER; note = 2'-Omethylcytosine
  modified_base 4: mod_base = OTHER; note = 2'-Omethyluridine
  modified_base 5: mod_base = OTHER; note = 2'-Omethylcytosine
  modified_base 6: mod_base = OTHER; note = 2'-Omethylcytosine
  modified_base 10: mod_base = OTHER; note = 2'-Omethylguanosine
  modified_base 11: mod_base = OTHER; note = 2'-Omethylcytosine
  modified_base 12: mod_base = OTHER; note = 2'-Omethylguanosine
  modified_base 13: mod_base = OTHER; note = 2'-Omethylcytosine
  modified_base 14: mod_base = OTHER; note = 2'-Omethyladenosine
  modified_base 15: mod_base = OTHER; note = 2'-fluoroadenosine
  modified_base 16: mod_base = OTHER; note = 2'-Omethyluridine
  modified_base 17: mod_base = OTHER; note = 2'-Omethylguanosine
  modified_base 18: mod_base = OTHER; note = 2'-Omethylguanosine
  modified_base 19: mod_base = OTHER; note = 2'-fluoroadenosine
  modified_base 20: mod_base = OTHER; note = 2'-Omethyluridine
  modified_base 40: mod_base = OTHER; note = 2'-fluorouridine
  modified_base 41: mod_base = OTHER; note = 2'-fluorocytosine
  modified_base 42: mod_base = OTHER; note = 2'-fluoroadenosine
  modified_base 43: mod_base = OTHER; note = 2'-fluoroadenosine
  modified_base 49: mod_base = OTHER; note = 2'-Omethylcytosine
  modified_base 50: mod_base = OTHER; note = 2'-Omethylcytosine
  modified_base 51: mod_base = OTHER; note = 2'-Omethylguanosine
  modified_base 52: mod_base = OTHER; note = 2'-Omethylguanosine
  modified_base 53: mod_base = OTHER; note = 2'-Omethylguanosine
  modified_base 54: mod_base = OTHER; note = 2'-Omethyluridine
  modified_base 56: mod_base = OTHER; note = 2'-Omethylcytosine
  modified_base 57: mod_base = OTHER; note = 2'-fluoroguanosine
  modified_base 59: mod_base = OTHER; note = 2'-Omethylguanosine
  modified_base 61: mod_base = OTHER; note = 2'-Omethylcytosine
  modified_base 62: mod_base = OTHER; note = 2'-Omethylcytosine
  modified_base 63: mod_base = OTHER; note = 2'-Omethylcytosine
  modified_base 64: mod_base = OTHER; note = 2'-Omethylguanosine
  modified_base 65: mod_base = OTHER; note = 2'-Omethylguanosine
  modified_base 66: mod_base = OTHER; note = 2'-Omethylcytosine
  modified_base 67: mod_base = OTHER; note = 2'-Omethylguanosine
  modified_base 68: mod_base = OTHER; note = 2'-Omethylguanosine
  modified_base 69: mod_base = OTHER; note = 2'-Omethyladenosine
  modified_base 73: mod_base = OTHER; note = 2'-Omethylguanosine

SEQ ID NO: 6974 - RNA, 76 nt, synthetic construct; identical to SEQ ID NO: 625
  source 1..76: mol_type = other RNA
  modified_base 1: mod_base = OTHER; note = 2'-Omethylguanosine
  modified_base 2: mod_base = OTHER; note = 2'-Omethylguanosine
  modified_base 10: mod_base = OTHER; note = 2'-Omethylguanosine
  modified_base 13: mod_base = OTHER; note = 2'-Omethylcytosine
  modified_base 17: mod_base = OTHER; note = Guanosine phosphorothiorate
  modified_base 18: mod_base = OTHER; note = 2'-Omethylguanosine
  modified_base 19: mod_base = OTHER; note = Adenosine phosphorothiorate
  modified_base 20: mod_base = OTHER; note = 2'-Omethyluridine
  modified_base 25: mod_base = OTHER; note = 2'-Omethylcytosine
  modified_base 29: mod_base = OTHER; note = 2'-Omethylguanosine
  modified_base 33: mod_base = OTHER; note = 2'-fluorouridine
  modified_base 35: mod_base = OTHER; note = Cytosine phosphorothiorate
  modified_base 37: mod_base = OTHER; note = Adenosine phosphorothiorate
  modified_base 38: mod_base = OTHER; note = Adenosine phosphorothiorate
  modified_base 43: mod_base = OTHER; note = 2'-Omethyladenosine
  modified_base 44: mod_base = OTHER; note = 2'-fluoroadenosine
  modified_base 46: mod_base = OTHER; note = Guanosine phosphorothiorate
  modified_base 50: mod_base = OTHER; note = 2'-Omethylcytosine
  modified_base 52: mod_base = OTHER; note = 2'-Omethylguanosine
  modified_base 54: mod_base = OTHER; note = Uridine phosphorothiorate
  modified_base 55: mod_base = OTHER; note = Uridine phosphorothiorate
  modified_base 56: mod_base = OTHER; note = 2'-Omethylcytosine
  modified_base 57: mod_base = OTHER; note = Guanosine phosphorothiorate
  modified_base 62: mod_base = OTHER; note = 2'-Omethylcytosine
  modified_base 63: mod_base = OTHER; note = 2'-fluorocytosine
  modified_base 65: mod_base = OTHER; note = 2'-Omethylguanosine
  modified_base 71: mod_base = OTHER; note = 2'-Omethyluridine
  modified_base 73: mod_base = OTHER; note = 2'-Omethylguanosine

SEQ ID NO: 6975 - RNA, 85 nt, synthetic construct
  source 1..85: mol_type = other RNA
gctgtgatggccgagtggttaaggtgttggacttcaaatccaatggggtttccccacgcaggttcaagtcctgctcacagcgcca

SEQ ID NO: 6976 - RNA, 75 nt, synthetic construct; identical to SEQ ID NO: 1045
  source 1..75: mol_type = other RNA
  modified_base 1: mod_base = OTHER; note = 2'-Omethylguanosine phosphorothiorate
  modified_base 2: mod_base = OTHER; note = 2'-Omethylguanosine phosphorothiorate
  modified_base 3: mod_base = OTHER; note = 2'-Omethyluridine
  modified_base 4: mod_base = OTHER; note = 2'-Omethyluridine
  modified_base 5: mod_base = OTHER; note = 2'-Omethylcytosine
  modified_base 6: mod_base = OTHER; note = 2'-Omethylcytosine
  modified_base 16: mod_base = OTHER; note = 2'-Omethyluridine
  modified_base 17: mod_base = OTHER; note = 2'-Omethylguanosine
  modified_base 18: mod_base = OTHER; note = 2'-Omethylguanosine
  modified_base 20: mod_base = OTHER; note = 2'-Omethyladenosine
  modified_base 22: mod_base = OTHER; note = 2'-Omethylguanosine
  modified_base 24: mod_base = OTHER; note = 2'-Omethyladenosine
  modified_base 25: mod_base = OTHER; note = 2'-Omethylcytosine
  modified_base 27: mod_base = OTHER; note = 2'-Omethylcytosine
  modified_base 33: mod_base = OTHER; note = 2'-fluorouridine
  modified_base 35: mod_base = OTHER; note = Uridine phosphorothiorate
  modified_base 37: mod_base = OTHER; note = Adenosine phosphorothiorate
  modified_base 38: mod_base = OTHER; note = Adenosine phosphorothiorate
  modified_base 44: mod_base = OTHER; note = 2'-Omethylcytosine
  modified_base 45: mod_base = OTHER; note = 2'-Omethylguanosine
  modified_base 46: mod_base = OTHER; note = 2'-fluoroadenosine
  modified_base 47: mod_base = OTHER; note = 2'-fluorouridine
  modified_base 48: mod_base = OTHER; note = 2'-Omethylcytosine
  modified_base 49: mod_base = OTHER; note = 2'-Omethylcytosine
  modified_base 50: mod_base = OTHER; note = 2'-Omethylguanosine
  modified_base 51: mod_base = OTHER; note = 2'-Omethyladenosine
  modified_base 52: mod_base = OTHER; note = 2'-Omethylguanosine
  modified_base 53: mod_base = OTHER; note = 2'-Omethyluridine
  modified_base 55: mod_base = OTHER; note = 2'-Omethylcytosine
  modified_base 58: mod_base = OTHER; note = 2'-Omethylguanosine
  modified_base 60: mod_base = OTHER; note = 2'-Omethylcytosine
  modified_base 61: mod_base = OTHER; note = 2'-Omethyluridine
  modified_base 62: mod_base = OTHER; note = 2'-fluorocytosine
  modified_base 63: mod_base = OTHER; note = 2'-Omethylguanosine
  modified_base 64: mod_base = OTHER; note = 2'-Omethylguanosine
  modified_base 65: mod_base = OTHER; note = 2'-Omethyluridine
  modified_base 66: mod_base = OTHER; note = 2'-Omethylguanosine
  modified_base 67: mod_base = OTHER; note = 2'-Omethylguanosine
  modified_base 72: mod_base = OTHER; note = 2'-Omethyluridine

SEQ ID NO: 6977 - RNA, 85 nt, synthetic construct; identical to SEQ ID NO: 3288
  source 1..85: mol_type = other RNA
  modified_base 1: mod_base = OTHER; note = 2'-fluorocytosine
  modified_base 25: mod_base = OTHER; note = 2'-fluoroguanosine
  modified_base 33: mod_base = OTHER; note = 2'-fluorouridine
  modified_base 44: mod_base = OTHER; note = Guanosine phosphorothiorate
  modified_base 55: mod_base = OTHER; note = 2'-Omethylcytosine
  modified_base 58: mod_base = OTHER; note = Guanosine phosphorothiorate
  modified_base 70: mod_base = OTHER; note = 2'-fluorocytosine
  modified_base 84: mod_base = OTHER; note = Cytosine phosphorothiorate

SEQ ID NO: 6978 - RNA, 85 nt, synthetic construct; identical to SEQ ID NO: 3297
  source 1..85: mol_type = other RNA
  modified_base 1: mod_base = OTHER; note = 2'-Omethylguanosine phosphorothiorate
  modified_base 2: mod_base = OTHER; note = 2'-Omethylcytosine phosphorothiorate
  modified_base 3: mod_base = OTHER; note = 2'-Omethyluridine
  modified_base 4: mod_base = OTHER; note = 2'-Omethylguanosine
  modified_base 5: mod_base = OTHER; note = 2'-Omethyluridine
  modified_base 6: mod_base = OTHER; note = 2'-Omethylguanosine
  modified_base 16: mod_base = OTHER; note = 2'-Omethyluridine
  modified_base 17: mod_base = OTHER; note = 2'-Omethylguanosine
  modified_base 18: mod_base = OTHER; note = 2'-Omethylguanosine
  modified_base 20: mod_base = OTHER; note = 2'-Omethyluridine
  modified_base 25: mod_base = OTHER; note = 2'-Omethylcytosine
  modified_base 33: mod_base = OTHER; note = 2'-fluorouridine
  modified_base 35: mod_base = OTHER; note = Cytosine phosphorothiorate
  modified_base 37: mod_base = OTHER; note = Adenosine phosphorothiorate
  modified_base 38: mod_base = OTHER; note = Adenosine phosphorothiorate
  modified_base 41: mod_base = OTHER; note = 2'-Omethylcytosine
  modified_base 44: mod_base = OTHER; note = 2'-Omethyluridine
  modified_base 56: mod_base = OTHER; note = 2'-fluoroguanosine
  modified_base 57: mod_base = OTHER; note = 2'-fluorocytosine
  modified_base 65: mod_base = OTHER; note = 2'-Omethylcytosine
  modified_base 68: mod_base = OTHER; note = 2'-Omethyladenosine
  modified_base 82: mod_base = OTHER; note = 2'-Omethylguanosine

SEQ ID NO: 6979 - RNA, 76 nt, synthetic construct; identical to SEQ ID NO: 625
  source 1..76: mol_type = other RNA
  modified_base 1: mod_base = OTHER; note = 2'-Omethylguanosine
  modified_base 5: mod_base = OTHER; note = 2'-Omethylcytosine phosphorothiorate
  modified_base 10: mod_base = OTHER; note = 2'-Omethylguanosine
  modified_base 13: mod_base = OTHER; note = 2'-Omethylcytosine
  modified_base 17: mod_base = OTHER; note = Guanosine phosphorothiorate
  modified_base 18: mod_base = OTHER; note = 2'-Omethylguanosine
  modified_base 19: mod_base = OTHER; note = Adenosine phosphorothiorate
  modified_base 20: mod_base = OTHER; note = 2'-Omethyluridine
  modified_base 25: mod_base = OTHER; note = 2'-Omethylcytosine
  modified_base 29: mod_base = OTHER; note = 2'-Omethylguanosine
  modified_base 33: mod_base = OTHER; note = 2'-fluorouridine
  modified_base 35: mod_base = OTHER; note = Cytosine phosphorothiorate
  modified_base 37: mod_base = OTHER; note = Adenosine phosphorothiorate
  modified_base 38: mod_base = OTHER; note = Adenosine phosphorothiorate
  modified_base 43: mod_base = OTHER; note = 2'-Omethyladenosine
  modified_base 44: mod_base = OTHER; note = 2'-fluoroadenosine
  modified_base 46: mod_base = OTHER; note = Guanosine phosphorothiorate
  modified_base 50: mod_base = OTHER; note = 2'-Omethylcytosine
  modified_base 52: mod_base = OTHER; note = 2'-Omethylguanosine
  modified_base 54: mod_base = OTHER; note = Uridine phosphorothiorate
  modified_base 55: mod_base = OTHER; note = Uridine phosphorothiorate
  modified_base 56: mod_base = OTHER; note = 2'-Omethylcytosine
  modified_base 57: mod_base = OTHER; note = Guanosine phosphorothiorate
  modified_base 62: mod_base = OTHER; note = 2'-Omethylcytosine
  modified_base 63: mod_base = OTHER; note = 2'-fluorocytosine
  modified_base 65: mod_base = OTHER; note = 2'-Omethylguanosine
  modified_base 71: mod_base = OTHER; note = 2'-Omethyluridine
  modified_base 73: mod_base = OTHER; note = 2'-Omethylguanosine

SEQ ID NO: 6980 - RNA, 76 nt, synthetic construct; identical to SEQ ID NO: 625
  source 1..76: mol_type = other RNA
  modified_base 1: mod_base = OTHER; note = 2'-Omethylguanosine
  modified_base 2: mod_base = OTHER; note = 2'-Omethylguanosine
  modified_base 3: mod_base = OTHER; note = 2'-Omethylcytosine
  modified_base 4: mod_base = OTHER; note = 2'-Omethyluridine
  modified_base 5: mod_base = OTHER; note = 2'-Omethylcytosine
  modified_base 6: mod_base = OTHER; note = 2'-Omethylcytosine
  modified_base 10: mod_base = OTHER; note = 2'-Omethylguanosine
  modified_base 11: mod_base = OTHER; note = 2'-Omethylcytosine
  modified_base 12: mod_base = OTHER; note = 2'-Omethylguanosine
  modified_base 13: mod_base = OTHER; note = 2'-Omethylcytosine
  modified_base 14: mod_base = OTHER; note = 2'-Omethyladenosine
  modified_base 15: mod_base = OTHER; note = 2'-fluoroadenosine
  modified_base 16: mod_base = OTHER; note = 2'-Omethyluridine
  modified_base 17: mod_base = OTHER; note = 2'-Omethylguanosine
  modified_base 18: mod_base = OTHER; note = 2'-Omethylguanosine
  modified_base 19: mod_base = OTHER; note = 2'-fluoroadenosine
  modified_base 20: mod_base = OTHER; note = 2'-Omethyluridine
  modified_base 21: mod_base = OTHER; note = 2'-fluoroadenosine
  modified_base 22: mod_base = OTHER; note = 2'-Omethylguanosine
  modified_base 23: mod_base = OTHER; note = 2'-Omethylcytosine
  modified_base 24: mod_base = OTHER; note = 2'-Omethylguanosine
  modified_base 25: mod_base = OTHER; note = 2'-Omethylcytosine
  modified_base 38: mod_base = OTHER; note = Adenosine phosphorothiorate
  modified_base 39: mod_base = OTHER; note = Uridine phosphorothiorate
  modified_base 40: mod_base = OTHER; note = 2'-fluorouridine
  modified_base 43: mod_base = OTHER; note = 2'-Omethyladenosine
  modified_base 44: mod_base = OTHER; note = 2'-Omethyladenosine
  modified_base 45: mod_base = OTHER; note = 2'-Omethylguanosine
  modified_base 46: mod_base = OTHER; note = 2'-fluoroguanosine
  modified_base 48: mod_base = OTHER; note = 2'-fluorouridine
  modified_base 49: mod_base = OTHER; note = 2'-Omethylcytosine
  modified_base 50: mod_base = OTHER; note = 2'-Omethylcytosine
  modified_base 54: mod_base = OTHER; note = Uridine phosphorothiorate
  modified_base 55: mod_base = OTHER; note = Uridine phosphorothiorate
  modified_base 56: mod_base = OTHER; note = 2'-Omethylcytosine
  modified_base 57: mod_base = OTHER; note = Guanosine phosphorothiorate
  modified_base 61: mod_base = OTHER; note = 2'-Omethylcytosine
  modified_base 62: mod_base = OTHER; note = 2'-Omethylcytosine
  modified_base 63: mod_base = OTHER; note = 2'-fluorocytosine
  modified_base 64: mod_base = OTHER; note = 2'-Omethylguanosine
  modified_base 65: mod_base = OTHER; note = 2'-Omethylguanosine
  modified_base 66: mod_base = OTHER; note = 2'-Omethylcytosine
  modified_base 67: mod_base = OTHER; note = 2'-Omethylguanosine
  modified_base 68: mod_base = OTHER; note = 2'-Omethylguanosine

SEQ ID NO: 6981 - DNA, 76 bp, synthetic construct; identical to SEQ ID NO: 1924
  source 1..76: mol_type = other DNA
  modified_base 1: mod_base = OTHER; note = 2'-Omethylguanosine phosphorothiorate
  modified_base 2: mod_base = OTHER; note = deoxyguanosine phosphorothiorate
  modified_base 8: mod_base = OTHER; note = 2'-O-(2-Methoxyethyl) thymine
  modified_base 10: mod_base = OTHER; note = 2'-O-(2-Methoxyethyl) guanosine
  modified_base 11: mod_base = OTHER; note = 2'-Omethylcytosine
  modified_base 13: mod_base = OTHER; note = Cytosine phosphorothiorate
  modified_base 15: mod_base = OTHER; note = Adenosine phosphorothiorate
  modified_base 18: mod_base = OTHER; note = Guanosine phosphorothiorate
  modified_base 20: mod_base = OTHER; note = Uridine phosphorothiorate
  modified_base 21: mod_base = OTHER; note = deoxyadenosine phosphorothiorate
  modified_base 23: mod_base = OTHER; note = Cytosine phosphorothiorate
  modified_base 24: mod_base = OTHER; note = 2'-O-(2-Methoxyethyl) guanosine
  modified_base 25: mod_base = OTHER; note = 2'-fluorocytosine
  modified_base 26: mod_base = OTHER; note = Adenosine phosphorothiorate
  modified_base 31: mod_base = OTHER; note = Adenosine phosphorothiorate
  modified_base 32: mod_base = OTHER; note = Cytosine phosphorothiorate
  modified_base 34: mod_base = OTHER; note = 2'-Omethyluridine
  modified_base 35: mod_base = OTHER; note = 2'-fluorocytosine
  modified_base 38: mod_base = OTHER; note = Adenosine phosphorothiorate
  modified_base 40: mod_base = OTHER; note = deoxyuridine phosphorothiorate
  modified_base 46: mod_base = OTHER; note = 2'-Omethylguanosine
  modified_base 48: mod_base = OTHER; note = Uridine phosphorothiorate
  modified_base 49: mod_base = OTHER; note = 2'-fluorocytosine
  modified_base 50: mod_base = OTHER; note = 2'-fluorocytosine phosphorothiorate
  modified_base 51: mod_base = OTHER; note = 2'-fluoroguanosine
  modified_base 52: mod_base = OTHER; note = 2'-fluoroguanosine
  modified_base 62: mod_base = OTHER; note = Cytosine phosphorothiorate
  modified_base 63: mod_base = OTHER; note = 2'-O-(2-Methoxyethyl) 5-methylcytosine
  modified_base 68: mod_base = OTHER; note = 2'-Omethylguanosine
  modified_base 69: mod_base = OTHER; note = Adenosine phosphorothiorate
  modified_base 70: mod_base = OTHER; note = 2'-fluoroguanosine
  modified_base 71: mod_base = OTHER; note = Uridine phosphorothiorate
  modified_base 75: mod_base = OTHER; note = 2'-Omethylcytosine phosphorothiorate
  modified_base 76: mod_base = OTHER; note = 2'-Omethyladenosine
  misc_feature 1: note = RNA
  misc_feature 2: note = DNA
  misc_feature 3..15: note = RNA
  misc_feature 16: note = DNA
  misc_feature 17..18: note = RNA
  misc_feature 19: note = DNA
  misc_feature 20: note = RNA
  misc_feature 21: note = DNA
  misc_feature 22..39: note = RNA
  misc_feature 40..41: note = DNA
  misc_feature 42..76: note = RNA

SEQ ID NO: 6982 - DNA, 76 bp, synthetic construct; identical to SEQ ID NO: 1924
  source 1..76: mol_type = other DNA
  modified_base 1: mod_base = OTHER; note = 2'-Omethylguanosine phosphorothiorate
  modified_base 2: mod_base = OTHER; note = 2'-Omethylguanosine phosphorothiorate
  modified_base 4: mod_base = OTHER; note = Uridine phosphorothiorate
  modified_base 7: mod_base = OTHER; note = 2'-O-(2-Methoxyethyl) guanosine phosphorothiorate
  modified_base 11: mod_base = OTHER; note = Cytosine phosphorothiorate
  modified_base 18: mod_base = OTHER; note = Guanosine phosphorothiorate
  modified_base 19: mod_base = OTHER; note = deoxyadenosine phosphorothiorate
  modified_base 21: mod_base = OTHER; note = Adenosine phosphorothiorate
  modified_base 24: mod_base = OTHER; note = 2'-Omethylguanosine
  modified_base 25: mod_base = OTHER; note = Cytosine phosphorothiorate
  modified_base 26: mod_base = OTHER; note = 2'-Omethyladenosine
  modified_base 28: mod_base = OTHER; note = 2'-O-(2-Methoxyethyl) thymine
  modified_base 29: mod_base = OTHER; note = Guanosine phosphorothiorate
  modified_base 30: mod_base = OTHER; note = 2'-O-(2-Methoxyethyl) guanosine
  modified_base 32: mod_base = OTHER; note = Cytosine phosphorothiorate
  modified_base 34: mod_base = OTHER; note = Uridine phosphorothiorate
  modified_base 35: mod_base = OTHER; note = 2'-Omethylcytosine
  modified_base 38: mod_base = OTHER; note = 2'-fluoroadenosine
  modified_base 39: mod_base = OTHER; note = Uridine phosphorothiorate
  modified_base 42: mod_base = OTHER; note = Adenosine phosphorothiorate
  modified_base 43: mod_base = OTHER; note = 2'-O-(2-Methoxyethyl) adenosine
  modified_base 44: mod_base = OTHER; note = Adenosine phosphorothiorate
  modified_base 45: mod_base = OTHER; note = 2'-fluoroguanosine phosphorothiorate
  modified_base 49: mod_base = OTHER; note = 2'-Omethylcytosine
  modified_base 50: mod_base = OTHER; note = 2'-O-(2-Methoxyethyl) 5-methylcytosine
  modified_base 51: mod_base = OTHER; note = Guanosine phosphorothiorate
  modified_base 52: mod_base = OTHER; note = 2'-fluoroguanosine
  modified_base 53: mod_base = OTHER; note = Guanosine phosphorothiorate
  modified_base 54: mod_base = OTHER; note = 2'-fluorouridine
  modified_base 55: mod_base = OTHER; note = Uridine phosphorothiorate
  modified_base 57: mod_base = OTHER; note = 2'-Omethylguanosine
  modified_base 59: mod_base = OTHER; note = Guanosine phosphorothiorate
  modified_base 60: mod_base = OTHER; note = 2'-O-(2-Methoxyethyl) thymine
  modified_base 61: mod_base = OTHER; note = 2'-fluorocytosine
  modified_base 62: mod_base = OTHER; note = 2'-fluorocytosine
  modified_base 63: mod_base = OTHER; note = 2'-fluorocytosine
  modified_base 65: mod_base = OTHER; note = Guanosine phosphorothiorate
  modified_base 66: mod_base = OTHER; note = 2'-Omethylcytosine
  modified_base 74: mod_base = OTHER; note = 2'-O-(2-Methoxyethyl) 5-methylcytosine phosphorothiorate
  modified_base 76: mod_base = OTHER; note = 2'-O-(2-Methoxyethyl) adenosine
  misc_feature 1..7: note = RNA
  misc_feature 8: note = DNA
  misc_feature 9..11: note = RNA
  misc_feature 12: note = DNA
  misc_feature 13..14: note = RNA
  misc_feature 15: note = DNA
  misc_feature 16..18: note = RNA
  misc_feature 19..20: note = DNA
  misc_feature 21: note = RNA
  misc_feature 22: note = DNA
  misc_feature 23..32: note = RNA
  misc_feature 33: note = DNA
  misc_feature 34..63: note = RNA
  misc_feature 64: note = DNA
  misc_feature 65..71: note = RNA
  misc_feature 72: note = DNA
  misc_feature 73..76: note = RNA

SEQ ID NO: 6983 - RNA, 76 nt, synthetic construct; identical to SEQ ID NO: 625
  source 1..76: mol_type = other RNA
  modified_base 1: mod_base = OTHER; note = 2'-Omethylguanosine phosphorothiorate
  modified_base 2: mod_base = OTHER; note = 2'-Omethylguanosine
  modified_base 3: mod_base = OTHER; note = 2'-Omethylcytosine
  modified_base 4: mod_base = OTHER; note = 2'-Omethyluridine
  modified_base 5: mod_base = OTHER; note = 2'-Omethylcytosine
  modified_base 6: mod_base = OTHER; note = 2'-Omethylcytosine
  modified_base 10: mod_base = OTHER; note = 2'-Omethylguanosine
  modified_base 11: mod_base = OTHER; note = 2'-Omethylcytosine
  modified_base 12: mod_base = OTHER; note = 2'-Omethylguanosine
  modified_base 13: mod_base = OTHER; note = 2'-Omethylcytosine
  modified_base 49: mod_base = OTHER; note = 2'-Omethylcytosine
  modified_base 50: mod_base = OTHER; note = 2'-Omethylcytosine
  modified_base 51: mod_base = OTHER; note = 2'-Omethylguanosine
  modified_base 52: mod_base = OTHER; note = 2'-Omethylguanosine
  modified_base 53: mod_base = OTHER; note = 2'-Omethylguanosine
  modified_base 61: mod_base = OTHER; note = 2'-Omethylcytosine
  modified_base 62: mod_base = OTHER; note = 2'-Omethylcytosine
  modified_base 63: mod_base = OTHER; note = 2'-fluorocytosine
  modified_base 64: mod_base = OTHER; note = 2'-Omethylguanosine
  modified_base 65: mod_base = OTHER; note = 2'-Omethylguanosine
  modified_base 66: mod_base = OTHER; note = 2'-Omethylcytosine
  modified_base 67: mod_base = OTHER; note = 2'-Omethylguanosine
  modified_base 68: mod_base = OTHER; note = 2'-Omethylguanosine
  modified_base 69: mod_base = OTHER; note = 2'-Omethyladenosine
  modified_base 71: mod_base = OTHER; note = 2'-Omethyluridine
  modified_base 72: mod_base = OTHER; note = 2'-Omethylcytosine

SEQ ID NO: 6984 - RNA, 76 nt, synthetic construct
  source 1..76: mol_type = other RNA
gggtccgtggcgcaatggatagcgcattggacttcaaattcaaaggttccgggttcgagtcccggcggacccgcca

SEQ ID NO: 6985 - RNA, 85 nt, synthetic construct; identical to SEQ ID NO: 3288
  source 1..85: mol_type = other RNA
  modified_base 1: mod_base = OTHER; note = 2'-Omethylcytosine
  modified_base 3: mod_base = OTHER; note = 2'-fluoroadenosine phosphorothiorate
  modified_base 26: mod_base = OTHER; note = 2'-fluorouridine
  modified_base 28: mod_base = OTHER; note = 2'-fluoroguanosine phosphorothiorate
  modified_base 30: mod_base = OTHER; note = 2'-fluoroadenosine
  modified_base 34: mod_base = OTHER; note = 2'-fluorocytosine
  modified_base 40: mod_base = OTHER; note = Cytosine phosphorothiorate
  modified_base 43: mod_base = OTHER; note = Uridine phosphorothiorate
  modified_base 45: mod_base = OTHER; note = 2'-fluoroguanosine
  modified_base 48: mod_base = OTHER; note = Adenosine phosphorothiorate
  modified_base 49: mod_base = OTHER; note = 2'-fluorouridine
  modified_base 54: mod_base = OTHER; note = 2'-fluorocytosine
  modified_base 55: mod_base = OTHER; note = 2'-Omethylcytosine
  modified_base 56: mod_base = OTHER; note = 2'-fluoroguanosine
  modified_base 57: mod_base = OTHER; note = 2'-Omethylcytosine
  modified_base 58: mod_base = OTHER; note = 2'-Omethylguanosine
  modified_base 60: mod_base = OTHER; note = 2'-fluoroguanosine phosphorothiorate
  modified_base 67: mod_base = OTHER; note = Adenosine phosphorothiorate
  modified_base 73: mod_base = OTHER; note = 2'-fluoroadenosine
  modified_base 84: mod_base = OTHER; note = 2'-fluorocytosine

SEQ ID NO: 6986 - RNA, 75 nt, synthetic construct; identical to SEQ ID NO: 3311
  source 1..75: mol_type = other RNA
  modified_base 1: mod_base = OTHER; note = 2'-Omethylguanosine phosphorothiorate
  modified_base 2: mod_base = OTHER; note = 2'-Omethylguanosine
  modified_base 20: mod_base = OTHER; note = 2'-fluoroadenosine
  modified_base 21: mod_base = OTHER; note = 2'-fluoroadenosine
  modified_base 22: mod_base = OTHER; note = Guanosine phosphorothiorate
  modified_base 42: mod_base = OTHER; note = 2'-fluoroadenosine
  modified_base 43: mod_base = OTHER; note = 2'-fluoroguanosine phosphorothiorate
  modified_base 51: mod_base = OTHER; note = Adenosine phosphorothiorate
  modified_base 52: mod_base = OTHER; note = 2'-fluoroguanosine
  modified_base 59: mod_base = OTHER; note = 2'-fluorouridine
  modified_base 65: mod_base = OTHER; note = Uridine phosphorothiorate
  modified_base 66: mod_base = OTHER; note = 2'-fluoroguanosine
  modified_base 68: mod_base = OTHER; note = Adenosine phosphorothiorate
  modified_base 69: mod_base = OTHER; note = 2'-fluoroadenosine
  modified_base 73: mod_base = OTHER; note = Cytosine phosphorothiorate
  modified_base 74: mod_base = OTHER; note = 2'-Omethylcytosine

SEQ ID NO: 6987 - RNA, 76 nt, synthetic construct; identical to SEQ ID NO: 625
  source 1..76: mol_type = other RNA
  modified_base 1: mod_base = OTHER; note = Guanosine phosphorothiorate
  modified_base 2: mod_base = OTHER; note = 2'-Omethylguanosine
  modified_base 3: mod_base = OTHER; note = Cytosine phosphorothiorate
  modified_base 4: mod_base = OTHER; note = 2'-fluorouridine
  modified_base 6: mod_base = OTHER; note = 2'-fluorocytosine phosphorothiorate
  modified_base 11: mod_base = OTHER; note = 2'-fluorocytosine
  modified_base 12: mod_base = OTHER; note = 2'-fluoroguanosine
  modified_base 15: mod_base = OTHER; note = Adenosine phosphorothiorate
  modified_base 20: mod_base = OTHER; note = Uridine phosphorothiorate
  modified_base 22: mod_base = OTHER; note = 2'-Omethylguanosine
  modified_base 25: mod_base = OTHER; note = 2'-Omethylcytosine
  modified_base 27: mod_base = OTHER; note = 2'-Omethyluridine
  modified_base 28: mod_base = OTHER; note = 2'-Omethyluridine
  modified_base 38: mod_base = OTHER; note = 2'-Omethyladenosine
  modified_base 40: mod_base = OTHER; note = 2'-Omethyluridine
  modified_base 41: mod_base = OTHER; note = Cytosine phosphorothiorate
  modified_base 42: mod_base = OTHER; note = 2'-Omethyladenosine phosphorothiorate
  modified_base 43: mod_base = OTHER; note = 2'-Omethyladenosine
  modified_base 44: mod_base = OTHER; note = Adenosine phosphorothiorate
  modified_base 45: mod_base = OTHER; note = 2'-Omethylguanosine
  modified_base 46: mod_base = OTHER; note = Guanosine phosphorothiorate
  modified_base 47: mod_base = OTHER; note = 2'-Omethyluridine
  modified_base 50: mod_base = OTHER; note = 2'-Omethylcytosine
  modified_base 53: mod_base = OTHER; note = 2'-Omethylguanosine
  modified_base 56: mod_base = OTHER; note = 2'-Omethylcytosine
  modified_base 57: mod_base = OTHER; note = 2'-Omethylguanosine phosphorothiorate
  modified_base 58: mod_base = OTHER; note = 2'-fluoroadenosine
  modified_base 62: mod_base = OTHER; note = 2'-Omethylcytosine
  modified_base 63: mod_base = OTHER; note = 2'-Omethylcytosine
  modified_base 67: mod_base = OTHER; note = 2'-fluoroguanosine
  modified_base 69: mod_base = OTHER; note = 2'-Omethyladenosine
  modified_base 71: mod_base = OTHER; note = 2'-Omethyluridine phosphorothiorate
  modified_base 72: mod_base = OTHER; note = 2'-Omethylcytosine
  modified_base 73: mod_base = OTHER; note = 2'-Omethylguanosine phosphorothiorate
  modified_base 74: mod_base = OTHER; note = 2'-Omethylcytosine phosphorothiorate

SEQ ID NO: 6988 - RNA, 76 nt, synthetic construct; identical to SEQ ID NO: 625
  source 1..76: mol_type = other RNA
  modified_base 1: mod_base = OTHER; note = 2'-Omethylguanosine phosphorothiorate
  modified_base 2: mod_base = OTHER; note = 2'-Omethylguanosine phosphorothiorate
  modified_base 10: mod_base = OTHER; note = Guanosine phosphorothiorate
  modified_base 11: mod_base = OTHER; note = 2'-O-(2-Methoxyethyl) 5-methylcytosine
  modified_base 56: mod_base = OTHER; note = Cytosine phosphorothiorate
  modified_base 57: mod_base = OTHER; note = 2'-Omethylguanosine
  modified_base 74: mod_base = OTHER; note = Cytosine phosphorothiorate
  modified_base 75: mod_base = OTHER; note = 2'-Omethylcytosine phosphorothiorate
  modified_base 76: mod_base = OTHER; note = 2'-Omethyladenosine

SEQ ID NO: 6989 - RNA, 85 nt, synthetic construct; identical to SEQ ID NO: 3317
  source 1..85: mol_type = other RNA
  modified_base 1: mod_base = OTHER; note = 2'-Omethylguanosine phosphorothiorate
  modified_base 2: mod_base = OTHER; note = 2'-Omethylcytosine phosphorothiorate
  modified_base 3: mod_base = OTHER; note = 2'-Omethyluridine phosphorothiorate
  modified_base 5: mod_base = OTHER; note = Uridine phosphorothiorate
  modified_base 12: mod_base = OTHER; note = 2'-Omethylcytosine phosphorothiorate
  modified_base 15: mod_base = OTHER; note = 2'-Omethylguanosine phosphorothiorate
  modified_base 18: mod_base = OTHER; note = 2'-Omethylguanosine phosphorothiorate
  modified_base 24: mod_base = OTHER; note = 2'-Omethylguanosine phosphorothiorate
  modified_base 27: mod_base = OTHER; note = 2'-fluorouridine
  modified_base 28: mod_base = OTHER; note = 2'-fluorouridine
  modified_base 33: mod_base = OTHER; note = 2'-fluorouridine
  modified_base 39: mod_base = OTHER; note = 2'-Omethyluridine phosphorothiorate
  modified_base 44: mod_base = OTHER; note = 2'-Omethyluridine
  modified_base 45: mod_base = OTHER; note = 2'-Omethylguanosine phosphorothiorate
  modified_base 47: mod_base = OTHER; note = Guanosine phosphorothiorate
  modified_base 49: mod_base = OTHER; note = 2'-Omethyluridine phosphorothiorate
  modified_base 54: mod_base = OTHER; note = 2'-Omethylcytosine
  modified_base 56: mod_base = OTHER; note = 2'-Omethylguanosine
  modified_base 62: mod_base = OTHER; note = 2'-fluoroguanosine
  modified_base 71: mod_base = OTHER; note = 2'-fluorocytosine phosphorothiorate
  modified_base 83: mod_base = OTHER; note = Cytosine phosphorothiorate
  modified_base 84: mod_base = OTHER; note = Cytosine phosphorothiorate

SEQ ID NO: 6990 - RNA, 76 nt, synthetic construct; identical to SEQ ID NO: 625
  source 1..76: mol_type = other RNA
  modified_base 1: mod_base = OTHER; note = 2'-Omethylguanosine
  modified_base 2: mod_base = OTHER; note = 2'-Omethylguanosine
  modified_base 3: mod_base = OTHER; note = 2'-Omethylcytosine
  modified_base 10: mod_base = OTHER; note = 2'-Omethylguanosine
  modified_base 11: mod_base = OTHER; note = 2'-Omethylcytosine
  modified_base 12: mod_base = OTHER; note = 2'-Omethylguanosine
  modified_base 13: mod_base = OTHER; note = 2'-Omethylcytosine
  modified_base 14: mod_base = OTHER; note = 2'-Omethyladenosine
  modified_base 15: mod_base = OTHER; note = 2'-fluoroadenosine
  modified_base 16: mod_base = OTHER; note = 2'-Omethyluridine
  modified_base 17: mod_base = OTHER; note = 2'-Omethylguanosine
  modified_base 18: mod_base = OTHER; note = 2'-Omethylguanosine
  modified_base 19: mod_base = OTHER; note = 2'-fluoroadenosine
  modified_base 20: mod_base = OTHER; note = 2'-Omethyluridine
  modified_base 22: mod_base = OTHER; note = 2'-Omethylguanosine
  modified_base 23: mod_base = OTHER; note = 2'-Omethylcytosine
  modified_base 24: mod_base = OTHER; note = 2'-Omethylguanosine
  modified_base 25: mod_base = OTHER; note = 2'-Omethylcytosine
  modified_base 38: mod_base = OTHER; note = Adenosine phosphorothiorate
  modified_base 39: mod_base = OTHER; note = Uridine phosphorothiorate
  modified_base 40: mod_base = OTHER; note = 2'-fluorouridine
  modified_base 43: mod_base = OTHER; note = 2'-Omethyladenosine
  modified_base 44: mod_base = OTHER; note = 2'-Omethyladenosine
  modified_base 45: mod_base = OTHER; note = 2'-Omethylguanosine
  modified_base 46: mod_base = OTHER; note = 2'-fluoroguanosine
  modified_base 48: mod_base = OTHER; note = 2'-fluorouridine
  modified_base 49: mod_base = OTHER; note = 2'-Omethylcytosine
  modified_base 50: mod_base = OTHER; note = 2'-Omethylcytosine
  modified_base 51: mod_base = OTHER; note = 2'-Omethylguanosine
  modified_base 52: mod_base = OTHER; note = 2'-Omethylguanosine
  modified_base 53: mod_base = OTHER; note = 2'-Omethylguanosine
  modified_base 54: mod_base = OTHER; note = 2'-Omethyluridine
  modified_base 61: mod_base = OTHER; note = 2'-Omethylcytosine
  modified_base 62: mod_base = OTHER; note = 2'-Omethylcytosine
  modified_base 63: mod_base = OTHER; note = 2'-fluorocytosine
  modified_base 64: mod_base = OTHER; note = 2'-Omethylguanosine
  modified_base 65: mod_base = OTHER; note = 2'-Omethylguanosine
  modified_base 66: mod_base = OTHER; note = 2'-Omethylcytosine
  modified_base 67: mod_base = OTHER; note = 2'-Omethylguanosine
  modified_base 68: mod_base = OTHER; note = 2'-Omethylguanosine
  modified_base 69: mod_base = OTHER; note = 2'-Omethyladenosine

SEQ ID NO: 6991 - RNA, 85 nt, synthetic construct; identical to SEQ ID NO: 3301
  source 1..85: mol_type = other RNA
  modified_base 1: mod_base = OTHER; note = 2'-Omethylguanosine phosphorothiorate
  modified_base 2: mod_base = OTHER; note = 2'-Omethylcytosine phosphorothiorate
  modified_base 4: mod_base = OTHER; note = Guanosine phosphorothiorate
  modified_base 14: mod_base = OTHER; note = 2'-fluoroadenosine
  modified_base 19: mod_base = OTHER; note = 2'-fluorouridine
  modified_base 23: mod_base = OTHER; note = 2'-fluoroguanosine
  modified_base 24: mod_base = OTHER; note = 2'-fluoroguanosine phosphorothiorate
  modified_base 27: mod_base = OTHER; note = 2'-fluorouridine
  modified_base 29: mod_base = OTHER; note = 2'-fluoroguanosine
  modified_base 33: mod_base = OTHER; note = 2'-fluorouridine
  modified_base 37: mod_base = OTHER; note = Adenosine phosphorothiorate
  modified_base 44: mod_base = OTHER; note = 2'-fluorouridine
  modified_base 47: mod_base = OTHER; note = Guanosine phosphorothiorate
  modified_base 54: mod_base = OTHER; note = 2'-Omethylcytosine
  modified_base 56: mod_base = OTHER; note = 2'-Omethylguanosine phosphorothiorate
  modified_base 60: mod_base = OTHER; note = 2'-fluoroadenosine phosphorothiorate
  modified_base 72: mod_base = OTHER; note = Uridine phosphorothiorate
  modified_base 82: mod_base = OTHER; note = Guanosine phosphorothiorate
  modified_base 83: mod_base = OTHER; note = 2'-fluorocytosine phosphorothiorate

SEQ ID NO: 6992 - RNA, 74 nt, synthetic construct; identical to SEQ ID NO: 3293
  source 1..74: mol_type = other RNA
  modified_base 1: mod_base = OTHER; note = 2'-fluoroadenosine
  modified_base 3: mod_base = OTHER; note = 2'-Omethylcytosine
  modified_base 9: mod_base = OTHER; note = 2'-fluoroguanosine
  modified_base 15: mod_base = OTHER; note = 2'-Omethylcytosine
  modified_base 35: mod_base = OTHER; note = 2'-fluoroguanosine
  modified_base 44: mod_base = OTHER; note = Guanosine phosphorothiorate
  modified_base 49: mod_base = OTHER; note = Guanosine phosphorothiorate
  modified_base 72: mod_base = OTHER; note = 2'-fluorocytosine
  modified_base 73: mod_base = OTHER; note = 2'-Omethylcytosine phosphorothiorate

SEQ ID NO: 6993 - RNA, 74 nt, synthetic construct; identical to SEQ ID NO: 3293
  source 1..74: mol_type = other RNA
  modified_base 1: mod_base = OTHER; note = 2'-fluoroadenosine phosphorothiorate
  modified_base 4: mod_base = OTHER; note = 2'-fluorouridine
  modified_base 11: mod_base = OTHER; note = 2'-fluoroguanosine
  modified_base 34: mod_base = OTHER; note = Adenosine phosphorothiorate
  modified_base 42: mod_base = OTHER; note = 2'-Omethyladenosine
  modified_base 48: mod_base = OTHER; note = 2'-fluorocytosine
  modified_base 73: mod_base = OTHER; note = 2'-Omethylcytosine phosphorothiorate
  modified_base 74: mod_base = OTHER; note = 2'-Omethyladenosine

SEQ ID NO: 6994 - RNA, 75 nt, synthetic construct; identical to SEQ ID NO: 3336
  source 1..75: mol_type = other RNA
  modified_base 10: mod_base = OTHER; note = 2'-Omethylcytosine phosphorothiorate
  modified_base 21: mod_base = OTHER; note = 2'-fluoroguanosine
  modified_base 26: mod_base = OTHER; note = Uridine phosphorothiorate
  modified_base 27: mod_base = OTHER; note = Cytosine phosphorothiorate
  modified_base 46: mod_base = OTHER; note = 2'-fluorouridine
  modified_base 47: mod_base = OTHER; note = 2'-fluorocytosine
  modified_base 53: mod_base = OTHER; note = 2'-fluorouridine
  modified_base 60: mod_base = OTHER; note = 2'-Omethylcytosine phosphorothiorate
  modified_base 72: mod_base = OTHER; note = 2'-Omethylguanosine
  modified_base 74: mod_base = OTHER; note = Cytosine phosphorothiorate

SEQ ID NO: 6995 - RNA, 76 nt, synthetic construct; identical to SEQ ID NO: 625
  source 1..76: mol_type = other RNA
  modified_base 1: mod_base = OTHER; note = 2'-Omethylguanosine phosphorothiorate
  modified_base 4: mod_base = OTHER; note = 2'-Omethyluridine
  modified_base 7: mod_base = OTHER; note = Guanosine phosphorothiorate
  modified_base 11: mod_base = OTHER; note = Cytosine phosphorothiorate
  modified_base 12: mod_base = OTHER; note = 2'-fluoroguanosine
  modified_base 13: mod_base = OTHER; note = 2'-Omethylcytosine
  modified_base 14: mod_base = OTHER; note = 2'-fluoroadenosine
  modified_base 17: mod_base = OTHER; note = Guanosine phosphorothiorate
  modified_base 18: mod_base = OTHER; note = Guanosine phosphorothiorate
  modified_base 23: mod_base = OTHER; note = 2'-Omethylcytosine
  modified_base 24: mod_base = OTHER; note = 2'-fluoroguanosine
  modified_base 27: mod_base = OTHER; note = 2'-Omethyluridine
  modified_base 30: mod_base = OTHER; note = 2'-Omethylguanosine
  modified_base 33: mod_base = OTHER; note = 2'-fluorouridine
  modified_base 36: mod_base = OTHER; note = Adenosine phosphorothiorate
  modified_base 38: mod_base = OTHER; note = 2'-Omethyladenosine phosphorothiorate
  modified_base 39: mod_base = OTHER; note = 2'-fluorouridine
  modified_base 41: mod_base = OTHER; note = Cytosine phosphorothiorate
  modified_base 42: mod_base = OTHER; note = 2'-fluoroadenosine
  modified_base 45: mod_base = OTHER; note = 2'-Omethylguanosine phosphorothiorate
  modified_base 47: mod_base = OTHER; note = 2'-Omethyluridine phosphorothiorate
  modified_base 48: mod_base = OTHER; note = 2'-fluorouridine
  modified_base 51: mod_base = OTHER; note = 2'-Omethylguanosine phosphorothiorate
  modified_base 52: mod_base = OTHER; note = Guanosine phosphorothiorate
  modified_base 56: mod_base = OTHER; note = 2'-fluorocytosine
  modified_base 60: mod_base = OTHER; note = 2'-fluorouridine
  modified_base 62: mod_base = OTHER; note = 2'-Omethylcytosine phosphorothiorate
  modified_base 63: mod_base = OTHER; note = 2'-fluorocytosine
  modified_base 65: mod_base = OTHER; note = 2'-fluoroguanosine
  modified_base 66: mod_base = OTHER; note = 2'-Omethylcytosine
  modified_base 67: mod_base = OTHER; note = 2'-fluoroguanosine
  modified_base 68: mod_base = OTHER; note = 2'-Omethylguanosine
  modified_base 69: mod_base = OTHER; note = Adenosine phosphorothiorate
  modified_base 71: mod_base = OTHER; note = 2'-fluorouridine
  modified_base 72: mod_base = OTHER; note = 2'-Omethylcytosine

SEQ ID NO: 6996 - RNA, 76 nt, synthetic construct; identical to SEQ ID NO: 3615
  source 1..76: mol_type = other RNA
  modified_base 1: mod_base = OTHER; note = 2'-Omethylguanosine
  modified_base 2: mod_base = OTHER; note = 2'-Omethylguanosine
  modified_base 3: mod_base = OTHER; note = 2'-Omethylcytosine
  modified_base 4: mod_base = OTHER; note = 2'-Omethyluridine
  modified_base 5: mod_base = OTHER; note = 2'-Omethylcytosine
  modified_base 6: mod_base = OTHER; note = 2'-Omethylcytosine
  modified_base 16: mod_base = OTHER; note = 2'-Omethyluridine
  modified_base 17: mod_base = OTHER; note = 2'-Omethylguanosine
  modified_base 18: mod_base = OTHER; note = 2'-Omethylguanosine
  modified_base 20: mod_base = OTHER; note = 2'-Omethyluridine
  modified_base 25: mod_base = OTHER; note = 2'-Omethylcytosine
  modified_base 33: mod_base = OTHER; note = 2'-fluorouridine
  modified_base 35: mod_base = OTHER; note = Cytosine phosphorothiorate
  modified_base 37: mod_base = OTHER; note = Adenosine phosphorothiorate
  modified_base 38: mod_base = OTHER; note = Adenosine phosphorothiorate
  modified_base 41: mod_base = OTHER; note = 2'-Omethylcytosine
  modified_base 42: mod_base = OTHER; note = 2'-Omethyladenosine
  modified_base 43: mod_base = OTHER; note = 2'-Omethyladenosine
  modified_base 44: mod_base = OTHER; note = 2'-Omethylguanosine
  modified_base 49: mod_base = OTHER; note = 2'-Omethylcytosine
  modified_base 50: mod_base = OTHER; note = 2'-Omethylcytosine
  modified_base 52: mod_base = OTHER; note = 2'-Omethylguanosine
  modified_base 54: mod_base = OTHER; note = Uridine phosphorothiorate
  modified_base 55: mod_base = OTHER; note = Uridine phosphorothiorate
  modified_base 61: mod_base = OTHER; note = 2'-Omethylcytosine
  modified_base 65: mod_base = OTHER; note = 2'-Omethylguanosine
  modified_base 73: mod_base = OTHER; note = 2'-Omethylguanosine

SEQ ID NO: 6997 - RNA, 76 nt, synthetic construct; identical to SEQ ID NO: 625
  source 1..76: mol_type = other RNA
  modified_base 1: mod_base = OTHER; note = 2'-Omethylguanosine phosphorothiorate
  modified_base 2: mod_base = OTHER; note = 2'-Omethylguanosine
  modified_base 13: mod_base = OTHER; note = 2'-Omethylcytosine
  modified_base 33: mod_base = OTHER; note = 2'-fluorouridine
  modified_base 35: mod_base = OTHER; note = Cytosine phosphorothiorate
  modified_base 37: mod_base = OTHER; note = Adenosine phosphorothiorate
  modified_base 38: mod_base = OTHER; note = Adenosine phosphorothiorate
  modified_base 52: mod_base = OTHER; note = 2'-Omethylguanosine
  modified_base 62: mod_base = OTHER; note = 2'-Omethylcytosine
  modified_base 65: mod_base = OTHER; note = 2'-Omethylguanosine
  modified_base 73: mod_base = OTHER; note = 2'-Omethylguanosine
  modified_base 75: mod_base = OTHER; note = 2'-fluorocytosine phosphorothiorate

SEQ ID NO: 6998 - RNA, 75 nt, synthetic construct; identical to SEQ ID NO: 3336
  source 1..75: mol_type = other RNA
  modified_base 1: mod_base = OTHER; note = 2'-Omethylcytosine
  modified_base 3: mod_base = OTHER; note = 2'-fluorouridine phosphorothiorate
  modified_base 10: mod_base = OTHER; note = 2'-Omethylcytosine phosphorothiorate
  modified_base 11: mod_base = OTHER; note = Uridine phosphorothiorate
  modified_base 17: mod_base = OTHER; note = 2'-fluoroguanosine
  modified_base 21: mod_base = OTHER; note = 2'-fluoroguanosine
  modified_base 22: mod_base = OTHER; note = Adenosine phosphorothiorate
  modified_base 25: mod_base = OTHER; note = Adenosine phosphorothiorate
  modified_base 28: mod_base = OTHER; note = 2'-fluoroadenosine
  modified_base 33: mod_base = OTHER; note = Cytosine phosphorothiorate
  modified_base 37: mod_base = OTHER; note = 2'-fluoroadenosine
  modified_base 39: mod_base = OTHER; note = 2'-Omethylcytosine phosphorothiorate
  modified_base 49: mod_base = OTHER; note = Adenosine phosphorothiorate
  modified_base 51: mod_base = OTHER; note = 2'-fluoroguanosine phosphorothiorate
  modified_base 55: mod_base = OTHER; note = 2'-Omethylcytosine phosphorothiorate
  modified_base 58: mod_base = OTHER; note = Guanosine phosphorothiorate
  modified_base 72: mod_base = OTHER; note = Guanosine phosphorothiorate
  modified_base 74: mod_base = OTHER; note = 2'-Omethylcytosine

SEQ ID NO: 6999 - RNA, 75 nt, synthetic construct; identical to SEQ ID NO: 1045
  source 1..75: mol_type = other RNA
  modified_base 1: mod_base = OTHER; note = 2'-Omethylguanosine
  modified_base 19: mod_base = OTHER; note = 2'-Omethyluridine
  modified_base 20: mod_base = OTHER; note = 2'-Omethyladenosine
  modified_base 21: mod_base = OTHER; note = 2'-fluoroadenosine
  modified_base 22: mod_base = OTHER; note = 2'-Omethylguanosine
  modified_base 40: mod_base = OTHER; note = 2'-fluorocytosine
  modified_base 41: mod_base = OTHER; note = 2'-Omethylcytosine
  modified_base 42: mod_base = OTHER; note = 2'-Omethyladenosine
  modified_base 43: mod_base = OTHER; note = 2'-Omethylguanosine
  modified_base 72: mod_base = OTHER; note = 2'-Omethyluridine

SEQ ID NO: 7000 - RNA, 86 nt, synthetic construct; identical to SEQ ID NO: 3290
  source 1..86: mol_type = other RNA
  modified_base 40: mod_base = OTHER; note = 2'-fluorocytosine

SEQ ID NO: 7001 - RNA, 76 nt, synthetic construct; identical to SEQ ID NO: 625
  source 1..76: mol_type = other RNA
  modified_base 1: mod_base = OTHER; note = Guanosine phosphorothiorate
  modified_base 3: mod_base = OTHER; note = Cytosine phosphorothiorate
  modified_base 4: mod_base = OTHER; note = 2'-fluorouridine
  modified_base 10: mod_base = OTHER; note = Guanosine phosphorothiorate
  modified_base 11: mod_base = OTHER; note = 2'-fluorocytosine
  modified_base 12: mod_base = OTHER; note = Guanosine phosphorothiorate
  modified_base 13: mod_base = OTHER; note = 2'-Omethylcytosine
  modified_base 14: mod_base = OTHER; note = 2'-Omethyladenosine
  modified_base 15: mod_base = OTHER; note = 2'-fluoroadenosine
  modified_base 16: mod_base = OTHER; note = Uridine phosphorothiorate
  modified_base 17: mod_base = OTHER; note = 2'-Omethylguanosine
  modified_base 19: mod_base = OTHER; note = Adenosine phosphorothiorate
  modified_base 20: mod_base = OTHER; note = 2'-fluorouridine
  modified_base 22: mod_base = OTHER; note = 2'-Omethylguanosine
  modified_base 23: mod_base = OTHER; note = 2'-Omethylcytosine
  modified_base 26: mod_base = OTHER; note = 2'-fluoroadenosine phosphorothiorate
  modified_base 33: mod_base = OTHER; note = Uridine phosphorothiorate
  modified_base 34: mod_base = OTHER; note = 2'-fluorouridine
  modified_base 38: mod_base = OTHER; note = Adenosine phosphorothiorate
  modified_base 48: mod_base = OTHER; note = 2'-fluorouridine phosphorothiorate
  modified_base 50: mod_base = OTHER; note = 2'-fluorocytosine
  modified_base 52: mod_base = OTHER; note = 2'-fluoroguanosine
  modified_base 53: mod_base = OTHER; note = 2'-Omethylguanosine phosphorothiorate
  modified_base 54: mod_base = OTHER; note = 2'-Omethyluridine
  modified_base 57: mod_base = OTHER; note = 2'-Omethylguanosine
  modified_base 59: mod_base = OTHER; note = Guanosine phosphorothiorate
  modified_base 60: mod_base = OTHER; note = 2'-fluorouridine
  modified_base 61: mod_base = OTHER; note = 2'-Omethylcytosine
  modified_base 63: mod_base = OTHER; note = Cytosine phosphorothiorate
  modified_base 64: mod_base = OTHER; note = 2'-Omethylguanosine
  modified_base 67: mod_base = OTHER; note = 2'-fluoroguanosine
  modified_base 68: mod_base = OTHER; note = 2'-fluoroguanosine
  modified_base 69: mod_base = OTHER; note = 2'-Omethyladenosine
  modified_base 74: mod_base = OTHER; note = 2'-Omethylcytosine
  modified_base 75: mod_base = OTHER; note = 2'-Omethylcytosine
  modified_base 76: mod_base = OTHER; note = 2'-fluoroadenosine

SEQ ID NO: 7002 - RNA, 75 nt, synthetic construct; identical to SEQ ID NO: 3299
  source 1..75: mol_type = other RNA
  modified_base 1: mod_base = OTHER; note = 2'-Omethylcytosine phosphorothiorate
  modified_base 2: mod_base = OTHER; note = 2'-Omethylcytosine phosphorothiorate
  modified_base 3: mod_base = OTHER; note = 2'-Omethyluridine
  modified_base 7: mod_base = OTHER; note = 2'-fluorouridine phosphorothiorate
  modified_base 13: mod_base = OTHER; note = 2'-fluoroadenosine phosphorothiorate
  modified_base 18: mod_base = OTHER; note = 2'-Omethylguanosine phosphorothiorate
  modified_base 19: mod_base = OTHER; note = 2'-fluorouridine
  modified_base 22: mod_base = OTHER; note = 2'-fluoroadenosine
  modified_base 25: mod_base = OTHER; note = Adenosine phosphorothiorate
  modified_base 27: mod_base = OTHER; note = 2'-fluorocytosine
  modified_base 28: mod_base = OTHER; note = Adenosine phosphorothiorate
  modified_base 39: mod_base = OTHER; note = 2'-fluorocytosine
  modified_base 40: mod_base = OTHER; note = 2'-fluorouridine
  modified_base 46: mod_base = OTHER; note = 2'-fluorouridine
  modified_base 52: mod_base = OTHER; note = 2'-fluoroguanosine
  modified_base 58: mod_base = OTHER; note = Guanosine phosphorothiorate
  modified_base 60: mod_base = OTHER; note = Cytosine phosphorothiorate
  modified_base 62: mod_base = OTHER; note = 2'-fluorocytosine phosphorothiorate
  modified_base 71: mod_base = OTHER; note = Cytosine phosphorothiorate
  modified_base 73: mod_base = OTHER; note = Cytosine phosphorothiorate
  modified_base 74: mod_base = OTHER; note = 2'-Omethylcytosine

SEQ ID NO: 7003 - RNA, 75 nt, synthetic construct; identical to SEQ ID NO: 3306
  source 1..75: mol_type = other RNA
  modified_base 1: mod_base = OTHER; note = 2'-Omethylguanosine
  modified_base 13: mod_base = OTHER; note = 2'-Omethylcytosine
  modified_base 14: mod_base = OTHER; note = 2'-Omethyladenosine
  modified_base 15: mod_base = OTHER; note = 2'-Omethyladenosine
  modified_base 16: mod_base = OTHER; note = 2'-Omethylcytosine
  modified_base 17: mod_base = OTHER; note = 2'-Omethylguanosine
  modified_base 18: mod_base = OTHER; note = 2'-Omethylguanosine
  modified_base 19: mod_base = OTHER; note = Uridine phosphorothiorate
  modified_base 20: mod_base = OTHER; note = Adenosine phosphorothiorate
  modified_base 21: mod_base = OTHER; note = 2'-Omethylguanosine
  modified_base 22: mod_base = OTHER; note = 2'-Omethylcytosine
  modified_base 23: mod_base = OTHER; note = 2'-Omethylguanosine
  modified_base 24: mod_base = OTHER; note = 2'-Omethylcytosine
  modified_base 32: mod_base = OTHER; note = 2'-fluorouridine
  modified_base 33: mod_base = OTHER; note = 2'-Omethylcytosine
  modified_base 34: mod_base = OTHER; note = Uridine phosphorothiorate
  modified_base 36: mod_base = OTHER; note = Guanosine phosphorothiorate
  modified_base 37: mod_base = OTHER; note = Adenosine phosphorothiorate
  modified_base 48: mod_base = OTHER; note = 2'-Omethylguanosine
  modified_base 49: mod_base = OTHER; note = 2'-Omethylcytosine
  modified_base 51: mod_base = OTHER; note = 2'-Omethyluridine
  modified_base 53: mod_base = OTHER; note = Uridine phosphorothiorate
  modified_base 54: mod_base = OTHER; note = Uridine phosphorothiorate
  modified_base 60: mod_base = OTHER; note = 2'-Omethylcytosine
  modified_base 64: mod_base = OTHER; note = 2'-Omethyluridine
  modified_base 72: mod_base = OTHER; note = 2'-Omethyladenosine

SEQ ID NO: 7004 - RNA, 76 nt, synthetic construct; identical to SEQ ID NO: 625
  source 1..76: mol_type = other RNA
  modified_base 1: mod_base = OTHER; note = 2'-fluoroguanosine
  modified_base 4: mod_base = OTHER; note = 2'-Omethyluridine phosphorothiorate
  modified_base 5: mod_base = OTHER; note = 2'-Omethylcytosine
  modified_base 12: mod_base = OTHER; note = 2'-fluoroguanosine phosphorothiorate
  modified_base 13: mod_base = OTHER; note = 2'-fluorocytosine
  modified_base 15: mod_base = OTHER; note = 2'-fluoroadenosine
  modified_base 16: mod_base = OTHER; note = 2'-Omethyluridine
  modified_base 18: mod_base = OTHER; note = 2'-Omethylguanosine phosphorothiorate
  modified_base 20: mod_base = OTHER; note = 2'-Omethyluridine
  modified_base 22: mod_base = OTHER; note = 2'-Omethylguanosine
  modified_base 26: mod_base = OTHER; note = 2'-fluoroadenosine
  modified_base 29: mod_base = OTHER; note = 2'-fluoroguanosine
  modified_base 30: mod_base = OTHER; note = 2'-fluoroguanosine
  modified_base 36: mod_base = OTHER; note = Adenosine phosphorothiorate
  modified_base 38: mod_base = OTHER; note = 2'-fluoroadenosine
  modified_base 39: mod_base = OTHER; note = 2'-fluorouridine
  modified_base 41: mod_base = OTHER; note = 2'-fluorocytosine
  modified_base 42: mod_base = OTHER; note = 2'-fluoroadenosine phosphorothiorate
  modified_base 43: mod_base = OTHER; note = 2'-fluoroadenosine
  modified_base 47: mod_base = OTHER; note = Uridine phosphorothiorate
  modified_base 48: mod_base = OTHER; note = 2'-Omethyluridine phosphorothiorate
  modified_base 51: mod_base = OTHER; note = 2'-Omethylguanosine
  modified_base 53: mod_base = OTHER; note = 2'-Omethylguanosine
  modified_base 54: mod_base = OTHER; note = Uridine phosphorothiorate
  modified_base 55: mod_base = OTHER; note = Uridine phosphorothiorate
  modified_base 58: mod_base = OTHER; note = 2'-fluoroadenosine phosphorothiorate
  modified_base 59: mod_base = OTHER; note = 2'-Omethylguanosine phosphorothiorate
  modified_base 60: mod_base = OTHER; note = 2'-Omethyluridine
  modified_base 67: mod_base = OTHER; note = 2'-Omethylguanosine
  modified_base 68: mod_base = OTHER; note = 2'-fluoroguanosine phosphorothiorate

SEQ ID NO: 7005 - RNA, 75 nt, synthetic construct; identical to SEQ ID NO: 3336
  source 1..75: mol_type = other RNA
  modified_base 1: mod_base = OTHER; note = 2'-Omethylcytosine
  modified_base 9: mod_base = OTHER; note = Guanosine phosphorothiorate
  modified_base 20: mod_base = OTHER; note = 2'-fluoroadenosine
  modified_base 25: mod_base = OTHER; note = Adenosine phosphorothiorate
  modified_base 36: mod_base = OTHER; note = Adenosine phosphorothiorate
  modified_base 60: mod_base = OTHER; note = 2'-fluorocytosine
  modified_base 61: mod_base = OTHER; note = Cytosine phosphorothiorate

SEQ ID NO: 7006 - RNA, 74 nt, synthetic construct; identical to SEQ ID NO: 3293
  source 1..74: mol_type = other RNA
  modified_base 1: mod_base = OTHER; note = 2'-fluoroadenosine phosphorothiorate
  modified_base 9: mod_base = OTHER; note = Guanosine phosphorothiorate
  modified_base 15: mod_base = OTHER; note = 2'-Omethylcytosine phosphorothiorate
  modified_base 26: mod_base = OTHER; note = 2'-Omethylcytosine phosphorothiorate
  modified_base 34: mod_base = OTHER; note = 2'-fluoroadenosine
  modified_base 43: mod_base = OTHER; note = 2'-fluoroguanosine
  modified_base 48: mod_base = OTHER; note = Cytosine phosphorothiorate
  modified_base 73: mod_base = OTHER; note = 2'-Omethylcytosine phosphorothiorate
  modified_base 74: mod_base = OTHER; note = 2'-fluoroadenosine

SEQ ID NO: 7007 - RNA, 75 nt, synthetic construct; identical to SEQ ID NO: 3306
  source 1..75: mol_type = other RNA
  modified_base 1: mod_base = OTHER; note = 2'-Omethylguanosine phosphorothiorate
  modified_base 2: mod_base = OTHER; note = 2'-Omethyladenosine phosphorothiorate
  modified_base 13: mod_base = OTHER; note = 2'-fluorocytosine
  modified_base 14: mod_base = OTHER; note = 2'-fluoroadenosine
  modified_base 53: mod_base = OTHER; note = 2'-fluorouridine
  modified_base 58: mod_base = OTHER; note = 2'-Omethyladenosine
  modified_base 74: mod_base = OTHER; note = Cytosine phosphorothiorate
  modified_base 75: mod_base = OTHER; note = 2'-Omethyladenosine

SEQ ID NO: 7008 - RNA, 85 nt, synthetic construct; identical to SEQ ID NO: 3297
  source 1..85: mol_type = other RNA
  modified_base 1: mod_base = OTHER; note = 2'-Omethylguanosine
  modified_base 10: mod_base = OTHER; note = 2'-Omethylguanosine
  modified_base 11: mod_base = OTHER; note = 2'-Omethylcytosine
  modified_base 12: mod_base = OTHER; note = 2'-Omethylcytosine
  modified_base 13: mod_base = OTHER; note = 2'-Omethylguanosine
  modified_base 14: mod_base = OTHER; note = 2'-Omethyladenosine
  modified_base 15: mod_base = OTHER; note = 2'-Omethylguanosine
  modified_base 16: mod_base = OTHER; note = 2'-Omethyluridine
  modified_base 17: mod_base = OTHER; note = 2'-Omethylguanosine
  modified_base 18: mod_base = OTHER; note = 2'-Omethylguanosine
  modified_base 19: mod_base = OTHER; note = Uridine phosphorothiorate
  modified_base 20: mod_base = OTHER; note = 2'-Omethyluridine
  modified_base 21: mod_base = OTHER; note = Adenosine phosphorothiorate
  modified_base 22: mod_base = OTHER; note = 2'-Omethyladenosine
  modified_base 23: mod_base = OTHER; note = 2'-Omethylguanosine
  modified_base 24: mod_base = OTHER; note = 2'-Omethylguanosine
  modified_base 25: mod_base = OTHER; note = 2'-Omethylcytosine
  modified_base 41: mod_base = OTHER; note = 2'-Omethylcytosine
  modified_base 42: mod_base = OTHER; note = 2'-Omethyladenosine
  modified_base 43: mod_base = OTHER; note = 2'-Omethyladenosine
  modified_base 44: mod_base = OTHER; note = 2'-Omethyluridine
  modified_base 58: mod_base = OTHER; note = 2'-Omethylguanosine
  modified_base 59: mod_base = OTHER; note = 2'-Omethylcytosine
  modified_base 61: mod_base = OTHER; note = 2'-Omethylguanosine
  modified_base 63: mod_base = OTHER; note = Uridine phosphorothiorate
  modified_base 64: mod_base = OTHER; note = Uridine phosphorothiorate
  modified_base 70: mod_base = OTHER; note = 2'-Omethylcytosine
  modified_base 74: mod_base = OTHER; note = 2'-Omethylcytosine
  modified_base 82: mod_base = OTHER; note = 2'-Omethylguanosine

SEQ ID NO: 7009 - DNA, 74 bp, synthetic construct; identical to SEQ ID NO: 3384
  source 1..74: mol_type = other DNA
  modified_base 1: mod_base = OTHER; note = 2'-Omethylguanosine phosphorothiorate
  modified_base 2: mod_base = OTHER; note = 2'-Omethylguanosine
  modified_base 12: mod_base = OTHER; note = Guanosine phosphorothiorate
  modified_base 13: mod_base = OTHER; note = 2'-fluorocytosine
  modified_base 25: mod_base = OTHER; note = Cytosine phosphorothiorate
  modified_base 44: mod_base = OTHER; note = Adenosine phosphorothiorate
  modified_base 45: mod_base = OTHER; note = 2'-O-(2-Methoxyethyl) guanosine
  modified_base 51: mod_base = OTHER; note = Guanosine phosphorothiorate
  modified_base 73: mod_base = OTHER; note = 2'-Omethylguanosine
  misc_feature 1..51: note = RNA
  misc_feature 52: note = DNA
  misc_feature 53..74: note = RNA

SEQ ID NO: 7010 - RNA, 76 nt, synthetic construct; identical to SEQ ID NO: 3419
  source 1..76: mol_type = other RNA
  modified_base 1: mod_base = OTHER; note = 2'-Omethylguanosine
  modified_base 2: mod_base = OTHER; note = 2'-Omethylguanosine
  modified_base 3: mod_base = OTHER; note = 2'-Omethylcytosine
  modified_base 4: mod_base = OTHER; note = 2'-Omethyluridine
  modified_base 5: mod_base = OTHER; note = 2'-Omethylcytosine
  modified_base 6: mod_base = OTHER; note = 2'-Omethylcytosine
  modified_base 10: mod_base = OTHER; note = 2'-Omethylguanosine
  modified_base 11: mod_base = OTHER; note = 2'-Omethylcytosine
  modified_base 12: mod_base = OTHER; note = 2'-Omethylguanosine
  modified_base 13: mod_base = OTHER; note = 2'-Omethylcytosine
  modified_base 16: mod_base = OTHER; note = 2'-Omethyluridine
  modified_base 17: mod_base = OTHER; note = 2'-Omethylguanosine
  modified_base 18: mod_base = OTHER; note = 2'-Omethylguanosine
  modified_base 20: mod_base = OTHER; note = 2'-Omethyluridine
  modified_base 25: mod_base = OTHER; note = 2'-Omethylcytosine
  modified_base 33: mod_base = OTHER; note = 2'-fluorouridine
  modified_base 35: mod_base = OTHER; note = Cytosine phosphorothiorate
  modified_base 37: mod_base = OTHER; note = Adenosine phosphorothiorate
  modified_base 38: mod_base = OTHER; note = Adenosine phosphorothiorate
  modified_base 41: mod_base = OTHER; note = 2'-fluoroguanosine
  modified_base 42: mod_base = OTHER; note = 2'-Omethylguanosine
  modified_base 43: mod_base = OTHER; note = 2'-Omethyluridine
  modified_base 44: mod_base = OTHER; note = 2'-fluoroadenosine
  modified_base 49: mod_base = OTHER; note = 2'-Omethylcytosine
  modified_base 50: mod_base = OTHER; note = 2'-Omethylcytosine
  modified_base 52: mod_base = OTHER; note = 2'-Omethylguanosine
  modified_base 54: mod_base = OTHER; note = 2'-Omethyluridine
  modified_base 55: mod_base = OTHER; note = Uridine phosphorothiorate
  modified_base 56: mod_base = OTHER; note = 2'-Omethylcytosine
  modified_base 57: mod_base = OTHER; note = 2'-fluoroguanosine
  modified_base 59: mod_base = OTHER; note = 2'-Omethylguanosine
  modified_base 61: mod_base = OTHER; note = 2'-Omethylcytosine
  modified_base 65: mod_base = OTHER; note = 2'-Omethylguanosine
  modified_base 73: mod_base = OTHER; note = 2'-Omethylguanosine

SEQ ID NO: 7011 - RNA, 74 nt, synthetic construct; identical to SEQ ID NO: 3293
  source 1..74: mol_type = other RNA
  modified_base 4: mod_base = OTHER; note = Uridine phosphorothiorate
  modified_base 8: mod_base = OTHER; note = 2'-Omethylguanosine
  modified_base 12: mod_base = OTHER; note = 2'-fluorocytosine
  modified_base 26: mod_base = OTHER; note = 2'-fluorocytosine phosphorothiorate
  modified_base 28: mod_base = OTHER; note = 2'-Omethylguanosine phosphorothiorate
  modified_base 43: mod_base = OTHER; note = Guanosine phosphorothiorate
  modified_base 48: mod_base = OTHER; note = 2'-Omethylcytosine phosphorothiorate
  modified_base 51: mod_base = OTHER; note = Guanosine phosphorothiorate
  modified_base 59: mod_base = OTHER; note = 2'-fluorocytosine
  modified_base 73: mod_base = OTHER; note = 2'-fluorocytosine

SEQ ID NO: 7012 - RNA, 85 nt, synthetic construct; identical to SEQ ID NO: 3297
  source 1..85: mol_type = other RNA
  modified_base 59: mod_base = OTHER; note = 2'-Omethylcytosine
  modified_base 82: mod_base = OTHER; note = 2'-Omethylguanosine

SEQ ID NO: 7013 - RNA, 75 nt, synthetic construct; identical to SEQ ID NO: 3336
  source 1..75: mol_type = other RNA
  modified_base 1: mod_base = OTHER; note = Cytosine phosphorothiorate
  modified_base 2: mod_base = OTHER; note = 2'-fluorocytosine
  modified_base 7: mod_base = OTHER; note = 2'-Omethyluridine phosphorothiorate
  modified_base 8: mod_base = OTHER; note = 2'-fluoroadenosine
  modified_base 15: mod_base = OTHER; note = 2'-Omethyluridine
  modified_base 17: mod_base = OTHER; note = 2'-fluoroguanosine
  modified_base 21: mod_base = OTHER; note = 2'-fluoroguanosine
  modified_base 28: mod_base = OTHER; note = 2'-fluoroadenosine
  modified_base 29: mod_base = OTHER; note = 2'-fluoroguanosine
  modified_base 34: mod_base = OTHER; note = 2'-Omethyluridine phosphorothiorate
  modified_base 38: mod_base = OTHER; note = Uridine phosphorothiorate
  modified_base 41: mod_base = OTHER; note = 2'-fluoroguanosine
  modified_base 47: mod_base = OTHER; note = 2'-fluorocytosine
  modified_base 48: mod_base = OTHER; note = 2'-fluorocytosine
  modified_base 49: mod_base = OTHER; note = Adenosine phosphorothiorate
  modified_base 54: mod_base = OTHER; note = 2'-fluorouridine phosphorothiorate
  modified_base 61: mod_base = OTHER; note = 2'-fluorocytosine
  modified_base 72: mod_base = OTHER; note = Guanosine phosphorothiorate
  modified_base 74: mod_base = OTHER; note = 2'-Omethylcytosine

SEQ ID NO: 7014 - RNA, 76 nt, synthetic construct
  source 1..76: mol_type = other RNA
ggctccgtggacgaatggagacgtcattggacttcaaattcaaaggttccgggttcgagtcccggcggagtcgcca

SEQ ID NO: 7015 - RNA, 73 nt, synthetic construct; identical to SEQ ID NO: 935
  source 1..73: mol_type = other RNA
  modified_base 1: mod_base = OTHER; note = 2'-Omethylguanosine phosphorothiorate
  modified_base 2: mod_base = OTHER; note = 2'-Omethylguanosine
  modified_base 13: mod_base = OTHER; note = 2'-fluorocytosine
  modified_base 72: mod_base = OTHER; note = 2'-Omethylcytosine

SEQ ID NO: 7016 - RNA, 75 nt, synthetic construct; identical to SEQ ID NO: 3336
  source 1..75: mol_type = other RNA
  modified_base 1: mod_base = OTHER; note = 2'-Omethylcytosine
  modified_base 2: mod_base = OTHER; note = 2'-fluorocytosine phosphorothiorate
  modified_base 4: mod_base = OTHER; note = 2'-fluoroguanosine
  modified_base 11: mod_base = OTHER; note = Uridine phosphorothiorate
  modified_base 19: mod_base = OTHER; note = 2'-fluorouridine
  modified_base 20: mod_base = OTHER; note = 2'-fluoroadenosine
  modified_base 21: mod_base = OTHER; note = 2'-Omethylguanosine phosphorothiorate
  modified_base 23: mod_base = OTHER; note = 2'-Omethylguanosine
  modified_base 26: mod_base = OTHER; note = Uridine phosphorothiorate
  modified_base 30: mod_base = OTHER; note = 2'-fluoroadenosine
  modified_base 35: mod_base = OTHER; note = 2'-fluoroadenosine
  modified_base 38: mod_base = OTHER; note = 2'-fluorouridine
  modified_base 39: mod_base = OTHER; note = 2'-fluorocytosine
  modified_base 41: mod_base = OTHER; note = 2'-Omethylguanosine phosphorothiorate
  modified_base 45: mod_base = OTHER; note = 2'-fluoroguanosine
  modified_base 48: mod_base = OTHER; note = 2'-fluorocytosine
  modified_base 49: mod_base = OTHER; note = Adenosine phosphorothiorate
  modified_base 61: mod_base = OTHER; note = 2'-Omethylcytosine phosphorothiorate
  modified_base 69: mod_base = OTHER; note = Guanosine phosphorothiorate
  modified_base 73: mod_base = OTHER; note = Cytosine phosphorothiorate
  modified_base 74: mod_base = OTHER; note = Cytosine phosphorothiorate

SEQ ID NO: 7017 - RNA, 86 nt, synthetic construct; identical to SEQ ID NO: 3290
  source 1..86: mol_type = other RNA
  modified_base 9: mod_base = OTHER; note = Guanosine phosphorothiorate

SEQ ID NO: 7018 - RNA, 85 nt, synthetic construct; identical to SEQ ID NO: 3310
  source 1..85: mol_type = other RNA
  modified_base 1: mod_base = OTHER; note = 2'-Omethylcytosine
  modified_base 30: mod_base = OTHER; note = 2'-fluoroadenosine
  modified_base 34: mod_base = OTHER; note = 2'-fluorouridine
  modified_base 36: mod_base = OTHER; note = Guanosine phosphorothiorate
  modified_base 42: mod_base = OTHER; note = Adenosine phosphorothiorate
  modified_base 84: mod_base = OTHER; note = Cytosine phosphorothiorate
  modified_base 85: mod_base = OTHER; note = 2'-fluoroadenosine

SEQ ID NO: 7019 - RNA, 76 nt, synthetic construct; identical to SEQ ID NO: 3289
  source 1..76: mol_type = other RNA
  modified_base 1: mod_base = OTHER; note = 2'-Omethylguanosine phosphorothiorate
  modified_base 2: mod_base = OTHER; note = 2'-Omethylcytosine
  modified_base 3: mod_base = OTHER; note = 2'-Omethylcytosine
  modified_base 4: mod_base = OTHER; note = 2'-Omethyluridine
  modified_base 5: mod_base = OTHER; note = 2'-Omethylguanosine
  modified_base 6: mod_base = OTHER; note = 2'-Omethylguanosine
  modified_base 44: mod_base = OTHER; note = 2'-Omethylguanosine
  modified_base 45: mod_base = OTHER; note = 2'-Omethylguanosine
  modified_base 46: mod_base = OTHER; note = 2'-fluoroguanosine
  modified_base 47: mod_base = OTHER; note = 2'-fluorouridine
  modified_base 48: mod_base = OTHER; note = 2'-Omethylcytosine
  modified_base 49: mod_base = OTHER; note = 2'-Omethylcytosine
  modified_base 73: mod_base = OTHER; note = 2'-Omethylguanosine

SEQ ID NO: 7020 - RNA, 73 nt, synthetic construct; identical to SEQ ID NO: 935
  source 1..73: mol_type = other RNA
  modified_base 1: mod_base = OTHER; note = 2'-Omethylguanosine
  modified_base 14: mod_base = OTHER; note = 2'-Omethyladenosine
  modified_base 15: mod_base = OTHER; note = 2'-fluoroadenosine
  modified_base 16: mod_base = OTHER; note = 2'-Omethyluridine
  modified_base 17: mod_base = OTHER; note = 2'-Omethylguanosine
  modified_base 18: mod_base = OTHER; note = 2'-Omethylguanosine
  modified_base 19: mod_base = OTHER; note = 2'-fluoroadenosine
  modified_base 20: mod_base = OTHER; note = 2'-Omethyluridine
  modified_base 72: mod_base = OTHER; note = 2'-Omethylcytosine

SEQ ID NO: 7021 - RNA, 76 nt, synthetic construct; identical to SEQ ID NO: 3318
  source 1..76: mol_type = other RNA
  modified_base 1: mod_base = OTHER; note = 2'-Omethylcytosine
  modified_base 13: mod_base = OTHER; note = 2'-Omethylcytosine
  modified_base 14: mod_base = OTHER; note = 2'-Omethyladenosine
  modified_base 15: mod_base = OTHER; note = 2'-Omethylguanosine
  modified_base 16: mod_base = OTHER; note = 2'-Omethyluridine
  modified_base 18: mod_base = OTHER; note = 2'-Omethylguanosine
  modified_base 19: mod_base = OTHER; note = 2'-Omethylguanosine
  modified_base 20: mod_base = OTHER; note = Uridine phosphorothiorate
  modified_base 21: mod_base = OTHER; note = Adenosine phosphorothiorate
  modified_base 25: mod_base = OTHER; note = 2'-Omethylcytosine
  modified_base 33: mod_base = OTHER; note = Uridine phosphorothiorate
  modified_base 34: mod_base = OTHER; note = 2'-Omethylcytosine
  modified_base 35: mod_base = OTHER; note = Uridine phosphorothiorate
  modified_base 37: mod_base = OTHER; note = Guanosine phosphorothiorate
  modified_base 38: mod_base = OTHER; note = Adenosine phosphorothiorate
  modified_base 41: mod_base = OTHER; note = 2'-fluorocytosine
  modified_base 42: mod_base = OTHER; note = 2'-Omethyluridine
  modified_base 43: mod_base = OTHER; note = 2'-Omethyluridine
  modified_base 44: mod_base = OTHER; note = 2'-fluoroadenosine
  modified_base 49: mod_base = OTHER; note = 2'-Omethylguanosine
  modified_base 50: mod_base = OTHER; note = 2'-Omethylcytosine
  modified_base 52: mod_base = OTHER; note = 2'-Omethylguanosine
  modified_base 54: mod_base = OTHER; note = Uridine phosphorothiorate
  modified_base 55: mod_base = OTHER; note = Uridine phosphorothiorate
  modified_base 61: mod_base = OTHER; note = 2'-Omethylcytosine
  modified_base 65: mod_base = OTHER; note = 2'-Omethylcytosine
  modified_base 73: mod_base = OTHER; note = 2'-Omethyladenosine

SEQ ID NO: 7022 - RNA, 76 nt, synthetic construct
  source 1..76: mol_type = other RNA
gagcacgtggcgcaatggatagcgcattggacttcaaattcaaaggttccgggttcgagtcccggcgtgctcgcca

SEQ ID NO: 7023 - RNA, 76 nt, synthetic construct; identical to SEQ ID NO: 3289
  source 1..76: mol_type = other RNA
  modified_base 49: mod_base = OTHER; note = 2'-Omethylcytosine
  modified_base 52: mod_base = OTHER; note = 2'-Omethylguanosine

SEQ ID NO: 7024 - RNA, 75 nt, synthetic construct; identical to SEQ ID NO: 3306
  source 1..75: mol_type = other RNA
  modified_base 1: mod_base = OTHER; note = 2'-Omethylguanosine
  modified_base 13: mod_base = OTHER; note = 2'-Omethylcytosine
  modified_base 17: mod_base = OTHER; note = 2'-Omethylguanosine
  modified_base 18: mod_base = OTHER; note = 2'-Omethylguanosine
  modified_base 24: mod_base = OTHER; note = 2'-Omethylcytosine
  modified_base 32: mod_base = OTHER; note = 2'-fluorouridine
  modified_base 33: mod_base = OTHER; note = 2'-Omethylcytosine
  modified_base 34: mod_base = OTHER; note = Uridine phosphorothiorate
  modified_base 36: mod_base = OTHER; note = Guanosine phosphorothiorate
  modified_base 37: mod_base = OTHER; note = Adenosine phosphorothiorate
  modified_base 40: mod_base = OTHER; note = 2'-Omethyladenosine
  modified_base 41: mod_base = OTHER; note = 2'-Omethylguanosine
  modified_base 42: mod_base = OTHER; note = 2'-Omethyladenosine
  modified_base 43: mod_base = OTHER; note = 2'-Omethyladenosine
  modified_base 48: mod_base = OTHER; note = 2'-Omethylguanosine
  modified_base 49: mod_base = OTHER; note = 2'-Omethylcytosine
  modified_base 51: mod_base = OTHER; note = 2'-Omethyluridine
  modified_base 53: mod_base = OTHER; note = Uridine phosphorothiorate
  modified_base 54: mod_base = OTHER; note = Uridine phosphorothiorate
  modified_base 55: mod_base = OTHER; note = 2'-Omethylcytosine
  modified_base 56: mod_base = OTHER; note = Adenosine phosphorothiorate
  modified_base 57: mod_base = OTHER; note = Adenosine phosphorothiorate
  modified_base 58: mod_base = OTHER; note = 2'-Omethyladenosine
  modified_base 60: mod_base = OTHER; note = 2'-Omethylcytosine
  modified_base 64: mod_base = OTHER; note = 2'-Omethyluridine
  modified_base 72: mod_base = OTHER; note = 2'-Omethyladenosine

SEQ ID NO: 7025 - RNA, 76 nt, synthetic construct; identical to SEQ ID NO: 625
  source 1..76: mol_type = other RNA
  modified_base 3: mod_base = OTHER; note = 2'-fluorocytosine
  modified_base 16: mod_base = OTHER; note = 2'-Omethyluridine
  modified_base 17: mod_base = OTHER; note = 2'-Omethylguanosine phosphorothiorate
  modified_base 18: mod_base = OTHER; note = 2'-Omethylguanosine phosphorothiorate
  modified_base 20: mod_base = OTHER; note = 2'-Omethyluridine
  modified_base 22: mod_base = OTHER; note = 2'-fluoroguanosine
  modified_base 24: mod_base = OTHER; note = 2'-fluoroguanosine
  modified_base 25: mod_base = OTHER; note = 2'-fluorocytosine
  modified_base 26: mod_base = OTHER; note = 2'-fluoroadenosine
  modified_base 27: mod_base = OTHER; note = 2'-Omethyluridine phosphorothiorate
  modified_base 29: mod_base = OTHER; note = 2'-fluoroguanosine
  modified_base 30: mod_base = OTHER; note = Guanosine phosphorothiorate
  modified_base 31: mod_base = OTHER; note = 2'-Omethyladenosine
  modified_base 33: mod_base = OTHER; note = Uridine phosphorothiorate
  modified_base 45: mod_base = OTHER; note = 2'-Omethylguanosine
  modified_base 49: mod_base = OTHER; note = 2'-Omethylcytosine
  modified_base 50: mod_base = OTHER; note = 2'-fluorocytosine
  modified_base 52: mod_base = OTHER; note = Guanosine phosphorothiorate
  modified_base 53: mod_base = OTHER; note = 2'-Omethylguanosine
  modified_base 54: mod_base = OTHER; note = Uridine phosphorothiorate
  modified_base 56: mod_base = OTHER; note = 2'-Omethylcytosine phosphorothiorate
  modified_base 57: mod_base = OTHER; note = 2'-fluoroguanosine
  modified_base 58: mod_base = OTHER; note = Adenosine phosphorothiorate
  modified_base 59: mod_base = OTHER; note = 2'-fluoroguanosine
  modified_base 62: mod_base = OTHER; note = 2'-Omethylcytosine phosphorothiorate
  modified_base 65: mod_base = OTHER; note = 2'-fluoroguanosine phosphorothiorate
  modified_base 66: mod_base = OTHER; note = 2'-Omethylcytosine
  modified_base 67: mod_base = OTHER; note = 2'-Omethylguanosine
  modified_base 71: mod_base = OTHER; note = 2'-Omethyluridine
  modified_base 72: mod_base = OTHER; note = 2'-Omethylcytosine
  modified_base 75: mod_base = OTHER; note = 2'-Omethylcytosine

SEQ ID NO: 7026 - RNA, 75 nt, synthetic construct; identical to SEQ ID NO: 1045
  source 1..75: mol_type = other RNA
  modified_base 1: mod_base = OTHER; note = 2'-Omethylguanosine
  modified_base 2: mod_base = OTHER; note = 2'-Omethylguanosine
  modified_base 3: mod_base = OTHER; note = 2'-Omethyluridine
  modified_base 4: mod_base = OTHER; note = 2'-Omethyluridine
  modified_base 5: mod_base = OTHER; note = 2'-Omethylcytosine
  modified_base 6: mod_base = OTHER; note = 2'-Omethylcytosine
  modified_base 13: mod_base = OTHER; note = 2'-Omethyluridine
  modified_base 14: mod_base = OTHER; note = 2'-Omethyladenosine
  modified_base 15: mod_base = OTHER; note = 2'-Omethyladenosine
  modified_base 16: mod_base = OTHER; note = 2'-Omethyluridine
  modified_base 17: mod_base = OTHER; note = 2'-Omethylguanosine
  modified_base 18: mod_base = OTHER; note = 2'-Omethylguanosine
  modified_base 19: mod_base = OTHER; note = Uridine phosphorothiorate
  modified_base 20: mod_base = OTHER; note = 2'-Omethyladenosine
  modified_base 21: mod_base = OTHER; note = Adenosine phosphorothiorate
  modified_base 25: mod_base = OTHER; note = 2'-Omethylcytosine
  modified_base 33: mod_base = OTHER; note = 2'-fluorouridine
  modified_base 34: mod_base = OTHER; note = 2'-Omethyluridine
  modified_base 35: mod_base = OTHER; note = Uridine phosphorothiorate
  modified_base 37: mod_base = OTHER; note = Adenosine phosphorothiorate
  modified_base 38: mod_base = OTHER; note = Adenosine phosphorothiorate
  modified_base 48: mod_base = OTHER; note = 2'-Omethylcytosine
  modified_base 49: mod_base = OTHER; note = 2'-Omethylcytosine
  modified_base 51: mod_base = OTHER; note = 2'-Omethyladenosine
  modified_base 53: mod_base = OTHER; note = Uridine phosphorothiorate
  modified_base 54: mod_base = OTHER; note = Uridine phosphorothiorate
  modified_base 60: mod_base = OTHER; note = 2'-Omethylcytosine
  modified_base 64: mod_base = OTHER; note = 2'-Omethylguanosine
  modified_base 72: mod_base = OTHER; note = 2'-Omethyluridine

SEQ ID NO: 7027 - RNA, 76 nt, synthetic construct; identical to SEQ ID NO: 625
  source 1..76: mol_type = other RNA
  modified_base 1: mod_base = OTHER; note = 2'-fluoroguanosine
  modified_base 2: mod_base = OTHER; note = 2'-Omethylguanosine phosphorothiorate
  modified_base 4: mod_base = OTHER; note = 2'-fluorouridine
  modified_base 5: mod_base = OTHER; note = Cytosine phosphorothiorate
  modified_base 6: mod_base = OTHER; note = Cytosine phosphorothiorate
  modified_base 8: mod_base = OTHER; note = Uridine phosphorothiorate
  modified_base 10: mod_base = OTHER; note = Guanosine phosphorothiorate
  modified_base 12: mod_base = OTHER; note = 2'-Omethylguanosine
  modified_base 13: mod_base = OTHER; note = 2'-Omethylcytosine phosphorothiorate
  modified_base 14: mod_base = OTHER; note = 2'-Omethyladenosine
  modified_base 15: mod_base = OTHER; note = 2'-Omethyladenosine
  modified_base 17: mod_base = OTHER; note = Guanosine phosphorothiorate
  modified_base 18: mod_base = OTHER; note = 2'-Omethylguanosine
  modified_base 23: mod_base = OTHER; note = 2'-fluorocytosine phosphorothiorate
  modified_base 24: mod_base = OTHER; note = 2'-Omethylguanosine phosphorothiorate
  modified_base 25: mod_base = OTHER; note = 2'-fluorocytosine
  modified_base 27: mod_base = OTHER; note = 2'-fluorouridine
  modified_base 28: mod_base = OTHER; note = 2'-fluorouridine
  modified_base 36: mod_base = OTHER; note = Adenosine phosphorothiorate
  modified_base 38: mod_base = OTHER; note = 2'-fluoroadenosine
  modified_base 39: mod_base = OTHER; note = 2'-Omethyluridine
  modified_base 42: mod_base = OTHER; note = 2'-Omethyladenosine
  modified_base 45: mod_base = OTHER; note = 2'-Omethylguanosine phosphorothiorate
  modified_base 46: mod_base = OTHER; note = 2'-fluoroguanosine
  modified_base 47: mod_base = OTHER; note = 2'-Omethyluridine phosphorothiorate
  modified_base 48: mod_base = OTHER; note = 2'-fluorouridine
  modified_base 51: mod_base = OTHER; note = Guanosine phosphorothiorate
  modified_base 52: mod_base = OTHER; note = 2'-fluoroguanosine phosphorothiorate
  modified_base 53: mod_base = OTHER; note = 2'-Omethylguanosine phosphorothiorate
  modified_base 56: mod_base = OTHER; note = Cytosine phosphorothiorate
  modified_base 61: mod_base = OTHER; note = 2'-fluorocytosine
  modified_base 63: mod_base = OTHER; note = Cytosine phosphorothiorate
  modified_base 64: mod_base = OTHER; note = 2'-fluoroguanosine phosphorothiorate
  modified_base 65: mod_base = OTHER; note = 2'-Omethylguanosine
  modified_base 68: mod_base = OTHER; note = 2'-Omethylguanosine phosphorothiorate
  modified_base 76: mod_base = OTHER; note = 2'-Omethyladenosine

SEQ ID NO: 7028 - RNA, 85 nt, synthetic construct; identical to SEQ ID NO: 3297
  source 1..85: mol_type = other RNA
  modified_base 1: mod_base = OTHER; note = 2'-Omethylguanosine phosphorothiorate
  modified_base 2: mod_base = OTHER; note = 2'-Omethylcytosine
  modified_base 3: mod_base = OTHER; note = 2'-Omethyluridine
  modified_base 4: mod_base = OTHER; note = 2'-Omethylguanosine
  modified_base 5: mod_base = OTHER; note = 2'-Omethyluridine
  modified_base 6: mod_base = OTHER; note = 2'-Omethylguanosine
  modified_base 58: mod_base = OTHER; note = 2'-Omethylguanosine
  modified_base 59: mod_base = OTHER; note = 2'-Omethylcytosine
  modified_base 60: mod_base = OTHER; note = 2'-Omethyladenosine
  modified_base 61: mod_base = OTHER; note = 2'-Omethylguanosine
  modified_base 62: mod_base = OTHER; note = 2'-Omethylguanosine
  modified_base 70: mod_base = OTHER; note = 2'-Omethylcytosine
  modified_base 71: mod_base = OTHER; note = 2'-Omethylcytosine
  modified_base 72: mod_base = OTHER; note = 2'-fluorouridine
  modified_base 73: mod_base = OTHER; note = 2'-Omethylguanosine
  modified_base 74: mod_base = OTHER; note = 2'-Omethylcytosine
  modified_base 75: mod_base = OTHER; note = 2'-Omethyluridine
  modified_base 76: mod_base = OTHER; note = 2'-Omethylcytosine
  modified_base 77: mod_base = OTHER; note = 2'-Omethyladenosine
  modified_base 78: mod_base = OTHER; note = 2'-fluorocytosine
  modified_base 80: mod_base = OTHER; note = 2'-Omethylguanosine
  modified_base 81: mod_base = OTHER; note = 2'-Omethylcytosine

SEQ ID NO: 7029 - RNA, 74 nt, synthetic construct; identical to SEQ ID NO: 3293
  source 1..74: mol_type = other RNA
  modified_base 2: mod_base = OTHER; note = 2'-fluorocytosine
  modified_base 5: mod_base = OTHER; note = 2'-fluorocytosine
  modified_base 12: mod_base = OTHER; note = 2'-Omethylcytosine
  modified_base 19: mod_base = OTHER; note = 2'-Omethyladenosine phosphorothiorate
  modified_base 34: mod_base = OTHER; note = 2'-fluoroadenosine
  modified_base 50: mod_base = OTHER; note = 2'-fluorouridine
  modified_base 73: mod_base = OTHER; note = 2'-Omethylcytosine phosphorothiorate

SEQ ID NO: 7030 - RNA, 76 nt, synthetic construct; identical to SEQ ID NO: 625
  source 1..76: mol_type = other RNA
  modified_base 1: mod_base = OTHER; note = 2'-fluoroguanosine
  modified_base 2: mod_base = OTHER; note = 2'-fluoroguanosine
  modified_base 3: mod_base = OTHER; note = Cytosine phosphorothiorate
  modified_base 6: mod_base = OTHER; note = 2'-fluorocytosine
  modified_base 11: mod_base = OTHER; note = 2'-Omethylcytosine
  modified_base 12: mod_base = OTHER; note = Guanosine phosphorothiorate
  modified_base 13: mod_base = OTHER; note = 2'-Omethylcytosine
  modified_base 16: mod_base = OTHER; note = Uridine phosphorothiorate
  modified_base 23: mod_base = OTHER; note = 2'-fluorocytosine
  modified_base 28: mod_base = OTHER; note = Uridine phosphorothiorate
  modified_base 29: mod_base = OTHER; note = 2'-Omethylguanosine phosphorothiorate
  modified_base 30: mod_base = OTHER; note = 2'-fluoroguanosine
  modified_base 31: mod_base = OTHER; note = 2'-Omethyladenosine
  modified_base 32: mod_base = OTHER; note = 2'-fluorocytosine
  modified_base 34: mod_base = OTHER; note = Uridine phosphorothiorate
  modified_base 40: mod_base = OTHER; note = Uridine phosphorothiorate
  modified_base 42: mod_base = OTHER; note = 2'-fluoroadenosine
  modified_base 47: mod_base = OTHER; note = 2'-Omethyluridine
  modified_base 49: mod_base = OTHER; note = 2'-fluorocytosine
  modified_base 52: mod_base = OTHER; note = 2'-fluoroguanosine
  modified_base 54: mod_base = OTHER; note = 2'-Omethyluridine
  modified_base 56: mod_base = OTHER; note = Cytosine phosphorothiorate
  modified_base 57: mod_base = OTHER; note = 2'-Omethylguanosine
  modified_base 58: mod_base = OTHER; note = Adenosine phosphorothiorate
  modified_base 59: mod_base = OTHER; note = 2'-Omethylguanosine
  modified_base 60: mod_base = OTHER; note = 2'-fluorouridine phosphorothiorate
  modified_base 61: mod_base = OTHER; note = 2'-Omethylcytosine phosphorothiorate
  modified_base 63: mod_base = OTHER; note = 2'-fluorocytosine
  modified_base 64: mod_base = OTHER; note = 2'-fluoroguanosine
  modified_base 66: mod_base = OTHER; note = 2'-Omethylcytosine
  modified_base 68: mod_base = OTHER; note = Guanosine phosphorothiorate
  modified_base 69: mod_base = OTHER; note = 2'-Omethyladenosine
  modified_base 71: mod_base = OTHER; note = Uridine phosphorothiorate
  modified_base 72: mod_base = OTHER; note = 2'-fluorocytosine
  modified_base 73: mod_base = OTHER; note = 2'-fluoroguanosine phosphorothiorate
  modified_base 74: mod_base = OTHER; note = 2'-fluorocytosine

SEQ ID NO: 7031 - RNA, 74 nt, synthetic construct; identical to SEQ ID NO: 766
  source 1..74: mol_type = other RNA
  modified_base 1: mod_base = OTHER; note = 2'-Omethylguanosine phosphorothiorate
  modified_base 2: mod_base = OTHER; note = 2'-Omethylguanosine phosphorothiorate
  modified_base 3: mod_base = OTHER; note = 2'-Omethylcytosine
  modified_base 4: mod_base = OTHER; note = 2'-Omethyluridine
  modified_base 5: mod_base = OTHER; note = 2'-Omethylcytosine
  modified_base 6: mod_base = OTHER; note = 2'-Omethylcytosine
  modified_base 10: mod_base = OTHER; note = 2'-Omethylguanosine
  modified_base 11: mod_base = OTHER; note = 2'-Omethylcytosine
  modified_base 12: mod_base = OTHER; note = 2'-Omethylguanosine
  modified_base 13: mod_base = OTHER; note = 2'-Omethylcytosine
  modified_base 16: mod_base = OTHER; note = 2'-Omethyluridine
  modified_base 17: mod_base = OTHER; note = 2'-Omethylguanosine
  modified_base 18: mod_base = OTHER; note = 2'-Omethylguanosine
  modified_base 20: mod_base = OTHER; note = 2'-Omethyluridine
  modified_base 25: mod_base = OTHER; note = 2'-Omethylcytosine
  modified_base 33: mod_base = OTHER; note = 2'-fluorouridine
  modified_base 35: mod_base = OTHER; note = Cytosine phosphorothiorate
  modified_base 37: mod_base = OTHER; note = Adenosine phosphorothiorate
  modified_base 38: mod_base = OTHER; note = Adenosine phosphorothiorate
  modified_base 41: mod_base = OTHER; note = 2'-fluorocytosine
  modified_base 42: mod_base = OTHER; note = 2'-Omethyladenosine
  modified_base 43: mod_base = OTHER; note = 2'-Omethyladenosine
  modified_base 44: mod_base = OTHER; note = 2'-fluoroadenosine
  modified_base 49: mod_base = OTHER; note = 2'-Omethylcytosine
  modified_base 50: mod_base = OTHER; note = 2'-Omethylcytosine
  modified_base 52: mod_base = OTHER; note = 2'-Omethylguanosine
  modified_base 54: mod_base = OTHER; note = 2'-Omethyluridine
  modified_base 55: mod_base = OTHER; note = Uridine phosphorothiorate
  modified_base 56: mod_base = OTHER; note = 2'-Omethylcytosine
  modified_base 57: mod_base = OTHER; note = 2'-fluoroguanosine
  modified_base 59: mod_base = OTHER; note = 2'-Omethylguanosine
  modified_base 61: mod_base = OTHER; note = 2'-Omethylcytosine
  modified_base 65: mod_base = OTHER; note = 2'-Omethylguanosine
  modified_base 73: mod_base = OTHER; note = 2'-Omethylguanosine

SEQ ID NO: 7032 - RNA, 76 nt, synthetic construct; identical to SEQ ID NO: 625
  source 1..76: mol_type = other RNA
  modified_base 1: mod_base = OTHER; note = 2'-Omethylguanosine phosphorothiorate
  modified_base 2: mod_base = OTHER; note = 2'-Omethylguanosine
  modified_base 17: mod_base = OTHER; note = 2'-Omethylguanosine
  modified_base 33: mod_base = OTHER; note = 2'-fluorouridine
  modified_base 35: mod_base = OTHER; note = Cytosine phosphorothiorate
  modified_base 37: mod_base = OTHER; note = Adenosine phosphorothiorate
  modified_base 38: mod_base = OTHER; note = Adenosine phosphorothiorate
  modified_base 52: mod_base = OTHER; note = 2'-fluoroguanosine
  modified_base 56: mod_base = OTHER; note = 2'-Omethylcytosine
  modified_base 62: mod_base = OTHER; note = 2'-Omethylcytosine
  modified_base 63: mod_base = OTHER; note = 2'-fluorocytosine
  modified_base 73: mod_base = OTHER; note = 2'-Omethylguanosine
  modified_base 75: mod_base = OTHER; note = 2'-fluorocytosine phosphorothiorate

SEQ ID NO: 7033 - DNA, 73 bp, synthetic construct; identical to SEQ ID NO: 3380
  source 1..73: mol_type = other DNA
  modified_base 1: mod_base = OTHER; note = 2'-Omethylguanosine phosphorothiorate
  modified_base 2: mod_base = OTHER; note = 2'-Omethylguanosine
  modified_base 13: mod_base = OTHER; note = 2'-fluorocytosine
  modified_base 22: mod_base = OTHER; note = Guanosine phosphorothiorate
  modified_base 68: mod_base = OTHER; note = 2'-fluoroguanosine
  modified_base 72: mod_base = OTHER; note = 2'-Omethylcytosine
  misc_feature 1..22: note = RNA
  misc_feature 23: note = DNA
  misc_feature 24..73: note = RNA

SEQ ID NO: 7034 - RNA, 76 nt, synthetic construct; identical to SEQ ID NO: 3795
  source 1..76: mol_type = other RNA
  modified_base 1: mod_base = OTHER; note = 2'-Omethylguanosine
  modified_base 2: mod_base = OTHER; note = 2'-Omethylcytosine
  modified_base 3: mod_base = OTHER; note = 2'-Omethylcytosine
  modified_base 4: mod_base = OTHER; note = 2'-Omethyluridine
  modified_base 5: mod_base = OTHER; note = 2'-Omethylcytosine
  modified_base 6: mod_base = OTHER; note = 2'-Omethylcytosine
  modified_base 10: mod_base = OTHER; note = 2'-Omethylguanosine
  modified_base 11: mod_base = OTHER; note = 2'-Omethylcytosine
  modified_base 12: mod_base = OTHER; note = 2'-Omethylcytosine
  modified_base 13: mod_base = OTHER; note = 2'-Omethyluridine
  modified_base 16: mod_base = OTHER; note = 2'-Omethyluridine
  modified_base 17: mod_base = OTHER; note = 2'-Omethylguanosine
  modified_base 18: mod_base = OTHER; note = 2'-Omethylguanosine
  modified_base 20: mod_base = OTHER; note = 2'-Omethyluridine
  modified_base 25: mod_base = OTHER; note = 2'-Omethylcytosine
  modified_base 33: mod_base = OTHER; note = 2'-fluorouridine
  modified_base 35: mod_base = OTHER; note = Cytosine phosphorothiorate
  modified_base 37: mod_base = OTHER; note = Adenosine phosphorothiorate
  modified_base 38: mod_base = OTHER; note = Adenosine phosphorothiorate
  modified_base 41: mod_base = OTHER; note = 2'-fluorocytosine
  modified_base 42: mod_base = OTHER; note = 2'-Omethylguanosine
  modified_base 43: mod_base = OTHER; note = 2'-Omethylguanosine
  modified_base 44: mod_base = OTHER; note = 2'-fluoroguanosine
  modified_base 49: mod_base = OTHER; note = 2'-Omethylguanosine
  modified_base 50: mod_base = OTHER; note = 2'-Omethylcytosine
  modified_base 52: mod_base = OTHER; note = 2'-Omethylguanosine
  modified_base 54: mod_base = OTHER; note = 2'-Omethyluridine
  modified_base 55: mod_base = OTHER; note = Uridine phosphorothiorate
  modified_base 56: mod_base = OTHER; note = 2'-Omethylcytosine
  modified_base 57: mod_base = OTHER; note = 2'-fluoroguanosine
  modified_base 59: mod_base = OTHER; note = 2'-Omethylguanosine
  modified_base 61: mod_base = OTHER; note = 2'-Omethylcytosine
  modified_base 65: mod_base = OTHER; note = 2'-Omethyluridine
  modified_base 73: mod_base = OTHER; note = 2'-Omethylguanosine

SEQ ID NO: 7035 - RNA, 75 nt, synthetic construct; identical to SEQ ID NO: 3336
  source 1..75: mol_type = other RNA
  modified_base 4: mod_base = OTHER; note = 2'-Omethylguanosine
  modified_base 7: mod_base = OTHER; note = 2'-Omethyluridine phosphorothiorate
  modified_base 16: mod_base = OTHER; note = 2'-Omethylcytosine
  modified_base 21: mod_base = OTHER; note = 2'-fluoroguanosine
  modified_base 22: mod_base = OTHER; note = 2'-fluoroadenosine
  modified_base 23: mod_base = OTHER; note = 2'-Omethylguanosine phosphorothiorate
  modified_base 26: mod_base = OTHER; note = Uridine phosphorothiorate
  modified_base 29: mod_base = OTHER; note = 2'-Omethylguanosine phosphorothiorate
  modified_base 35: mod_base = OTHER; note = 2'-Omethyladenosine
  modified_base 39: mod_base = OTHER; note = 2'-Omethylcytosine phosphorothiorate
  modified_base 47: mod_base = OTHER; note = 2'-fluorocytosine
  modified_base 48: mod_base = OTHER; note = 2'-fluorocytosine
  modified_base 49: mod_base = OTHER; note = 2'-Omethyladenosine
  modified_base 54: mod_base = OTHER; note = 2'-fluorouridine
  modified_base 60: mod_base = OTHER; note = 2'-Omethylcytosine phosphorothiorate
  modified_base 71: mod_base = OTHER; note = Cytosine phosphorothiorate
  modified_base 73: mod_base = OTHER; note = Cytosine phosphorothiorate
  modified_base 74: mod_base = OTHER; note = 2'-fluorocytosine phosphorothiorate

SEQ ID NO: 7036 - RNA, 76 nt, synthetic construct; identical to SEQ ID NO: 625
  source 1..76: mol_type = other RNA
  modified_base 2: mod_base = OTHER; note = 2'-fluoroguanosine
  modified_base 4: mod_base = OTHER; note = 2'-Omethyluridine phosphorothiorate
  modified_base 5: mod_base = OTHER; note = 2'-Omethylcytosine phosphorothiorate
  modified_base 6: mod_base = OTHER; note = 2'-fluorocytosine
  modified_base 10: mod_base = OTHER; note = 2'-Omethylguanosine phosphorothiorate
  modified_base 12: mod_base = OTHER; note = 2'-fluoroguanosine
  modified_base 13: mod_base = OTHER; note = 2'-Omethylcytosine
  modified_base 14: mod_base = OTHER; note = Adenosine phosphorothiorate
  modified_base 16: mod_base = OTHER; note = 2'-fluorouridine
  modified_base 18: mod_base = OTHER; note = 2'-fluoroguanosine phosphorothiorate
  modified_base 22: mod_base = OTHER; note = 2'-Omethylguanosine
  modified_base 26: mod_base = OTHER; note = 2'-Omethyladenosine
  modified_base 27: mod_base = OTHER; note = Uridine phosphorothiorate
  modified_base 29: mod_base = OTHER; note = 2'-Omethylguanosine
  modified_base 30: mod_base = OTHER; note = 2'-fluoroguanosine
  modified_base 33: mod_base = OTHER; note = 2'-fluorouridine
  modified_base 34: mod_base = OTHER; note = 2'-fluorouridine
  modified_base 39: mod_base = OTHER; note = Uridine phosphorothiorate
  modified_base 40: mod_base = OTHER; note = 2'-fluorouridine
  modified_base 41: mod_base = OTHER; note = 2'-Omethylcytosine
  modified_base 44: mod_base = OTHER; note = 2'-Omethyladenosine
  modified_base 48: mod_base = OTHER; note = 2'-fluorouridine
  modified_base 52: mod_base = OTHER; note = 2'-Omethylguanosine
  modified_base 54: mod_base = OTHER; note = 2'-fluorouridine
  modified_base 56: mod_base = OTHER; note = 2'-Omethylcytosine
  modified_base 57: mod_base = OTHER; note = 2'-fluoroguanosine phosphorothiorate
  modified_base 58: mod_base = OTHER; note = 2'-fluoroadenosine
  modified_base 62: mod_base = OTHER; note = 2'-fluorocytosine
  modified_base 65: mod_base = OTHER; note = 2'-fluoroguanosine
  modified_base 66: mod_base = OTHER; note = 2'-fluorocytosine phosphorothiorate
  modified_base 68: mod_base = OTHER; note = 2'-Omethylguanosine
  modified_base 70: mod_base = OTHER; note = 2'-fluoroguanosine
  modified_base 74: mod_base = OTHER; note = 2'-fluorocytosine

SEQ ID NO: 7037 - RNA, 75 nt, synthetic construct; identical to SEQ ID NO: 3306
  source 1..75: mol_type = other RNA
  modified_base 1: mod_base = OTHER; note = 2'-Omethylguanosine
  modified_base 49: mod_base = OTHER; note = 2'-Omethylcytosine

SEQ ID NO: 7038 - RNA, 75 nt, synthetic construct; identical to SEQ ID NO: 3306
  source 1..75: mol_type = other RNA
  modified_base 1: mod_base = OTHER; note = 2'-Omethylguanosine
  modified_base 2: mod_base = OTHER; note = 2'-Omethyladenosine
  modified_base 3: mod_base = OTHER; note = 2'-Omethylcytosine
  modified_base 4: mod_base = OTHER; note = 2'-Omethylcytosine
  modified_base 5: mod_base = OTHER; note = 2'-Omethyluridine
  modified_base 6: mod_base = OTHER; note = 2'-Omethylcytosine
  modified_base 13: mod_base = OTHER; note = 2'-Omethylcytosine
  modified_base 14: mod_base = OTHER; note = 2'-Omethyladenosine
  modified_base 15: mod_base = OTHER; note = 2'-Omethyladenosine
  modified_base 16: mod_base = OTHER; note = 2'-Omethylcytosine
  modified_base 17: mod_base = OTHER; note = 2'-Omethylguanosine
  modified_base 18: mod_base = OTHER; note = 2'-Omethylguanosine
  modified_base 19: mod_base = OTHER; note = Uridine phosphorothiorate
  modified_base 20: mod_base = OTHER; note = Adenosine phosphorothiorate
  modified_base 24: mod_base = OTHER; note = 2'-Omethylcytosine
  modified_base 32: mod_base = OTHER; note = 2'-fluorouridine
  modified_base 33: mod_base = OTHER; note = 2'-Omethylcytosine
  modified_base 34: mod_base = OTHER; note = Uridine phosphorothiorate
  modified_base 36: mod_base = OTHER; note = Guanosine phosphorothiorate
  modified_base 37: mod_base = OTHER; note = Adenosine phosphorothiorate
  modified_base 48: mod_base = OTHER; note = 2'-Omethylguanosine
  modified_base 49: mod_base = OTHER; note = 2'-Omethylcytosine
  modified_base 51: mod_base = OTHER; note = 2'-Omethyluridine
  modified_base 53: mod_base = OTHER; note = Uridine phosphorothiorate
  modified_base 54: mod_base = OTHER; note = Uridine phosphorothiorate
  modified_base 60: mod_base = OTHER; note = 2'-Omethylcytosine
  modified_base 64: mod_base = OTHER; note = 2'-Omethyluridine
  modified_base 72: mod_base = OTHER; note = 2'-Omethyladenosine

SEQ ID NO: 7039 - RNA, 76 nt, synthetic construct
  source 1..76: mol_type = other RNA
ggctcgactacgcaatggatagcgtattggacttcaaattcaaaggttccgggttcgagtcccggtcgagtcgcca

SEQ ID NO: 7040 - RNA, 75 nt, synthetic construct; identical to SEQ ID NO: 1045
  source 1..75: mol_type = other RNA
  modified_base 1: mod_base = OTHER; note = 2'-Omethylguanosine
  modified_base 14: mod_base = OTHER; note = 2'-Omethyladenosine
  modified_base 15: mod_base = OTHER; note = 2'-fluoroadenosine
  modified_base 16: mod_base = OTHER; note = 2'-Omethyluridine
  modified_base 17: mod_base = OTHER; note = 2'-Omethylguanosine
  modified_base 18: mod_base = OTHER; note = 2'-Omethylguanosine
  modified_base 19: mod_base = OTHER; note = 2'-fluorouridine
  modified_base 20: mod_base = OTHER; note = 2'-Omethyladenosine
  modified_base 53: mod_base = OTHER; note = 2'-Omethyluridine
  modified_base 55: mod_base = OTHER; note = 2'-Omethylcytosine
  modified_base 58: mod_base = OTHER; note = 2'-Omethylguanosine
  modified_base 72: mod_base = OTHER; note = 2'-Omethyluridine

SEQ ID NO: 7041 - RNA, 76 nt, synthetic construct; identical to SEQ ID NO: 3795
  source 1..76: mol_type = other RNA
  modified_base 1: mod_base = OTHER; note = 2'-Omethylguanosine
  modified_base 2: mod_base = OTHER; note = 2'-Omethylcytosine
  modified_base 3: mod_base = OTHER; note = 2'-Omethylcytosine
  modified_base 4: mod_base = OTHER; note = 2'-Omethyluridine
  modified_base 5: mod_base = OTHER; note = 2'-Omethylcytosine
  modified_base 6: mod_base = OTHER; note = 2'-Omethylcytosine
  modified_base 16: mod_base = OTHER; note = 2'-Omethyluridine
  modified_base 17: mod_base = OTHER; note = 2'-Omethylguanosine
  modified_base 18: mod_base = OTHER; note = 2'-Omethylguanosine
  modified_base 20: mod_base = OTHER; note = 2'-Omethyluridine
  modified_base 25: mod_base = OTHER; note = 2'-Omethylcytosine
  modified_base 33: mod_base = OTHER; note = 2'-fluorouridine
  modified_base 35: mod_base = OTHER; note = Cytosine phosphorothiorate
  modified_base 37: mod_base = OTHER; note = Adenosine phosphorothiorate
  modified_base 38: mod_base = OTHER; note = Adenosine phosphorothiorate
  modified_base 41: mod_base = OTHER; note = 2'-fluorocytosine
  modified_base 42: mod_base = OTHER; note = 2'-Omethylguanosine
  modified_base 43: mod_base = OTHER; note = 2'-Omethylguanosine
  modified_base 44: mod_base = OTHER; note = 2'-fluoroguanosine
  modified_base 49: mod_base = OTHER; note = 2'-Omethylguanosine
  modified_base 50: mod_base = OTHER; note = 2'-Omethylcytosine
  modified_base 52: mod_base = OTHER; note = 2'-Omethylguanosine
  modified_base 54: mod_base = OTHER; note = 2'-Omethyluridine
  modified_base 55: mod_base = OTHER; note = Uridine phosphorothiorate
  modified_base 56: mod_base = OTHER; note = 2'-Omethylcytosine
  modified_base 57: mod_base = OTHER; note = 2'-fluoroguanosine
  modified_base 59: mod_base = OTHER; note = 2'-Omethylguanosine
  modified_base 61: mod_base = OTHER; note = 2'-Omethylcytosine
  modified_base 62: mod_base = OTHER; note = 2'-Omethylcytosine
  modified_base 63: mod_base = OTHER; note = 2'-fluorocytosine
  modified_base 64: mod_base = OTHER; note = 2'-Omethylguanosine
  modified_base 65: mod_base = OTHER; note = 2'-Omethyluridine
  modified_base 73: mod_base = OTHER; note = 2'-Omethylguanosine

SEQ ID NO: 7042 - RNA, 73 nt, synthetic construct; identical to SEQ ID NO: 935
  source 1..73: mol_type = other RNA
  modified_base 1: mod_base = OTHER; note = 2'-Omethylguanosine phosphorothiorate
  modified_base 2: mod_base = OTHER; note = 2'-Omethylguanosine phosphorothiorate
  modified_base 5: mod_base = OTHER; note = 2'-Omethylcytosine
  modified_base 61: mod_base = OTHER; note = 2'-fluorocytosine
  modified_base 72: mod_base = OTHER; note = 2'-Omethylcytosine phosphorothiorate

SEQ ID NO: 7043 - RNA, 85 nt, synthetic construct; identical to SEQ ID NO: 3317
  source 1..85: mol_type = other RNA
  modified_base 1: mod_base = OTHER; note = 2'-Omethylguanosine phosphorothiorate
  modified_base 2: mod_base = OTHER; note = 2'-Omethylcytosine phosphorothiorate
  modified_base 4: mod_base = OTHER; note = 2'-fluoroguanosine phosphorothiorate
  modified_base 18: mod_base = OTHER; note = 2'-Omethylguanosine phosphorothiorate
  modified_base 21: mod_base = OTHER; note = Adenosine phosphorothiorate
  modified_base 24: mod_base = OTHER; note = 2'-Omethylguanosine phosphorothiorate
  modified_base 27: mod_base = OTHER; note = 2'-Omethyluridine phosphorothiorate
  modified_base 38: mod_base = OTHER; note = 2'-Omethyladenosine
  modified_base 46: mod_base = OTHER; note = 2'-Omethylguanosine
  modified_base 47: mod_base = OTHER; note = Guanosine phosphorothiorate
  modified_base 48: mod_base = OTHER; note = Guanosine phosphorothiorate
  modified_base 50: mod_base = OTHER; note = 2'-fluorocytosine
  modified_base 57: mod_base = OTHER; note = 2'-fluorocytosine
  modified_base 59: mod_base = OTHER; note = Cytosine phosphorothiorate
  modified_base 60: mod_base = OTHER; note = 2'-Omethyladenosine
  modified_base 61: mod_base = OTHER; note = 2'-fluoroguanosine
  modified_base 71: mod_base = OTHER; note = Cytosine phosphorothiorate
  modified_base 83: mod_base = OTHER; note = Cytosine phosphorothiorate

SEQ ID NO: 7044 - RNA, 76 nt, synthetic construct; identical to SEQ ID NO: 625
  source 1..76: mol_type = other RNA
  modified_base 1: mod_base = OTHER; note = 2'-Omethylguanosine phosphorothiorate
  modified_base 2: mod_base = OTHER; note = 2'-Omethylguanosine
  modified_base 3: mod_base = OTHER; note = 2'-Omethylcytosine
  modified_base 4: mod_base = OTHER; note = 2'-Omethyluridine
  modified_base 5: mod_base = OTHER; note = 2'-Omethylcytosine
  modified_base 6: mod_base = OTHER; note = 2'-Omethylcytosine
  modified_base 10: mod_base = OTHER; note = 2'-Omethylguanosine
  modified_base 11: mod_base = OTHER; note = 2'-Omethylcytosine
  modified_base 12: mod_base = OTHER; note = 2'-Omethylguanosine
  modified_base 13: mod_base = OTHER; note = 2'-Omethylcytosine
  modified_base 14: mod_base = OTHER; note = 2'-Omethyladenosine
  modified_base 15: mod_base = OTHER; note = 2'-fluoroadenosine
  modified_base 16: mod_base = OTHER; note = 2'-Omethyluridine
  modified_base 17: mod_base = OTHER; note = 2'-Omethylguanosine
  modified_base 18: mod_base = OTHER; note = 2'-Omethylguanosine
  modified_base 19: mod_base = OTHER; note = Adenosine phosphorothiorate
  modified_base 20: mod_base = OTHER; note = 2'-Omethyluridine
  modified_base 21: mod_base = OTHER; note = 2'-fluoroadenosine
  modified_base 22: mod_base = OTHER; note = 2'-Omethylguanosine
  modified_base 23: mod_base = OTHER; note = 2'-Omethylcytosine
  modified_base 24: mod_base = OTHER; note = 2'-Omethylguanosine
  modified_base 25: mod_base = OTHER; note = 2'-Omethylcytosine
  modified_base 29: mod_base = OTHER; note = 2'-Omethylguanosine
  modified_base 33: mod_base = OTHER; note = 2'-fluorouridine
  modified_base 35: mod_base = OTHER; note = Cytosine phosphorothiorate
  modified_base 37: mod_base = OTHER; note = Adenosine phosphorothiorate
  modified_base 38: mod_base = OTHER; note = Adenosine phosphorothiorate
  modified_base 40: mod_base = OTHER; note = 2'-fluorouridine
  modified_base 41: mod_base = OTHER; note = 2'-Omethylcytosine
  modified_base 42: mod_base = OTHER; note = 2'-Omethyladenosine
  modified_base 43: mod_base = OTHER; note = 2'-Omethyladenosine
  modified_base 44: mod_base = OTHER; note = 2'-fluoroadenosine
  modified_base 45: mod_base = OTHER; note = 2'-Omethylguanosine
  modified_base 46: mod_base = OTHER; note = Guanosine phosphorothiorate
  modified_base 48: mod_base = OTHER; note = 2'-fluorouridine
  modified_base 49: mod_base = OTHER; note = 2'-Omethylcytosine
  modified_base 50: mod_base = OTHER; note = 2'-Omethylcytosine
  modified_base 51: mod_base = OTHER; note = 2'-Omethylguanosine
  modified_base 52: mod_base = OTHER; note = 2'-fluoroguanosine
  modified_base 53: mod_base = OTHER; note = 2'-Omethylguanosine
  modified_base 54: mod_base = OTHER; note = 2'-Omethyluridine
  modified_base 55: mod_base = OTHER; note = Uridine phosphorothiorate
  modified_base 56: mod_base = OTHER; note = 2'-Omethylcytosine
  modified_base 57: mod_base = OTHER; note = Guanosine phosphorothiorate
  modified_base 61: mod_base = OTHER; note = 2'-Omethylcytosine
  modified_base 62: mod_base = OTHER; note = 2'-Omethylcytosine
  modified_base 63: mod_base = OTHER; note = 2'-fluorocytosine
  modified_base 64: mod_base = OTHER; note = 2'-Omethylguanosine
  modified_base 65: mod_base = OTHER; note = 2'-Omethylguanosine
  modified_base 66: mod_base = OTHER; note = 2'-Omethylcytosine
  modified_base 67: mod_base = OTHER; note = 2'-Omethylguanosine
  modified_base 68: mod_base = OTHER; note = 2'-Omethylguanosine
  modified_base 69: mod_base = OTHER; note = 2'-fluoroadenosine
  modified_base 70: mod_base = OTHER; note = 2'-fluoroguanosine
  modified_base 71: mod_base = OTHER; note = 2'-Omethyluridine
  modified_base 73: mod_base = OTHER; note = 2'-Omethylguanosine
  modified_base 75: mod_base = OTHER; note = 2'-fluorocytosine phosphorothiorate

SEQ ID NO: 7045 - RNA, 76 nt, synthetic construct; identical to SEQ ID NO: 3289
  source 1..76: mol_type = other RNA
  modified_base 1: mod_base = OTHER; note = 2'-Omethylguanosine
  modified_base 4: mod_base = OTHER; note = 2'-Omethyluridine
  modified_base 13: mod_base = OTHER; note = 2'-Omethylcytosine
  modified_base 18: mod_base = OTHER; note = 2'-Omethylguanosine
  modified_base 19: mod_base = OTHER; note = 2'-Omethylguanosine
  modified_base 25: mod_base = OTHER; note = 2'-Omethylcytosine
  modified_base 29: mod_base = OTHER; note = 2'-Omethyladenosine
  modified_base 30: mod_base = OTHER; note = 2'-Omethylguanosine
  modified_base 49: mod_base = OTHER; note = 2'-Omethylcytosine
  modified_base 50: mod_base = OTHER; note = 2'-Omethyladenosine
  modified_base 52: mod_base = OTHER; note = 2'-Omethylguanosine
  modified_base 56: mod_base = OTHER; note = 2'-Omethylcytosine
  modified_base 59: mod_base = OTHER; note = 2'-Omethylguanosine
  modified_base 65: mod_base = OTHER; note = 2'-Omethylguanosine
  modified_base 69: mod_base = OTHER; note = 2'-Omethyladenosine
  modified_base 71: mod_base = OTHER; note = 2'-Omethylguanosine
  modified_base 72: mod_base = OTHER; note = 2'-Omethylcytosine
  modified_base 73: mod_base = OTHER; note = 2'-Omethylguanosine

SEQ ID NO: 7046 - RNA, 76 nt, synthetic construct; identical to SEQ ID NO: 625
  source 1..76: mol_type = other RNA
  modified_base 2: mod_base = OTHER; note = 2'-fluoroguanosine
  modified_base 3: mod_base = OTHER; note = 2'-Omethylcytosine
  modified_base 6: mod_base = OTHER; note = Cytosine phosphorothiorate
  modified_base 11: mod_base = OTHER; note = 2'-fluorocytosine
  modified_base 13: mod_base = OTHER; note = 2'-fluorocytosine
  modified_base 14: mod_base = OTHER; note = 2'-fluoroadenosine phosphorothiorate
  modified_base 15: mod_base = OTHER; note = 2'-Omethyladenosine
  modified_base 17: mod_base = OTHER; note = 2'-Omethylguanosine
  modified_base 19: mod_base = OTHER; note = Adenosine phosphorothiorate
  modified_base 22: mod_base = OTHER; note = Guanosine phosphorothiorate
  modified_base 23: mod_base = OTHER; note = 2'-Omethylcytosine
  modified_base 27: mod_base = OTHER; note = 2'-fluorouridine phosphorothiorate
  modified_base 28: mod_base = OTHER; note = 2'-fluorouridine
  modified_base 29: mod_base = OTHER; note = 2'-fluoroguanosine
  modified_base 32: mod_base = OTHER; note = 2'-fluorocytosine
  modified_base 33: mod_base = OTHER; note = 2'-fluorouridine
  modified_base 40: mod_base = OTHER; note = Uridine phosphorothiorate
  modified_base 46: mod_base = OTHER; note = 2'-fluoroguanosine
  modified_base 50: mod_base = OTHER; note = 2'-fluorocytosine
  modified_base 51: mod_base = OTHER; note = Guanosine phosphorothiorate
  modified_base 52: mod_base = OTHER; note = 2'-Omethylguanosine
  modified_base 57: mod_base = OTHER; note = 2'-fluoroguanosine
  modified_base 58: mod_base = OTHER; note = 2'-fluoroadenosine
  modified_base 59: mod_base = OTHER; note = 2'-fluoroguanosine
  modified_base 60: mod_base = OTHER; note = 2'-Omethyluridine
  modified_base 65: mod_base = OTHER; note = 2'-fluoroguanosine
  modified_base 66: mod_base = OTHER; note = 2'-Omethylcytosine
  modified_base 67: mod_base = OTHER; note = Guanosine phosphorothiorate
  modified_base 68: mod_base = OTHER; note = 2'-Omethylguanosine
  modified_base 70: mod_base = OTHER; note = 2'-fluoroguanosine
  modified_base 73: mod_base = OTHER; note = Guanosine phosphorothiorate
  modified_base 75: mod_base = OTHER; note = 2'-fluorocytosine
  modified_base 76: mod_base = OTHER; note = 2'-fluoroadenosine

SEQ ID NO: 7047 - RNA, 75 nt, synthetic construct; identical to SEQ ID NO: 3311
  source 1..75: mol_type = other RNA
  modified_base 1: mod_base = OTHER; note = 2'-Omethylguanosine phosphorothiorate
  modified_base 2: mod_base = OTHER; note = 2'-Omethylguanosine
  modified_base 11: mod_base = OTHER; note = 2'-fluorouridine
  modified_base 16: mod_base = OTHER; note = 2'-fluorouridine
  modified_base 19: mod_base = OTHER; note = 2'-fluorouridine
  modified_base 20: mod_base = OTHER; note = Adenosine phosphorothiorate
  modified_base 21: mod_base = OTHER; note = Adenosine phosphorothiorate
  modified_base 23: mod_base = OTHER; note = Cytosine phosphorothiorate
  modified_base 27: mod_base = OTHER; note = 2'-Omethylcytosine
  modified_base 28: mod_base = OTHER; note = 2'-fluorouridine
  modified_base 29: mod_base = OTHER; note = 2'-Omethylguanosine
  modified_base 30: mod_base = OTHER; note = 2'-Omethylguanosine
  modified_base 37: mod_base = OTHER; note = 2'-fluoroadenosine
  modified_base 44: mod_base = OTHER; note = 2'-fluorocytosine
  modified_base 50: mod_base = OTHER; note = 2'-fluoroguanosine phosphorothiorate
  modified_base 55: mod_base = OTHER; note = 2'-fluorocytosine phosphorothiorate
  modified_base 58: mod_base = OTHER; note = 2'-fluoroguanosine
  modified_base 65: mod_base = OTHER; note = Uridine phosphorothiorate
  modified_base 67: mod_base = OTHER; note = 2'-fluoroguanosine
  modified_base 74: mod_base = OTHER; note = Cytosine phosphorothiorate

SEQ ID NO: 7048 - RNA, 76 nt, synthetic construct; identical to SEQ ID NO: 3318
  source 1..76: mol_type = other RNA
  modified_base 1: mod_base = OTHER; note = 2'-Omethylcytosine
  modified_base 50: mod_base = OTHER; note = 2'-Omethylcytosine

SEQ ID NO: 7049 - RNA, 76 nt, synthetic construct; identical to SEQ ID NO: 625
  source 1..76: mol_type = other RNA
  modified_base 40: mod_base = OTHER; note = 2'-fluorouridine
  modified_base 41: mod_base = OTHER; note = 2'-fluorocytosine
  modified_base 42: mod_base = OTHER; note = 2'-fluoroadenosine
  modified_base 43: mod_base = OTHER; note = 2'-fluoroadenosine
  modified_base 49: mod_base = OTHER; note = 2'-Omethylcytosine
  modified_base 50: mod_base = OTHER; note = 2'-Omethylcytosine
  modified_base 51: mod_base = OTHER; note = 2'-Omethylguanosine
  modified_base 52: mod_base = OTHER; note = 2'-Omethylguanosine
  modified_base 53: mod_base = OTHER; note = 2'-Omethylguanosine

SEQ ID NO: 7050 - RNA, 75 nt, synthetic construct; identical to SEQ ID NO: 3306
  source 1..75: mol_type = other RNA
  modified_base 1: mod_base = OTHER; note = 2'-Omethylguanosine
  modified_base 16: mod_base = OTHER; note = 2'-Omethylcytosine
  modified_base 17: mod_base = OTHER; note = 2'-Omethylguanosine
  modified_base 18: mod_base = OTHER; note = 2'-Omethylguanosine
  modified_base 53: mod_base = OTHER; note = 2'-Omethyluridine phosphorothiorate
  modified_base 54: mod_base = OTHER; note = Uridine phosphorothiorate
  modified_base 55: mod_base = OTHER; note = 2'-Omethylcytosine
  modified_base 58: mod_base = OTHER; note = 2'-Omethyladenosine
  modified_base 72: mod_base = OTHER; note = 2'-Omethyladenosine

SEQ ID NO: 7051 - RNA, 76 nt, synthetic construct; identical to SEQ ID NO: 625
  source 1..76: mol_type = other RNA
  modified_base 61: mod_base = OTHER; note = 2'-Omethylcytosine
  modified_base 62: mod_base = OTHER; note = 2'-Omethylcytosine
  modified_base 63: mod_base = OTHER; note = 2'-fluorocytosine
  modified_base 64: mod_base = OTHER; note = 2'-Omethylguanosine
  modified_base 65: mod_base = OTHER; note = 2'-Omethylguanosine
  modified_base 66: mod_base = OTHER; note = 2'-Omethylcytosine
  modified_base 67: mod_base = OTHER; note = 2'-Omethylguanosine
  modified_base 68: mod_base = OTHER; note = 2'-Omethylguanosine
  modified_base 69: mod_base = OTHER; note = 2'-Omethyladenosine

SEQ ID NO: 7052 - RNA, 73 nt, synthetic construct; identical to SEQ ID NO: 935
  source 1..73: mol_type = other RNA
  modified_base 1: mod_base = OTHER; note = 2'-Omethylguanosine phosphorothiorate
  modified_base 2: mod_base = OTHER; note = 2'-Omethylguanosine
  modified_base 64: mod_base = OTHER; note = Guanosine phosphorothiorate
  modified_base 65: mod_base = OTHER; note = 2'-fluoroguanosine
  modified_base 72: mod_base = OTHER; note = 2'-Omethylcytosine

SEQ ID NO: 7053 - RNA, 85 nt, synthetic construct; identical to SEQ ID NO: 3286
  source 1..85: mol_type = other RNA
  modified_base 2: mod_base = OTHER; note = 2'-Omethylcytosine phosphorothiorate
  modified_base 45: mod_base = OTHER; note = Guanosine phosphorothiorate
  modified_base 48: mod_base = OTHER; note = Adenosine phosphorothiorate
  modified_base 58: mod_base = OTHER; note = 2'-Omethylguanosine
  modified_base 67: mod_base = OTHER; note = Adenosine phosphorothiorate
  modified_base 84: mod_base = OTHER; note = 2'-fluorocytosine

SEQ ID NO: 7054 - RNA, 76 nt, synthetic construct; identical to SEQ ID NO: 3289
  source 1..76: mol_type = other RNA
  modified_base 1: mod_base = OTHER; note = 2'-Omethylguanosine
  modified_base 19: mod_base = OTHER; note = 2'-Omethylguanosine
  modified_base 50: mod_base = OTHER; note = 2'-Omethyladenosine
  modified_base 52: mod_base = OTHER; note = 2'-Omethylguanosine
  modified_base 73: mod_base = OTHER; note = 2'-Omethylguanosine

SEQ ID NO: 7055 - RNA, 76 nt, synthetic construct; identical to SEQ ID NO: 625
  source 1..76: mol_type = other RNA
  modified_base 2: mod_base = OTHER; note = 2'-fluoroguanosine
  modified_base 3: mod_base = OTHER; note = Cytosine phosphorothiorate
  modified_base 4: mod_base = OTHER; note = 2'-fluorouridine phosphorothiorate
  modified_base 5: mod_base = OTHER; note = 2'-Omethylcytosine
  modified_base 6: mod_base = OTHER; note = 2'-fluorocytosine phosphorothiorate
  modified_base 9: mod_base = OTHER; note = Guanosine phosphorothiorate
  modified_base 10: mod_base = OTHER; note = Guanosine phosphorothiorate
  modified_base 11: mod_base = OTHER; note = 2'-Omethylcytosine
  modified_base 13: mod_base = OTHER; note = 2'-Omethylcytosine
  modified_base 15: mod_base = OTHER; note = 2'-Omethyladenosine
  modified_base 20: mod_base = OTHER; note = 2'-fluorouridine
  modified_base 22: mod_base = OTHER; note = 2'-fluoroguanosine
  modified_base 23: mod_base = OTHER; note = 2'-Omethylcytosine
  modified_base 24: mod_base = OTHER; note = Guanosine phosphorothiorate
  modified_base 27: mod_base = OTHER; note = 2'-Omethyluridine
  modified_base 40: mod_base = OTHER; note = 2'-Omethyluridine
  modified_base 44: mod_base = OTHER; note = 2'-Omethyladenosine
  modified_base 45: mod_base = OTHER; note = 2'-fluoroguanosine
  modified_base 47: mod_base = OTHER; note = 2'-fluorouridine
  modified_base 48: mod_base = OTHER; note = 2'-fluorouridine
  modified_base 52: mod_base = OTHER; note = 2'-fluoroguanosine phosphorothiorate
  modified_base 53: mod_base = OTHER; note = 2'-Omethylguanosine
  modified_base 54: mod_base = OTHER; note = 2'-Omethyluridine
  modified_base 55: mod_base = OTHER; note = Uridine phosphorothiorate
  modified_base 56: mod_base = OTHER; note = 2'-fluorocytosine phosphorothiorate
  modified_base 58: mod_base = OTHER; note = 2'-fluoroadenosine phosphorothiorate
  modified_base 59: mod_base = OTHER; note = Guanosine phosphorothiorate
  modified_base 61: mod_base = OTHER; note = 2'-Omethylcytosine
  modified_base 62: mod_base = OTHER; note = Cytosine phosphorothiorate
  modified_base 63: mod_base = OTHER; note = 2'-fluorocytosine
  modified_base 65: mod_base = OTHER; note = Guanosine phosphorothiorate
  modified_base 68: mod_base = OTHER; note = Guanosine phosphorothiorate
  modified_base 69: mod_base = OTHER; note = Adenosine phosphorothiorate
  modified_base 70: mod_base = OTHER; note = Guanosine phosphorothiorate
  modified_base 71: mod_base = OTHER; note = 2'-Omethyluridine
  modified_base 74: mod_base = OTHER; note = 2'-Omethylcytosine

SEQ ID NO: 7056 - RNA, 75 nt, synthetic construct; identical to SEQ ID NO: 3299
  source 1..75: mol_type = other RNA
  modified_base 2: mod_base = OTHER; note = 2'-Omethylcytosine phosphorothiorate
  modified_base 3: mod_base = OTHER; note = Uridine phosphorothiorate
  modified_base 10: mod_base = OTHER; note = Cytosine phosphorothiorate
  modified_base 22: mod_base = OTHER; note = 2'-fluoroadenosine
  modified_base 24: mod_base = OTHER; note = Cytosine phosphorothiorate
  modified_base 28: mod_base = OTHER; note = 2'-fluoroadenosine
  modified_base 29: mod_base = OTHER; note = 2'-Omethylguanosine phosphorothiorate
  modified_base 31: mod_base = OTHER; note = 2'-fluorocytosine phosphorothiorate
  modified_base 35: mod_base = OTHER; note = 2'-fluoroadenosine
  modified_base 37: mod_base = OTHER; note = 2'-fluoroadenosine phosphorothiorate
  modified_base 39: mod_base = OTHER; note = 2'-Omethylcytosine phosphorothiorate
  modified_base 40: mod_base = OTHER; note = 2'-fluorouridine
  modified_base 41: mod_base = OTHER; note = 2'-Omethylguanosine
  modified_base 48: mod_base = OTHER; note = 2'-fluorocytosine
  modified_base 49: mod_base = OTHER; note = 2'-fluoroadenosine
  modified_base 58: mod_base = OTHER; note = 2'-Omethylguanosine phosphorothiorate
  modified_base 60: mod_base = OTHER; note = 2'-fluorocytosine phosphorothiorate
  modified_base 73: mod_base = OTHER; note = Cytosine phosphorothiorate
  modified_base 74: mod_base = OTHER; note = 2'-Omethylcytosine

SEQ ID NO: 7057 - RNA, 85 nt, synthetic construct; identical to SEQ ID NO: 3297
  source 1..85: mol_type = other RNA
  modified_base 1: mod_base = OTHER; note = 2'-Omethylguanosine phosphorothiorate
  modified_base 2: mod_base = OTHER; note = 2'-Omethylcytosine phosphorothiorate
  modified_base 32: mod_base = OTHER; note = Cytosine phosphorothiorate
  modified_base 33: mod_base = OTHER; note = 2'-Omethyluridine
  modified_base 83: mod_base = OTHER; note = Cytosine phosphorothiorate
  modified_base 84: mod_base = OTHER; note = 2'-Omethylcytosine phosphorothiorate
  modified_base 85: mod_base = OTHER; note = 2'-Omethyladenosine

SEQ ID NO: 7058 - RNA, 85 nt, synthetic construct; identical to SEQ ID NO: 3297
  source 1..85: mol_type = other RNA
  modified_base 1: mod_base = OTHER; note = 2'-Omethylguanosine
  modified_base 13: mod_base = OTHER; note = 2'-Omethylguanosine
  modified_base 14: mod_base = OTHER; note = 2'-Omethyladenosine
  modified_base 15: mod_base = OTHER; note = 2'-Omethylguanosine
  modified_base 16: mod_base = OTHER; note = 2'-Omethyluridine
  modified_base 17: mod_base = OTHER; note = 2'-Omethylguanosine
  modified_base 18: mod_base = OTHER; note = 2'-Omethylguanosine
  modified_base 19: mod_base = OTHER; note = Uridine phosphorothiorate
  modified_base 20: mod_base = OTHER; note = 2'-Omethyluridine
  modified_base 21: mod_base = OTHER; note = Adenosine phosphorothiorate
  modified_base 25: mod_base = OTHER; note = 2'-Omethylcytosine
  modified_base 33: mod_base = OTHER; note = Uridine phosphorothiorate
  modified_base 34: mod_base = OTHER; note = 2'-Omethyluridine
  modified_base 35: mod_base = OTHER; note = Cytosine phosphorothiorate
  modified_base 37: mod_base = OTHER; note = Adenosine phosphorothiorate
  modified_base 38: mod_base = OTHER; note = Adenosine phosphorothiorate
  modified_base 58: mod_base = OTHER; note = 2'-Omethylguanosine
  modified_base 59: mod_base = OTHER; note = 2'-Omethylcytosine
  modified_base 61: mod_base = OTHER; note = 2'-Omethylguanosine
  modified_base 63: mod_base = OTHER; note = Uridine phosphorothiorate
  modified_base 64: mod_base = OTHER; note = Uridine phosphorothiorate
  modified_base 65: mod_base = OTHER; note = 2'-Omethylcytosine
  modified_base 66: mod_base = OTHER; note = Guanosine phosphorothiorate
  modified_base 67: mod_base = OTHER; note = Adenosine phosphorothiorate
  modified_base 68: mod_base = OTHER; note = 2'-Omethyladenosine
  modified_base 70: mod_base = OTHER; note = 2'-Omethylcytosine
  modified_base 74: mod_base = OTHER; note = 2'-Omethylcytosine
  modified_base 82: mod_base = OTHER; note = 2'-Omethylguanosine

SEQ ID NO: 7059 - RNA, 74 nt, synthetic construct; identical to SEQ ID NO: 766
  source 1..74: mol_type = other RNA
  modified_base 1: mod_base = OTHER; note = 2'-Omethylguanosine phosphorothiorate
  modified_base 2: mod_base = OTHER; note = 2'-Omethylguanosine
  modified_base 64: mod_base = OTHER; note = Guanosine phosphorothiorate
  modified_base 65: mod_base = OTHER; note = 2'-fluoroguanosine
  modified_base 73: mod_base = OTHER; note = 2'-Omethylguanosine

SEQ ID NO: 7060 - RNA, 75 nt, synthetic construct; identical to SEQ ID NO: 3336
  source 1..75: mol_type = other RNA
  modified_base 2: mod_base = OTHER; note = 2'-Omethylcytosine phosphorothiorate
  modified_base 3: mod_base = OTHER; note = Uridine phosphorothiorate
  modified_base 10: mod_base = OTHER; note = Cytosine phosphorothiorate
  modified_base 22: mod_base = OTHER; note = 2'-fluoroadenosine
  modified_base 24: mod_base = OTHER; note = Cytosine phosphorothiorate
  modified_base 28: mod_base = OTHER; note = 2'-fluoroadenosine
  modified_base 29: mod_base = OTHER; note = 2'-Omethylguanosine phosphorothiorate
  modified_base 31: mod_base = OTHER; note = 2'-fluorocytosine phosphorothiorate
  modified_base 35: mod_base = OTHER; note = 2'-fluoroadenosine
  modified_base 37: mod_base = OTHER; note = 2'-fluoroadenosine phosphorothiorate
  modified_base 39: mod_base = OTHER; note = 2'-Omethylcytosine phosphorothiorate
  modified_base 40: mod_base = OTHER; note = 2'-fluorouridine
  modified_base 41: mod_base = OTHER; note = 2'-Omethylguanosine
  modified_base 48: mod_base = OTHER; note = 2'-fluorocytosine
  modified_base 49: mod_base = OTHER; note = 2'-fluoroadenosine
  modified_base 58: mod_base = OTHER; note = 2'-Omethylguanosine phosphorothiorate
  modified_base 60: mod_base = OTHER; note = 2'-fluorocytosine phosphorothiorate
  modified_base 73: mod_base = OTHER; note = Cytosine phosphorothiorate
  modified_base 74: mod_base = OTHER; note = 2'-Omethylcytosine

SEQ ID NO: 7061 - RNA, 75 nt, synthetic construct; identical to SEQ ID NO: 3336
  source 1..75: mol_type = other RNA
  modified_base 1: mod_base = OTHER; note = 2'-Omethylcytosine
  modified_base 3: mod_base = OTHER; note = 2'-fluorouridine phosphorothiorate
  modified_base 6: mod_base = OTHER; note = Guanosine phosphorothiorate
  modified_base 12: mod_base = OTHER; note = 2'-Omethylcytosine phosphorothiorate
  modified_base 15: mod_base = OTHER; note = Uridine phosphorothiorate
  modified_base 18: mod_base = OTHER; note = 2'-fluoroguanosine
  modified_base 20: mod_base = OTHER; note = 2'-fluoroadenosine
  modified_base 25: mod_base = OTHER; note = 2'-fluoroadenosine
  modified_base 36: mod_base = OTHER; note = 2'-fluoroadenosine
  modified_base 38: mod_base = OTHER; note = 2'-fluorouridine
  modified_base 39: mod_base = OTHER; note = 2'-fluorocytosine
  modified_base 42: mod_base = OTHER; note = 2'-fluoroadenosine phosphorothiorate
  modified_base 48: mod_base = OTHER; note = 2'-fluorocytosine
  modified_base 49: mod_base = OTHER; note = 2'-fluoroadenosine
  modified_base 53: mod_base = OTHER; note = 2'-Omethyluridine phosphorothiorate
  modified_base 55: mod_base = OTHER; note = 2'-fluorocytosine phosphorothiorate
  modified_base 63: mod_base = OTHER; note = 2'-fluorouridine
  modified_base 71: mod_base = OTHER; note = Cytosine phosphorothiorate
  modified_base 74: mod_base = OTHER; note = 2'-Omethylcytosine

SEQ ID NO: 7062 - RNA, 76 nt, synthetic construct; identical to SEQ ID NO: 625
  source 1..76: mol_type = other RNA
  modified_base 1: mod_base = OTHER; note = 2'-Omethylguanosine
  modified_base 10: mod_base = OTHER; note = 2'-Omethylguanosine
  modified_base 13: mod_base = OTHER; note = 2'-Omethylcytosine
  modified_base 17: mod_base = OTHER; note = Guanosine phosphorothiorate
  modified_base 18: mod_base = OTHER; note = 2'-Omethylguanosine
  modified_base 19: mod_base = OTHER; note = Adenosine phosphorothiorate
  modified_base 20: mod_base = OTHER; note = 2'-Omethyluridine
  modified_base 25: mod_base = OTHER; note = 2'-Omethylcytosine
  modified_base 29: mod_base = OTHER; note = 2'-Omethylguanosine
  modified_base 33: mod_base = OTHER; note = 2'-fluorouridine
  modified_base 35: mod_base = OTHER; note = Cytosine phosphorothiorate
  modified_base 37: mod_base = OTHER; note = Adenosine phosphorothiorate
  modified_base 38: mod_base = OTHER; note = Adenosine phosphorothiorate
  modified_base 41: mod_base = OTHER; note = 2'-fluorocytosine phosphorothiorate
  modified_base 44: mod_base = OTHER; note = 2'-fluoroadenosine
  modified_base 50: mod_base = OTHER; note = 2'-Omethylcytosine
  modified_base 52: mod_base = OTHER; note = 2'-Omethylguanosine
  modified_base 54: mod_base = OTHER; note = Uridine phosphorothiorate
  modified_base 55: mod_base = OTHER; note = Uridine phosphorothiorate
  modified_base 56: mod_base = OTHER; note = 2'-Omethylcytosine
  modified_base 57: mod_base = OTHER; note = Guanosine phosphorothiorate
  modified_base 62: mod_base = OTHER; note = 2'-Omethylcytosine
  modified_base 63: mod_base = OTHER; note = 2'-fluorocytosine
  modified_base 65: mod_base = OTHER; note = 2'-Omethylguanosine
  modified_base 71: mod_base = OTHER; note = 2'-Omethyluridine
  modified_base 73: mod_base = OTHER; note = 2'-Omethylguanosine

SEQ ID NO: 7063 - RNA, 75 nt, synthetic construct; identical to SEQ ID NO: 1045
  source 1..75: mol_type = other RNA
  modified_base 1: mod_base = OTHER; note = 2'-Omethylguanosine phosphorothiorate
  modified_base 2: mod_base = OTHER; note = 2'-Omethylguanosine phosphorothiorate
  modified_base 5: mod_base = OTHER; note = 2'-Omethylcytosine phosphorothiorate
  modified_base 8: mod_base = OTHER; note = Uridine phosphorothiorate
  modified_base 17: mod_base = OTHER; note = 2'-Omethylguanosine phosphorothiorate
  modified_base 18: mod_base = OTHER; note = 2'-Omethylguanosine phosphorothiorate
  modified_base 20: mod_base = OTHER; note = 2'-fluoroadenosine
  modified_base 26: mod_base = OTHER; note = Uridine phosphorothiorate
  modified_base 33: mod_base = OTHER; note = 2'-fluorouridine
  modified_base 34: mod_base = OTHER; note = 2'-Omethyluridine
  modified_base 44: mod_base = OTHER; note = 2'-Omethylcytosine
  modified_base 50: mod_base = OTHER; note = 2'-Omethylguanosine
  modified_base 53: mod_base = OTHER; note = 2'-Omethyluridine
  modified_base 67: mod_base = OTHER; note = 2'-fluoroguanosine phosphorothiorate
  modified_base 72: mod_base = OTHER; note = 2'-Omethyluridine
  modified_base 74: mod_base = OTHER; note = 2'-Omethylcytosine phosphorothiorate
  modified_base 75: mod_base = OTHER; note = 2'-Omethyladenosine

SEQ ID NO: 7064 - RNA, 76 nt, synthetic construct; identical to SEQ ID NO: 625
  source 1..76: mol_type = other RNA
  modified_base 1: mod_base = OTHER; note = 2'-Omethylguanosine phosphorothiorate
  modified_base 2: mod_base = OTHER; note = 2'-Omethylguanosine
  modified_base 3: mod_base = OTHER; note = 2'-Omethylcytosine
  modified_base 4: mod_base = OTHER; note = 2'-Omethyluridine
  modified_base 5: mod_base = OTHER; note = 2'-Omethylcytosine
  modified_base 6: mod_base = OTHER; note = 2'-Omethylcytosine
  modified_base 10: mod_base = OTHER; note = 2'-Omethylguanosine
  modified_base 13: mod_base = OTHER; note = 2'-Omethylcytosine
  modified_base 14: mod_base = OTHER; note = 2'-Omethyladenosine
  modified_base 15: mod_base = OTHER; note = 2'-fluoroadenosine
  modified_base 16: mod_base = OTHER; note = 2'-Omethyluridine
  modified_base 17: mod_base = OTHER; note = Guanosine phosphorothiorate
  modified_base 18: mod_base = OTHER; note = 2'-Omethylguanosine
  modified_base 19: mod_base = OTHER; note = Adenosine phosphorothiorate
  modified_base 20: mod_base = OTHER; note = 2'-Omethyluridine
  modified_base 25: mod_base = OTHER; note = 2'-Omethylcytosine
  modified_base 29: mod_base = OTHER; note = 2'-Omethylguanosine
  modified_base 33: mod_base = OTHER; note = 2'-fluorouridine
  modified_base 35: mod_base = OTHER; note = Cytosine phosphorothiorate
  modified_base 37: mod_base = OTHER; note = Adenosine phosphorothiorate
  modified_base 38: mod_base = OTHER; note = Adenosine phosphorothiorate
  modified_base 40: mod_base = OTHER; note = 2'-fluorouridine
  modified_base 41: mod_base = OTHER; note = 2'-Omethylcytosine
  modified_base 42: mod_base = OTHER; note = 2'-Omethyladenosine
  modified_base 43: mod_base = OTHER; note = 2'-Omethyladenosine
  modified_base 44: mod_base = OTHER; note = 2'-Omethyladenosine
  modified_base 45: mod_base = OTHER; note = 2'-Omethylguanosine
  modified_base 46: mod_base = OTHER; note = 2'-fluoroguanosine
  modified_base 48: mod_base = OTHER; note = 2'-fluorouridine
  modified_base 50: mod_base = OTHER; note = 2'-Omethylcytosine
  modified_base 52: mod_base = OTHER; note = 2'-Omethylguanosine
  modified_base 54: mod_base = OTHER; note = Uridine phosphorothiorate
  modified_base 55: mod_base = OTHER; note = Uridine phosphorothiorate
  modified_base 56: mod_base = OTHER; note = 2'-Omethylcytosine
  modified_base 57: mod_base = OTHER; note = Guanosine phosphorothiorate
  modified_base 62: mod_base = OTHER; note = 2'-Omethylcytosine
  modified_base 63: mod_base = OTHER; note = 2'-fluorocytosine
  modified_base 65: mod_base = OTHER; note = 2'-Omethylguanosine phosphorothiorate
  modified_base 71: mod_base = OTHER; note = 2'-Omethyluridine
  modified_base 73: mod_base = OTHER; note = 2'-Omethylguanosine
  modified_base 75: mod_base = OTHER; note = 2'-fluorocytosine phosphorothiorate

SEQ ID NO: 7065 - RNA, 86 nt, synthetic construct; identical to SEQ ID NO: 3290
  source 1..86: mol_type = other RNA
  modified_base 22: mod_base = OTHER; note = 2'-Omethyladenosine

SEQ ID NO: 7066 - RNA, 75 nt, synthetic construct; identical to SEQ ID NO: 1045
  source 1..75: mol_type = other RNA
  modified_base 1: mod_base = OTHER; note = 2'-Omethylguanosine phosphorothiorate
  modified_base 2: mod_base = OTHER; note = 2'-Omethylguanosine phosphorothiorate
  modified_base 18: mod_base = OTHER; note = 2'-fluoroguanosine
  modified_base 24: mod_base = OTHER; note = 2'-fluoroadenosine
  modified_base 36: mod_base = OTHER; note = 2'-fluoroadenosine
  modified_base 43: mod_base = OTHER; note = 2'-fluoroguanosine
  modified_base 59: mod_base = OTHER; note = 2'-fluorouridine
  modified_base 64: mod_base = OTHER; note = Guanosine phosphorothiorate
  modified_base 65: mod_base = OTHER; note = 2'-fluorouridine
  modified_base 67: mod_base = OTHER; note = Guanosine phosphorothiorate
  modified_base 68: mod_base = OTHER; note = 2'-fluoroadenosine
  modified_base 73: mod_base = OTHER; note = Cytosine phosphorothiorate
  modified_base 74: mod_base = OTHER; note = 2'-fluorocytosine phosphorothiorate

SEQ ID NO: 7067 - RNA, 85 nt, synthetic construct; identical to SEQ ID NO: 3297
  source 1..85: mol_type = other RNA
  modified_base 1: mod_base = OTHER; note = 2'-Omethylguanosine
  modified_base 10: mod_base = OTHER; note = 2'-Omethylguanosine
  modified_base 11: mod_base = OTHER; note = 2'-Omethylcytosine
  modified_base 12: mod_base = OTHER; note = 2'-Omethylcytosine
  modified_base 13: mod_base = OTHER; note = 2'-Omethylguanosine
  modified_base 14: mod_base = OTHER; note = 2'-Omethyladenosine
  modified_base 15: mod_base = OTHER; note = 2'-Omethylguanosine
  modified_base 16: mod_base = OTHER; note = 2'-Omethyluridine
  modified_base 17: mod_base = OTHER; note = 2'-Omethylguanosine
  modified_base 18: mod_base = OTHER; note = 2'-Omethylguanosine
  modified_base 19: mod_base = OTHER; note = Uridine phosphorothiorate
  modified_base 20: mod_base = OTHER; note = 2'-Omethyluridine
  modified_base 21: mod_base = OTHER; note = Adenosine phosphorothiorate
  modified_base 25: mod_base = OTHER; note = 2'-Omethylcytosine
  modified_base 33: mod_base = OTHER; note = Uridine phosphorothiorate
  modified_base 34: mod_base = OTHER; note = 2'-Omethyluridine
  modified_base 35: mod_base = OTHER; note = Cytosine phosphorothiorate
  modified_base 37: mod_base = OTHER; note = Adenosine phosphorothiorate
  modified_base 38: mod_base = OTHER; note = Adenosine phosphorothiorate
  modified_base 58: mod_base = OTHER; note = 2'-Omethylguanosine
  modified_base 59: mod_base = OTHER; note = 2'-Omethylcytosine
  modified_base 61: mod_base = OTHER; note = 2'-Omethylguanosine
  modified_base 63: mod_base = OTHER; note = Uridine phosphorothiorate
  modified_base 64: mod_base = OTHER; note = Uridine phosphorothiorate
  modified_base 70: mod_base = OTHER; note = 2'-Omethylcytosine
  modified_base 74: mod_base = OTHER; note = 2'-Omethylcytosine
  modified_base 82: mod_base = OTHER; note = 2'-Omethylguanosine

SEQ ID NO: 7068 - RNA, 75 nt, synthetic construct; identical to SEQ ID NO: 3311
  source 1..75: mol_type = other RNA
  modified_base 1: mod_base = OTHER; note = 2'-fluoroguanosine phosphorothiorate
  modified_base 2: mod_base = OTHER; note = 2'-Omethylguanosine phosphorothiorate
  modified_base 12: mod_base = OTHER; note = Guanosine phosphorothiorate
  modified_base 23: mod_base = OTHER; note = Cytosine phosphorothiorate
  modified_base 24: mod_base = OTHER; note = 2'-fluoroadenosine
  modified_base 29: mod_base = OTHER; note = 2'-Omethylguanosine phosphorothiorate
  modified_base 40: mod_base = OTHER; note = 2'-fluorocytosine phosphorothiorate
  modified_base 41: mod_base = OTHER; note = 2'-fluorocytosine
  modified_base 44: mod_base = OTHER; note = 2'-fluorocytosine
  modified_base 55: mod_base = OTHER; note = Cytosine phosphorothiorate
  modified_base 65: mod_base = OTHER; note = Uridine phosphorothiorate
  modified_base 73: mod_base = OTHER; note = Cytosine phosphorothiorate
  modified_base 74: mod_base = OTHER; note = Cytosine phosphorothiorate

SEQ ID NO: 7069 - RNA, 76 nt, synthetic construct; identical to SEQ ID NO: 3318
  source 1..76: mol_type = other RNA
  modified_base 61: mod_base = OTHER; note = 2'-Omethylcytosine
  modified_base 62: mod_base = OTHER; note = 2'-Omethylcytosine
  modified_base 63: mod_base = OTHER; note = 2'-Omethylguanosine
  modified_base 64: mod_base = OTHER; note = 2'-Omethylguanosine
  modified_base 65: mod_base = OTHER; note = 2'-Omethylcytosine

SEQ ID NO: 7070 - RNA, 75 nt, synthetic construct; identical to SEQ ID NO: 3306
  source 1..75: mol_type = other RNA
  modified_base 1: mod_base = OTHER; note = 2'-Omethylguanosine phosphorothiorate
  modified_base 2: mod_base = OTHER; note = 2'-Omethyladenosine phosphorothiorate
  modified_base 3: mod_base = OTHER; note = 2'-Omethylcytosine
  modified_base 4: mod_base = OTHER; note = 2'-Omethylcytosine
  modified_base 5: mod_base = OTHER; note = 2'-Omethyluridine
  modified_base 6: mod_base = OTHER; note = 2'-Omethylcytosine
  modified_base 10: mod_base = OTHER; note = 2'-Omethylguanosine
  modified_base 11: mod_base = OTHER; note = 2'-Omethylcytosine
  modified_base 12: mod_base = OTHER; note = 2'-Omethylguanosine
  modified_base 13: mod_base = OTHER; note = 2'-Omethylcytosine
  modified_base 21: mod_base = OTHER; note = 2'-Omethylguanosine
  modified_base 22: mod_base = OTHER; note = 2'-Omethylcytosine
  modified_base 23: mod_base = OTHER; note = 2'-Omethylguanosine
  modified_base 24: mod_base = OTHER; note = 2'-Omethylcytosine
  modified_base 32: mod_base = OTHER; note = 2'-fluorouridine
  modified_base 34: mod_base = OTHER; note = Uridine phosphorothiorate
  modified_base 36: mod_base = OTHER; note = Guanosine phosphorothiorate
  modified_base 37: mod_base = OTHER; note = Adenosine phosphorothiorate
  modified_base 48: mod_base = OTHER; note = 2'-Omethylguanosine
  modified_base 49: mod_base = OTHER; note = 2'-Omethylcytosine
  modified_base 50: mod_base = OTHER; note = 2'-Omethylguanosine
  modified_base 51: mod_base = OTHER; note = 2'-Omethyluridine
  modified_base 52: mod_base = OTHER; note = 2'-Omethylguanosine
  modified_base 53: mod_base = OTHER; note = 2'-Omethyluridine
  modified_base 55: mod_base = OTHER; note = 2'-Omethylcytosine
  modified_base 58: mod_base = OTHER; note = 2'-Omethyladenosine
  modified_base 60: mod_base = OTHER; note = 2'-Omethylcytosine
  modified_base 61: mod_base = OTHER; note = 2'-Omethyladenosine
  modified_base 62: mod_base = OTHER; note = 2'-fluorocytosine
  modified_base 63: mod_base = OTHER; note = 2'-Omethylguanosine
  modified_base 64: mod_base = OTHER; note = 2'-Omethyluridine
  modified_base 65: mod_base = OTHER; note = 2'-Omethylcytosine
  modified_base 66: mod_base = OTHER; note = 2'-Omethylguanosine
  modified_base 67: mod_base = OTHER; note = 2'-Omethylguanosine
  modified_base 72: mod_base = OTHER; note = 2'-Omethyladenosine

SEQ ID NO: 7071 - RNA, 75 nt, synthetic construct; identical to SEQ ID NO: 3299
  source 1..75: mol_type = other RNA
  modified_base 1: mod_base = OTHER; note = 2'-Omethylcytosine phosphorothiorate
  modified_base 2: mod_base = OTHER; note = Cytosine phosphorothiorate
  modified_base 4: mod_base = OTHER; note = Guanosine phosphorothiorate
  modified_base 12: mod_base = OTHER; note = 2'-Omethylcytosine
  modified_base 14: mod_base = OTHER; note = 2'-fluoroguanosine
  modified_base 16: mod_base = OTHER; note = 2'-fluorocytosine
  modified_base 24: mod_base = OTHER; note = Cytosine phosphorothiorate
  modified_base 28: mod_base = OTHER; note = 2'-fluoroadenosine
  modified_base 29: mod_base = OTHER; note = 2'-fluoroguanosine
  modified_base 35: mod_base = OTHER; note = Adenosine phosphorothiorate
  modified_base 37: mod_base = OTHER; note = 2'-Omethyladenosine phosphorothiorate
  modified_base 45: mod_base = OTHER; note = Guanosine phosphorothiorate
  modified_base 47: mod_base = OTHER; note = 2'-fluorocytosine phosphorothiorate
  modified_base 53: mod_base = OTHER; note = 2'-Omethyluridine phosphorothiorate
  modified_base 54: mod_base = OTHER; note = 2'-fluorouridine phosphorothiorate
  modified_base 71: mod_base = OTHER; note = 2'-fluorocytosine phosphorothiorate
  modified_base 74: mod_base = OTHER; note = 2'-Omethylcytosine
  modified_base 75: mod_base = OTHER; note = 2'-fluoroadenosine

SEQ ID NO: 7072 - RNA, 76 nt, synthetic construct; identical to SEQ ID NO: 625
  source 1..76: mol_type = other RNA
  modified_base 1: mod_base = OTHER; note = 2'-Omethylguanosine
  modified_base 3: mod_base = OTHER; note = 2'-Omethylcytosine
  modified_base 5: mod_base = OTHER; note = Cytosine phosphorothiorate
  modified_base 6: mod_base = OTHER; note = 2'-fluorocytosine
  modified_base 7: mod_base = OTHER; note = Guanosine phosphorothiorate
  modified_base 9: mod_base = OTHER; note = Guanosine phosphorothiorate
  modified_base 10: mod_base = OTHER; note = 2'-Omethylguanosine
  modified_base 13: mod_base = OTHER; note = 2'-fluorocytosine
  modified_base 15: mod_base = OTHER; note = Adenosine phosphorothiorate
  modified_base 16: mod_base = OTHER; note = 2'-fluorouridine
  modified_base 17: mod_base = OTHER; note = Guanosine phosphorothiorate
  modified_base 20: mod_base = OTHER; note = 2'-Omethyluridine phosphorothiorate
  modified_base 23: mod_base = OTHER; note = 2'-Omethylcytosine
  modified_base 24: mod_base = OTHER; note = Guanosine phosphorothiorate
  modified_base 26: mod_base = OTHER; note = 2'-fluoroadenosine
  modified_base 27: mod_base = OTHER; note = Uridine phosphorothiorate
  modified_base 33: mod_base = OTHER; note = Uridine phosphorothiorate
  modified_base 37: mod_base = OTHER; note = Adenosine phosphorothiorate
  modified_base 38: mod_base = OTHER; note = 2'-fluoroadenosine
  modified_base 39: mod_base = OTHER; note = 2'-fluorouridine
  modified_base 43: mod_base = OTHER; note = 2'-fluoroadenosine
  modified_base 44: mod_base = OTHER; note = Adenosine phosphorothiorate
  modified_base 45: mod_base = OTHER; note = 2'-Omethylguanosine
  modified_base 46: mod_base = OTHER; note = 2'-Omethylguanosine
  modified_base 47: mod_base = OTHER; note = 2'-Omethyluridine
  modified_base 50: mod_base = OTHER; note = 2'-fluorocytosine
  modified_base 53: mod_base = OTHER; note = Guanosine phosphorothiorate
  modified_base 54: mod_base = OTHER; note = 2'-Omethyluridine phosphorothiorate
  modified_base 59: mod_base = OTHER; note = 2'-fluoroguanosine
  modified_base 60: mod_base = OTHER; note = Uridine phosphorothiorate
  modified_base 61: mod_base = OTHER; note = 2'-Omethylcytosine
  modified_base 62: mod_base = OTHER; note = 2'-Omethylcytosine
  modified_base 63: mod_base = OTHER; note = 2'-fluorocytosine
  modified_base 67: mod_base = OTHER; note = 2'-fluoroguanosine
  modified_base 70: mod_base = OTHER; note = 2'-fluoroguanosine
  modified_base 72: mod_base = OTHER; note = 2'-fluorocytosine
  modified_base 74: mod_base = OTHER; note = 2'-fluorocytosine

SEQ ID NO: 7073 - RNA, 76 nt, synthetic construct; identical to SEQ ID NO: 3316
  source 1..76: mol_type = other RNA
  modified_base 1: mod_base = OTHER; note = 2'-Omethyladenosine
  modified_base 14: mod_base = OTHER; note = 2'-Omethyladenosine
  modified_base 15: mod_base = OTHER; note = 2'-fluoroadenosine
  modified_base 16: mod_base = OTHER; note = 2'-Omethyluridine
  modified_base 17: mod_base = OTHER; note = 2'-Omethylguanosine
  modified_base 18: mod_base = OTHER; note = 2'-Omethylguanosine
  modified_base 19: mod_base = OTHER; note = 2'-fluoroadenosine
  modified_base 20: mod_base = OTHER; note = 2'-Omethyluridine
  modified_base 33: mod_base = OTHER; note = 2'-fluorouridine
  modified_base 35: mod_base = OTHER; note = Cytosine phosphorothiorate
  modified_base 37: mod_base = OTHER; note = Adenosine phosphorothiorate
  modified_base 38: mod_base = OTHER; note = Adenosine phosphorothiorate
  modified_base 41: mod_base = OTHER; note = 2'-Omethylcytosine
  modified_base 42: mod_base = OTHER; note = 2'-Omethyladenosine
  modified_base 43: mod_base = OTHER; note = 2'-Omethyladenosine
  modified_base 44: mod_base = OTHER; note = 2'-Omethyladenosine
  modified_base 50: mod_base = OTHER; note = 2'-Omethylcytosine
  modified_base 52: mod_base = OTHER; note = 2'-Omethylguanosine
  modified_base 73: mod_base = OTHER; note = 2'-Omethylguanosine

SEQ ID NO: 7074 - RNA, 86 nt, synthetic construct; identical to SEQ ID NO: 3290
  source 1..86: mol_type = other RNA
  modified_base 1: mod_base = OTHER; note = 2'-Omethyladenosine
  modified_base 44: mod_base = OTHER; note = 2'-Omethyluridine
  modified_base 57: mod_base = OTHER; note = 2'-fluoroguanosine
  modified_base 58: mod_base = OTHER; note = 2'-fluorocytosine
  modified_base 59: mod_base = OTHER; note = 2'-Omethylguanosine
  modified_base 60: mod_base = OTHER; note = 2'-Omethyluridine
  modified_base 61: mod_base = OTHER; note = 2'-Omethylguanosine
  modified_base 62: mod_base = OTHER; note = 2'-Omethylguanosine
  modified_base 63: mod_base = OTHER; note = 2'-Omethylguanosine
  modified_base 71: mod_base = OTHER; note = 2'-Omethylcytosine
  modified_base 72: mod_base = OTHER; note = 2'-Omethylcytosine
  modified_base 73: mod_base = OTHER; note = 2'-fluorocytosine
  modified_base 74: mod_base = OTHER; note = 2'-Omethyladenosine
  modified_base 75: mod_base = OTHER; note = 2'-Omethylcytosine
  modified_base 83: mod_base = OTHER; note = 2'-Omethyladenosine

SEQ ID NO: 7075 - RNA, 76 nt, synthetic construct; identical to SEQ ID NO: 625
  source 1..76: mol_type = other RNA
  modified_base 1: mod_base = OTHER; note = 2'-Omethylguanosine phosphorothiorate
  modified_base 2: mod_base = OTHER; note = 2'-Omethylguanosine
  modified_base 16: mod_base = OTHER; note = 2'-fluorouridine
  modified_base 73: mod_base = OTHER; note = Guanosine phosphorothiorate
  modified_base 74: mod_base = OTHER; note = 2'-fluorocytosine phosphorothiorate
  modified_base 75: mod_base = OTHER; note = 2'-Omethylcytosine

SEQ ID NO: 7076 - RNA, 76 nt, synthetic construct; identical to SEQ ID NO: 625
  source 1..76: mol_type = other RNA
  modified_base 4: mod_base = OTHER; note = Uridine phosphorothiorate
  modified_base 6: mod_base = OTHER; note = Cytosine phosphorothiorate
  modified_base 9: mod_base = OTHER; note = Guanosine phosphorothiorate
  modified_base 10: mod_base = OTHER; note = 2'-Omethylguanosine phosphorothiorate
  modified_base 11: mod_base = OTHER; note = 2'-fluorocytosine
  modified_base 12: mod_base = OTHER; note = Guanosine phosphorothiorate
  modified_base 13: mod_base = OTHER; note = 2'-Omethylcytosine
  modified_base 15: mod_base = OTHER; note = 2'-Omethyladenosine
  modified_base 16: mod_base = OTHER; note = 2'-Omethyluridine phosphorothiorate
  modified_base 17: mod_base = OTHER; note = 2'-Omethylguanosine
  modified_base 18: mod_base = OTHER; note = Guanosine phosphorothiorate
  modified_base 20: mod_base = OTHER; note = 2'-fluorouridine
  modified_base 23: mod_base = OTHER; note = 2'-fluorocytosine phosphorothiorate
  modified_base 24: mod_base = OTHER; note = 2'-Omethylguanosine phosphorothiorate
  modified_base 27: mod_base = OTHER; note = 2'-fluorouridine
  modified_base 28: mod_base = OTHER; note = 2'-fluorouridine phosphorothiorate
  modified_base 29: mod_base = OTHER; note = 2'-Omethylguanosine phosphorothiorate
  modified_base 30: mod_base = OTHER; note = 2'-fluoroguanosine
  modified_base 33: mod_base = OTHER; note = Uridine phosphorothiorate
  modified_base 34: mod_base = OTHER; note = Uridine phosphorothiorate
  modified_base 39: mod_base = OTHER; note = 2'-fluorouridine
  modified_base 43: mod_base = OTHER; note = 2'-fluoroadenosine
  modified_base 45: mod_base = OTHER; note = 2'-Omethylguanosine
  modified_base 48: mod_base = OTHER; note = 2'-fluorouridine
  modified_base 49: mod_base = OTHER; note = Cytosine phosphorothiorate
  modified_base 51: mod_base = OTHER; note = 2'-Omethylguanosine
  modified_base 55: mod_base = OTHER; note = Uridine phosphorothiorate
  modified_base 59: mod_base = OTHER; note = 2'-Omethylguanosine phosphorothiorate
  modified_base 60: mod_base = OTHER; note = 2'-Omethyluridine
  modified_base 64: mod_base = OTHER; note = Guanosine phosphorothiorate
  modified_base 65: mod_base = OTHER; note = 2'-Omethylguanosine
  modified_base 73: mod_base = OTHER; note = 2'-Omethylguanosine
  modified_base 75: mod_base = OTHER; note = 2'-Omethylcytosine
  modified_base 76: mod_base = OTHER; note = 2'-fluoroadenosine

SEQ ID NO: 7077 - RNA, 75 nt, synthetic construct; identical to SEQ ID NO: 1045
  source 1..75: mol_type = other RNA
  modified_base 1: mod_base = OTHER; note = 2'-Omethylguanosine phosphorothiorate
  modified_base 2: mod_base = OTHER; note = 2'-Omethylguanosine
  modified_base 10: mod_base = OTHER; note = 2'-Omethylguanosine
  modified_base 14: mod_base = OTHER; note = 2'-fluoroadenosine
  modified_base 19: mod_base = OTHER; note = 2'-fluorouridine
  modified_base 20: mod_base = OTHER; note = 2'-Omethyladenosine phosphorothiorate
  modified_base 21: mod_base = OTHER; note = 2'-fluoroadenosine
  modified_base 22: mod_base = OTHER; note = 2'-fluoroguanosine
  modified_base 23: mod_base = OTHER; note = Cytosine phosphorothiorate
  modified_base 28: mod_base = OTHER; note = Uridine phosphorothiorate
  modified_base 29: mod_base = OTHER; note = 2'-fluoroguanosine
  modified_base 32: mod_base = OTHER; note = 2'-fluorocytosine
  modified_base 36: mod_base = OTHER; note = 2'-fluoroadenosine phosphorothiorate
  modified_base 41: mod_base = OTHER; note = Cytosine phosphorothiorate
  modified_base 42: mod_base = OTHER; note = 2'-fluoroadenosine
  modified_base 44: mod_base = OTHER; note = 2'-fluorocytosine
  modified_base 50: mod_base = OTHER; note = Guanosine phosphorothiorate
  modified_base 62: mod_base = OTHER; note = Cytosine phosphorothiorate
  modified_base 64: mod_base = OTHER; note = Guanosine phosphorothiorate
  modified_base 66: mod_base = OTHER; note = 2'-fluoroguanosine
  modified_base 68: mod_base = OTHER; note = Adenosine phosphorothiorate
  modified_base 69: mod_base = OTHER; note = 2'-fluoroadenosine
  modified_base 73: mod_base = OTHER; note = Cytosine phosphorothiorate
  modified_base 74: mod_base = OTHER; note = 2'-Omethylcytosine
  modified_base 75: mod_base = OTHER; note = 2'-Omethyladenosine

SEQ ID NO: 7078 - RNA, 85 nt, synthetic construct; identical to SEQ ID NO: 3297
  source 1..85: mol_type = other RNA
  modified_base 1: mod_base = OTHER; note = 2'-Omethylguanosine phosphorothiorate
  modified_base 2: mod_base = OTHER; note = Cytosine phosphorothiorate
  modified_base 29: mod_base = OTHER; note = Guanosine phosphorothiorate
  modified_base 46: mod_base = OTHER; note = 2'-Omethylguanosine phosphorothiorate
  modified_base 54: mod_base = OTHER; note = 2'-fluorocytosine phosphorothiorate
  modified_base 55: mod_base = OTHER; note = 2'-fluorocytosine
  modified_base 61: mod_base = OTHER; note = 2'-Omethylguanosine

SEQ ID NO: 7079 - RNA, 75 nt, synthetic construct; identical to SEQ ID NO: 3299
  source 1..75: mol_type = other RNA
  modified_base 1: mod_base = OTHER; note = 2'-Omethylcytosine phosphorothiorate
  modified_base 11: mod_base = OTHER; note = Uridine phosphorothiorate
  modified_base 15: mod_base = OTHER; note = 2'-Omethyluridine
  modified_base 16: mod_base = OTHER; note = Cytosine phosphorothiorate
  modified_base 18: mod_base = OTHER; note = 2'-fluoroguanosine
  modified_base 20: mod_base = OTHER; note = Adenosine phosphorothiorate
  modified_base 21: mod_base = OTHER; note = 2'-fluoroguanosine
  modified_base 28: mod_base = OTHER; note = 2'-fluoroadenosine
  modified_base 37: mod_base = OTHER; note = 2'-fluoroadenosine phosphorothiorate
  modified_base 41: mod_base = OTHER; note = 2'-fluoroguanosine
  modified_base 42: mod_base = OTHER; note = 2'-fluoroadenosine
  modified_base 47: mod_base = OTHER; note = 2'-fluorocytosine
  modified_base 48: mod_base = OTHER; note = 2'-fluorocytosine
  modified_base 55: mod_base = OTHER; note = 2'-Omethylcytosine phosphorothiorate
  modified_base 64: mod_base = OTHER; note = 2'-fluoroguanosine
  modified_base 65: mod_base = OTHER; note = 2'-fluorouridine
  modified_base 69: mod_base = OTHER; note = 2'-fluoroguanosine phosphorothiorate
  modified_base 73: mod_base = OTHER; note = 2'-fluorocytosine phosphorothiorate
  modified_base 74: mod_base = OTHER; note = Cytosine phosphorothiorate
  modified_base 75: mod_base = OTHER; note = 2'-fluoroadenosine

SEQ ID NO: 7080 - DNA, 76 bp, synthetic construct; identical to SEQ ID NO: 1924
  source 1..76: mol_type = other DNA
  misc_feature 1..68: note = RNA
  misc_feature 69: note = DNA
  misc_feature 70..76: note = RNA

SEQ ID NO: 7081 - RNA, 86 nt, synthetic construct; identical to SEQ ID NO: 3290
  source 1..86: mol_type = other RNA
  modified_base 32: mod_base = OTHER; note = 2'-fluorocytosine

SEQ ID NO: 7082 - RNA, 85 nt, synthetic construct; identical to SEQ ID NO: 3286
  source 1..85: mol_type = other RNA
  modified_base 1: mod_base = OTHER; note = 2'-Omethylcytosine
  modified_base 14: mod_base = OTHER; note = Guanosine phosphorothiorate
  modified_base 26: mod_base = OTHER; note = 2'-fluorouridine
  modified_base 30: mod_base = OTHER; note = 2'-fluoroadenosine
  modified_base 36: mod_base = OTHER; note = Guanosine phosphorothiorate
  modified_base 44: mod_base = OTHER; note = 2'-Omethylguanosine
  modified_base 53: mod_base = OTHER; note = Uridine phosphorothiorate
  modified_base 54: mod_base = OTHER; note = 2'-fluorocytosine
  modified_base 64: mod_base = OTHER; note = Uridine phosphorothiorate
  modified_base 76: mod_base = OTHER; note = 2'-fluorocytosine
  modified_base 84: mod_base = OTHER; note = 2'-fluorocytosine phosphorothiorate

SEQ ID NO: 7083 - RNA, 85 nt, synthetic construct; identical to SEQ ID NO: 3317
  source 1..85: mol_type = other RNA
  modified_base 1: mod_base = OTHER; note = 2'-Omethylguanosine phosphorothiorate
  modified_base 3: mod_base = OTHER; note = 2'-fluorouridine phosphorothiorate
  modified_base 6: mod_base = OTHER; note = 2'-fluoroguanosine
  modified_base 15: mod_base = OTHER; note = 2'-Omethylguanosine
  modified_base 18: mod_base = OTHER; note = 2'-Omethylguanosine phosphorothiorate
  modified_base 20: mod_base = OTHER; note = 2'-Omethyluridine phosphorothiorate
  modified_base 23: mod_base = OTHER; note = 2'-fluoroguanosine
  modified_base 24: mod_base = OTHER; note = 2'-fluoroguanosine
  modified_base 39: mod_base = OTHER; note = Uridine phosphorothiorate
  modified_base 56: mod_base = OTHER; note = 2'-Omethylguanosine phosphorothiorate
  modified_base 57: mod_base = OTHER; note = Cytosine phosphorothiorate
  modified_base 58: mod_base = OTHER; note = 2'-fluoroguanosine
  modified_base 59: mod_base = OTHER; note = Cytosine phosphorothiorate
  modified_base 64: mod_base = OTHER; note = 2'-fluorouridine
  modified_base 79: mod_base = OTHER; note = 2'-fluoroadenosine
  modified_base 80: mod_base = OTHER; note = Guanosine phosphorothiorate
  modified_base 82: mod_base = OTHER; note = 2'-Omethylguanosine

SEQ ID NO: 7084 - RNA, 75 nt, synthetic construct; identical to SEQ ID NO: 3306
  source 1..75: mol_type = other RNA
  modified_base 1: mod_base = OTHER; note = 2'-Omethylguanosine
  modified_base 2: mod_base = OTHER; note = 2'-Omethyladenosine
  modified_base 3: mod_base = OTHER; note = 2'-Omethylcytosine
  modified_base 4: mod_base = OTHER; note = 2'-Omethylcytosine
  modified_base 5: mod_base = OTHER; note = 2'-Omethyluridine
  modified_base 6: mod_base = OTHER; note = 2'-Omethylcytosine
  modified_base 14: mod_base = OTHER; note = 2'-Omethyladenosine
  modified_base 15: mod_base = OTHER; note = 2'-Omethyladenosine
  modified_base 16: mod_base = OTHER; note = 2'-Omethylcytosine
  modified_base 17: mod_base = OTHER; note = 2'-Omethylguanosine
  modified_base 18: mod_base = OTHER; note = 2'-Omethylguanosine
  modified_base 24: mod_base = OTHER; note = 2'-Omethylcytosine
  modified_base 32: mod_base = OTHER; note = 2'-fluorouridine
  modified_base 34: mod_base = OTHER; note = Uridine phosphorothiorate
  modified_base 36: mod_base = OTHER; note = Guanosine phosphorothiorate
  modified_base 37: mod_base = OTHER; note = Adenosine phosphorothiorate
  modified_base 48: mod_base = OTHER; note = 2'-Omethylguanosine
  modified_base 49: mod_base = OTHER; note = 2'-Omethylcytosine
  modified_base 51: mod_base = OTHER; note = 2'-Omethyluridine
  modified_base 53: mod_base = OTHER; note = 2'-Omethyluridine
  modified_base 54: mod_base = OTHER; note = Uridine phosphorothiorate
  modified_base 55: mod_base = OTHER; note = 2'-Omethylcytosine
  modified_base 56: mod_base = OTHER; note = 2'-fluoroadenosine
  modified_base 58: mod_base = OTHER; note = 2'-Omethyladenosine
  modified_base 60: mod_base = OTHER; note = 2'-Omethylcytosine
  modified_base 61: mod_base = OTHER; note = 2'-Omethyladenosine
  modified_base 62: mod_base = OTHER; note = 2'-fluorocytosine
  modified_base 63: mod_base = OTHER; note = 2'-Omethylguanosine
  modified_base 64: mod_base = OTHER; note = 2'-Omethyluridine
  modified_base 72: mod_base = OTHER; note = 2'-Omethyladenosine

SEQ ID NO: 7085 - RNA, 76 nt, synthetic construct; identical to SEQ ID NO: 625
  source 1..76: mol_type = other RNA
  modified_base 1: mod_base = OTHER; note = 2'-Omethylguanosine
  modified_base 2: mod_base = OTHER; note = 2'-Omethylguanosine
  modified_base 3: mod_base = OTHER; note = 2'-Omethylcytosine
  modified_base 4: mod_base = OTHER; note = 2'-Omethyluridine
  modified_base 5: mod_base = OTHER; note = 2'-Omethylcytosine
  modified_base 6: mod_base = OTHER; note = 2'-Omethylcytosine
  modified_base 10: mod_base = OTHER; note = 2'-Omethylguanosine
  modified_base 11: mod_base = OTHER; note = 2'-Omethylcytosine
  modified_base 12: mod_base = OTHER; note = 2'-Omethylguanosine
  modified_base 13: mod_base = OTHER; note = 2'-Omethylcytosine
  modified_base 14: mod_base = OTHER; note = 2'-Omethyladenosine
  modified_base 15: mod_base = OTHER; note = 2'-fluoroadenosine
  modified_base 16: mod_base = OTHER; note = 2'-Omethyluridine
  modified_base 17: mod_base = OTHER; note = 2'-Omethylguanosine
  modified_base 18: mod_base = OTHER; note = 2'-Omethylguanosine
  modified_base 19: mod_base = OTHER; note = 2'-fluoroadenosine
  modified_base 20: mod_base = OTHER; note = 2'-Omethyluridine
  modified_base 21: mod_base = OTHER; note = 2'-fluoroadenosine
  modified_base 22: mod_base = OTHER; note = 2'-Omethylguanosine
  modified_base 23: mod_base = OTHER; note = 2'-Omethylcytosine
  modified_base 24: mod_base = OTHER; note = 2'-Omethylguanosine
  modified_base 25: mod_base = OTHER; note = 2'-Omethylcytosine
  modified_base 44: mod_base = OTHER; note = 2'-Omethyladenosine
  modified_base 45: mod_base = OTHER; note = 2'-Omethylguanosine
  modified_base 46: mod_base = OTHER; note = 2'-Omethylguanosine
  modified_base 49: mod_base = OTHER; note = 2'-Omethylcytosine
  modified_base 50: mod_base = OTHER; note = 2'-Omethylcytosine
  modified_base 51: mod_base = OTHER; note = 2'-Omethylguanosine
  modified_base 52: mod_base = OTHER; note = 2'-Omethylguanosine
  modified_base 53: mod_base = OTHER; note = 2'-Omethylguanosine
  modified_base 61: mod_base = OTHER; note = 2'-Omethylcytosine
  modified_base 62: mod_base = OTHER; note = 2'-Omethylcytosine
  modified_base 63: mod_base = OTHER; note = 2'-Omethylcytosine
  modified_base 64: mod_base = OTHER; note = 2'-Omethylguanosine
  modified_base 65: mod_base = OTHER; note = 2'-Omethylguanosine
  modified_base 66: mod_base = OTHER; note = 2'-Omethylcytosine
  modified_base 67: mod_base = OTHER; note = 2'-Omethylguanosine
  modified_base 68: mod_base = OTHER; note = 2'-Omethylguanosine
  modified_base 69: mod_base = OTHER; note = 2'-Omethyladenosine
  modified_base 73: mod_base = OTHER; note = 2'-Omethylguanosine

SEQ ID NO: 7086 - RNA, 75 nt, synthetic construct; identical to SEQ ID NO: 1045
  source 1..75: mol_type = other RNA
  modified_base 1: mod_base = OTHER; note = 2'-Omethylguanosine phosphorothiorate
  modified_base 2: mod_base = OTHER; note = 2'-Omethylguanosine
  modified_base 13: mod_base = OTHER; note = 2'-fluorouridine
  modified_base 14: mod_base = OTHER; note = Adenosine phosphorothiorate
  modified_base 19: mod_base = OTHER; note = 2'-Omethyluridine phosphorothiorate
  modified_base 21: mod_base = OTHER; note = 2'-fluoroadenosine
  modified_base 29: mod_base = OTHER; note = 2'-Omethylguanosine
  modified_base 38: mod_base = OTHER; note = 2'-fluoroadenosine
  modified_base 44: mod_base = OTHER; note = 2'-fluorocytosine phosphorothiorate
  modified_base 51: mod_base = OTHER; note = 2'-fluoroadenosine phosphorothiorate
  modified_base 57: mod_base = OTHER; note = 2'-Omethyladenosine
  modified_base 58: mod_base = OTHER; note = Guanosine phosphorothiorate
  modified_base 63: mod_base = OTHER; note = Guanosine phosphorothiorate
  modified_base 65: mod_base = OTHER; note = 2'-fluorouridine
  modified_base 71: mod_base = OTHER; note = Cytosine phosphorothiorate
  modified_base 74: mod_base = OTHER; note = 2'-fluorocytosine phosphorothiorate

SEQ ID NO: 7087 - RNA, 76 nt, synthetic construct; identical to SEQ ID NO: 625
  source 1..76: mol_type = other RNA
  modified_base 1: mod_base = OTHER; note = 2'-Omethylguanosine
  modified_base 2: mod_base = OTHER; note = Guanosine phosphorothiorate
  modified_base 3: mod_base = OTHER; note = 2'-Omethylcytosine
  modified_base 4: mod_base = OTHER; note = 2'-Omethyluridine
  modified_base 5: mod_base = OTHER; note = 2'-fluorocytosine
  modified_base 12: mod_base = OTHER; note = 2'-Omethylguanosine
  modified_base 15: mod_base = OTHER; note = Adenosine phosphorothiorate
  modified_base 16: mod_base = OTHER; note = 2'-Omethyluridine
  modified_base 17: mod_base = OTHER; note = 2'-Omethylguanosine
  modified_base 18: mod_base = OTHER; note = 2'-fluoroguanosine
  modified_base 22: mod_base = OTHER; note = 2'-Omethylguanosine
  modified_base 24: mod_base = OTHER; note = 2'-fluoroguanosine
  modified_base 25: mod_base = OTHER; note = 2'-Omethylcytosine
  modified_base 26: mod_base = OTHER; note = 2'-Omethyladenosine
  modified_base 28: mod_base = OTHER; note = 2'-fluorouridine phosphorothiorate
  modified_base 29: mod_base = OTHER; note = 2'-fluoroguanosine
  modified_base 30: mod_base = OTHER; note = 2'-fluoroguanosine
  modified_base 31: mod_base = OTHER; note = 2'-fluoroadenosine
  modified_base 32: mod_base = OTHER; note = 2'-fluorocytosine
  modified_base 34: mod_base = OTHER; note = Uridine phosphorothiorate
  modified_base 38: mod_base = OTHER; note = Adenosine phosphorothiorate
  modified_base 39: mod_base = OTHER; note = 2'-fluorouridine phosphorothiorate
  modified_base 40: mod_base = OTHER; note = 2'-Omethyluridine
  modified_base 45: mod_base = OTHER; note = 2'-Omethylguanosine
  modified_base 47: mod_base = OTHER; note = 2'-fluorouridine
  modified_base 49: mod_base = OTHER; note = Cytosine phosphorothiorate
  modified_base 50: mod_base = OTHER; note = 2'-fluorocytosine phosphorothiorate
  modified_base 56: mod_base = OTHER; note = Cytosine phosphorothiorate
  modified_base 57: mod_base = OTHER; note = 2'-fluoroguanosine
  modified_base 60: mod_base = OTHER; note = Uridine phosphorothiorate
  modified_base 61: mod_base = OTHER; note = 2'-Omethylcytosine
  modified_base 63: mod_base = OTHER; note = 2'-fluorocytosine
  modified_base 64: mod_base = OTHER; note = 2'-Omethylguanosine
  modified_base 68: mod_base = OTHER; note = 2'-Omethylguanosine
  modified_base 73: mod_base = OTHER; note = Guanosine phosphorothiorate
  modified_base 74: mod_base = OTHER; note = 2'-Omethylcytosine

SEQ ID NO: 7088 - RNA, 75 nt, synthetic construct; identical to SEQ ID NO: 3299
  source 1..75: mol_type = other RNA
  modified_base 1: mod_base = OTHER; note = Cytosine phosphorothiorate
  modified_base 3: mod_base = OTHER; note = 2'-fluorouridine
  modified_base 9: mod_base = OTHER; note = 2'-Omethylguanosine phosphorothiorate
  modified_base 15: mod_base = OTHER; note = 2'-Omethyluridine phosphorothiorate
  modified_base 20: mod_base = OTHER; note = 2'-fluoroadenosine
  modified_base 24: mod_base = OTHER; note = 2'-fluorocytosine phosphorothiorate
  modified_base 25: mod_base = OTHER; note = 2'-fluoroadenosine
  modified_base 29: mod_base = OTHER; note = 2'-Omethylguanosine phosphorothiorate
  modified_base 34: mod_base = OTHER; note = 2'-Omethyluridine phosphorothiorate
  modified_base 38: mod_base = OTHER; note = 2'-fluorouridine
  modified_base 41: mod_base = OTHER; note = 2'-fluoroguanosine phosphorothiorate
  modified_base 46: mod_base = OTHER; note = 2'-fluorouridine
  modified_base 47: mod_base = OTHER; note = Cytosine phosphorothiorate
  modified_base 48: mod_base = OTHER; note = 2'-fluorocytosine
  modified_base 56: mod_base = OTHER; note = 2'-fluoroadenosine
  modified_base 57: mod_base = OTHER; note = 2'-fluoroadenosine phosphorothiorate
  modified_base 74: mod_base = OTHER; note = 2'-Omethylcytosine

SEQ ID NO: 7089 - RNA, 75 nt, synthetic construct; identical to SEQ ID NO: 1045
  source 1..75: mol_type = other RNA
  modified_base 2: mod_base = OTHER; note = 2'-Omethylguanosine phosphorothiorate
  modified_base 5: mod_base = OTHER; note = 2'-fluorocytosine phosphorothiorate
  modified_base 6: mod_base = OTHER; note = 2'-fluorocytosine phosphorothiorate
  modified_base 15: mod_base = OTHER; note = 2'-Omethyladenosine
  modified_base 16: mod_base = OTHER; note = 2'-Omethyluridine
  modified_base 18: mod_base = OTHER; note = 2'-fluoroguanosine phosphorothiorate
  modified_base 19: mod_base = OTHER; note = 2'-Omethyluridine
  modified_base 30: mod_base = OTHER; note = 2'-Omethylguanosine phosphorothiorate
  modified_base 32: mod_base = OTHER; note = 2'-fluorocytosine phosphorothiorate
  modified_base 34: mod_base = OTHER; note = 2'-Omethyluridine phosphorothiorate
  modified_base 39: mod_base = OTHER; note = 2'-Omethyluridine
  modified_base 42: mod_base = OTHER; note = 2'-Omethyladenosine
  modified_base 44: mod_base = OTHER; note = 2'-fluorocytosine phosphorothiorate
  modified_base 45: mod_base = OTHER; note = 2'-Omethylguanosine
  modified_base 72: mod_base = OTHER; note = 2'-Omethyluridine
  modified_base 74: mod_base = OTHER; note = 2'-Omethylcytosine phosphorothiorate
  modified_base 75: mod_base = OTHER; note = 2'-Omethyladenosine

SEQ ID NO: 7090 - RNA, 86 nt, synthetic construct; identical to SEQ ID NO: 3290
  source 1..86: mol_type = other RNA
  modified_base 23: mod_base = OTHER; note = 2'-fluoroguanosine

SEQ ID NO: 7091 - RNA, 75 nt, synthetic construct; identical to SEQ ID NO: 1045
  source 1..75: mol_type = other RNA
  modified_base 1: mod_base = OTHER; note = 2'-Omethylguanosine phosphorothiorate
  modified_base 2: mod_base = OTHER; note = 2'-Omethylguanosine phosphorothiorate
  modified_base 9: mod_base = OTHER; note = Guanosine phosphorothiorate
  modified_base 10: mod_base = OTHER; note = Guanosine phosphorothiorate
  modified_base 11: mod_base = OTHER; note = 2'-fluorouridine
  modified_base 17: mod_base = OTHER; note = Guanosine phosphorothiorate
  modified_base 19: mod_base = OTHER; note = 2'-fluorouridine
  modified_base 23: mod_base = OTHER; note = Cytosine phosphorothiorate
  modified_base 37: mod_base = OTHER; note = 2'-fluoroadenosine
  modified_base 56: mod_base = OTHER; note = 2'-fluoroguanosine phosphorothiorate
  modified_base 59: mod_base = OTHER; note = 2'-fluorouridine
  modified_base 67: mod_base = OTHER; note = 2'-fluoroguanosine
  modified_base 73: mod_base = OTHER; note = Cytosine phosphorothiorate

SEQ ID NO: 7092 - RNA, 76 nt, synthetic construct; identical to SEQ ID NO: 625
  source 1..76: mol_type = other RNA
  modified_base 1: mod_base = OTHER; note = 2'-Omethylguanosine
  modified_base 2: mod_base = OTHER; note = 2'-Omethylguanosine
  modified_base 3: mod_base = OTHER; note = 2'-Omethylcytosine
  modified_base 4: mod_base = OTHER; note = 2'-Omethyluridine
  modified_base 5: mod_base = OTHER; note = 2'-Omethylcytosine
  modified_base 6: mod_base = OTHER; note = 2'-Omethylcytosine
  modified_base 10: mod_base = OTHER; note = 2'-Omethylguanosine
  modified_base 11: mod_base = OTHER; note = 2'-Omethylcytosine
  modified_base 12: mod_base = OTHER; note = Guanosine phosphorothiorate
  modified_base 13: mod_base = OTHER; note = 2'-Omethylcytosine
  modified_base 17: mod_base = OTHER; note = Guanosine phosphorothiorate
  modified_base 18: mod_base = OTHER; note = 2'-Omethylguanosine
  modified_base 20: mod_base = OTHER; note = 2'-Omethyluridine
  modified_base 22: mod_base = OTHER; note = 2'-Omethylguanosine
  modified_base 23: mod_base = OTHER; note = 2'-Omethylcytosine
  modified_base 24: mod_base = OTHER; note = 2'-Omethylguanosine
  modified_base 25: mod_base = OTHER; note = 2'-Omethylcytosine
  modified_base 29: mod_base = OTHER; note = 2'-Omethylguanosine
  modified_base 33: mod_base = OTHER; note = 2'-fluorouridine
  modified_base 35: mod_base = OTHER; note = Cytosine phosphorothiorate
  modified_base 37: mod_base = OTHER; note = Adenosine phosphorothiorate
  modified_base 38: mod_base = OTHER; note = Adenosine phosphorothiorate
  modified_base 41: mod_base = OTHER; note = 2'-fluorocytosine phosphorothiorate
  modified_base 43: mod_base = OTHER; note = 2'-Omethyladenosine
  modified_base 44: mod_base = OTHER; note = 2'-fluoroadenosine
  modified_base 45: mod_base = OTHER; note = 2'-O-(2-Methoxyethyl) guanosine
  modified_base 46: mod_base = OTHER; note = Guanosine phosphorothiorate
  modified_base 49: mod_base = OTHER; note = 2'-Omethylcytosine
  modified_base 50: mod_base = OTHER; note = 2'-Omethylcytosine
  modified_base 51: mod_base = OTHER; note = 2'-Omethylguanosine
  modified_base 52: mod_base = OTHER; note = 2'-Omethylguanosine
  modified_base 53: mod_base = OTHER; note = 2'-Omethylguanosine
  modified_base 54: mod_base = OTHER; note = Uridine phosphorothiorate
  modified_base 55: mod_base = OTHER; note = Uridine phosphorothiorate
  modified_base 56: mod_base = OTHER; note = 2'-Omethylcytosine
  modified_base 57: mod_base = OTHER; note = Guanosine phosphorothiorate
  modified_base 59: mod_base = OTHER; note = 2'-Omethylguanosine
  modified_base 61: mod_base = OTHER; note = 2'-Omethylcytosine
  modified_base 62: mod_base = OTHER; note = 2'-Omethylcytosine
  modified_base 63: mod_base = OTHER; note = 2'-fluorocytosine
  modified_base 64: mod_base = OTHER; note = 2'-Omethylguanosine
  modified_base 65: mod_base = OTHER; note = 2'-Omethylguanosine
  modified_base 66: mod_base = OTHER; note = 2'-Omethylcytosine
  modified_base 67: mod_base = OTHER; note = 2'-Omethylguanosine
  modified_base 68: mod_base = OTHER; note = 2'-Omethylguanosine
  modified_base 69: mod_base = OTHER; note = 2'-Omethyladenosine
  modified_base 70: mod_base = OTHER; note = 2'-fluoroguanosine
  modified_base 71: mod_base = OTHER; note = 2'-Omethyluridine
  modified_base 73: mod_base = OTHER; note = 2'-Omethylguanosine
  modified_base 75: mod_base = OTHER; note = 2'-fluorocytosine phosphorothiorate

SEQ ID NO: 7093 - RNA, 76 nt, synthetic construct; identical to SEQ ID NO: 3289
  source 1..76: mol_type = other RNA
  modified_base 18: mod_base = OTHER; note = 2'-Omethylguanosine
  modified_base 73: mod_base = OTHER; note = 2'-Omethylguanosine

SEQ ID NO: 7094 - RNA, 75 nt, synthetic construct; identical to SEQ ID NO: 3306
  source 1..75: mol_type = other RNA
  modified_base 1: mod_base = OTHER; note = 2'-Omethylguanosine phosphorothiorate
  modified_base 2: mod_base = OTHER; note = 2'-Omethyladenosine phosphorothiorate
  modified_base 3: mod_base = OTHER; note = 2'-Omethylcytosine
  modified_base 4: mod_base = OTHER; note = 2'-Omethylcytosine
  modified_base 5: mod_base = OTHER; note = 2'-Omethyluridine
  modified_base 6: mod_base = OTHER; note = 2'-Omethylcytosine
  modified_base 10: mod_base = OTHER; note = 2'-Omethylguanosine
  modified_base 11: mod_base = OTHER; note = 2'-Omethylcytosine
  modified_base 12: mod_base = OTHER; note = 2'-Omethylguanosine
  modified_base 13: mod_base = OTHER; note = 2'-Omethylcytosine
  modified_base 14: mod_base = OTHER; note = 2'-Omethyladenosine
  modified_base 15: mod_base = OTHER; note = 2'-fluoroadenosine
  modified_base 16: mod_base = OTHER; note = 2'-Omethylcytosine
  modified_base 17: mod_base = OTHER; note = 2'-Omethylguanosine
  modified_base 18: mod_base = OTHER; note = 2'-Omethylguanosine
  modified_base 19: mod_base = OTHER; note = 2'-fluorouridine
  modified_base 32: mod_base = OTHER; note = 2'-fluorouridine
  modified_base 34: mod_base = OTHER; note = Uridine phosphorothiorate
  modified_base 36: mod_base = OTHER; note = Guanosine phosphorothiorate
  modified_base 37: mod_base = OTHER; note = Adenosine phosphorothiorate
  modified_base 43: mod_base = OTHER; note = 2'-Omethyladenosine
  modified_base 44: mod_base = OTHER; note = 2'-Omethylguanosine
  modified_base 45: mod_base = OTHER; note = 2'-fluoroguanosine
  modified_base 46: mod_base = OTHER; note = 2'-fluorouridine
  modified_base 47: mod_base = OTHER; note = 2'-fluorouridine
  modified_base 55: mod_base = OTHER; note = 2'-Omethylcytosine
  modified_base 58: mod_base = OTHER; note = 2'-Omethyladenosine
  modified_base 60: mod_base = OTHER; note = 2'-Omethylcytosine
  modified_base 61: mod_base = OTHER; note = 2'-Omethyladenosine
  modified_base 62: mod_base = OTHER; note = 2'-fluorocytosine
  modified_base 63: mod_base = OTHER; note = 2'-Omethylguanosine
  modified_base 64: mod_base = OTHER; note = 2'-Omethyluridine
  modified_base 65: mod_base = OTHER; note = 2'-Omethylcytosine
  modified_base 66: mod_base = OTHER; note = 2'-Omethylguanosine
  modified_base 67: mod_base = OTHER; note = 2'-Omethylguanosine
  modified_base 72: mod_base = OTHER; note = 2'-Omethyladenosine

SEQ ID NO: 7095 - RNA, 86 nt, synthetic construct; identical to SEQ ID NO: 3290
  source 1..86: mol_type = other RNA
  modified_base 1: mod_base = OTHER; note = 2'-Omethyladenosine phosphorothiorate
  modified_base 2: mod_base = OTHER; note = 2'-Omethylcytosine

SEQ ID NO: 7096 - RNA, 76 nt, synthetic construct; identical to SEQ ID NO: 625
  source 1..76: mol_type = other RNA
  modified_base 1: mod_base = OTHER; note = 2'-Omethylguanosine phosphorothiorate
  modified_base 2: mod_base = OTHER; note = 2'-Omethylguanosine
  modified_base 3: mod_base = OTHER; note = 2'-fluorocytosine
  modified_base 8: mod_base = OTHER; note = Uridine phosphorothiorate
  modified_base 13: mod_base = OTHER; note = 2'-Omethylcytosine
  modified_base 15: mod_base = OTHER; note = 2'-Omethyladenosine phosphorothiorate
  modified_base 16: mod_base = OTHER; note = 2'-Omethyluridine
  modified_base 18: mod_base = OTHER; note = 2'-Omethylguanosine
  modified_base 20: mod_base = OTHER; note = 2'-Omethyluridine
  modified_base 22: mod_base = OTHER; note = 2'-Omethylguanosine
  modified_base 23: mod_base = OTHER; note = Cytosine phosphorothiorate
  modified_base 24: mod_base = OTHER; note = 2'-Omethylguanosine
  modified_base 25: mod_base = OTHER; note = 2'-Omethylcytosine
  modified_base 30: mod_base = OTHER; note = 2'-fluoroguanosine
  modified_base 31: mod_base = OTHER; note = 2'-Omethyladenosine
  modified_base 32: mod_base = OTHER; note = 2'-fluorocytosine
  modified_base 36: mod_base = OTHER; note = Adenosine phosphorothiorate
  modified_base 37: mod_base = OTHER; note = Adenosine phosphorothiorate
  modified_base 38: mod_base = OTHER; note = 2'-Omethyladenosine
  modified_base 39: mod_base = OTHER; note = 2'-fluorouridine
  modified_base 41: mod_base = OTHER; note = 2'-Omethylcytosine phosphorothiorate
  modified_base 43: mod_base = OTHER; note = 2'-fluoroadenosine
  modified_base 46: mod_base = OTHER; note = 2'-fluoroguanosine
  modified_base 48: mod_base = OTHER; note = 2'-fluorouridine
  modified_base 50: mod_base = OTHER; note = 2'-fluorocytosine
  modified_base 51: mod_base = OTHER; note = 2'-Omethylguanosine
  modified_base 52: mod_base = OTHER; note = 2'-fluoroguanosine phosphorothiorate
  modified_base 53: mod_base = OTHER; note = 2'-fluoroguanosine
  modified_base 57: mod_base = OTHER; note = 2'-fluoroguanosine phosphorothiorate
  modified_base 58: mod_base = OTHER; note = 2'-fluoroadenosine
  modified_base 59: mod_base = OTHER; note = 2'-Omethylguanosine phosphorothiorate
  modified_base 60: mod_base = OTHER; note = 2'-Omethyluridine
  modified_base 62: mod_base = OTHER; note = 2'-Omethylcytosine
  modified_base 63: mod_base = OTHER; note = 2'-fluorocytosine
  modified_base 66: mod_base = OTHER; note = 2'-Omethylcytosine phosphorothiorate
  modified_base 67: mod_base = OTHER; note = 2'-fluoroguanosine
  modified_base 68: mod_base = OTHER; note = 2'-Omethylguanosine
  modified_base 74: mod_base = OTHER; note = 2'-Omethylcytosine
  modified_base 75: mod_base = OTHER; note = 2'-Omethylcytosine

SEQ ID NO: 7097 - RNA, 75 nt, synthetic construct; identical to SEQ ID NO: 3311
  source 1..75: mol_type = other RNA
  modified_base 1: mod_base = OTHER; note = 2'-Omethylguanosine phosphorothiorate
  modified_base 2: mod_base = OTHER; note = 2'-Omethylguanosine phosphorothiorate
  modified_base 12: mod_base = OTHER; note = Guanosine phosphorothiorate
  modified_base 20: mod_base = OTHER; note = 2'-fluoroadenosine phosphorothiorate
  modified_base 21: mod_base = OTHER; note = 2'-fluoroadenosine
  modified_base 36: mod_base = OTHER; note = 2'-fluoroadenosine
  modified_base 40: mod_base = OTHER; note = 2'-Omethylcytosine
  modified_base 46: mod_base = OTHER; note = 2'-fluoroadenosine
  modified_base 59: mod_base = OTHER; note = 2'-fluorouridine
  modified_base 68: mod_base = OTHER; note = 2'-fluoroadenosine
  modified_base 74: mod_base = OTHER; note = Cytosine phosphorothiorate

SEQ ID NO: 7098 - RNA, 74 nt, synthetic construct; identical to SEQ ID NO: 766
  source 1..74: mol_type = other RNA
  modified_base 1: mod_base = OTHER; note = 2'-Omethylguanosine phosphorothiorate
  modified_base 2: mod_base = OTHER; note = 2'-Omethylguanosine phosphorothiorate
  modified_base 22: mod_base = OTHER; note = Guanosine phosphorothiorate
  modified_base 23: mod_base = OTHER; note = 2'-Omethylcytosine
  modified_base 66: mod_base = OTHER; note = Cytosine phosphorothiorate
  modified_base 67: mod_base = OTHER; note = 2'-Omethylguanosine
  modified_base 73: mod_base = OTHER; note = 2'-Omethylguanosine phosphorothiorate

SEQ ID NO: 7099 - RNA, 76 nt, synthetic construct; identical to SEQ ID NO: 3332
  source 1..76: mol_type = other RNA
  modified_base 1: mod_base = OTHER; note = 2'-Omethylguanosine
  modified_base 2: mod_base = OTHER; note = 2'-Omethylguanosine
  modified_base 3: mod_base = OTHER; note = 2'-Omethylcytosine
  modified_base 4: mod_base = OTHER; note = 2'-Omethylcytosine
  modified_base 5: mod_base = OTHER; note = 2'-Omethylcytosine
  modified_base 6: mod_base = OTHER; note = 2'-Omethylcytosine
  modified_base 14: mod_base = OTHER; note = 2'-Omethyladenosine
  modified_base 15: mod_base = OTHER; note = 2'-Omethyladenosine
  modified_base 16: mod_base = OTHER; note = 2'-Omethyluridine
  modified_base 17: mod_base = OTHER; note = 2'-Omethylguanosine
  modified_base 18: mod_base = OTHER; note = 2'-Omethylguanosine
  modified_base 20: mod_base = OTHER; note = 2'-Omethyluridine
  modified_base 25: mod_base = OTHER; note = 2'-Omethylcytosine
  modified_base 33: mod_base = OTHER; note = 2'-fluorouridine
  modified_base 35: mod_base = OTHER; note = Cytosine phosphorothiorate
  modified_base 37: mod_base = OTHER; note = Adenosine phosphorothiorate
  modified_base 38: mod_base = OTHER; note = Adenosine phosphorothiorate
  modified_base 41: mod_base = OTHER; note = 2'-fluorocytosine
  modified_base 42: mod_base = OTHER; note = 2'-Omethyladenosine
  modified_base 43: mod_base = OTHER; note = 2'-Omethyladenosine
  modified_base 44: mod_base = OTHER; note = 2'-fluoroadenosine
  modified_base 49: mod_base = OTHER; note = 2'-Omethylguanosine
  modified_base 50: mod_base = OTHER; note = 2'-Omethylcytosine
  modified_base 52: mod_base = OTHER; note = 2'-Omethylguanosine
  modified_base 54: mod_base = OTHER; note = 2'-Omethyluridine
  modified_base 55: mod_base = OTHER; note = Uridine phosphorothiorate
  modified_base 56: mod_base = OTHER; note = 2'-Omethylcytosine
  modified_base 57: mod_base = OTHER; note = 2'-fluoroguanosine
  modified_base 59: mod_base = OTHER; note = 2'-Omethylguanosine
  modified_base 61: mod_base = OTHER; note = 2'-Omethylcytosine
  modified_base 62: mod_base = OTHER; note = 2'-Omethylcytosine
  modified_base 63: mod_base = OTHER; note = 2'-fluorocytosine
  modified_base 64: mod_base = OTHER; note = 2'-Omethylguanosine
  modified_base 65: mod_base = OTHER; note = 2'-Omethylcytosine
  modified_base 73: mod_base = OTHER; note = 2'-Omethylguanosine

SEQ ID NO: 7100 - RNA, 76 nt, synthetic construct; identical to SEQ ID NO: 625
  source 1..76: mol_type = other RNA
  modified_base 2: mod_base = OTHER; note = 2'-fluoroguanosine
  modified_base 3: mod_base = OTHER; note = Cytosine phosphorothiorate
  modified_base 4: mod_base = OTHER; note = 2'-fluorouridine
  modified_base 5: mod_base = OTHER; note = 2'-fluorocytosine
  modified_base 9: mod_base = OTHER; note = Guanosine phosphorothiorate
  modified_base 10: mod_base = OTHER; note = 2'-Omethylguanosine
  modified_base 13: mod_base = OTHER; note = 2'-fluorocytosine phosphorothiorate
  modified_base 14: mod_base = OTHER; note = 2'-Omethyladenosine
  modified_base 16: mod_base = OTHER; note = 2'-fluorouridine
  modified_base 17: mod_base = OTHER; note = 2'-Omethylguanosine
  modified_base 23: mod_base = OTHER; note = 2'-fluorocytosine
  modified_base 24: mod_base = OTHER; note = 2'-fluoroguanosine
  modified_base 25: mod_base = OTHER; note = 2'-fluorocytosine
  modified_base 27: mod_base = OTHER; note = 2'-Omethyluridine
  modified_base 29: mod_base = OTHER; note = 2'-fluoroguanosine
  modified_base 30: mod_base = OTHER; note = Guanosine phosphorothiorate
  modified_base 31: mod_base = OTHER; note = 2'-Omethyladenosine
  modified_base 34: mod_base = OTHER; note = 2'-Omethyluridine
  modified_base 39: mod_base = OTHER; note = 2'-Omethyluridine
  modified_base 40: mod_base = OTHER; note = 2'-fluorouridine
  modified_base 44: mod_base = OTHER; note = 2'-fluoroadenosine
  modified_base 45: mod_base = OTHER; note = 2'-fluoroguanosine
  modified_base 48: mod_base = OTHER; note = 2'-fluorouridine
  modified_base 49: mod_base = OTHER; note = Cytosine phosphorothiorate
  modified_base 53: mod_base = OTHER; note = Guanosine phosphorothiorate
  modified_base 54: mod_base = OTHER; note = 2'-Omethyluridine phosphorothiorate
  modified_base 59: mod_base = OTHER; note = 2'-Omethylguanosine
  modified_base 60: mod_base = OTHER; note = 2'-Omethyluridine
  modified_base 62: mod_base = OTHER; note = 2'-fluorocytosine
  modified_base 64: mod_base = OTHER; note = Guanosine phosphorothiorate
  modified_base 65: mod_base = OTHER; note = 2'-fluoroguanosine
  modified_base 67: mod_base = OTHER; note = 2'-fluoroguanosine
  modified_base 69: mod_base = OTHER; note = 2'-fluoroadenosine phosphorothiorate
  modified_base 74: mod_base = OTHER; note = 2'-Omethylcytosine

SEQ ID NO: 7101 - RNA, 76 nt, synthetic construct; identical to SEQ ID NO: 625
  source 1..76: mol_type = other RNA
  modified_base 1: mod_base = OTHER; note = 2'-fluoroguanosine
  modified_base 2: mod_base = OTHER; note = Guanosine phosphorothiorate
  modified_base 5: mod_base = OTHER; note = 2'-Omethylcytosine
  modified_base 10: mod_base = OTHER; note = 2'-Omethylguanosine
  modified_base 12: mod_base = OTHER; note = 2'-Omethylguanosine
  modified_base 14: mod_base = OTHER; note = 2'-Omethyladenosine
  modified_base 16: mod_base = OTHER; note = 2'-fluorouridine
  modified_base 23: mod_base = OTHER; note = 2'-fluorocytosine
  modified_base 25: mod_base = OTHER; note = 2'-Omethylcytosine
  modified_base 26: mod_base = OTHER; note = 2'-fluoroadenosine
  modified_base 30: mod_base = OTHER; note = 2'-fluoroguanosine phosphorothiorate
  modified_base 31: mod_base = OTHER; note = 2'-fluoroadenosine
  modified_base 34: mod_base = OTHER; note = Uridine phosphorothiorate
  modified_base 39: mod_base = OTHER; note = 2'-Omethyluridine
  modified_base 40: mod_base = OTHER; note = 2'-fluorouridine
  modified_base 42: mod_base = OTHER; note = 2'-Omethyladenosine
  modified_base 49: mod_base = OTHER; note = 2'-fluorocytosine
  modified_base 51: mod_base = OTHER; note = 2'-Omethylguanosine
  modified_base 54: mod_base = OTHER; note = 2'-Omethyluridine
  modified_base 57: mod_base = OTHER; note = Guanosine phosphorothiorate
  modified_base 58: mod_base = OTHER; note = 2'-fluoroadenosine
  modified_base 59: mod_base = OTHER; note = 2'-fluoroguanosine phosphorothiorate
  modified_base 60: mod_base = OTHER; note = 2'-fluorouridine phosphorothiorate
  modified_base 61: mod_base = OTHER; note = 2'-Omethylcytosine
  modified_base 62: mod_base = OTHER; note = 2'-fluorocytosine phosphorothiorate
  modified_base 63: mod_base = OTHER; note = 2'-fluorocytosine
  modified_base 67: mod_base = OTHER; note = 2'-Omethylguanosine
  modified_base 70: mod_base = OTHER; note = Guanosine phosphorothiorate
  modified_base 72: mod_base = OTHER; note = Cytosine phosphorothiorate
  modified_base 73: mod_base = OTHER; note = 2'-fluoroguanosine
  modified_base 74: mod_base = OTHER; note = 2'-fluorocytosine
  modified_base 75: mod_base = OTHER; note = 2'-Omethylcytosine
  modified_base 76: mod_base = OTHER; note = 2'-Omethyladenosine

SEQ ID NO: 7102 - RNA, 76 nt, synthetic construct; identical to SEQ ID NO: 3342
  source 1..76: mol_type = other RNA
  modified_base 1: mod_base = OTHER; note = 2'-Omethylguanosine phosphorothiorate
  modified_base 2: mod_base = OTHER; note = 2'-Omethylguanosine
  modified_base 3: mod_base = OTHER; note = 2'-Omethylcytosine
  modified_base 4: mod_base = OTHER; note = 2'-Omethyluridine
  modified_base 5: mod_base = OTHER; note = 2'-Omethylcytosine
  modified_base 6: mod_base = OTHER; note = 2'-Omethylcytosine
  modified_base 27: mod_base = OTHER; note = 2'-Omethyluridine
  modified_base 28: mod_base = OTHER; note = 2'-Omethylcytosine
  modified_base 29: mod_base = OTHER; note = 2'-fluoroguanosine
  modified_base 30: mod_base = OTHER; note = 2'-Omethylguanosine
  modified_base 40: mod_base = OTHER; note = 2'-fluorouridine
  modified_base 41: mod_base = OTHER; note = 2'-Omethylcytosine
  modified_base 42: mod_base = OTHER; note = 2'-Omethylguanosine
  modified_base 43: mod_base = OTHER; note = 2'-Omethyladenosine
  modified_base 73: mod_base = OTHER; note = 2'-Omethylguanosine

SEQ ID NO: 7103 - RNA, 75 nt, synthetic construct; identical to SEQ ID NO: 3299
  source 1..75: mol_type = other RNA
  modified_base 2: mod_base = OTHER; note = 2'-Omethylcytosine phosphorothiorate
  modified_base 11: mod_base = OTHER; note = Uridine phosphorothiorate
  modified_base 19: mod_base = OTHER; note = 2'-fluorouridine
  modified_base 20: mod_base = OTHER; note = 2'-fluoroadenosine
  modified_base 36: mod_base = OTHER; note = 2'-fluoroadenosine
  modified_base 48: mod_base = OTHER; note = Cytosine phosphorothiorate
  modified_base 63: mod_base = OTHER; note = 2'-fluorouridine
  modified_base 73: mod_base = OTHER; note = Cytosine phosphorothiorate
  modified_base 74: mod_base = OTHER; note = 2'-Omethylcytosine

SEQ ID NO: 7104 - RNA, 76 nt, synthetic construct; identical to SEQ ID NO: 3318
  source 1..76: mol_type = other RNA
  modified_base 10: mod_base = OTHER; note = 2'-Omethylguanosine
  modified_base 11: mod_base = OTHER; note = 2'-Omethylcytosine
  modified_base 12: mod_base = OTHER; note = 2'-Omethyluridine
  modified_base 13: mod_base = OTHER; note = 2'-Omethylcytosine
  modified_base 49: mod_base = OTHER; note = 2'-Omethylguanosine
  modified_base 50: mod_base = OTHER; note = 2'-Omethylcytosine
  modified_base 51: mod_base = OTHER; note = 2'-Omethyluridine
  modified_base 52: mod_base = OTHER; note = 2'-Omethylguanosine
  modified_base 53: mod_base = OTHER; note = 2'-Omethylguanosine
  modified_base 73: mod_base = OTHER; note = 2'-Omethyladenosine

SEQ ID NO: 7105 - RNA, 76 nt, synthetic construct; identical to SEQ ID NO: 625
  source 1..76: mol_type = other RNA
  modified_base 1: mod_base = OTHER; note = 2'-Omethylguanosine
  modified_base 5: mod_base = OTHER; note = 2'-Omethylcytosine
  modified_base 10: mod_base = OTHER; note = 2'-fluoroguanosine
  modified_base 11: mod_base = OTHER; note = Cytosine phosphorothiorate
  modified_base 12: mod_base = OTHER; note = 2'-Omethylguanosine
  modified_base 14: mod_base = OTHER; note = 2'-fluoroadenosine
  modified_base 16: mod_base = OTHER; note = 2'-Omethyluridine
  modified_base 17: mod_base = OTHER; note = 2'-Omethylguanosine
  modified_base 18: mod_base = OTHER; note = 2'-fluoroguanosine
  modified_base 20: mod_base = OTHER; note = Uridine phosphorothiorate
  modified_base 21: mod_base = OTHER; note = Adenosine phosphorothiorate
  modified_base 22: mod_base = OTHER; note = 2'-Omethylguanosine
  modified_base 23: mod_base = OTHER; note = 2'-fluorocytosine
  modified_base 24: mod_base = OTHER; note = Guanosine phosphorothiorate
  modified_base 26: mod_base = OTHER; note = 2'-fluoroadenosine
  modified_base 27: mod_base = OTHER; note = 2'-fluorouridine
  modified_base 28: mod_base = OTHER; note = Uridine phosphorothiorate
  modified_base 29: mod_base = OTHER; note = 2'-fluoroguanosine
  modified_base 30: mod_base = OTHER; note = Guanosine phosphorothiorate
  modified_base 31: mod_base = OTHER; note = 2'-Omethyladenosine
  modified_base 34: mod_base = OTHER; note = 2'-fluorouridine
  modified_base 37: mod_base = OTHER; note = Adenosine phosphorothiorate
  modified_base 42: mod_base = OTHER; note = 2'-fluoroadenosine
  modified_base 43: mod_base = OTHER; note = 2'-Omethyladenosine
  modified_base 44: mod_base = OTHER; note = 2'-fluoroadenosine
  modified_base 49: mod_base = OTHER; note = 2'-fluorocytosine
  modified_base 54: mod_base = OTHER; note = 2'-Omethyluridine
  modified_base 55: mod_base = OTHER; note = Uridine phosphorothiorate
  modified_base 56: mod_base = OTHER; note = 2'-fluorocytosine
  modified_base 60: mod_base = OTHER; note = 2'-fluorouridine
  modified_base 63: mod_base = OTHER; note = 2'-Omethylcytosine phosphorothiorate
  modified_base 64: mod_base = OTHER; note = 2'-fluoroguanosine phosphorothiorate
  modified_base 65: mod_base = OTHER; note = 2'-fluoroguanosine
  modified_base 68: mod_base = OTHER; note = 2'-fluoroguanosine
  modified_base 69: mod_base = OTHER; note = 2'-Omethyladenosine phosphorothiorate
  modified_base 70: mod_base = OTHER; note = 2'-fluoroguanosine phosphorothiorate
  modified_base 71: mod_base = OTHER; note = 2'-Omethyluridine
  modified_base 72: mod_base = OTHER; note = 2'-fluorocytosine

SEQ ID NO: 7106 - RNA, 76 nt, synthetic construct
  source 1..76: mol_type = other RNA
ggcgccgtggcgcaatggagagcgcattggacttcaaattcaaaggttccgggttcgagtcccggcggcgtcgcca

SEQ ID NO: 7107 - RNA, 76 nt, synthetic construct; identical to SEQ ID NO: 3795
  source 1..76: mol_type = other RNA
  modified_base 1: mod_base = OTHER; note = 2'-Omethylguanosine
  modified_base 14: mod_base = OTHER; note = 2'-Omethyladenosine
  modified_base 15: mod_base = OTHER; note = 2'-Omethyladenosine
  modified_base 16: mod_base = OTHER; note = 2'-Omethyluridine
  modified_base 17: mod_base = OTHER; note = 2'-Omethylguanosine
  modified_base 18: mod_base = OTHER; note = 2'-Omethylguanosine
  modified_base 19: mod_base = OTHER; note = Adenosine phosphorothiorate
  modified_base 20: mod_base = OTHER; note = 2'-Omethyluridine
  modified_base 21: mod_base = OTHER; note = Adenosine phosphorothiorate
  modified_base 33: mod_base = OTHER; note = 2'-fluorouridine
  modified_base 34: mod_base = OTHER; note = 2'-Omethyluridine
  modified_base 35: mod_base = OTHER; note = Cytosine phosphorothiorate
  modified_base 37: mod_base = OTHER; note = Adenosine phosphorothiorate
  modified_base 38: mod_base = OTHER; note = Adenosine phosphorothiorate
  modified_base 41: mod_base = OTHER; note = 2'-Omethylcytosine
  modified_base 42: mod_base = OTHER; note = 2'-Omethylguanosine
  modified_base 43: mod_base = OTHER; note = 2'-Omethylguanosine
  modified_base 44: mod_base = OTHER; note = 2'-Omethylguanosine
  modified_base 50: mod_base = OTHER; note = 2'-Omethylcytosine
  modified_base 52: mod_base = OTHER; note = 2'-Omethylguanosine
  modified_base 73: mod_base = OTHER; note = 2'-Omethylguanosine

SEQ ID NO: 7108 - RNA, 76 nt, synthetic construct; identical to SEQ ID NO: 3289
  source 1..76: mol_type = other RNA
  modified_base 1: mod_base = OTHER; note = 2'-Omethylguanosine
  modified_base 16: mod_base = OTHER; note = 2'-Omethyluridine
  modified_base 18: mod_base = OTHER; note = 2'-Omethylguanosine
  modified_base 19: mod_base = OTHER; note = 2'-Omethylguanosine
  modified_base 54: mod_base = OTHER; note = 2'-Omethyluridine phosphorothiorate
  modified_base 55: mod_base = OTHER; note = Uridine phosphorothiorate
  modified_base 56: mod_base = OTHER; note = 2'-Omethylcytosine
  modified_base 59: mod_base = OTHER; note = 2'-Omethylguanosine
  modified_base 73: mod_base = OTHER; note = 2'-Omethylguanosine

SEQ ID NO: 7109 - RNA, 76 nt, synthetic construct; identical to SEQ ID NO: 625
  source 1..76: mol_type = other RNA
  modified_base 6: mod_base = OTHER; note = 2'-fluorocytosine phosphorothiorate
  modified_base 12: mod_base = OTHER; note = 2'-Omethylguanosine phosphorothiorate
  modified_base 20: mod_base = OTHER; note = 2'-Omethyluridine
  modified_base 22: mod_base = OTHER; note = 2'-Omethylguanosine
  modified_base 26: mod_base = OTHER; note = 2'-fluoroadenosine
  modified_base 28: mod_base = OTHER; note = 2'-Omethyluridine phosphorothiorate
  modified_base 30: mod_base = OTHER; note = 2'-Omethylguanosine
  modified_base 31: mod_base = OTHER; note = 2'-Omethyladenosine
  modified_base 33: mod_base = OTHER; note = Uridine phosphorothiorate
  modified_base 34: mod_base = OTHER; note = 2'-Omethyluridine phosphorothiorate
  modified_base 36: mod_base = OTHER; note = Adenosine phosphorothiorate
  modified_base 39: mod_base = OTHER; note = Uridine phosphorothiorate
  modified_base 40: mod_base = OTHER; note = 2'-fluorouridine
  modified_base 41: mod_base = OTHER; note = Cytosine phosphorothiorate
  modified_base 44: mod_base = OTHER; note = 2'-fluoroadenosine
  modified_base 51: mod_base = OTHER; note = 2'-Omethylguanosine
  modified_base 53: mod_base = OTHER; note = Guanosine phosphorothiorate
  modified_base 56: mod_base = OTHER; note = 2'-fluorocytosine
  modified_base 57: mod_base = OTHER; note = Guanosine phosphorothiorate
  modified_base 58: mod_base = OTHER; note = 2'-fluoroadenosine
  modified_base 59: mod_base = OTHER; note = Guanosine phosphorothiorate
  modified_base 60: mod_base = OTHER; note = 2'-fluorouridine
  modified_base 62: mod_base = OTHER; note = 2'-Omethylcytosine
  modified_base 63: mod_base = OTHER; note = Cytosine phosphorothiorate
  modified_base 64: mod_base = OTHER; note = 2'-fluoroguanosine
  modified_base 66: mod_base = OTHER; note = 2'-Omethylcytosine
  modified_base 71: mod_base = OTHER; note = Uridine phosphorothiorate
  modified_base 72: mod_base = OTHER; note = 2'-fluorocytosine
  modified_base 73: mod_base = OTHER; note = Guanosine phosphorothiorate

SEQ ID NO: 7110 - RNA, 76 nt, synthetic construct; identical to SEQ ID NO: 625
  source 1..76: mol_type = other RNA
  modified_base 1: mod_base = OTHER; note = 2'-fluoroguanosine
  modified_base 3: mod_base = OTHER; note = Cytosine phosphorothiorate
  modified_base 6: mod_base = OTHER; note = Cytosine phosphorothiorate
  modified_base 10: mod_base = OTHER; note = Guanosine phosphorothiorate
  modified_base 13: mod_base = OTHER; note = 2'-Omethylcytosine phosphorothiorate
  modified_base 14: mod_base = OTHER; note = 2'-Omethyladenosine
  modified_base 20: mod_base = OTHER; note = 2'-fluorouridine
  modified_base 22: mod_base = OTHER; note = Guanosine phosphorothiorate
  modified_base 23: mod_base = OTHER; note = 2'-Omethylcytosine
  modified_base 26: mod_base = OTHER; note = Adenosine phosphorothiorate
  modified_base 27: mod_base = OTHER; note = 2'-fluorouridine
  modified_base 29: mod_base = OTHER; note = Guanosine phosphorothiorate
  modified_base 30: mod_base = OTHER; note = 2'-fluoroguanosine
  modified_base 32: mod_base = OTHER; note = 2'-fluorocytosine
  modified_base 34: mod_base = OTHER; note = 2'-Omethyluridine
  modified_base 39: mod_base = OTHER; note = 2'-fluorouridine
  modified_base 40: mod_base = OTHER; note = 2'-Omethyluridine
  modified_base 41: mod_base = OTHER; note = 2'-Omethylcytosine
  modified_base 42: mod_base = OTHER; note = 2'-fluoroadenosine
  modified_base 43: mod_base = OTHER; note = 2'-Omethyladenosine phosphorothiorate
  modified_base 44: mod_base = OTHER; note = 2'-fluoroadenosine phosphorothiorate
  modified_base 45: mod_base = OTHER; note = 2'-Omethylguanosine
  modified_base 46: mod_base = OTHER; note = 2'-Omethylguanosine
  modified_base 47: mod_base = OTHER; note = 2'-fluorouridine
  modified_base 48: mod_base = OTHER; note = 2'-fluorouridine
  modified_base 49: mod_base = OTHER; note = 2'-Omethylcytosine
  modified_base 51: mod_base = OTHER; note = 2'-Omethylguanosine phosphorothiorate
  modified_base 52: mod_base = OTHER; note = 2'-fluoroguanosine phosphorothiorate
  modified_base 59: mod_base = OTHER; note = Guanosine phosphorothiorate
  modified_base 60: mod_base = OTHER; note = 2'-Omethyluridine phosphorothiorate
  modified_base 65: mod_base = OTHER; note = 2'-fluoroguanosine
  modified_base 66: mod_base = OTHER; note = Cytosine phosphorothiorate
  modified_base 67: mod_base = OTHER; note = 2'-Omethylguanosine
  modified_base 73: mod_base = OTHER; note = 2'-fluoroguanosine
  modified_base 74: mod_base = OTHER; note = 2'-fluorocytosine
  modified_base 75: mod_base = OTHER; note = Cytosine phosphorothiorate

SEQ ID NO: 7111 - RNA, 85 nt, synthetic construct; identical to SEQ ID NO: 3297
  source 1..85: mol_type = other RNA
  modified_base 1: mod_base = OTHER; note = 2'-Omethylguanosine phosphorothiorate
  modified_base 2: mod_base = OTHER; note = 2'-Omethylcytosine phosphorothiorate
  modified_base 68: mod_base = OTHER; note = 2'-Omethyladenosine
  modified_base 84: mod_base = OTHER; note = Cytosine phosphorothiorate
  modified_base 85: mod_base = OTHER; note = 2'-Omethyladenosine

SEQ ID NO: 7112 - RNA, 86 nt, synthetic construct; identical to SEQ ID NO: 3290
  source 1..86: mol_type = other RNA
  modified_base 1: mod_base = OTHER; note = 2'-Omethyladenosine
  modified_base 10: mod_base = OTHER; note = 2'-Omethylguanosine
  modified_base 11: mod_base = OTHER; note = 2'-Omethylcytosine
  modified_base 12: mod_base = OTHER; note = 2'-Omethylcytosine
  modified_base 13: mod_base = OTHER; note = 2'-Omethylguanosine
  modified_base 14: mod_base = OTHER; note = 2'-Omethyladenosine
  modified_base 15: mod_base = OTHER; note = 2'-Omethylguanosine
  modified_base 16: mod_base = OTHER; note = 2'-Omethyluridine
  modified_base 17: mod_base = OTHER; note = 2'-Omethylguanosine
  modified_base 18: mod_base = OTHER; note = 2'-Omethylguanosine
  modified_base 19: mod_base = OTHER; note = Uridine phosphorothiorate
  modified_base 20: mod_base = OTHER; note = 2'-Omethyluridine
  modified_base 21: mod_base = OTHER; note = Adenosine phosphorothiorate
  modified_base 22: mod_base = OTHER; note = 2'-Omethyladenosine
  modified_base 23: mod_base = OTHER; note = 2'-Omethylguanosine
  modified_base 24: mod_base = OTHER; note = 2'-Omethylguanosine
  modified_base 25: mod_base = OTHER; note = 2'-Omethylcytosine
  modified_base 33: mod_base = OTHER; note = Uridine phosphorothiorate
  modified_base 34: mod_base = OTHER; note = 2'-Omethyluridine
  modified_base 35: mod_base = OTHER; note = Cytosine phosphorothiorate
  modified_base 37: mod_base = OTHER; note = Guanosine phosphorothiorate
  modified_base 38: mod_base = OTHER; note = Adenosine phosphorothiorate
  modified_base 41: mod_base = OTHER; note = 2'-fluorocytosine
  modified_base 42: mod_base = OTHER; note = 2'-Omethyladenosine
  modified_base 43: mod_base = OTHER; note = 2'-Omethyladenosine
  modified_base 44: mod_base = OTHER; note = 2'-fluorouridine
  modified_base 59: mod_base = OTHER; note = 2'-Omethylguanosine
  modified_base 60: mod_base = OTHER; note = 2'-Omethyluridine
  modified_base 62: mod_base = OTHER; note = 2'-Omethylguanosine
  modified_base 64: mod_base = OTHER; note = Uridine phosphorothiorate
  modified_base 65: mod_base = OTHER; note = Uridine phosphorothiorate
  modified_base 71: mod_base = OTHER; note = 2'-Omethylcytosine
  modified_base 75: mod_base = OTHER; note = 2'-Omethylcytosine
  modified_base 83: mod_base = OTHER; note = 2'-Omethyladenosine

SEQ ID NO: 7113 - RNA, 76 nt, synthetic construct; identical to SEQ ID NO: 3295
  source 1..76: mol_type = other RNA
  modified_base 1: mod_base = OTHER; note = 2'-Omethylcytosine phosphorothiorate
  modified_base 3: mod_base = OTHER; note = 2'-fluorouridine
  modified_base 14: mod_base = OTHER; note = 2'-fluoroadenosine phosphorothiorate
  modified_base 17: mod_base = OTHER; note = 2'-fluorouridine phosphorothiorate
  modified_base 20: mod_base = OTHER; note = 2'-Omethyluridine
  modified_base 31: mod_base = OTHER; note = 2'-fluoroadenosine
  modified_base 43: mod_base = OTHER; note = 2'-Omethyluridine phosphorothiorate
  modified_base 50: mod_base = OTHER; note = 2'-fluorocytosine phosphorothiorate
  modified_base 57: mod_base = OTHER; note = Guanosine phosphorothiorate
  modified_base 75: mod_base = OTHER; note = 2'-fluorocytosine
  modified_base 76: mod_base = OTHER; note = 2'-Omethyladenosine

SEQ ID NO: 7114 - RNA, 76 nt, synthetic construct; identical to SEQ ID NO: 3342
  source 1..76: mol_type = other RNA
  modified_base 1: mod_base = OTHER; note = 2'-Omethylguanosine phosphorothiorate
  modified_base 2: mod_base = OTHER; note = 2'-Omethylguanosine phosphorothiorate
  modified_base 3: mod_base = OTHER; note = 2'-Omethylcytosine
  modified_base 4: mod_base = OTHER; note = 2'-Omethyluridine
  modified_base 5: mod_base = OTHER; note = 2'-Omethylcytosine
  modified_base 6: mod_base = OTHER; note = 2'-Omethylcytosine
  modified_base 10: mod_base = OTHER; note = 2'-Omethylguanosine
  modified_base 11: mod_base = OTHER; note = 2'-Omethylcytosine
  modified_base 12: mod_base = OTHER; note = 2'-Omethylguanosine
  modified_base 13: mod_base = OTHER; note = 2'-Omethylcytosine
  modified_base 17: mod_base = OTHER; note = 2'-Omethylguanosine
  modified_base 18: mod_base = OTHER; note = 2'-Omethylguanosine
  modified_base 22: mod_base = OTHER; note = 2'-Omethylguanosine
  modified_base 23: mod_base = OTHER; note = 2'-Omethylcytosine
  modified_base 24: mod_base = OTHER; note = 2'-Omethylguanosine
  modified_base 25: mod_base = OTHER; note = 2'-Omethylcytosine
  modified_base 33: mod_base = OTHER; note = 2'-fluorouridine
  modified_base 35: mod_base = OTHER; note = Cytosine phosphorothiorate
  modified_base 37: mod_base = OTHER; note = Adenosine phosphorothiorate
  modified_base 38: mod_base = OTHER; note = Adenosine phosphorothiorate
  modified_base 41: mod_base = OTHER; note = 2'-fluorocytosine
  modified_base 42: mod_base = OTHER; note = 2'-Omethylguanosine
  modified_base 43: mod_base = OTHER; note = 2'-Omethyladenosine
  modified_base 44: mod_base = OTHER; note = 2'-fluoroadenosine
  modified_base 49: mod_base = OTHER; note = 2'-Omethylcytosine
  modified_base 50: mod_base = OTHER; note = 2'-Omethylcytosine
  modified_base 51: mod_base = OTHER; note = 2'-Omethylguanosine
  modified_base 52: mod_base = OTHER; note = 2'-Omethylguanosine
  modified_base 53: mod_base = OTHER; note = 2'-Omethylguanosine
  modified_base 54: mod_base = OTHER; note = Uridine phosphorothiorate
  modified_base 55: mod_base = OTHER; note = Uridine phosphorothiorate
  modified_base 61: mod_base = OTHER; note = 2'-Omethylcytosine
  modified_base 62: mod_base = OTHER; note = 2'-Omethylcytosine
  modified_base 63: mod_base = OTHER; note = 2'-fluorocytosine
  modified_base 64: mod_base = OTHER; note = 2'-Omethylguanosine
  modified_base 65: mod_base = OTHER; note = 2'-Omethylguanosine
  modified_base 66: mod_base = OTHER; note = 2'-Omethylcytosine
  modified_base 67: mod_base = OTHER; note = 2'-Omethylguanosine
  modified_base 68: mod_base = OTHER; note = 2'-Omethylguanosine
  modified_base 73: mod_base = OTHER; note = 2'-Omethylguanosine

SEQ ID NO: 7115 - DNA, 76 bp, synthetic construct; identical to SEQ ID NO: 1924
  source 1..76: mol_type = other DNA
  modified_base 1: mod_base = OTHER; note = 2'-Omethylguanosine phosphorothiorate
  modified_base 2: mod_base = OTHER; note = 2'-Omethylguanosine
  modified_base 37: mod_base = OTHER; note = Adenosine phosphorothiorate
  modified_base 50: mod_base = OTHER; note = 2'-O-(2-Methoxyethyl) 5-methylcytosine
  modified_base 52: mod_base = OTHER; note = 2'-O-(2-Methoxyethyl) guanosine
  modified_base 55: mod_base = OTHER; note = Uridine phosphorothiorate
  modified_base 56: mod_base = OTHER; note = 2'-fluorocytosine
  modified_base 58: mod_base = OTHER; note = Adenosine phosphorothiorate
  modified_base 74: mod_base = OTHER; note = Cytosine phosphorothiorate
  modified_base 75: mod_base = OTHER; note = 2'-Omethylcytosine phosphorothiorate
  modified_base 76: mod_base = OTHER; note = 2'-Omethyladenosine
  misc_feature 1..63: note = RNA
  misc_feature 64: note = DNA
  misc_feature 65..76: note = RNA

SEQ ID NO: 7116 - DNA, 76 bp, synthetic construct; identical to SEQ ID NO: 1924
  source 1..76: mol_type = other DNA
  modified_base 1: mod_base = OTHER; note = 2'-Omethylguanosine phosphorothiorate
  modified_base 2: mod_base = OTHER; note = 2'-Omethylguanosine
  modified_base 3: mod_base = OTHER; note = Cytosine phosphorothiorate
  modified_base 5: mod_base = OTHER; note = 2'-Omethylcytosine
  modified_base 11: mod_base = OTHER; note = Cytosine phosphorothiorate
  modified_base 15: mod_base = OTHER; note = Adenosine phosphorothiorate
  modified_base 16: mod_base = OTHER; note = 2'-fluorouridine
  modified_base 17: mod_base = OTHER; note = 2'-O-(2-Methoxyethyl) guanosine
  modified_base 18: mod_base = OTHER; note = Guanosine phosphorothiorate
  modified_base 19: mod_base = OTHER; note = 2'-fluoroadenosine
  modified_base 23: mod_base = OTHER; note = Cytosine phosphorothiorate
  modified_base 26: mod_base = OTHER; note = Adenosine phosphorothiorate
  modified_base 27: mod_base = OTHER; note = 2'-O-(2-Methoxyethyl) thymine
  modified_base 29: mod_base = OTHER; note = 2'-fluoroguanosine
  modified_base 34: mod_base = OTHER; note = Uridine phosphorothiorate
  modified_base 38: mod_base = OTHER; note = 2'-O-(2-Methoxyethyl) adenosine
  modified_base 39: mod_base = OTHER; note = 2'-O-(2-Methoxyethyl) thymine phosphorothiorate
  modified_base 41: mod_base = OTHER; note = 2'-fluorocytosine
  modified_base 42: mod_base = OTHER; note = 2'-fluoroadenosine
  modified_base 46: mod_base = OTHER; note = 2'-O-(2-Methoxyethyl) guanosine
  modified_base 48: mod_base = OTHER; note = 2'-Omethyluridine
  modified_base 49: mod_base = OTHER; note = 2'-O-(2-Methoxyethyl) 5-methylcytosine phosphorothiorate
  modified_base 50: mod_base = OTHER; note = deoxycytosine phosphorothiorate
  modified_base 51: mod_base = OTHER; note = deoxyguanosine phosphorothiorate
  modified_base 54: mod_base = OTHER; note = 2'-O-(2-Methoxyethyl) thymine
  modified_base 56: mod_base = OTHER; note = 2'-fluorocytosine
  modified_base 61: mod_base = OTHER; note = Cytosine phosphorothiorate
  modified_base 62: mod_base = OTHER; note = 2'-Omethylcytosine
  modified_base 65: mod_base = OTHER; note = 2'-fluoroguanosine
  modified_base 67: mod_base = OTHER; note = 2'-fluoroguanosine
  modified_base 68: mod_base = OTHER; note = Guanosine phosphorothiorate
  modified_base 69: mod_base = OTHER; note = deoxyadenosine phosphorothiorate
  modified_base 71: mod_base = OTHER; note = 2'-O-(2-Methoxyethyl) thymine
  modified_base 72: mod_base = OTHER; note = 2'-fluorocytosine
  modified_base 73: mod_base = OTHER; note = Guanosine phosphorothiorate
  modified_base 75: mod_base = OTHER; note = Cytosine phosphorothiorate
  modified_base 76: mod_base = OTHER; note = 2'-O-(2-Methoxyethyl) adenosine
  misc_feature 1..29: note = RNA
  misc_feature 30: note = DNA
  misc_feature 31..46: note = RNA
  misc_feature 47: note = DNA
  misc_feature 48..49: note = RNA
  misc_feature 50..51: note = DNA
  misc_feature 52..56: note = RNA
  misc_feature 57: note = DNA
  misc_feature 58..68: note = RNA
  misc_feature 69: note = DNA
  misc_feature 70..76: note = RNA

SEQ ID NO: 7117 - RNA, 85 nt, synthetic construct; identical to SEQ ID NO: 3301
  source 1..85: mol_type = other RNA
  modified_base 1: mod_base = OTHER; note = 2'-Omethylguanosine phosphorothiorate
  modified_base 2: mod_base = OTHER; note = 2'-Omethylcytosine
  modified_base 5: mod_base = OTHER; note = 2'-Omethyluridine phosphorothiorate
  modified_base 11: mod_base = OTHER; note = 2'-fluorocytosine
  modified_base 12: mod_base = OTHER; note = 2'-fluorocytosine
  modified_base 13: mod_base = OTHER; note = 2'-fluoroguanosine
  modified_base 22: mod_base = OTHER; note = 2'-Omethyladenosine phosphorothiorate
  modified_base 23: mod_base = OTHER; note = 2'-fluoroguanosine
  modified_base 25: mod_base = OTHER; note = Cytosine phosphorothiorate
  modified_base 33: mod_base = OTHER; note = 2'-fluorouridine
  modified_base 54: mod_base = OTHER; note = 2'-Omethylcytosine
  modified_base 56: mod_base = OTHER; note = 2'-Omethylguanosine
  modified_base 58: mod_base = OTHER; note = 2'-fluoroguanosine
  modified_base 60: mod_base = OTHER; note = 2'-Omethyladenosine
  modified_base 62: mod_base = OTHER; note = 2'-Omethylguanosine
  modified_base 71: mod_base = OTHER; note = 2'-fluorocytosine phosphorothiorate
  modified_base 74: mod_base = OTHER; note = 2'-fluorocytosine phosphorothiorate
  modified_base 81: mod_base = OTHER; note = 2'-fluorocytosine
  modified_base 82: mod_base = OTHER; note = 2'-fluoroguanosine

SEQ ID NO: 7118 - RNA, 76 nt, synthetic construct; identical to SEQ ID NO: 625
  source 1..76: mol_type = other RNA
  modified_base 1: mod_base = OTHER; note = 2'-Omethylguanosine
  modified_base 17: mod_base = OTHER; note = 2'-Omethylguanosine
  modified_base 18: mod_base = OTHER; note = 2'-Omethylguanosine
  modified_base 20: mod_base = OTHER; note = Thymine
  modified_base 33: mod_base = OTHER; note = 2'-fluorouridine
  modified_base 50: mod_base = OTHER; note = 2'-Omethylcytosine
  modified_base 52: mod_base = OTHER; note = 2'-Omethylguanosine
  modified_base 55: mod_base = OTHER; note = Uridine phosphorothiorate
  modified_base 73: mod_base = OTHER; note = 2'-Omethylguanosine

SEQ ID NO: 7119 - RNA, 76 nt, synthetic construct; identical to SEQ ID NO: 3289
  source 1..76: mol_type = other RNA
  modified_base 1: mod_base = OTHER; note = 2'-Omethylguanosine
  modified_base 16: mod_base = OTHER; note = 2'-Omethyluridine
  modified_base 18: mod_base = OTHER; note = 2'-Omethylguanosine
  modified_base 19: mod_base = OTHER; note = 2'-Omethylguanosine
  modified_base 54: mod_base = OTHER; note = 2'-Omethyluridine phosphorothiorate
  modified_base 55: mod_base = OTHER; note = Uridine phosphorothiorate
  modified_base 56: mod_base = OTHER; note = 2'-Omethylcytosine
  modified_base 57: mod_base = OTHER; note = 2'-fluoroadenosine
  modified_base 58: mod_base = OTHER; note = 2'-fluoroadenosine
  modified_base 59: mod_base = OTHER; note = 2'-Omethylguanosine
  modified_base 60: mod_base = OTHER; note = 2'-Omethyluridine
  modified_base 73: mod_base = OTHER; note = 2'-Omethylguanosine

SEQ ID NO: 7120 - RNA, 76 nt, synthetic construct; identical to SEQ ID NO: 625
  source 1..76: mol_type = other RNA
  modified_base 2: mod_base = OTHER; note = 2'-Omethylguanosine
  modified_base 5: mod_base = OTHER; note = 2'-fluorocytosine
  modified_base 6: mod_base = OTHER; note = 2'-fluorocytosine
  modified_base 11: mod_base = OTHER; note = 2'-Omethylcytosine
  modified_base 12: mod_base = OTHER; note = 2'-fluoroguanosine
  modified_base 20: mod_base = OTHER; note = 2'-Omethyluridine
  modified_base 24: mod_base = OTHER; note = 2'-fluoroguanosine
  modified_base 25: mod_base = OTHER; note = 2'-Omethylcytosine phosphorothiorate
  modified_base 26: mod_base = OTHER; note = 2'-Omethyladenosine
  modified_base 28: mod_base = OTHER; note = 2'-fluorouridine
  modified_base 29: mod_base = OTHER; note = Guanosine phosphorothiorate
  modified_base 33: mod_base = OTHER; note = 2'-fluorouridine
  modified_base 40: mod_base = OTHER; note = Uridine phosphorothiorate
  modified_base 41: mod_base = OTHER; note = 2'-Omethylcytosine phosphorothiorate
  modified_base 43: mod_base = OTHER; note = 2'-fluoroadenosine
  modified_base 44: mod_base = OTHER; note = 2'-fluoroadenosine
  modified_base 47: mod_base = OTHER; note = 2'-Omethyluridine
  modified_base 50: mod_base = OTHER; note = 2'-fluorocytosine
  modified_base 51: mod_base = OTHER; note = Guanosine phosphorothiorate
  modified_base 52: mod_base = OTHER; note = 2'-fluoroguanosine
  modified_base 53: mod_base = OTHER; note = 2'-Omethylguanosine
  modified_base 54: mod_base = OTHER; note = 2'-Omethyluridine
  modified_base 57: mod_base = OTHER; note = 2'-Omethylguanosine
  modified_base 59: mod_base = OTHER; note = 2'-Omethylguanosine
  modified_base 61: mod_base = OTHER; note = 2'-fluorocytosine
  modified_base 62: mod_base = OTHER; note = 2'-fluorocytosine
  modified_base 63: mod_base = OTHER; note = 2'-Omethylcytosine
  modified_base 65: mod_base = OTHER; note = 2'-fluoroguanosine
  modified_base 66: mod_base = OTHER; note = Cytosine phosphorothiorate
  modified_base 67: mod_base = OTHER; note = 2'-fluoroguanosine
  modified_base 68: mod_base = OTHER; note = 2'-Omethylguanosine
  modified_base 70: mod_base = OTHER; note = 2'-Omethylguanosine
  modified_base 71: mod_base = OTHER; note = 2'-Omethyluridine
  modified_base 73: mod_base = OTHER; note = 2'-Omethylguanosine
  modified_base 75: mod_base = OTHER; note = 2'-Omethylcytosine

SEQ ID NO: 7121 - RNA, 76 nt, synthetic construct; identical to SEQ ID NO: 3289
  source 1..76: mol_type = other RNA
  modified_base 1: mod_base = OTHER; note = 2'-Omethylguanosine phosphorothiorate
  modified_base 2: mod_base = OTHER; note = 2'-Omethylcytosine phosphorothiorate
  modified_base 32: mod_base = OTHER; note = Cytosine phosphorothiorate
  modified_base 33: mod_base = OTHER; note = 2'-Omethyluridine
  modified_base 74: mod_base = OTHER; note = Cytosine phosphorothiorate
  modified_base 75: mod_base = OTHER; note = 2'-Omethylcytosine phosphorothiorate
  modified_base 76: mod_base = OTHER; note = 2'-Omethyladenosine

SEQ ID NO: 7122 - RNA, 85 nt, synthetic construct; identical to SEQ ID NO: 3288
  source 1..85: mol_type = other RNA
  modified_base 1: mod_base = OTHER; note = 2'-Omethylcytosine
  modified_base 8: mod_base = OTHER; note = Guanosine phosphorothiorate
  modified_base 13: mod_base = OTHER; note = 2'-Omethyladenosine
  modified_base 19: mod_base = OTHER; note = 2'-Omethyluridine
  modified_base 27: mod_base = OTHER; note = 2'-fluorouridine
  modified_base 29: mod_base = OTHER; note = 2'-Omethylguanosine phosphorothiorate
  modified_base 32: mod_base = OTHER; note = 2'-fluorouridine
  modified_base 48: mod_base = OTHER; note = 2'-Omethyladenosine
  modified_base 56: mod_base = OTHER; note = 2'-fluoroguanosine
  modified_base 57: mod_base = OTHER; note = 2'-Omethylcytosine
  modified_base 58: mod_base = OTHER; note = 2'-fluoroguanosine phosphorothiorate
  modified_base 61: mod_base = OTHER; note = Guanosine phosphorothiorate
  modified_base 65: mod_base = OTHER; note = Cytosine phosphorothiorate
  modified_base 75: mod_base = OTHER; note = 2'-fluorouridine
  modified_base 76: mod_base = OTHER; note = 2'-fluorocytosine
  modified_base 80: mod_base = OTHER; note = 2'-fluoroguanosine
  modified_base 82: mod_base = OTHER; note = 2'-Omethyladenosine phosphorothiorate
  modified_base 83: mod_base = OTHER; note = 2'-Omethylcytosine

SEQ ID NO: 7123 - RNA, 85 nt, synthetic construct; identical to SEQ ID NO: 3297
  source 1..85: mol_type = other RNA
  modified_base 1: mod_base = OTHER; note = 2'-Omethylguanosine phosphorothiorate
  modified_base 2: mod_base = OTHER; note = Cytosine phosphorothiorate
  modified_base 14: mod_base = OTHER; note = Adenosine phosphorothiorate
  modified_base 38: mod_base = OTHER; note = 2'-fluoroadenosine
  modified_base 61: mod_base = OTHER; note = 2'-Omethylguanosine phosphorothiorate
  modified_base 82: mod_base = OTHER; note = 2'-Omethylguanosine

SEQ ID NO: 7124 - RNA, 86 nt, synthetic construct; identical to SEQ ID NO: 3290
  source 1..86: mol_type = other RNA
  modified_base 1: mod_base = OTHER; note = 2'-Omethyladenosine
  modified_base 10: mod_base = OTHER; note = 2'-Omethylguanosine
  modified_base 11: mod_base = OTHER; note = 2'-Omethylcytosine
  modified_base 12: mod_base = OTHER; note = 2'-Omethylcytosine
  modified_base 13: mod_base = OTHER; note = 2'-Omethylguanosine
  modified_base 17: mod_base = OTHER; note = 2'-Omethylguanosine
  modified_base 18: mod_base = OTHER; note = 2'-Omethylguanosine
  modified_base 25: mod_base = OTHER; note = 2'-Omethylcytosine
  modified_base 33: mod_base = OTHER; note = Uridine phosphorothiorate
  modified_base 34: mod_base = OTHER; note = 2'-Omethyluridine
  modified_base 35: mod_base = OTHER; note = Cytosine phosphorothiorate
  modified_base 37: mod_base = OTHER; note = Guanosine phosphorothiorate
  modified_base 38: mod_base = OTHER; note = Adenosine phosphorothiorate
  modified_base 41: mod_base = OTHER; note = 2'-fluorocytosine
  modified_base 42: mod_base = OTHER; note = 2'-Omethyladenosine
  modified_base 43: mod_base = OTHER; note = 2'-Omethyladenosine
  modified_base 44: mod_base = OTHER; note = 2'-fluorouridine
  modified_base 59: mod_base = OTHER; note = 2'-Omethylguanosine
  modified_base 60: mod_base = OTHER; note = 2'-Omethyluridine
  modified_base 62: mod_base = OTHER; note = 2'-Omethylguanosine
  modified_base 64: mod_base = OTHER; note = Uridine phosphorothiorate
  modified_base 65: mod_base = OTHER; note = Uridine phosphorothiorate
  modified_base 71: mod_base = OTHER; note = 2'-Omethylcytosine
  modified_base 75: mod_base = OTHER; note = 2'-Omethylcytosine
  modified_base 83: mod_base = OTHER; note = 2'-Omethyladenosine

SEQ ID NO: 7125 - RNA, 76 nt, synthetic construct; identical to SEQ ID NO: 625
  source 1..76: mol_type = other RNA
  modified_base 1: mod_base = OTHER; note = 2'-Omethylguanosine
  modified_base 2: mod_base = OTHER; note = 2'-Omethylguanosine
  modified_base 13: mod_base = OTHER; note = 2'-Omethylcytosine
  modified_base 33: mod_base = OTHER; note = 2'-fluorouridine
  modified_base 35: mod_base = OTHER; note = Cytosine phosphorothiorate
  modified_base 37: mod_base = OTHER; note = Adenosine phosphorothiorate
  modified_base 38: mod_base = OTHER; note = Adenosine phosphorothiorate
  modified_base 52: mod_base = OTHER; note = 2'-Omethylguanosine
  modified_base 56: mod_base = OTHER; note = 2'-Omethylcytosine
  modified_base 62: mod_base = OTHER; note = 2'-Omethylcytosine
  modified_base 63: mod_base = OTHER; note = 2'-fluorocytosine
  modified_base 73: mod_base = OTHER; note = 2'-Omethylguanosine
  modified_base 75: mod_base = OTHER; note = 2'-fluorocytosine phosphorothiorate

SEQ ID NO: 7126 - RNA, 75 nt, synthetic construct; identical to SEQ ID NO: 1045
  source 1..75: mol_type = other RNA
  modified_base 1: mod_base = OTHER; note = 2'-Omethylguanosine phosphorothiorate
  modified_base 2: mod_base = OTHER; note = 2'-Omethylguanosine phosphorothiorate
  modified_base 3: mod_base = OTHER; note = 2'-fluorouridine phosphorothiorate
  modified_base 7: mod_base = OTHER; note = 2'-fluoroadenosine
  modified_base 12: mod_base = OTHER; note = 2'-fluoroguanosine phosphorothiorate
  modified_base 18: mod_base = OTHER; note = 2'-Omethylguanosine
  modified_base 19: mod_base = OTHER; note = 2'-fluorouridine
  modified_base 20: mod_base = OTHER; note = Adenosine phosphorothiorate
  modified_base 21: mod_base = OTHER; note = 2'-fluoroadenosine
  modified_base 22: mod_base = OTHER; note = 2'-fluoroguanosine
  modified_base 24: mod_base = OTHER; note = 2'-fluoroadenosine
  modified_base 28: mod_base = OTHER; note = 2'-fluorouridine phosphorothiorate
  modified_base 36: mod_base = OTHER; note = 2'-fluoroadenosine
  modified_base 38: mod_base = OTHER; note = 2'-fluoroadenosine
  modified_base 43: mod_base = OTHER; note = 2'-fluoroguanosine
  modified_base 44: mod_base = OTHER; note = 2'-Omethylcytosine
  modified_base 52: mod_base = OTHER; note = 2'-fluoroguanosine
  modified_base 57: mod_base = OTHER; note = Adenosine phosphorothiorate
  modified_base 61: mod_base = OTHER; note = 2'-fluorouridine
  modified_base 62: mod_base = OTHER; note = Cytosine phosphorothiorate
  modified_base 64: mod_base = OTHER; note = Guanosine phosphorothiorate
  modified_base 65: mod_base = OTHER; note = Uridine phosphorothiorate
  modified_base 66: mod_base = OTHER; note = 2'-fluoroguanosine
  modified_base 68: mod_base = OTHER; note = Adenosine phosphorothiorate
  modified_base 69: mod_base = OTHER; note = 2'-fluoroadenosine
  modified_base 74: mod_base = OTHER; note = Cytosine phosphorothiorate
  modified_base 75: mod_base = OTHER; note = 2'-fluoroadenosine

SEQ ID NO: 7127 - RNA, 76 nt, synthetic construct; identical to SEQ ID NO: 625
  source 1..76: mol_type = other RNA
  modified_base 1: mod_base = OTHER; note = 2'-Omethylguanosine
  modified_base 3: mod_base = OTHER; note = 2'-fluorocytosine
  modified_base 5: mod_base = OTHER; note = 2'-fluorocytosine
  modified_base 8: mod_base = OTHER; note = Uridine phosphorothiorate
  modified_base 11: mod_base = OTHER; note = 2'-Omethylcytosine
  modified_base 12: mod_base = OTHER; note = Guanosine phosphorothiorate
  modified_base 13: mod_base = OTHER; note = 2'-Omethylcytosine
  modified_base 14: mod_base = OTHER; note = 2'-Omethyladenosine
  modified_base 17: mod_base = OTHER; note = 2'-Omethylguanosine
  modified_base 20: mod_base = OTHER; note = 2'-fluorouridine
  modified_base 21: mod_base = OTHER; note = Adenosine phosphorothiorate
  modified_base 22: mod_base = OTHER; note = 2'-fluoroguanosine phosphorothiorate
  modified_base 24: mod_base = OTHER; note = 2'-fluoroguanosine
  modified_base 25: mod_base = OTHER; note = 2'-Omethylcytosine
  modified_base 26: mod_base = OTHER; note = 2'-fluoroadenosine
  modified_base 27: mod_base = OTHER; note = 2'-fluorouridine
  modified_base 30: mod_base = OTHER; note = 2'-fluoroguanosine
  modified_base 41: mod_base = OTHER; note = 2'-Omethylcytosine
  modified_base 43: mod_base = OTHER; note = 2'-Omethyladenosine
  modified_base 44: mod_base = OTHER; note = 2'-fluoroadenosine phosphorothiorate
  modified_base 45: mod_base = OTHER; note = 2'-Omethylguanosine phosphorothiorate
  modified_base 49: mod_base = OTHER; note = 2'-fluorocytosine
  modified_base 50: mod_base = OTHER; note = 2'-Omethylcytosine
  modified_base 52: mod_base = OTHER; note = 2'-Omethylguanosine phosphorothiorate
  modified_base 53: mod_base = OTHER; note = Guanosine phosphorothiorate
  modified_base 54: mod_base = OTHER; note = 2'-Omethyluridine
  modified_base 59: mod_base = OTHER; note = 2'-Omethylguanosine phosphorothiorate
  modified_base 60: mod_base = OTHER; note = 2'-fluorouridine
  modified_base 62: mod_base = OTHER; note = 2'-fluorocytosine
  modified_base 63: mod_base = OTHER; note = 2'-fluorocytosine
  modified_base 64: mod_base = OTHER; note = 2'-fluoroguanosine
  modified_base 65: mod_base = OTHER; note = Guanosine phosphorothiorate
  modified_base 66: mod_base = OTHER; note = 2'-Omethylcytosine
  modified_base 69: mod_base = OTHER; note = Adenosine phosphorothiorate
  modified_base 72: mod_base = OTHER; note = Cytosine phosphorothiorate
  modified_base 73: mod_base = OTHER; note = 2'-fluoroguanosine
  modified_base 75: mod_base = OTHER; note = 2'-fluorocytosine

SEQ ID NO: 7128 - RNA, 75 nt, synthetic construct; identical to SEQ ID NO: 3306
  source 1..75: mol_type = other RNA
  modified_base 1: mod_base = OTHER; note = 2'-Omethylguanosine phosphorothiorate
  modified_base 2: mod_base = OTHER; note = 2'-Omethyladenosine
  modified_base 3: mod_base = OTHER; note = 2'-Omethylcytosine
  modified_base 4: mod_base = OTHER; note = 2'-Omethylcytosine
  modified_base 5: mod_base = OTHER; note = 2'-Omethyluridine
  modified_base 6: mod_base = OTHER; note = 2'-Omethylcytosine
  modified_base 26: mod_base = OTHER; note = 2'-Omethyluridine
  modified_base 27: mod_base = OTHER; note = 2'-Omethylcytosine
  modified_base 28: mod_base = OTHER; note = 2'-fluorouridine
  modified_base 29: mod_base = OTHER; note = 2'-Omethylguanosine
  modified_base 39: mod_base = OTHER; note = 2'-fluorocytosine
  modified_base 40: mod_base = OTHER; note = 2'-Omethyladenosine
  modified_base 41: mod_base = OTHER; note = 2'-Omethylguanosine
  modified_base 42: mod_base = OTHER; note = 2'-Omethyladenosine
  modified_base 72: mod_base = OTHER; note = 2'-Omethyladenosine

SEQ ID NO: 7129 - RNA, 75 nt, synthetic construct; identical to SEQ ID NO: 3299
  source 1..75: mol_type = other RNA
  modified_base 11: mod_base = OTHER; note = 2'-Omethyluridine
  modified_base 15: mod_base = OTHER; note = 2'-fluorouridine phosphorothiorate
  modified_base 23: mod_base = OTHER; note = Guanosine phosphorothiorate
  modified_base 35: mod_base = OTHER; note = 2'-fluoroadenosine phosphorothiorate
  modified_base 37: mod_base = OTHER; note = 2'-fluoroadenosine
  modified_base 62: mod_base = OTHER; note = 2'-fluorocytosine phosphorothiorate
  modified_base 74: mod_base = OTHER; note = 2'-Omethylcytosine

SEQ ID NO: 7130 - RNA, 76 nt, synthetic construct; identical to SEQ ID NO: 625
  source 1..76: mol_type = other RNA
  modified_base 35: mod_base = OTHER; note = 2'-O-(2-Methoxyethyl) 5-methylcytosine

SEQ ID NO: 7131 - RNA, 76 nt, synthetic construct; identical to SEQ ID NO: 625
  source 1..76: mol_type = other RNA
  modified_base 1: mod_base = OTHER; note = 2'-Omethylguanosine
  modified_base 2: mod_base = OTHER; note = 2'-fluoroguanosine
  modified_base 5: mod_base = OTHER; note = 2'-Omethylcytosine
  modified_base 6: mod_base = OTHER; note = 2'-Omethylcytosine
  modified_base 7: mod_base = OTHER; note = Guanosine phosphorothiorate
  modified_base 13: mod_base = OTHER; note = 2'-fluorocytosine
  modified_base 18: mod_base = OTHER; note = Guanosine phosphorothiorate
  modified_base 22: mod_base = OTHER; note = 2'-Omethylguanosine phosphorothiorate
  modified_base 30: mod_base = OTHER; note = 2'-Omethylguanosine phosphorothiorate
  modified_base 31: mod_base = OTHER; note = 2'-fluoroadenosine
  modified_base 42: mod_base = OTHER; note = 2'-Omethyladenosine
  modified_base 43: mod_base = OTHER; note = 2'-Omethyladenosine
  modified_base 46: mod_base = OTHER; note = 2'-Omethylguanosine
  modified_base 48: mod_base = OTHER; note = 2'-fluorouridine
  modified_base 49: mod_base = OTHER; note = Cytosine phosphorothiorate
  modified_base 50: mod_base = OTHER; note = 2'-fluorocytosine
  modified_base 52: mod_base = OTHER; note = 2'-Omethylguanosine phosphorothiorate
  modified_base 53: mod_base = OTHER; note = 2'-Omethylguanosine phosphorothiorate
  modified_base 55: mod_base = OTHER; note = Uridine phosphorothiorate
  modified_base 56: mod_base = OTHER; note = 2'-Omethylcytosine
  modified_base 57: mod_base = OTHER; note = 2'-fluoroguanosine
  modified_base 61: mod_base = OTHER; note = Cytosine phosphorothiorate
  modified_base 64: mod_base = OTHER; note = Guanosine phosphorothiorate
  modified_base 65: mod_base = OTHER; note = 2'-fluoroguanosine
  modified_base 66: mod_base = OTHER; note = 2'-Omethylcytosine
  modified_base 67: mod_base = OTHER; note = Guanosine phosphorothiorate
  modified_base 68: mod_base = OTHER; note = Guanosine phosphorothiorate
  modified_base 69: mod_base = OTHER; note = 2'-Omethyladenosine
  modified_base 72: mod_base = OTHER; note = 2'-fluorocytosine
  modified_base 74: mod_base = OTHER; note = 2'-fluorocytosine
  modified_base 75: mod_base = OTHER; note = 2'-Omethylcytosine
  modified_base 76: mod_base = OTHER; note = 2'-Omethyladenosine

SEQ ID NO: 7132 - RNA, 85 nt, synthetic construct; identical to SEQ ID NO: 3297
  source 1..85: mol_type = other RNA
  modified_base 1: mod_base = OTHER; note = 2'-Omethylguanosine
  modified_base 2: mod_base = OTHER; note = 2'-Omethylcytosine
  modified_base 3: mod_base = OTHER; note = 2'-Omethyluridine
  modified_base 4: mod_base = OTHER; note = 2'-Omethylguanosine
  modified_base 5: mod_base = OTHER; note = 2'-Omethyluridine
  modified_base 6: mod_base = OTHER; note = 2'-Omethylguanosine
  modified_base 10: mod_base = OTHER; note = 2'-Omethylguanosine
  modified_base 11: mod_base = OTHER; note = 2'-Omethylcytosine
  modified_base 12: mod_base = OTHER; note = 2'-Omethylcytosine
  modified_base 13: mod_base = OTHER; note = 2'-Omethylguanosine

SEQ ID NO: 7133 - RNA, 75 nt, synthetic construct; identical to SEQ ID NO: 3336
  source 1..75: mol_type = other RNA
  modified_base 8: mod_base = OTHER; note = 2'-Omethyladenosine phosphorothiorate
  modified_base 19: mod_base = OTHER; note = 2'-fluorouridine
  modified_base 25: mod_base = OTHER; note = Adenosine phosphorothiorate
  modified_base 40: mod_base = OTHER; note = 2'-fluorouridine
  modified_base 45: mod_base = OTHER; note = 2'-fluoroguanosine
  modified_base 47: mod_base = OTHER; note = 2'-fluorocytosine
  modified_base 49: mod_base = OTHER; note = 2'-fluoroadenosine phosphorothiorate
  modified_base 54: mod_base = OTHER; note = 2'-Omethyluridine phosphorothiorate
  modified_base 73: mod_base = OTHER; note = Cytosine phosphorothiorate
  modified_base 74: mod_base = OTHER; note = Cytosine phosphorothiorate

SEQ ID NO: 7134 - RNA, 85 nt, synthetic construct; identical to SEQ ID NO: 3301
  source 1..85: mol_type = other RNA
  modified_base 1: mod_base = OTHER; note = 2'-Omethylguanosine phosphorothiorate
  modified_base 2: mod_base = OTHER; note = 2'-fluorocytosine
  modified_base 3: mod_base = OTHER; note = 2'-Omethyluridine phosphorothiorate
  modified_base 12: mod_base = OTHER; note = 2'-Omethylcytosine phosphorothiorate
  modified_base 26: mod_base = OTHER; note = Guanosine phosphorothiorate
  modified_base 27: mod_base = OTHER; note = Uridine phosphorothiorate
  modified_base 35: mod_base = OTHER; note = 2'-fluorouridine
  modified_base 45: mod_base = OTHER; note = Guanosine phosphorothiorate
  modified_base 46: mod_base = OTHER; note = Guanosine phosphorothiorate
  modified_base 50: mod_base = OTHER; note = 2'-Omethylcytosine phosphorothiorate
  modified_base 53: mod_base = OTHER; note = 2'-fluorocytosine
  modified_base 54: mod_base = OTHER; note = 2'-Omethylcytosine phosphorothiorate
  modified_base 57: mod_base = OTHER; note = Cytosine phosphorothiorate
  modified_base 60: mod_base = OTHER; note = Adenosine phosphorothiorate
  modified_base 66: mod_base = OTHER; note = Guanosine phosphorothiorate
  modified_base 83: mod_base = OTHER; note = Cytosine phosphorothiorate

SEQ ID NO: 7135 - RNA, 76 nt, synthetic construct; identical to SEQ ID NO: 625
  source 1..76: mol_type = other RNA
  modified_base 1: mod_base = OTHER; note = 2'-Omethylguanosine phosphorothiorate
  modified_base 2: mod_base = OTHER; note = 2'-Omethylguanosine phosphorothiorate
  modified_base 3: mod_base = OTHER; note = 2'-Omethylcytosine
  modified_base 4: mod_base = OTHER; note = 2'-Omethyluridine
  modified_base 5: mod_base = OTHER; note = 2'-Omethylcytosine
  modified_base 6: mod_base = OTHER; note = 2'-Omethylcytosine
  modified_base 16: mod_base = OTHER; note = 2'-Omethyluridine
  modified_base 17: mod_base = OTHER; note = 2'-Omethylguanosine
  modified_base 18: mod_base = OTHER; note = 2'-Omethylguanosine
  modified_base 20: mod_base = OTHER; note = 2'-Omethyluridine
  modified_base 22: mod_base = OTHER; note = 2'-Omethylguanosine
  modified_base 23: mod_base = OTHER; note = 2'-Omethylcytosine
  modified_base 24: mod_base = OTHER; note = 2'-Omethylguanosine
  modified_base 25: mod_base = OTHER; note = 2'-Omethylcytosine
  modified_base 33: mod_base = OTHER; note = 2'-fluorouridine
  modified_base 35: mod_base = OTHER; note = Cytosine phosphorothiorate
  modified_base 37: mod_base = OTHER; note = Adenosine phosphorothiorate
  modified_base 38: mod_base = OTHER; note = Adenosine phosphorothiorate
  modified_base 41: mod_base = OTHER; note = 2'-Omethylcytosine
  modified_base 42: mod_base = OTHER; note = 2'-Omethyladenosine
  modified_base 43: mod_base = OTHER; note = 2'-Omethyladenosine
  modified_base 44: mod_base = OTHER; note = 2'-Omethyladenosine
  modified_base 49: mod_base = OTHER; note = 2'-Omethylcytosine
  modified_base 50: mod_base = OTHER; note = 2'-Omethylcytosine
  modified_base 52: mod_base = OTHER; note = 2'-Omethylguanosine
  modified_base 54: mod_base = OTHER; note = 2'-Omethyluridine
  modified_base 55: mod_base = OTHER; note = Uridine phosphorothiorate
  modified_base 56: mod_base = OTHER; note = 2'-Omethylcytosine
  modified_base 57: mod_base = OTHER; note = 2'-fluoroguanosine
  modified_base 59: mod_base = OTHER; note = 2'-Omethylguanosine
  modified_base 61: mod_base = OTHER; note = 2'-Omethylcytosine
  modified_base 62: mod_base = OTHER; note = 2'-Omethylcytosine
  modified_base 63: mod_base = OTHER; note = 2'-fluorocytosine
  modified_base 64: mod_base = OTHER; note = 2'-Omethylguanosine
  modified_base 65: mod_base = OTHER; note = 2'-Omethylguanosine
  modified_base 73: mod_base = OTHER; note = 2'-Omethylguanosine

SEQ ID NO: 7136 - RNA, 76 nt, synthetic construct; identical to SEQ ID NO: 625
  source 1..76: mol_type = other RNA
  modified_base 1: mod_base = OTHER; note = 2'-Omethylguanosine phosphorothiorate
  modified_base 2: mod_base = OTHER; note = 2'-Omethylguanosine
  modified_base 3: mod_base = OTHER; note = 2'-Omethylcytosine
  modified_base 4: mod_base = OTHER; note = 2'-Omethyluridine
  modified_base 5: mod_base = OTHER; note = 2'-Omethylcytosine
  modified_base 6: mod_base = OTHER; note = 2'-Omethylcytosine
  modified_base 14: mod_base = OTHER; note = 2'-Omethyladenosine
  modified_base 15: mod_base = OTHER; note = 2'-fluoroadenosine
  modified_base 16: mod_base = OTHER; note = 2'-Omethyluridine
  modified_base 17: mod_base = OTHER; note = 2'-Omethylguanosine
  modified_base 18: mod_base = OTHER; note = 2'-Omethylguanosine
  modified_base 19: mod_base = OTHER; note = 2'-fluoroadenosine
  modified_base 20: mod_base = OTHER; note = 2'-Omethyluridine
  modified_base 49: mod_base = OTHER; note = 2'-Omethylcytosine
  modified_base 50: mod_base = OTHER; note = 2'-Omethylcytosine
  modified_base 51: mod_base = OTHER; note = 2'-Omethylguanosine
  modified_base 52: mod_base = OTHER; note = 2'-Omethylguanosine
  modified_base 53: mod_base = OTHER; note = 2'-Omethylguanosine
  modified_base 54: mod_base = OTHER; note = 2'-Omethyluridine
  modified_base 56: mod_base = OTHER; note = 2'-Omethylcytosine
  modified_base 57: mod_base = OTHER; note = 2'-fluoroguanosine
  modified_base 59: mod_base = OTHER; note = 2'-Omethylguanosine
  modified_base 73: mod_base = OTHER; note = 2'-Omethylguanosine

SEQ ID NO: 7137 - RNA, 86 nt, synthetic construct; identical to SEQ ID NO: 3290
  source 1..86: mol_type = other RNA
  modified_base 22: mod_base = OTHER; note = Adenosine phosphorothiorate

SEQ ID NO: 7138 - RNA, 76 nt, synthetic construct; identical to SEQ ID NO: 3295
  source 1..76: mol_type = other RNA
  modified_base 1: mod_base = OTHER; note = 2'-Omethylcytosine phosphorothiorate
  modified_base 2: mod_base = OTHER; note = 2'-fluorocytosine
  modified_base 3: mod_base = OTHER; note = Uridine phosphorothiorate
  modified_base 9: mod_base = OTHER; note = 2'-Omethyladenosine phosphorothiorate
  modified_base 14: mod_base = OTHER; note = 2'-fluoroadenosine phosphorothiorate
  modified_base 20: mod_base = OTHER; note = 2'-Omethyluridine
  modified_base 38: mod_base = OTHER; note = 2'-fluoroadenosine phosphorothiorate
  modified_base 42: mod_base = OTHER; note = 2'-Omethyluridine phosphorothiorate
  modified_base 49: mod_base = OTHER; note = 2'-Omethylguanosine
  modified_base 52: mod_base = OTHER; note = 2'-fluoroguanosine phosphorothiorate
  modified_base 55: mod_base = OTHER; note = Uridine phosphorothiorate
  modified_base 59: mod_base = OTHER; note = 2'-fluoroadenosine phosphorothiorate

SEQ ID NO: 7139 - RNA, 85 nt, synthetic construct; identical to SEQ ID NO: 3317
  source 1..85: mol_type = other RNA
  modified_base 1: mod_base = OTHER; note = 2'-Omethylguanosine phosphorothiorate
  modified_base 2: mod_base = OTHER; note = 2'-Omethylcytosine
  modified_base 9: mod_base = OTHER; note = 2'-fluoroguanosine
  modified_base 10: mod_base = OTHER; note = 2'-fluoroguanosine
  modified_base 17: mod_base = OTHER; note = Guanosine phosphorothiorate
  modified_base 22: mod_base = OTHER; note = Adenosine phosphorothiorate
  modified_base 24: mod_base = OTHER; note = 2'-fluoroguanosine
  modified_base 34: mod_base = OTHER; note = 2'-fluorocytosine
  modified_base 38: mod_base = OTHER; note = 2'-Omethyladenosine phosphorothiorate
  modified_base 41: mod_base = OTHER; note = 2'-Omethylcytosine phosphorothiorate
  modified_base 44: mod_base = OTHER; note = 2'-Omethyluridine
  modified_base 45: mod_base = OTHER; note = 2'-fluoroguanosine phosphorothiorate
  modified_base 46: mod_base = OTHER; note = 2'-Omethylguanosine
  modified_base 47: mod_base = OTHER; note = 2'-Omethylguanosine
  modified_base 56: mod_base = OTHER; note = 2'-Omethylguanosine
  modified_base 60: mod_base = OTHER; note = 2'-Omethyladenosine
  modified_base 61: mod_base = OTHER; note = 2'-Omethylguanosine
  modified_base 74: mod_base = OTHER; note = 2'-fluorocytosine
  modified_base 83: mod_base = OTHER; note = Cytosine phosphorothiorate
  modified_base 84: mod_base = OTHER; note = 2'-Omethylcytosine

SEQ ID NO: 7140 - RNA, 86 nt, synthetic construct; identical to SEQ ID NO: 3290
  source 1..86: mol_type = other RNA
  modified_base 7: mod_base = OTHER; note = 2'-fluoroadenosine

SEQ ID NO: 7141 - RNA, 75 nt, synthetic construct; identical to SEQ ID NO: 1045
  source 1..75: mol_type = other RNA
  modified_base 1: mod_base = OTHER; note = 2'-Omethylguanosine phosphorothiorate
  modified_base 2: mod_base = OTHER; note = 2'-Omethylguanosine phosphorothiorate
  modified_base 8: mod_base = OTHER; note = 2'-fluorouridine phosphorothiorate
  modified_base 20: mod_base = OTHER; note = 2'-fluoroadenosine
  modified_base 23: mod_base = OTHER; note = Cytosine phosphorothiorate
  modified_base 27: mod_base = OTHER; note = 2'-Omethylcytosine
  modified_base 28: mod_base = OTHER; note = 2'-fluorouridine
  modified_base 29: mod_base = OTHER; note = 2'-Omethylguanosine
  modified_base 42: mod_base = OTHER; note = 2'-fluoroadenosine
  modified_base 44: mod_base = OTHER; note = 2'-fluorocytosine
  modified_base 52: mod_base = OTHER; note = 2'-Omethylguanosine
  modified_base 56: mod_base = OTHER; note = 2'-Omethylguanosine
  modified_base 57: mod_base = OTHER; note = 2'-fluoroadenosine
  modified_base 58: mod_base = OTHER; note = 2'-Omethylguanosine
  modified_base 65: mod_base = OTHER; note = Uridine phosphorothiorate
  modified_base 67: mod_base = OTHER; note = Guanosine phosphorothiorate
  modified_base 69: mod_base = OTHER; note = 2'-fluoroadenosine

SEQ ID NO: 7142 - RNA, 76 nt, synthetic construct; identical to SEQ ID NO: 3325
  source 1..76: mol_type = other RNA
  modified_base 1: mod_base = OTHER; note = 2'-Omethyluridine
  modified_base 2: mod_base = OTHER; note = 2'-Omethyladenosine
  modified_base 3: mod_base = OTHER; note = 2'-Omethylcytosine
  modified_base 4: mod_base = OTHER; note = 2'-Omethyladenosine
  modified_base 5: mod_base = OTHER; note = 2'-Omethylcytosine
  modified_base 6: mod_base = OTHER; note = 2'-Omethylcytosine
  modified_base 16: mod_base = OTHER; note = 2'-Omethyluridine
  modified_base 17: mod_base = OTHER; note = 2'-Omethylguanosine
  modified_base 18: mod_base = OTHER; note = 2'-Omethylguanosine
  modified_base 20: mod_base = OTHER; note = 2'-Omethyluridine
  modified_base 25: mod_base = OTHER; note = 2'-Omethylcytosine
  modified_base 33: mod_base = OTHER; note = 2'-fluorouridine
  modified_base 35: mod_base = OTHER; note = Cytosine phosphorothiorate
  modified_base 37: mod_base = OTHER; note = Adenosine phosphorothiorate
  modified_base 38: mod_base = OTHER; note = Adenosine phosphorothiorate
  modified_base 41: mod_base = OTHER; note = 2'-fluorocytosine
  modified_base 42: mod_base = OTHER; note = 2'-Omethyladenosine
  modified_base 43: mod_base = OTHER; note = 2'-Omethyladenosine
  modified_base 44: mod_base = OTHER; note = 2'-fluoroadenosine
  modified_base 49: mod_base = OTHER; note = 2'-Omethylcytosine
  modified_base 50: mod_base = OTHER; note = 2'-Omethylcytosine
  modified_base 52: mod_base = OTHER; note = 2'-Omethylguanosine
  modified_base 54: mod_base = OTHER; note = 2'-Omethyluridine
  modified_base 55: mod_base = OTHER; note = Uridine phosphorothiorate
  modified_base 56: mod_base = OTHER; note = 2'-Omethylcytosine
  modified_base 57: mod_base = OTHER; note = 2'-fluoroguanosine
  modified_base 59: mod_base = OTHER; note = 2'-Omethylguanosine
  modified_base 61: mod_base = OTHER; note = 2'-Omethylcytosine
  modified_base 62: mod_base = OTHER; note = 2'-Omethylcytosine
  modified_base 63: mod_base = OTHER; note = 2'-fluorocytosine
  modified_base 64: mod_base = OTHER; note = 2'-Omethylguanosine
  modified_base 65: mod_base = OTHER; note = 2'-Omethylguanosine
  modified_base 73: mod_base = OTHER; note = 2'-Omethylguanosine

SEQ ID NO: 7143 - RNA, 75 nt, synthetic construct; identical to SEQ ID NO: 1045
  source 1..75: mol_type = other RNA
  modified_base 2: mod_base = OTHER; note = 2'-Omethylguanosine
  modified_base 12: mod_base = OTHER; note = 2'-Omethylguanosine
  modified_base 14: mod_base = OTHER; note = 2'-fluoroadenosine
  modified_base 15: mod_base = OTHER; note = 2'-fluoroadenosine phosphorothiorate
  modified_base 17: mod_base = OTHER; note = 2'-fluoroguanosine
  modified_base 20: mod_base = OTHER; note = 2'-fluoroadenosine
  modified_base 21: mod_base = OTHER; note = 2'-fluoroadenosine phosphorothiorate
  modified_base 24: mod_base = OTHER; note = Adenosine phosphorothiorate
  modified_base 25: mod_base = OTHER; note = 2'-fluorocytosine
  modified_base 39: mod_base = OTHER; note = 2'-fluorouridine
  modified_base 42: mod_base = OTHER; note = 2'-Omethyladenosine
  modified_base 51: mod_base = OTHER; note = Adenosine phosphorothiorate
  modified_base 59: mod_base = OTHER; note = 2'-Omethyluridine
  modified_base 66: mod_base = OTHER; note = Guanosine phosphorothiorate

SEQ ID NO: 7144 - RNA, 85 nt, synthetic construct; identical to SEQ ID NO: 3288
  source 1..85: mol_type = other RNA
  modified_base 1: mod_base = OTHER; note = 2'-Omethylcytosine
  modified_base 11: mod_base = OTHER; note = Cytosine phosphorothiorate
  modified_base 26: mod_base = OTHER; note = 2'-fluorouridine
  modified_base 30: mod_base = OTHER; note = 2'-fluoroadenosine
  modified_base 36: mod_base = OTHER; note = Guanosine phosphorothiorate
  modified_base 44: mod_base = OTHER; note = Guanosine phosphorothiorate
  modified_base 46: mod_base = OTHER; note = 2'-Omethyladenosine
  modified_base 55: mod_base = OTHER; note = 2'-Omethylcytosine
  modified_base 58: mod_base = OTHER; note = Guanosine phosphorothiorate
  modified_base 76: mod_base = OTHER; note = 2'-fluorocytosine
  modified_base 84: mod_base = OTHER; note = 2'-Omethylcytosine
  modified_base 85: mod_base = OTHER; note = 2'-Omethyladenosine

SEQ ID NO: 7145 - RNA, 76 nt, synthetic construct; identical to SEQ ID NO: 3318
  source 1..76: mol_type = other RNA
  modified_base 1: mod_base = OTHER; note = 2'-Omethylcytosine
  modified_base 2: mod_base = OTHER; note = 2'-Omethylcytosine
  modified_base 3: mod_base = OTHER; note = 2'-Omethyluridine
  modified_base 4: mod_base = OTHER; note = 2'-Omethyluridine
  modified_base 5: mod_base = OTHER; note = 2'-Omethylcytosine
  modified_base 6: mod_base = OTHER; note = 2'-Omethylguanosine
  modified_base 13: mod_base = OTHER; note = 2'-Omethylcytosine
  modified_base 14: mod_base = OTHER; note = 2'-Omethyladenosine
  modified_base 15: mod_base = OTHER; note = 2'-Omethylguanosine
  modified_base 16: mod_base = OTHER; note = 2'-Omethyluridine
  modified_base 18: mod_base = OTHER; note = 2'-Omethylguanosine
  modified_base 19: mod_base = OTHER; note = 2'-Omethylguanosine
  modified_base 20: mod_base = OTHER; note = Uridine phosphorothiorate
  modified_base 21: mod_base = OTHER; note = Adenosine phosphorothiorate
  modified_base 25: mod_base = OTHER; note = 2'-Omethylcytosine
  modified_base 33: mod_base = OTHER; note = Uridine phosphorothiorate
  modified_base 34: mod_base = OTHER; note = 2'-Omethylcytosine
  modified_base 35: mod_base = OTHER; note = Uridine phosphorothiorate
  modified_base 37: mod_base = OTHER; note = Guanosine phosphorothiorate
  modified_base 38: mod_base = OTHER; note = Adenosine phosphorothiorate
  modified_base 41: mod_base = OTHER; note = 2'-fluorocytosine
  modified_base 42: mod_base = OTHER; note = 2'-Omethyluridine
  modified_base 43: mod_base = OTHER; note = 2'-Omethyluridine
  modified_base 44: mod_base = OTHER; note = 2'-fluoroadenosine
  modified_base 49: mod_base = OTHER; note = 2'-Omethylguanosine
  modified_base 50: mod_base = OTHER; note = 2'-Omethylcytosine
  modified_base 52: mod_base = OTHER; note = 2'-Omethylguanosine
  modified_base 54: mod_base = OTHER; note = Uridine phosphorothiorate
  modified_base 55: mod_base = OTHER; note = Uridine phosphorothiorate
  modified_base 61: mod_base = OTHER; note = 2'-Omethylcytosine
  modified_base 65: mod_base = OTHER; note = 2'-Omethylcytosine
  modified_base 73: mod_base = OTHER; note = 2'-Omethyladenosine

SEQ ID NO: 7146 - RNA, 76 nt, synthetic construct; identical to SEQ ID NO: 625
  source 1..76: mol_type = other RNA
  modified_base 74: mod_base = OTHER; note = 2'-O-(2-Methoxyethyl) 5-methylcytosine

SEQ ID NO: 7147 - RNA, 75 nt, synthetic construct; identical to SEQ ID NO: 3311
  source 1..75: mol_type = other RNA
  modified_base 1: mod_base = OTHER; note = 2'-Omethylguanosine phosphorothiorate
  modified_base 2: mod_base = OTHER; note = 2'-Omethylguanosine
  modified_base 12: mod_base = OTHER; note = 2'-Omethylguanosine
  modified_base 13: mod_base = OTHER; note = Uridine phosphorothiorate
  modified_base 16: mod_base = OTHER; note = 2'-fluorouridine
  modified_base 24: mod_base = OTHER; note = 2'-fluoroadenosine
  modified_base 39: mod_base = OTHER; note = 2'-fluorouridine
  modified_base 42: mod_base = OTHER; note = 2'-fluoroadenosine
  modified_base 55: mod_base = OTHER; note = 2'-fluorocytosine phosphorothiorate
  modified_base 59: mod_base = OTHER; note = 2'-fluorouridine
  modified_base 73: mod_base = OTHER; note = Cytosine phosphorothiorate
  modified_base 74: mod_base = OTHER; note = 2'-Omethylcytosine
  modified_base 75: mod_base = OTHER; note = 2'-fluoroadenosine

SEQ ID NO: 7148 - RNA, 75 nt, synthetic construct; identical to SEQ ID NO: 3306
  source 1..75: mol_type = other RNA
  modified_base 1: mod_base = OTHER; note = 2'-Omethylguanosine phosphorothiorate
  modified_base 2: mod_base = OTHER; note = 2'-Omethyladenosine phosphorothiorate
  modified_base 8: mod_base = OTHER; note = Uridine phosphorothiorate
  modified_base 14: mod_base = OTHER; note = 2'-Omethyladenosine
  modified_base 17: mod_base = OTHER; note = 2'-Omethylguanosine
  modified_base 18: mod_base = OTHER; note = 2'-Omethylguanosine
  modified_base 21: mod_base = OTHER; note = 2'-Omethylguanosine
  modified_base 24: mod_base = OTHER; note = 2'-Omethylcytosine
  modified_base 26: mod_base = OTHER; note = 2'-Omethyluridine
  modified_base 32: mod_base = OTHER; note = 2'-fluorouridine
  modified_base 40: mod_base = OTHER; note = 2'-Omethyladenosine phosphorothiorate
  modified_base 43: mod_base = OTHER; note = 2'-Omethyladenosine phosphorothiorate
  modified_base 44: mod_base = OTHER; note = 2'-Omethylguanosine
  modified_base 45: mod_base = OTHER; note = 2'-fluoroguanosine
  modified_base 46: mod_base = OTHER; note = 2'-fluorouridine
  modified_base 47: mod_base = OTHER; note = 2'-fluorouridine
  modified_base 54: mod_base = OTHER; note = Uridine phosphorothiorate
  modified_base 70: mod_base = OTHER; note = 2'-Omethyluridine
  modified_base 72: mod_base = OTHER; note = 2'-Omethyladenosine

SEQ ID NO: 7149 - RNA, 76 nt, synthetic construct; identical to SEQ ID NO: 3795
  source 1..76: mol_type = other RNA
  modified_base 1: mod_base = OTHER; note = 2'-Omethylguanosine
  modified_base 2: mod_base = OTHER; note = 2'-Omethylcytosine
  modified_base 3: mod_base = OTHER; note = 2'-Omethylcytosine
  modified_base 4: mod_base = OTHER; note = 2'-Omethyluridine
  modified_base 5: mod_base = OTHER; note = 2'-Omethylcytosine
  modified_base 6: mod_base = OTHER; note = 2'-Omethylcytosine
  modified_base 16: mod_base = OTHER; note = 2'-Omethyluridine
  modified_base 17: mod_base = OTHER; note = 2'-Omethylguanosine
  modified_base 18: mod_base = OTHER; note = 2'-Omethylguanosine
  modified_base 20: mod_base = OTHER; note = 2'-Omethyluridine
  modified_base 22: mod_base = OTHER; note = 2'-Omethyladenosine
  modified_base 23: mod_base = OTHER; note = 2'-Omethylguanosine
  modified_base 24: mod_base = OTHER; note = 2'-Omethylguanosine
  modified_base 25: mod_base = OTHER; note = 2'-Omethylcytosine
  modified_base 33: mod_base = OTHER; note = 2'-fluorouridine
  modified_base 35: mod_base = OTHER; note = Cytosine phosphorothiorate
  modified_base 37: mod_base = OTHER; note = Adenosine phosphorothiorate
  modified_base 38: mod_base = OTHER; note = Adenosine phosphorothiorate
  modified_base 41: mod_base = OTHER; note = 2'-Omethylcytosine
  modified_base 42: mod_base = OTHER; note = 2'-Omethylguanosine
  modified_base 43: mod_base = OTHER; note = 2'-Omethylguanosine
  modified_base 44: mod_base = OTHER; note = 2'-Omethylguanosine
  modified_base 45: mod_base = OTHER; note = 2'-Omethylguanosine
  modified_base 46: mod_base = OTHER; note = 2'-fluoroadenosine
  modified_base 48: mod_base = OTHER; note = 2'-fluorouridine
  modified_base 49: mod_base = OTHER; note = 2'-Omethylguanosine
  modified_base 50: mod_base = OTHER; note = 2'-Omethylcytosine
  modified_base 52: mod_base = OTHER; note = 2'-Omethylguanosine
  modified_base 54: mod_base = OTHER; note = 2'-Omethyluridine
  modified_base 55: mod_base = OTHER; note = Uridine phosphorothiorate
  modified_base 56: mod_base = OTHER; note = 2'-Omethylcytosine
  modified_base 57: mod_base = OTHER; note = 2'-fluoroguanosine
  modified_base 59: mod_base = OTHER; note = 2'-Omethylguanosine
  modified_base 61: mod_base = OTHER; note = 2'-Omethylcytosine
  modified_base 65: mod_base = OTHER; note = 2'-Omethyluridine
  modified_base 73: mod_base = OTHER; note = 2'-Omethylguanosine

SEQ ID NO: 7150 - RNA, 76 nt, synthetic construct; identical to SEQ ID NO: 3675
  source 1..76: mol_type = other RNA
  modified_base 1: mod_base = OTHER; note = 2'-Omethylguanosine
  modified_base 2: mod_base = OTHER; note = 2'-Omethylcytosine
  modified_base 3: mod_base = OTHER; note = 2'-Omethylcytosine
  modified_base 4: mod_base = OTHER; note = 2'-Omethyluridine
  modified_base 5: mod_base = OTHER; note = 2'-Omethylcytosine
  modified_base 6: mod_base = OTHER; note = 2'-Omethylcytosine
  modified_base 14: mod_base = OTHER; note = 2'-Omethyladenosine
  modified_base 15: mod_base = OTHER; note = 2'-Omethyladenosine
  modified_base 16: mod_base = OTHER; note = 2'-Omethyluridine
  modified_base 17: mod_base = OTHER; note = 2'-Omethylguanosine
  modified_base 18: mod_base = OTHER; note = 2'-Omethylguanosine
  modified_base 20: mod_base = OTHER; note = 2'-Omethyluridine
  modified_base 25: mod_base = OTHER; note = 2'-Omethylcytosine
  modified_base 33: mod_base = OTHER; note = 2'-fluorouridine
  modified_base 35: mod_base = OTHER; note = Cytosine phosphorothiorate
  modified_base 37: mod_base = OTHER; note = Adenosine phosphorothiorate
  modified_base 38: mod_base = OTHER; note = Adenosine phosphorothiorate
  modified_base 41: mod_base = OTHER; note = 2'-Omethylcytosine
  modified_base 42: mod_base = OTHER; note = 2'-Omethyladenosine
  modified_base 43: mod_base = OTHER; note = 2'-Omethylcytosine
  modified_base 44: mod_base = OTHER; note = 2'-fluoroadenosine
  modified_base 49: mod_base = OTHER; note = 2'-Omethylcytosine
  modified_base 50: mod_base = OTHER; note = 2'-Omethylcytosine
  modified_base 52: mod_base = OTHER; note = 2'-Omethylguanosine
  modified_base 54: mod_base = OTHER; note = 2'-Omethyluridine
  modified_base 55: mod_base = OTHER; note = Uridine phosphorothiorate
  modified_base 56: mod_base = OTHER; note = 2'-Omethylcytosine
  modified_base 57: mod_base = OTHER; note = 2'-fluoroguanosine
  modified_base 59: mod_base = OTHER; note = 2'-Omethylguanosine
  modified_base 61: mod_base = OTHER; note = 2'-Omethylcytosine
  modified_base 65: mod_base = OTHER; note = 2'-Omethylguanosine
  modified_base 73: mod_base = OTHER; note = 2'-Omethylguanosine

SEQ ID NO: 7151 - RNA, 76 nt, synthetic construct; identical to SEQ ID NO: 625
  source 1..76: mol_type = other RNA
  modified_base 1: mod_base = OTHER; note = 2'-Omethylguanosine
  modified_base 2: mod_base = OTHER; note = 2'-Omethylguanosine
  modified_base 3: mod_base = OTHER; note = 2'-Omethylcytosine
  modified_base 4: mod_base = OTHER; note = 2'-Omethyluridine
  modified_base 5: mod_base = OTHER; note = 2'-Omethylcytosine
  modified_base 6: mod_base = OTHER; note = 2'-Omethylcytosine
  modified_base 7: mod_base = OTHER; note = Guanosine phosphorothiorate
  modified_base 11: mod_base = OTHER; note = 2'-Omethylcytosine
  modified_base 12: mod_base = OTHER; note = 2'-Omethylguanosine phosphorothiorate
  modified_base 14: mod_base = OTHER; note = 2'-Omethyladenosine
  modified_base 16: mod_base = OTHER; note = 2'-Omethyluridine
  modified_base 17: mod_base = OTHER; note = 2'-Omethylguanosine
  modified_base 18: mod_base = OTHER; note = 2'-Omethylguanosine
  modified_base 19: mod_base = OTHER; note = 2'-fluoroadenosine phosphorothiorate
  modified_base 21: mod_base = OTHER; note = 2'-fluoroadenosine phosphorothiorate
  modified_base 22: mod_base = OTHER; note = Guanosine phosphorothiorate
  modified_base 23: mod_base = OTHER; note = 2'-Omethylcytosine
  modified_base 24: mod_base = OTHER; note = 2'-Omethylguanosine
  modified_base 25: mod_base = OTHER; note = 2'-Omethylcytosine phosphorothiorate
  modified_base 26: mod_base = OTHER; note = Adenosine phosphorothiorate
  modified_base 30: mod_base = OTHER; note = 2'-Omethylguanosine phosphorothiorate
  modified_base 33: mod_base = OTHER; note = 2'-fluorouridine
  modified_base 35: mod_base = OTHER; note = 2'-Omethylcytosine phosphorothiorate
  modified_base 37: mod_base = OTHER; note = Adenosine phosphorothiorate
  modified_base 38: mod_base = OTHER; note = Adenosine phosphorothiorate
  modified_base 40: mod_base = OTHER; note = 2'-Omethyluridine phosphorothiorate
  modified_base 41: mod_base = OTHER; note = 2'-Omethylcytosine
  modified_base 42: mod_base = OTHER; note = 2'-Omethyladenosine
  modified_base 43: mod_base = OTHER; note = 2'-Omethyladenosine
  modified_base 44: mod_base = OTHER; note = 2'-Omethyladenosine
  modified_base 48: mod_base = OTHER; note = 2'-Omethyluridine phosphorothiorate
  modified_base 49: mod_base = OTHER; note = 2'-Omethylcytosine
  modified_base 50: mod_base = OTHER; note = 2'-Omethylcytosine
  modified_base 51: mod_base = OTHER; note = 2'-Omethylguanosine
  modified_base 52: mod_base = OTHER; note = 2'-Omethylguanosine
  modified_base 54: mod_base = OTHER; note = 2'-Omethyluridine
  modified_base 55: mod_base = OTHER; note = Uridine phosphorothiorate
  modified_base 56: mod_base = OTHER; note = Cytosine phosphorothiorate
  modified_base 57: mod_base = OTHER; note = 2'-Omethylguanosine
  modified_base 61: mod_base = OTHER; note = 2'-Omethylcytosine phosphorothiorate
  modified_base 62: mod_base = OTHER; note = 2'-Omethylcytosine
  modified_base 63: mod_base = OTHER; note = 2'-fluorocytosine
  modified_base 64: mod_base = OTHER; note = 2'-Omethylguanosine
  modified_base 65: mod_base = OTHER; note = 2'-Omethylguanosine
  modified_base 66: mod_base = OTHER; note = 2'-Omethylcytosine
  modified_base 67: mod_base = OTHER; note = 2'-fluoroguanosine
  modified_base 68: mod_base = OTHER; note = 2'-fluoroguanosine
  modified_base 69: mod_base = OTHER; note = 2'-fluoroadenosine
  modified_base 72: mod_base = OTHER; note = Cytosine phosphorothiorate
  modified_base 73: mod_base = OTHER; note = 2'-Omethylguanosine
  modified_base 74: mod_base = OTHER; note = 2'-fluorocytosine phosphorothiorate
  modified_base 75: mod_base = OTHER; note = 2'-fluorocytosine phosphorothiorate
  modified_base 76: mod_base = OTHER; note = 2'-Omethyladenosine

SEQ ID NO: 7152 - RNA, 76 nt, synthetic construct; identical to SEQ ID NO: 3289
  source 1..76: mol_type = other RNA
  modified_base 1: mod_base = OTHER; note = 2'-Omethylguanosine
  modified_base 10: mod_base = OTHER; note = 2'-Omethylguanosine
  modified_base 11: mod_base = OTHER; note = 2'-Omethylcytosine
  modified_base 12: mod_base = OTHER; note = 2'-Omethyluridine
  modified_base 13: mod_base = OTHER; note = 2'-Omethylcytosine
  modified_base 14: mod_base = OTHER; note = 2'-Omethyladenosine
  modified_base 15: mod_base = OTHER; note = 2'-Omethylguanosine
  modified_base 16: mod_base = OTHER; note = 2'-Omethyluridine
  modified_base 18: mod_base = OTHER; note = 2'-Omethylguanosine
  modified_base 19: mod_base = OTHER; note = 2'-Omethylguanosine
  modified_base 20: mod_base = OTHER; note = Uridine phosphorothiorate
  modified_base 21: mod_base = OTHER; note = Adenosine phosphorothiorate
  modified_base 22: mod_base = OTHER; note = 2'-Omethylguanosine
  modified_base 23: mod_base = OTHER; note = 2'-Omethyladenosine
  modified_base 24: mod_base = OTHER; note = 2'-Omethylguanosine
  modified_base 25: mod_base = OTHER; note = 2'-Omethylcytosine
  modified_base 33: mod_base = OTHER; note = Uridine phosphorothiorate
  modified_base 34: mod_base = OTHER; note = 2'-Omethyluridine
  modified_base 35: mod_base = OTHER; note = Uridine phosphorothiorate
  modified_base 37: mod_base = OTHER; note = Adenosine phosphorothiorate
  modified_base 38: mod_base = OTHER; note = Adenosine phosphorothiorate
  modified_base 41: mod_base = OTHER; note = 2'-fluorouridine
  modified_base 42: mod_base = OTHER; note = 2'-Omethylguanosine
  modified_base 43: mod_base = OTHER; note = 2'-Omethyladenosine
  modified_base 44: mod_base = OTHER; note = 2'-fluoroguanosine
  modified_base 49: mod_base = OTHER; note = 2'-Omethylcytosine
  modified_base 50: mod_base = OTHER; note = 2'-Omethyladenosine
  modified_base 52: mod_base = OTHER; note = 2'-Omethylguanosine
  modified_base 54: mod_base = OTHER; note = Uridine phosphorothiorate
  modified_base 55: mod_base = OTHER; note = Uridine phosphorothiorate
  modified_base 61: mod_base = OTHER; note = 2'-Omethylcytosine
  modified_base 65: mod_base = OTHER; note = 2'-Omethylguanosine
  modified_base 73: mod_base = OTHER; note = 2'-Omethylguanosine

SEQ ID NO: 7153 - RNA, 76 nt, synthetic construct; identical to SEQ ID NO: 625
  source 1..76: mol_type = other RNA
  modified_base 1: mod_base = OTHER; note = 2'-Omethylguanosine
  modified_base 10: mod_base = OTHER; note = 2'-Omethylguanosine
  modified_base 13: mod_base = OTHER; note = 2'-Omethylcytosine
  modified_base 17: mod_base = OTHER; note = Guanosine phosphorothiorate
  modified_base 18: mod_base = OTHER; note = 2'-Omethylguanosine
  modified_base 19: mod_base = OTHER; note = Adenosine phosphorothiorate
  modified_base 20: mod_base = OTHER; note = 2'-Omethyluridine
  modified_base 25: mod_base = OTHER; note = 2'-Omethylcytosine
  modified_base 29: mod_base = OTHER; note = 2'-Omethylguanosine
  modified_base 33: mod_base = OTHER; note = 2'-fluorouridine
  modified_base 35: mod_base = OTHER; note = Cytosine phosphorothiorate
  modified_base 37: mod_base = OTHER; note = Adenosine phosphorothiorate
  modified_base 38: mod_base = OTHER; note = Adenosine phosphorothiorate
  modified_base 41: mod_base = OTHER; note = 2'-fluorocytosine
  modified_base 43: mod_base = OTHER; note = 2'-Omethyladenosine
  modified_base 44: mod_base = OTHER; note = 2'-fluoroadenosine
  modified_base 46: mod_base = OTHER; note = Guanosine phosphorothiorate
  modified_base 50: mod_base = OTHER; note = 2'-Omethylcytosine
  modified_base 52: mod_base = OTHER; note = 2'-Omethylguanosine
  modified_base 54: mod_base = OTHER; note = Uridine phosphorothiorate
  modified_base 55: mod_base = OTHER; note = Uridine phosphorothiorate
  modified_base 57: mod_base = OTHER; note = Guanosine phosphorothiorate
  modified_base 62: mod_base = OTHER; note = 2'-Omethylcytosine
  modified_base 63: mod_base = OTHER; note = 2'-fluorocytosine
  modified_base 65: mod_base = OTHER; note = 2'-Omethylguanosine
  modified_base 71: mod_base = OTHER; note = 2'-Omethyluridine
  modified_base 73: mod_base = OTHER; note = 2'-Omethylguanosine

SEQ ID NO: 7154 - RNA, 75 nt, synthetic construct; identical to SEQ ID NO: 3336
  source 1..75: mol_type = other RNA
  modified_base 1: mod_base = OTHER; note = 2'-Omethylcytosine
  modified_base 4: mod_base = OTHER; note = 2'-Omethylguanosine phosphorothiorate
  modified_base 13: mod_base = OTHER; note = 2'-fluoroadenosine phosphorothiorate
  modified_base 16: mod_base = OTHER; note = 2'-fluorocytosine
  modified_base 18: mod_base = OTHER; note = 2'-fluoroguanosine
  modified_base 19: mod_base = OTHER; note = 2'-fluorouridine
  modified_base 23: mod_base = OTHER; note = Guanosine phosphorothiorate
  modified_base 25: mod_base = OTHER; note = 2'-fluoroadenosine
  modified_base 29: mod_base = OTHER; note = Guanosine phosphorothiorate
  modified_base 39: mod_base = OTHER; note = 2'-fluorocytosine
  modified_base 40: mod_base = OTHER; note = 2'-fluorouridine
  modified_base 41: mod_base = OTHER; note = 2'-Omethylguanosine phosphorothiorate
  modified_base 48: mod_base = OTHER; note = 2'-Omethylcytosine phosphorothiorate
  modified_base 54: mod_base = OTHER; note = Uridine phosphorothiorate
  modified_base 69: mod_base = OTHER; note = Guanosine phosphorothiorate
  modified_base 73: mod_base = OTHER; note = Cytosine phosphorothiorate
  modified_base 74: mod_base = OTHER; note = 2'-Omethylcytosine
  modified_base 75: mod_base = OTHER; note = 2'-fluoroadenosine

SEQ ID NO: 7155 - RNA, 76 nt, synthetic construct; identical to SEQ ID NO: 625
  source 1..76: mol_type = other RNA
  modified_base 1: mod_base = OTHER; note = 2'-Omethylguanosine phosphorothiorate
  modified_base 2: mod_base = OTHER; note = 2'-Omethylguanosine
  modified_base 33: mod_base = OTHER; note = 2'-fluorouridine
  modified_base 35: mod_base = OTHER; note = Cytosine phosphorothiorate
  modified_base 37: mod_base = OTHER; note = Adenosine phosphorothiorate
  modified_base 38: mod_base = OTHER; note = Adenosine phosphorothiorate
  modified_base 52: mod_base = OTHER; note = 2'-fluoroguanosine
  modified_base 56: mod_base = OTHER; note = 2'-Omethylcytosine
  modified_base 62: mod_base = OTHER; note = 2'-Omethylcytosine
  modified_base 73: mod_base = OTHER; note = 2'-Omethylguanosine
  modified_base 75: mod_base = OTHER; note = 2'-fluorocytosine phosphorothiorate

SEQ ID NO: 7156 - RNA, 85 nt, synthetic construct; identical to SEQ ID NO: 3317
  source 1..85: mol_type = other RNA
  modified_base 1: mod_base = OTHER; note = 2'-Omethylguanosine phosphorothiorate
  modified_base 2: mod_base = OTHER; note = 2'-Omethylcytosine phosphorothiorate
  modified_base 15: mod_base = OTHER; note = Guanosine phosphorothiorate
  modified_base 55: mod_base = OTHER; note = 2'-fluorocytosine
  modified_base 80: mod_base = OTHER; note = 2'-fluoroguanosine
  modified_base 84: mod_base = OTHER; note = 2'-Omethylcytosine

SEQ ID NO: 7157 - RNA, 76 nt, synthetic construct; identical to SEQ ID NO: 3329
  source 1..76: mol_type = other RNA
  modified_base 1: mod_base = OTHER; note = 2'-Omethylguanosine phosphorothiorate
  modified_base 2: mod_base = OTHER; note = 2'-Omethylguanosine phosphorothiorate
  modified_base 3: mod_base = OTHER; note = 2'-Omethylcytosine
  modified_base 4: mod_base = OTHER; note = 2'-Omethylcytosine
  modified_base 5: mod_base = OTHER; note = 2'-Omethylcytosine
  modified_base 6: mod_base = OTHER; note = 2'-Omethylcytosine
  modified_base 16: mod_base = OTHER; note = 2'-Omethyluridine
  modified_base 17: mod_base = OTHER; note = 2'-Omethylguanosine
  modified_base 18: mod_base = OTHER; note = 2'-Omethylguanosine
  modified_base 20: mod_base = OTHER; note = 2'-Omethyluridine
  modified_base 25: mod_base = OTHER; note = 2'-Omethylcytosine
  modified_base 33: mod_base = OTHER; note = 2'-fluorouridine
  modified_base 35: mod_base = OTHER; note = Cytosine phosphorothiorate
  modified_base 37: mod_base = OTHER; note = Adenosine phosphorothiorate
  modified_base 38: mod_base = OTHER; note = Adenosine phosphorothiorate
  modified_base 41: mod_base = OTHER; note = 2'-Omethylcytosine
  modified_base 44: mod_base = OTHER; note = 2'-Omethyladenosine
  modified_base 45: mod_base = OTHER; note = 2'-Omethylguanosine
  modified_base 46: mod_base = OTHER; note = 2'-fluoroguanosine
  modified_base 47: mod_base = OTHER; note = 2'-fluorouridine
  modified_base 48: mod_base = OTHER; note = 2'-fluorouridine
  modified_base 56: mod_base = OTHER; note = 2'-Omethylcytosine
  modified_base 59: mod_base = OTHER; note = 2'-Omethylguanosine
  modified_base 73: mod_base = OTHER; note = 2'-Omethylguanosine

SEQ ID NO: 7158 - RNA, 76 nt, synthetic construct; identical to SEQ ID NO: 625
  source 1..76: mol_type = other RNA
  modified_base 1: mod_base = OTHER; note = 2'-Omethylguanosine phosphorothiorate
  modified_base 2: mod_base = OTHER; note = 2'-Omethylguanosine phosphorothiorate
  modified_base 3: mod_base = OTHER; note = 2'-Omethylcytosine phosphorothiorate
  modified_base 4: mod_base = OTHER; note = 2'-Omethyluridine phosphorothiorate
  modified_base 5: mod_base = OTHER; note = 2'-Omethylcytosine phosphorothiorate
  modified_base 6: mod_base = OTHER; note = 2'-Omethylcytosine phosphorothiorate
  modified_base 10: mod_base = OTHER; note = 2'-Omethylguanosine
  modified_base 11: mod_base = OTHER; note = 2'-Omethylcytosine
  modified_base 12: mod_base = OTHER; note = 2'-Omethylguanosine
  modified_base 13: mod_base = OTHER; note = 2'-Omethylcytosine
  modified_base 22: mod_base = OTHER; note = 2'-Omethylguanosine
  modified_base 23: mod_base = OTHER; note = 2'-Omethylcytosine
  modified_base 24: mod_base = OTHER; note = 2'-Omethylguanosine
  modified_base 25: mod_base = OTHER; note = 2'-Omethylcytosine
  modified_base 49: mod_base = OTHER; note = 2'-Omethylcytosine
  modified_base 50: mod_base = OTHER; note = 2'-Omethylcytosine
  modified_base 51: mod_base = OTHER; note = 2'-Omethylguanosine
  modified_base 52: mod_base = OTHER; note = 2'-Omethylguanosine
  modified_base 53: mod_base = OTHER; note = 2'-Omethylguanosine

SEQ ID NO: 7159 - RNA, 86 nt, synthetic construct; identical to SEQ ID NO: 3290
  source 1..86: mol_type = other RNA
  modified_base 78: mod_base = OTHER; note = 2'-fluorocytosine

SEQ ID NO: 7160 - RNA, 76 nt, synthetic construct; identical to SEQ ID NO: 625
  source 1..76: mol_type = other RNA
  modified_base 1: mod_base = OTHER; note = 2'-Omethylguanosine
  modified_base 3: mod_base = OTHER; note = 2'-fluorocytosine
  modified_base 5: mod_base = OTHER; note = Cytosine phosphorothiorate
  modified_base 6: mod_base = OTHER; note = Cytosine phosphorothiorate
  modified_base 7: mod_base = OTHER; note = Guanosine phosphorothiorate
  modified_base 9: mod_base = OTHER; note = Guanosine phosphorothiorate
  modified_base 13: mod_base = OTHER; note = 2'-Omethylcytosine
  modified_base 20: mod_base = OTHER; note = Uridine phosphorothiorate
  modified_base 21: mod_base = OTHER; note = Adenosine phosphorothiorate
  modified_base 23: mod_base = OTHER; note = Cytosine phosphorothiorate
  modified_base 24: mod_base = OTHER; note = 2'-Omethylguanosine
  modified_base 26: mod_base = OTHER; note = 2'-Omethyladenosine
  modified_base 29: mod_base = OTHER; note = 2'-Omethylguanosine
  modified_base 31: mod_base = OTHER; note = 2'-fluoroadenosine
  modified_base 33: mod_base = OTHER; note = 2'-fluorouridine phosphorothiorate
  modified_base 34: mod_base = OTHER; note = 2'-Omethyluridine
  modified_base 36: mod_base = OTHER; note = Adenosine phosphorothiorate
  modified_base 38: mod_base = OTHER; note = 2'-fluoroadenosine phosphorothiorate
  modified_base 39: mod_base = OTHER; note = 2'-Omethyluridine
  modified_base 41: mod_base = OTHER; note = 2'-Omethylcytosine
  modified_base 43: mod_base = OTHER; note = 2'-Omethyladenosine
  modified_base 46: mod_base = OTHER; note = 2'-fluoroguanosine
  modified_base 47: mod_base = OTHER; note = Uridine phosphorothiorate
  modified_base 50: mod_base = OTHER; note = 2'-Omethylcytosine
  modified_base 56: mod_base = OTHER; note = Cytosine phosphorothiorate
  modified_base 58: mod_base = OTHER; note = 2'-fluoroadenosine
  modified_base 62: mod_base = OTHER; note = 2'-fluorocytosine
  modified_base 63: mod_base = OTHER; note = 2'-Omethylcytosine
  modified_base 64: mod_base = OTHER; note = 2'-Omethylguanosine
  modified_base 66: mod_base = OTHER; note = 2'-Omethylcytosine phosphorothiorate
  modified_base 73: mod_base = OTHER; note = 2'-Omethylguanosine phosphorothiorate

SEQ ID NO: 7161 - RNA, 73 nt, synthetic construct; identical to SEQ ID NO: 935
  source 1..73: mol_type = other RNA
  modified_base 1: mod_base = OTHER; note = 2'-Omethylguanosine phosphorothiorate
  modified_base 2: mod_base = OTHER; note = 2'-Omethylguanosine phosphorothiorate
  modified_base 5: mod_base = OTHER; note = 2'-Omethylcytosine
  modified_base 61: mod_base = OTHER; note = 2'-fluorocytosine
  modified_base 72: mod_base = OTHER; note = 2'-Omethylcytosine

SEQ ID NO: 7162 - RNA, 76 nt, synthetic construct; identical to SEQ ID NO: 3289
  source 1..76: mol_type = other RNA
  modified_base 1: mod_base = OTHER; note = 2'-Omethylguanosine
  modified_base 10: mod_base = OTHER; note = 2'-Omethylguanosine
  modified_base 11: mod_base = OTHER; note = 2'-Omethylcytosine
  modified_base 12: mod_base = OTHER; note = 2'-Omethyluridine
  modified_base 13: mod_base = OTHER; note = 2'-Omethylcytosine
  modified_base 18: mod_base = OTHER; note = 2'-Omethylguanosine
  modified_base 19: mod_base = OTHER; note = 2'-Omethylguanosine
  modified_base 25: mod_base = OTHER; note = 2'-Omethylcytosine
  modified_base 33: mod_base = OTHER; note = Uridine phosphorothiorate
  modified_base 34: mod_base = OTHER; note = 2'-Omethyluridine
  modified_base 35: mod_base = OTHER; note = Uridine phosphorothiorate
  modified_base 37: mod_base = OTHER; note = Adenosine phosphorothiorate
  modified_base 38: mod_base = OTHER; note = Adenosine phosphorothiorate
  modified_base 41: mod_base = OTHER; note = 2'-Omethyluridine
  modified_base 42: mod_base = OTHER; note = 2'-Omethylguanosine
  modified_base 43: mod_base = OTHER; note = 2'-Omethyladenosine
  modified_base 44: mod_base = OTHER; note = 2'-Omethylguanosine
  modified_base 49: mod_base = OTHER; note = 2'-Omethylcytosine
  modified_base 50: mod_base = OTHER; note = 2'-Omethyladenosine
  modified_base 52: mod_base = OTHER; note = 2'-Omethylguanosine
  modified_base 54: mod_base = OTHER; note = Uridine phosphorothiorate
  modified_base 55: mod_base = OTHER; note = Uridine phosphorothiorate
  modified_base 61: mod_base = OTHER; note = 2'-Omethylcytosine
  modified_base 65: mod_base = OTHER; note = 2'-Omethylguanosine
  modified_base 73: mod_base = OTHER; note = 2'-Omethylguanosine

SEQ ID NO: 7163 - RNA, 76 nt, synthetic construct
  source 1..76: mol_type = other RNA
ggctccgtggcgcaaaggatagcgcatcggacttcaaattcgaaggttccgggttcgagtcccggcggagtcgcca

SEQ ID NO: 7164 - RNA, 75 nt, synthetic construct; identical to SEQ ID NO: 3306
  source 1..75: mol_type = other RNA
  modified_base 1: mod_base = OTHER; note = 2'-Omethylguanosine phosphorothiorate
  modified_base 2: mod_base = OTHER; note = 2'-Omethyladenosine
  modified_base 73: mod_base = OTHER; note = Cytosine phosphorothiorate
  modified_base 74: mod_base = OTHER; note = 2'-Omethylcytosine

SEQ ID NO: 7165 - RNA, 85 nt, synthetic construct; identical to SEQ ID NO: 3310
  source 1..85: mol_type = other RNA
  modified_base 1: mod_base = OTHER; note = 2'-Omethylcytosine
  modified_base 11: mod_base = OTHER; note = Cytosine phosphorothiorate
  modified_base 30: mod_base = OTHER; note = 2'-fluoroadenosine
  modified_base 38: mod_base = OTHER; note = Uridine phosphorothiorate
  modified_base 46: mod_base = OTHER; note = Adenosine phosphorothiorate
  modified_base 49: mod_base = OTHER; note = 2'-Omethyluridine
  modified_base 54: mod_base = OTHER; note = 2'-fluorocytosine
  modified_base 73: mod_base = OTHER; note = 2'-fluoroadenosine
  modified_base 77: mod_base = OTHER; note = Cytosine phosphorothiorate
  modified_base 84: mod_base = OTHER; note = 2'-Omethylcytosine

SEQ ID NO: 7166 - RNA, 76 nt, synthetic construct; identical to SEQ ID NO: 625
  source 1..76: mol_type = other RNA
  modified_base 1: mod_base = OTHER; note = 2'-Omethylguanosine
  modified_base 10: mod_base = OTHER; note = 2'-Omethylguanosine
  modified_base 13: mod_base = OTHER; note = 2'-Omethylcytosine
  modified_base 17: mod_base = OTHER; note = Guanosine phosphorothiorate
  modified_base 18: mod_base = OTHER; note = 2'-Omethylguanosine
  modified_base 19: mod_base = OTHER; note = Adenosine phosphorothiorate
  modified_base 20: mod_base = OTHER; note = 2'-Omethyluridine
  modified_base 25: mod_base = OTHER; note = 2'-Omethylcytosine
  modified_base 29: mod_base = OTHER; note = 2'-Omethylguanosine
  modified_base 33: mod_base = OTHER; note = 2'-fluorouridine
  modified_base 35: mod_base = OTHER; note = Cytosine phosphorothiorate
  modified_base 37: mod_base = OTHER; note = Adenosine phosphorothiorate
  modified_base 38: mod_base = OTHER; note = Adenosine phosphorothiorate
  modified_base 43: mod_base = OTHER; note = 2'-Omethyladenosine
  modified_base 44: mod_base = OTHER; note = 2'-fluoroadenosine
  modified_base 46: mod_base = OTHER; note = Guanosine phosphorothiorate
  modified_base 52: mod_base = OTHER; note = 2'-Omethylguanosine
  modified_base 54: mod_base = OTHER; note = Uridine phosphorothiorate
  modified_base 55: mod_base = OTHER; note = Uridine phosphorothiorate
  modified_base 56: mod_base = OTHER; note = 2'-Omethylcytosine
  modified_base 57: mod_base = OTHER; note = Guanosine phosphorothiorate
  modified_base 62: mod_base = OTHER; note = 2'-Omethylcytosine
  modified_base 63: mod_base = OTHER; note = 2'-fluorocytosine
  modified_base 65: mod_base = OTHER; note = 2'-Omethylguanosine
  modified_base 71: mod_base = OTHER; note = 2'-Omethyluridine
  modified_base 73: mod_base = OTHER; note = 2'-Omethylguanosine

SEQ ID NO: 7167 - RNA, 75 nt, synthetic construct; identical to SEQ ID NO: 1045
  source 1..75: mol_type = other RNA
  modified_base 1: mod_base = OTHER; note = 2'-Omethylguanosine phosphorothiorate
  modified_base 2: mod_base = OTHER; note = 2'-Omethylguanosine phosphorothiorate
  modified_base 8: mod_base = OTHER; note = Uridine phosphorothiorate
  modified_base 14: mod_base = OTHER; note = 2'-Omethyladenosine
  modified_base 17: mod_base = OTHER; note = 2'-Omethylguanosine
  modified_base 18: mod_base = OTHER; note = 2'-Omethylguanosine
  modified_base 20: mod_base = OTHER; note = 2'-Omethyladenosine phosphorothiorate
  modified_base 22: mod_base = OTHER; note = 2'-Omethylguanosine
  modified_base 25: mod_base = OTHER; note = 2'-Omethylcytosine
  modified_base 27: mod_base = OTHER; note = 2'-Omethylcytosine
  modified_base 33: mod_base = OTHER; note = 2'-fluorouridine
  modified_base 41: mod_base = OTHER; note = 2'-Omethylcytosine phosphorothiorate
  modified_base 44: mod_base = OTHER; note = 2'-Omethylcytosine phosphorothiorate
  modified_base 45: mod_base = OTHER; note = 2'-Omethylguanosine
  modified_base 46: mod_base = OTHER; note = 2'-fluoroadenosine
  modified_base 47: mod_base = OTHER; note = 2'-fluorouridine
  modified_base 54: mod_base = OTHER; note = Uridine phosphorothiorate
  modified_base 70: mod_base = OTHER; note = 2'-Omethylcytosine
  modified_base 72: mod_base = OTHER; note = 2'-Omethyluridine

SEQ ID NO: 7168 - RNA, 75 nt, synthetic construct; identical to SEQ ID NO: 3336
  source 1..75: mol_type = other RNA
  modified_base 18: mod_base = OTHER; note = 2'-fluoroguanosine
  modified_base 45: mod_base = OTHER; note = Guanosine phosphorothiorate
  modified_base 48: mod_base = OTHER; note = 2'-fluorocytosine phosphorothiorate
  modified_base 51: mod_base = OTHER; note = Guanosine phosphorothiorate
  modified_base 63: mod_base = OTHER; note = 2'-fluorouridine phosphorothiorate
  modified_base 71: mod_base = OTHER; note = Cytosine phosphorothiorate
  modified_base 74: mod_base = OTHER; note = Cytosine phosphorothiorate

SEQ ID NO: 7169 - RNA, 85 nt, synthetic construct; identical to SEQ ID NO: 3286
  source 1..85: mol_type = other RNA
  modified_base 1: mod_base = OTHER; note = 2'-Omethylcytosine
  modified_base 30: mod_base = OTHER; note = 2'-fluoroadenosine
  modified_base 34: mod_base = OTHER; note = 2'-fluorouridine
  modified_base 38: mod_base = OTHER; note = Uridine phosphorothiorate
  modified_base 54: mod_base = OTHER; note = 2'-fluorocytosine
  modified_base 62: mod_base = OTHER; note = Guanosine phosphorothiorate
  modified_base 76: mod_base = OTHER; note = 2'-fluorocytosine
  modified_base 84: mod_base = OTHER; note = 2'-Omethylcytosine

SEQ ID NO: 7170 - RNA, 75 nt, synthetic construct; identical to SEQ ID NO: 1045
  source 1..75: mol_type = other RNA
  modified_base 1: mod_base = OTHER; note = 2'-Omethylguanosine
  modified_base 2: mod_base = OTHER; note = 2'-Omethylguanosine
  modified_base 3: mod_base = OTHER; note = 2'-Omethyluridine
  modified_base 4: mod_base = OTHER; note = 2'-Omethyluridine
  modified_base 5: mod_base = OTHER; note = 2'-Omethylcytosine
  modified_base 6: mod_base = OTHER; note = 2'-Omethylcytosine
  modified_base 13: mod_base = OTHER; note = 2'-Omethyluridine
  modified_base 14: mod_base = OTHER; note = 2'-Omethyladenosine
  modified_base 15: mod_base = OTHER; note = 2'-Omethyladenosine
  modified_base 16: mod_base = OTHER; note = 2'-Omethyluridine
  modified_base 17: mod_base = OTHER; note = 2'-Omethylguanosine
  modified_base 18: mod_base = OTHER; note = 2'-Omethylguanosine
  modified_base 19: mod_base = OTHER; note = Uridine phosphorothiorate
  modified_base 20: mod_base = OTHER; note = 2'-Omethyladenosine
  modified_base 21: mod_base = OTHER; note = Adenosine phosphorothiorate
  modified_base 25: mod_base = OTHER; note = 2'-Omethylcytosine
  modified_base 33: mod_base = OTHER; note = 2'-fluorouridine
  modified_base 34: mod_base = OTHER; note = 2'-Omethyluridine
  modified_base 35: mod_base = OTHER; note = Uridine phosphorothiorate
  modified_base 37: mod_base = OTHER; note = Adenosine phosphorothiorate
  modified_base 38: mod_base = OTHER; note = Adenosine phosphorothiorate
  modified_base 48: mod_base = OTHER; note = 2'-Omethylcytosine
  modified_base 49: mod_base = OTHER; note = 2'-Omethylcytosine
  modified_base 50: mod_base = OTHER; note = 2'-Omethylguanosine
  modified_base 51: mod_base = OTHER; note = 2'-Omethyladenosine
  modified_base 52: mod_base = OTHER; note = 2'-Omethylguanosine
  modified_base 53: mod_base = OTHER; note = Uridine phosphorothiorate
  modified_base 54: mod_base = OTHER; note = Uridine phosphorothiorate
  modified_base 60: mod_base = OTHER; note = 2'-Omethylcytosine
  modified_base 64: mod_base = OTHER; note = 2'-Omethylguanosine
  modified_base 72: mod_base = OTHER; note = 2'-Omethyluridine

SEQ ID NO: 7171 - RNA, 85 nt, synthetic construct; identical to SEQ ID NO: 3301
  source 1..85: mol_type = other RNA
  modified_base 1: mod_base = OTHER; note = 2'-Omethylguanosine
  modified_base 2: mod_base = OTHER; note = 2'-Omethylcytosine
  modified_base 3: mod_base = OTHER; note = Uridine phosphorothiorate
  modified_base 5: mod_base = OTHER; note = Uridine phosphorothiorate
  modified_base 8: mod_base = OTHER; note = 2'-fluorouridine
  modified_base 10: mod_base = OTHER; note = 2'-fluoroguanosine
  modified_base 23: mod_base = OTHER; note = Guanosine phosphorothiorate
  modified_base 29: mod_base = OTHER; note = 2'-fluoroguanosine
  modified_base 30: mod_base = OTHER; note = 2'-fluoroguanosine
  modified_base 36: mod_base = OTHER; note = 2'-fluoroadenosine
  modified_base 38: mod_base = OTHER; note = Adenosine phosphorothiorate
  modified_base 43: mod_base = OTHER; note = 2'-Omethyladenosine phosphorothiorate
  modified_base 60: mod_base = OTHER; note = 2'-fluoroadenosine
  modified_base 62: mod_base = OTHER; note = Guanosine phosphorothiorate
  modified_base 70: mod_base = OTHER; note = 2'-fluorocytosine
  modified_base 73: mod_base = OTHER; note = 2'-fluoroguanosine
  modified_base 82: mod_base = OTHER; note = 2'-Omethylguanosine phosphorothiorate

SEQ ID NO: 7172 - RNA, 86 nt, synthetic construct; identical to SEQ ID NO: 3290
  source 1..86: mol_type = other RNA
  modified_base 46: mod_base = OTHER; note = 2'-fluoroguanosine

SEQ ID NO: 7173 - RNA, 74 nt, synthetic construct; identical to SEQ ID NO: 766
  source 1..74: mol_type = other RNA
  modified_base 1: mod_base = OTHER; note = 2'-Omethylguanosine phosphorothiorate
  modified_base 2: mod_base = OTHER; note = 2'-Omethylguanosine phosphorothiorate
  modified_base 25: mod_base = OTHER; note = Cytosine phosphorothiorate
  modified_base 43: mod_base = OTHER; note = 2'-fluoroadenosine
  modified_base 55: mod_base = OTHER; note = Uridine phosphorothiorate
  modified_base 73: mod_base = OTHER; note = 2'-Omethylguanosine

SEQ ID NO: 7174 - RNA, 76 nt, synthetic construct; identical to SEQ ID NO: 3289
  source 1..76: mol_type = other RNA
  modified_base 16: mod_base = OTHER; note = 2'-Omethyluridine
  modified_base 73: mod_base = OTHER; note = 2'-Omethylguanosine

SEQ ID NO: 7175 - RNA, 75 nt, synthetic construct; identical to SEQ ID NO: 1045
  source 1..75: mol_type = other RNA
  modified_base 1: mod_base = OTHER; note = 2'-Omethylguanosine phosphorothiorate
  modified_base 2: mod_base = OTHER; note = 2'-Omethylguanosine phosphorothiorate
  modified_base 18: mod_base = OTHER; note = 2'-fluoroguanosine
  modified_base 19: mod_base = OTHER; note = 2'-Omethyluridine
  modified_base 21: mod_base = OTHER; note = 2'-fluoroadenosine
  modified_base 22: mod_base = OTHER; note = 2'-fluoroguanosine
  modified_base 24: mod_base = OTHER; note = 2'-fluoroadenosine
  modified_base 25: mod_base = OTHER; note = 2'-fluorocytosine
  modified_base 28: mod_base = OTHER; note = 2'-Omethyluridine
  modified_base 32: mod_base = OTHER; note = 2'-fluorocytosine
  modified_base 33: mod_base = OTHER; note = 2'-fluorouridine
  modified_base 34: mod_base = OTHER; note = 2'-fluorouridine phosphorothiorate
  modified_base 44: mod_base = OTHER; note = 2'-fluorocytosine
  modified_base 45: mod_base = OTHER; note = 2'-fluoroguanosine
  modified_base 52: mod_base = OTHER; note = 2'-fluoroguanosine phosphorothiorate
  modified_base 58: mod_base = OTHER; note = 2'-fluoroguanosine
  modified_base 64: mod_base = OTHER; note = Guanosine phosphorothiorate
  modified_base 67: mod_base = OTHER; note = Guanosine phosphorothiorate
  modified_base 68: mod_base = OTHER; note = 2'-fluoroadenosine
  modified_base 74: mod_base = OTHER; note = Cytosine phosphorothiorate
  modified_base 75: mod_base = OTHER; note = 2'-Omethyladenosine

SEQ ID NO: 7176 - RNA, 85 nt, synthetic construct; identical to SEQ ID NO: 3310
  source 1..85: mol_type = other RNA
  modified_base 1: mod_base = OTHER; note = 2'-Omethylcytosine phosphorothiorate
  modified_base 11: mod_base = OTHER; note = Cytosine phosphorothiorate
  modified_base 28: mod_base = OTHER; note = 2'-fluoroguanosine
  modified_base 30: mod_base = OTHER; note = 2'-fluoroadenosine
  modified_base 36: mod_base = OTHER; note = Guanosine phosphorothiorate
  modified_base 46: mod_base = OTHER; note = 2'-Omethyladenosine
  modified_base 49: mod_base = OTHER; note = Uridine phosphorothiorate
  modified_base 64: mod_base = OTHER; note = Uridine phosphorothiorate
  modified_base 84: mod_base = OTHER; note = 2'-Omethylcytosine

SEQ ID NO: 7177 - RNA, 75 nt, synthetic construct; identical to SEQ ID NO: 1045
  source 1..75: mol_type = other RNA
  modified_base 1: mod_base = OTHER; note = 2'-Omethylguanosine phosphorothiorate
  modified_base 2: mod_base = OTHER; note = 2'-Omethylguanosine phosphorothiorate
  modified_base 16: mod_base = OTHER; note = 2'-fluorouridine
  modified_base 18: mod_base = OTHER; note = 2'-fluoroguanosine
  modified_base 19: mod_base = OTHER; note = 2'-fluorouridine
  modified_base 22: mod_base = OTHER; note = Guanosine phosphorothiorate
  modified_base 23: mod_base = OTHER; note = 2'-fluorocytosine
  modified_base 31: mod_base = OTHER; note = 2'-Omethyladenosine
  modified_base 32: mod_base = OTHER; note = Cytosine phosphorothiorate
  modified_base 36: mod_base = OTHER; note = Adenosine phosphorothiorate
  modified_base 38: mod_base = OTHER; note = 2'-fluoroadenosine phosphorothiorate
  modified_base 43: mod_base = OTHER; note = 2'-Omethylguanosine
  modified_base 52: mod_base = OTHER; note = 2'-fluoroguanosine phosphorothiorate
  modified_base 59: mod_base = OTHER; note = Uridine phosphorothiorate
  modified_base 60: mod_base = OTHER; note = Cytosine phosphorothiorate
  modified_base 65: mod_base = OTHER; note = Uridine phosphorothiorate
  modified_base 69: mod_base = OTHER; note = Adenosine phosphorothiorate
  modified_base 72: mod_base = OTHER; note = Uridine phosphorothiorate
  modified_base 74: mod_base = OTHER; note = 2'-fluorocytosine phosphorothiorate

SEQ ID NO: 7178 - RNA, 85 nt, synthetic construct; identical to SEQ ID NO: 3317
  source 1..85: mol_type = other RNA
  modified_base 1: mod_base = OTHER; note = 2'-Omethylguanosine phosphorothiorate
  modified_base 4: mod_base = OTHER; note = 2'-fluoroguanosine phosphorothiorate
  modified_base 24: mod_base = OTHER; note = Guanosine phosphorothiorate
  modified_base 29: mod_base = OTHER; note = 2'-fluoroguanosine
  modified_base 30: mod_base = OTHER; note = 2'-fluoroguanosine
  modified_base 82: mod_base = OTHER; note = 2'-Omethylguanosine

SEQ ID NO: 7179 - RNA, 76 nt, synthetic construct; identical to SEQ ID NO: 3318
  source 1..76: mol_type = other RNA
  modified_base 1: mod_base = OTHER; note = 2'-Omethylcytosine
  modified_base 73: mod_base = OTHER; note = 2'-Omethyladenosine

SEQ ID NO: 7180 - RNA, 75 nt, synthetic construct; identical to SEQ ID NO: 3299
  source 1..75: mol_type = other RNA
  modified_base 38: mod_base = OTHER; note = 2'-fluorouridine
  modified_base 39: mod_base = OTHER; note = 2'-fluorocytosine
  modified_base 47: mod_base = OTHER; note = 2'-fluorocytosine
  modified_base 48: mod_base = OTHER; note = Cytosine phosphorothiorate
  modified_base 53: mod_base = OTHER; note = 2'-fluorouridine
  modified_base 71: mod_base = OTHER; note = 2'-fluorocytosine phosphorothiorate
  modified_base 73: mod_base = OTHER; note = Cytosine phosphorothiorate
  modified_base 74: mod_base = OTHER; note = Cytosine phosphorothiorate

SEQ ID NO: 7181 - RNA, 76 nt, synthetic construct
  source 1..76: mol_type = other RNA
ggctccgtggcgcaatggatagcgcattggacttcaaattcaaaggttaagatttcgagtatcttcggagtcgcca

SEQ ID NO: 7182 - RNA, 76 nt, synthetic construct; identical to SEQ ID NO: 3318
  source 1..76: mol_type = other RNA
  modified_base 1: mod_base = OTHER; note = 2'-Omethylcytosine
  modified_base 10: mod_base = OTHER; note = 2'-Omethylguanosine
  modified_base 11: mod_base = OTHER; note = 2'-Omethylcytosine
  modified_base 12: mod_base = OTHER; note = 2'-Omethyluridine
  modified_base 13: mod_base = OTHER; note = 2'-Omethylcytosine
  modified_base 14: mod_base = OTHER; note = 2'-Omethyladenosine
  modified_base 15: mod_base = OTHER; note = 2'-Omethylguanosine
  modified_base 16: mod_base = OTHER; note = 2'-Omethyluridine
  modified_base 18: mod_base = OTHER; note = 2'-Omethylguanosine
  modified_base 19: mod_base = OTHER; note = 2'-Omethylguanosine
  modified_base 20: mod_base = OTHER; note = Uridine phosphorothiorate
  modified_base 21: mod_base = OTHER; note = Adenosine phosphorothiorate
  modified_base 22: mod_base = OTHER; note = 2'-Omethylguanosine
  modified_base 23: mod_base = OTHER; note = 2'-Omethyladenosine
  modified_base 24: mod_base = OTHER; note = 2'-Omethylguanosine
  modified_base 25: mod_base = OTHER; note = 2'-Omethylcytosine
  modified_base 33: mod_base = OTHER; note = 2'-fluorouridine
  modified_base 34: mod_base = OTHER; note = 2'-Omethylcytosine
  modified_base 35: mod_base = OTHER; note = Uridine phosphorothiorate
  modified_base 37: mod_base = OTHER; note = Guanosine phosphorothiorate
  modified_base 38: mod_base = OTHER; note = Adenosine phosphorothiorate
  modified_base 41: mod_base = OTHER; note = 2'-Omethylcytosine
  modified_base 42: mod_base = OTHER; note = 2'-Omethyluridine
  modified_base 43: mod_base = OTHER; note = 2'-Omethyluridine
  modified_base 44: mod_base = OTHER; note = 2'-Omethyladenosine
  modified_base 49: mod_base = OTHER; note = 2'-Omethylguanosine
  modified_base 50: mod_base = OTHER; note = 2'-Omethylcytosine
  modified_base 52: mod_base = OTHER; note = 2'-Omethylguanosine
  modified_base 54: mod_base = OTHER; note = Uridine phosphorothiorate
  modified_base 55: mod_base = OTHER; note = Uridine phosphorothiorate
  modified_base 61: mod_base = OTHER; note = 2'-Omethylcytosine
  modified_base 65: mod_base = OTHER; note = 2'-Omethylcytosine
  modified_base 73: mod_base = OTHER; note = 2'-Omethyladenosine

SEQ ID NO: 7183 - RNA, 76 nt, synthetic construct; identical to SEQ ID NO: 3295
  source 1..76: mol_type = other RNA
  modified_base 1: mod_base = OTHER; note = 2'-Omethylcytosine
  modified_base 3: mod_base = OTHER; note = 2'-fluorouridine
  modified_base 6: mod_base = OTHER; note = 2'-Omethylguanosine phosphorothiorate
  modified_base 16: mod_base = OTHER; note = 2'-Omethyluridine
  modified_base 40: mod_base = OTHER; note = 2'-Omethylcytosine phosphorothiorate
  modified_base 52: mod_base = OTHER; note = 2'-fluoroguanosine phosphorothiorate
  modified_base 57: mod_base = OTHER; note = Guanosine phosphorothiorate
  modified_base 67: mod_base = OTHER; note = 2'-fluorocytosine
  modified_base 74: mod_base = OTHER; note = 2'-Omethylcytosine phosphorothiorate

SEQ ID NO: 7184 - RNA, 85 nt, synthetic construct; identical to SEQ ID NO: 3297
  source 1..85: mol_type = other RNA
  modified_base 1: mod_base = OTHER; note = 2'-Omethylguanosine
  modified_base 2: mod_base = OTHER; note = 2'-Omethylcytosine
  modified_base 3: mod_base = OTHER; note = 2'-Omethyluridine
  modified_base 4: mod_base = OTHER; note = 2'-Omethylguanosine
  modified_base 5: mod_base = OTHER; note = 2'-Omethyluridine
  modified_base 6: mod_base = OTHER; note = 2'-Omethylguanosine
  modified_base 14: mod_base = OTHER; note = 2'-Omethyladenosine
  modified_base 15: mod_base = OTHER; note = 2'-fluoroguanosine
  modified_base 16: mod_base = OTHER; note = 2'-Omethyluridine
  modified_base 17: mod_base = OTHER; note = 2'-Omethylguanosine
  modified_base 18: mod_base = OTHER; note = 2'-Omethylguanosine
  modified_base 19: mod_base = OTHER; note = 2'-fluorouridine
  modified_base 20: mod_base = OTHER; note = 2'-Omethyluridine
  modified_base 25: mod_base = OTHER; note = 2'-Omethylcytosine
  modified_base 33: mod_base = OTHER; note = 2'-fluorouridine
  modified_base 35: mod_base = OTHER; note = Cytosine phosphorothiorate
  modified_base 37: mod_base = OTHER; note = Adenosine phosphorothiorate
  modified_base 38: mod_base = OTHER; note = Adenosine phosphorothiorate
  modified_base 41: mod_base = OTHER; note = 2'-Omethylcytosine
  modified_base 42: mod_base = OTHER; note = 2'-Omethyladenosine
  modified_base 43: mod_base = OTHER; note = 2'-Omethyladenosine
  modified_base 44: mod_base = OTHER; note = 2'-Omethyluridine
  modified_base 58: mod_base = OTHER; note = 2'-Omethylguanosine
  modified_base 59: mod_base = OTHER; note = 2'-Omethylcytosine
  modified_base 61: mod_base = OTHER; note = 2'-Omethylguanosine
  modified_base 63: mod_base = OTHER; note = 2'-Omethyluridine
  modified_base 64: mod_base = OTHER; note = Uridine phosphorothiorate
  modified_base 65: mod_base = OTHER; note = 2'-Omethylcytosine
  modified_base 66: mod_base = OTHER; note = 2'-fluoroguanosine
  modified_base 68: mod_base = OTHER; note = 2'-Omethyladenosine
  modified_base 70: mod_base = OTHER; note = 2'-Omethylcytosine
  modified_base 74: mod_base = OTHER; note = 2'-Omethylcytosine
  modified_base 82: mod_base = OTHER; note = 2'-Omethylguanosine

SEQ ID NO: 7185 - RNA, 76 nt, synthetic construct; identical to SEQ ID NO: 625
  source 1..76: mol_type = other RNA
  modified_base 1: mod_base = OTHER; note = 2'-Omethylguanosine
  modified_base 2: mod_base = OTHER; note = 2'-Omethylguanosine
  modified_base 10: mod_base = OTHER; note = 2'-Omethylguanosine
  modified_base 13: mod_base = OTHER; note = 2'-Omethylcytosine
  modified_base 17: mod_base = OTHER; note = Guanosine phosphorothiorate
  modified_base 18: mod_base = OTHER; note = 2'-Omethylguanosine
  modified_base 19: mod_base = OTHER; note = Adenosine phosphorothiorate
  modified_base 20: mod_base = OTHER; note = 2'-Omethyluridine
  modified_base 25: mod_base = OTHER; note = 2'-Omethylcytosine
  modified_base 29: mod_base = OTHER; note = 2'-Omethylguanosine
  modified_base 33: mod_base = OTHER; note = 2'-fluorouridine
  modified_base 35: mod_base = OTHER; note = Cytosine phosphorothiorate
  modified_base 37: mod_base = OTHER; note = Adenosine phosphorothiorate
  modified_base 38: mod_base = OTHER; note = Adenosine phosphorothiorate
  modified_base 41: mod_base = OTHER; note = 2'-fluorocytosine
  modified_base 43: mod_base = OTHER; note = 2'-Omethyladenosine
  modified_base 44: mod_base = OTHER; note = 2'-fluoroadenosine
  modified_base 46: mod_base = OTHER; note = Guanosine phosphorothiorate
  modified_base 50: mod_base = OTHER; note = 2'-Omethylcytosine
  modified_base 52: mod_base = OTHER; note = 2'-Omethylguanosine
  modified_base 54: mod_base = OTHER; note = Uridine phosphorothiorate
  modified_base 55: mod_base = OTHER; note = Uridine phosphorothiorate
  modified_base 56: mod_base = OTHER; note = 2'-Omethylcytosine
  modified_base 57: mod_base = OTHER; note = Guanosine phosphorothiorate
  modified_base 62: mod_base = OTHER; note = 2'-Omethylcytosine
  modified_base 63: mod_base = OTHER; note = 2'-fluorocytosine
  modified_base 65: mod_base = OTHER; note = 2'-Omethylguanosine
  modified_base 71: mod_base = OTHER; note = 2'-Omethyluridine
  modified_base 73: mod_base = OTHER; note = 2'-Omethylguanosine

SEQ ID NO: 7186 - RNA, 85 nt, synthetic construct; identical to SEQ ID NO: 3288
  source 1..85: mol_type = other RNA
  modified_base 1: mod_base = OTHER; note = 2'-Omethylcytosine
  modified_base 8: mod_base = OTHER; note = Guanosine phosphorothiorate
  modified_base 19: mod_base = OTHER; note = Uridine phosphorothiorate
  modified_base 26: mod_base = OTHER; note = 2'-fluorouridine
  modified_base 30: mod_base = OTHER; note = 2'-fluoroadenosine
  modified_base 32: mod_base = OTHER; note = 2'-fluorouridine
  modified_base 34: mod_base = OTHER; note = 2'-fluorocytosine
  modified_base 46: mod_base = OTHER; note = 2'-fluoroadenosine
  modified_base 49: mod_base = OTHER; note = 2'-Omethyluridine
  modified_base 50: mod_base = OTHER; note = 2'-Omethyladenosine
  modified_base 56: mod_base = OTHER; note = 2'-Omethylguanosine
  modified_base 69: mod_base = OTHER; note = Cytosine phosphorothiorate
  modified_base 76: mod_base = OTHER; note = Cytosine phosphorothiorate
  modified_base 81: mod_base = OTHER; note = 2'-fluorouridine
  modified_base 85: mod_base = OTHER; note = 2'-fluoroadenosine

SEQ ID NO: 7187 - RNA, 75 nt, synthetic construct; identical to SEQ ID NO: 1045
  source 1..75: mol_type = other RNA
  modified_base 1: mod_base = OTHER; note = 2'-Omethylguanosine phosphorothiorate
  modified_base 2: mod_base = OTHER; note = 2'-Omethylguanosine
  modified_base 13: mod_base = OTHER; note = 2'-fluorouridine
  modified_base 19: mod_base = OTHER; note = 2'-fluorouridine
  modified_base 20: mod_base = OTHER; note = Adenosine phosphorothiorate
  modified_base 21: mod_base = OTHER; note = 2'-fluoroadenosine
  modified_base 22: mod_base = OTHER; note = 2'-Omethylguanosine
  modified_base 24: mod_base = OTHER; note = 2'-fluoroadenosine
  modified_base 25: mod_base = OTHER; note = Cytosine phosphorothiorate
  modified_base 32: mod_base = OTHER; note = 2'-fluorocytosine
  modified_base 37: mod_base = OTHER; note = 2'-fluoroadenosine phosphorothiorate
  modified_base 38: mod_base = OTHER; note = 2'-fluoroadenosine
  modified_base 39: mod_base = OTHER; note = 2'-fluorouridine
  modified_base 41: mod_base = OTHER; note = 2'-fluorocytosine
  modified_base 52: mod_base = OTHER; note = 2'-Omethylguanosine
  modified_base 57: mod_base = OTHER; note = 2'-Omethyladenosine
  modified_base 62: mod_base = OTHER; note = 2'-fluorocytosine
  modified_base 67: mod_base = OTHER; note = 2'-fluoroguanosine
  modified_base 68: mod_base = OTHER; note = 2'-fluoroadenosine
  modified_base 73: mod_base = OTHER; note = Cytosine phosphorothiorate
  modified_base 74: mod_base = OTHER; note = 2'-fluorocytosine phosphorothiorate

SEQ ID NO: 7188 - RNA, 75 nt, synthetic construct; identical to SEQ ID NO: 3299
  source 1..75: mol_type = other RNA
  modified_base 1: mod_base = OTHER; note = 2'-Omethylcytosine
  modified_base 6: mod_base = OTHER; note = 2'-Omethylguanosine phosphorothiorate
  modified_base 10: mod_base = OTHER; note = 2'-fluorocytosine
  modified_base 20: mod_base = OTHER; note = 2'-fluoroadenosine
  modified_base 21: mod_base = OTHER; note = 2'-fluoroguanosine
  modified_base 22: mod_base = OTHER; note = 2'-fluoroadenosine
  modified_base 25: mod_base = OTHER; note = 2'-Omethyladenosine phosphorothiorate
  modified_base 29: mod_base = OTHER; note = 2'-Omethylguanosine phosphorothiorate
  modified_base 35: mod_base = OTHER; note = 2'-fluoroadenosine phosphorothiorate
  modified_base 39: mod_base = OTHER; note = 2'-Omethylcytosine phosphorothiorate
  modified_base 42: mod_base = OTHER; note = 2'-fluoroadenosine
  modified_base 48: mod_base = OTHER; note = 2'-fluorocytosine
  modified_base 50: mod_base = OTHER; note = 2'-fluoroguanosine
  modified_base 52: mod_base = OTHER; note = 2'-fluoroguanosine phosphorothiorate
  modified_base 56: mod_base = OTHER; note = Adenosine phosphorothiorate
  modified_base 60: mod_base = OTHER; note = Cytosine phosphorothiorate
  modified_base 72: mod_base = OTHER; note = 2'-fluoroguanosine phosphorothiorate
  modified_base 74: mod_base = OTHER; note = 2'-Omethylcytosine

SEQ ID NO: 7189 - RNA, 76 nt, synthetic construct; identical to SEQ ID NO: 625
  source 1..76: mol_type = other RNA
  modified_base 1: mod_base = OTHER; note = 2'-Omethylguanosine phosphorothiorate
  modified_base 2: mod_base = OTHER; note = 2'-Omethylguanosine phosphorothiorate
  modified_base 3: mod_base = OTHER; note = 2'-Omethylcytosine
  modified_base 4: mod_base = OTHER; note = 2'-Omethyluridine
  modified_base 5: mod_base = OTHER; note = 2'-Omethylcytosine
  modified_base 6: mod_base = OTHER; note = 2'-Omethylcytosine
  modified_base 10: mod_base = OTHER; note = 2'-Omethylguanosine
  modified_base 12: mod_base = OTHER; note = 2'-Omethylguanosine
  modified_base 13: mod_base = OTHER; note = 2'-Omethylcytosine
  modified_base 14: mod_base = OTHER; note = 2'-Omethyladenosine
  modified_base 15: mod_base = OTHER; note = 2'-fluoroadenosine
  modified_base 16: mod_base = OTHER; note = 2'-Omethyluridine
  modified_base 17: mod_base = OTHER; note = Guanosine phosphorothiorate
  modified_base 18: mod_base = OTHER; note = 2'-Omethylguanosine
  modified_base 19: mod_base = OTHER; note = Adenosine phosphorothiorate
  modified_base 20: mod_base = OTHER; note = 2'-Omethyluridine
  modified_base 25: mod_base = OTHER; note = 2'-Omethylcytosine
  modified_base 29: mod_base = OTHER; note = 2'-Omethylguanosine
  modified_base 33: mod_base = OTHER; note = 2'-fluorouridine
  modified_base 35: mod_base = OTHER; note = Cytosine phosphorothiorate
  modified_base 37: mod_base = OTHER; note = Adenosine phosphorothiorate
  modified_base 38: mod_base = OTHER; note = Adenosine phosphorothiorate
  modified_base 40: mod_base = OTHER; note = 2'-fluorouridine
  modified_base 41: mod_base = OTHER; note = 2'-Omethylcytosine
  modified_base 42: mod_base = OTHER; note = 2'-Omethyladenosine
  modified_base 43: mod_base = OTHER; note = 2'-Omethyladenosine
  modified_base 44: mod_base = OTHER; note = 2'-fluoroadenosine
  modified_base 46: mod_base = OTHER; note = Guanosine phosphorothiorate
  modified_base 48: mod_base = OTHER; note = 2'-fluorouridine
  modified_base 49: mod_base = OTHER; note = 2'-Omethylcytosine
  modified_base 50: mod_base = OTHER; note = 2'-Omethylcytosine
  modified_base 51: mod_base = OTHER; note = 2'-Omethylguanosine
  modified_base 52: mod_base = OTHER; note = 2'-Omethylguanosine
  modified_base 53: mod_base = OTHER; note = 2'-Omethylguanosine
  modified_base 54: mod_base = OTHER; note = 2'-Omethyluridine
  modified_base 55: mod_base = OTHER; note = Uridine phosphorothiorate
  modified_base 56: mod_base = OTHER; note = 2'-Omethylcytosine
  modified_base 57: mod_base = OTHER; note = Guanosine phosphorothiorate
  modified_base 61: mod_base = OTHER; note = 2'-Omethylcytosine
  modified_base 62: mod_base = OTHER; note = 2'-Omethylcytosine
  modified_base 63: mod_base = OTHER; note = 2'-fluorocytosine
  modified_base 64: mod_base = OTHER; note = 2'-Omethylguanosine
  modified_base 65: mod_base = OTHER; note = 2'-Omethylguanosine
  modified_base 66: mod_base = OTHER; note = 2'-Omethylcytosine
  modified_base 67: mod_base = OTHER; note = 2'-Omethylguanosine
  modified_base 68: mod_base = OTHER; note = 2'-Omethylguanosine
  modified_base 71: mod_base = OTHER; note = 2'-Omethyluridine
  modified_base 73: mod_base = OTHER; note = 2'-Omethylguanosine
  modified_base 75: mod_base = OTHER; note = 2'-fluorocytosine phosphorothiorate

SEQ ID NO: 7190 - RNA, 85 nt, synthetic construct; identical to SEQ ID NO: 3297
  source 1..85: mol_type = other RNA
  modified_base 1: mod_base = OTHER; note = 2'-Omethylguanosine phosphorothiorate
  modified_base 3: mod_base = OTHER; note = 2'-fluorouridine
  modified_base 4: mod_base = OTHER; note = Guanosine phosphorothiorate
  modified_base 25: mod_base = OTHER; note = 2'-Omethylcytosine phosphorothiorate
  modified_base 54: mod_base = OTHER; note = 2'-Omethylcytosine
  modified_base 82: mod_base = OTHER; note = 2'-fluoroguanosine phosphorothiorate
  modified_base 83: mod_base = OTHER; note = Cytosine phosphorothiorate

SEQ ID NO: 7191 - RNA, 86 nt, synthetic construct; identical to SEQ ID NO: 3290
  source 1..86: mol_type = other RNA
  modified_base 74: mod_base = OTHER; note = 2'-Omethyladenosine

SEQ ID NO: 7192 - RNA, 86 nt, synthetic construct; identical to SEQ ID NO: 3290
  source 1..86: mol_type = other RNA
  modified_base 72: mod_base = OTHER; note = 2'-Omethylcytosine

SEQ ID NO: 7193 - RNA, 76 nt, synthetic construct; identical to SEQ ID NO: 625
  source 1..76: mol_type = other RNA
  modified_base 3: mod_base = OTHER; note = 2'-Omethylcytosine
  modified_base 6: mod_base = OTHER; note = 2'-Omethylcytosine
  modified_base 7: mod_base = OTHER; note = Guanosine phosphorothiorate
  modified_base 18: mod_base = OTHER; note = Guanosine phosphorothiorate
  modified_base 22: mod_base = OTHER; note = 2'-fluoroguanosine
  modified_base 23: mod_base = OTHER; note = 2'-Omethylcytosine
  modified_base 24: mod_base = OTHER; note = 2'-fluoroguanosine
  modified_base 25: mod_base = OTHER; note = 2'-Omethylcytosine
  modified_base 27: mod_base = OTHER; note = 2'-fluorouridine phosphorothiorate
  modified_base 28: mod_base = OTHER; note = 2'-Omethyluridine
  modified_base 29: mod_base = OTHER; note = 2'-fluoroguanosine
  modified_base 30: mod_base = OTHER; note = 2'-Omethylguanosine
  modified_base 31: mod_base = OTHER; note = 2'-fluoroadenosine
  modified_base 33: mod_base = OTHER; note = 2'-fluorouridine
  modified_base 34: mod_base = OTHER; note = Uridine phosphorothiorate
  modified_base 36: mod_base = OTHER; note = Adenosine phosphorothiorate
  modified_base 38: mod_base = OTHER; note = Adenosine phosphorothiorate
  modified_base 39: mod_base = OTHER; note = 2'-fluorouridine
  modified_base 40: mod_base = OTHER; note = 2'-fluorouridine
  modified_base 42: mod_base = OTHER; note = Adenosine phosphorothiorate
  modified_base 50: mod_base = OTHER; note = 2'-Omethylcytosine
  modified_base 51: mod_base = OTHER; note = Guanosine phosphorothiorate
  modified_base 52: mod_base = OTHER; note = 2'-Omethylguanosine
  modified_base 54: mod_base = OTHER; note = 2'-Omethyluridine
  modified_base 59: mod_base = OTHER; note = Guanosine phosphorothiorate
  modified_base 60: mod_base = OTHER; note = 2'-Omethyluridine
  modified_base 62: mod_base = OTHER; note = 2'-Omethylcytosine
  modified_base 64: mod_base = OTHER; note = 2'-Omethylguanosine phosphorothiorate
  modified_base 66: mod_base = OTHER; note = Cytosine phosphorothiorate
  modified_base 68: mod_base = OTHER; note = 2'-fluoroguanosine
  modified_base 69: mod_base = OTHER; note = 2'-Omethyladenosine
  modified_base 72: mod_base = OTHER; note = 2'-fluorocytosine

SEQ ID NO: 7194 - RNA, 76 nt, synthetic construct; identical to SEQ ID NO: 3295
  source 1..76: mol_type = other RNA
  modified_base 1: mod_base = OTHER; note = 2'-fluorocytosine
  modified_base 2: mod_base = OTHER; note = 2'-fluorocytosine phosphorothiorate
  modified_base 3: mod_base = OTHER; note = 2'-Omethyluridine phosphorothiorate
  modified_base 7: mod_base = OTHER; note = 2'-fluoroadenosine phosphorothiorate
  modified_base 8: mod_base = OTHER; note = 2'-Omethyluridine
  modified_base 14: mod_base = OTHER; note = 2'-fluoroadenosine phosphorothiorate
  modified_base 17: mod_base = OTHER; note = 2'-Omethyluridine
  modified_base 21: mod_base = OTHER; note = 2'-fluoroadenosine
  modified_base 29: mod_base = OTHER; note = 2'-Omethylguanosine phosphorothiorate
  modified_base 31: mod_base = OTHER; note = 2'-Omethyladenosine
  modified_base 35: mod_base = OTHER; note = 2'-fluorouridine phosphorothiorate
  modified_base 46: mod_base = OTHER; note = 2'-Omethylguanosine
  modified_base 51: mod_base = OTHER; note = 2'-Omethyluridine
  modified_base 58: mod_base = OTHER; note = 2'-fluoroadenosine phosphorothiorate
  modified_base 72: mod_base = OTHER; note = Guanosine phosphorothiorate

SEQ ID NO: 7195 - RNA, 76 nt, synthetic construct; identical to SEQ ID NO: 3419
  source 1..76: mol_type = other RNA
  modified_base 1: mod_base = OTHER; note = 2'-Omethylguanosine
  modified_base 2: mod_base = OTHER; note = 2'-Omethylguanosine
  modified_base 3: mod_base = OTHER; note = 2'-Omethylcytosine
  modified_base 4: mod_base = OTHER; note = 2'-Omethyluridine
  modified_base 5: mod_base = OTHER; note = 2'-Omethylcytosine
  modified_base 6: mod_base = OTHER; note = 2'-Omethylcytosine
  modified_base 16: mod_base = OTHER; note = 2'-Omethyluridine
  modified_base 17: mod_base = OTHER; note = 2'-Omethylguanosine
  modified_base 18: mod_base = OTHER; note = 2'-Omethylguanosine
  modified_base 20: mod_base = OTHER; note = 2'-Omethyluridine
  modified_base 25: mod_base = OTHER; note = 2'-Omethylcytosine
  modified_base 33: mod_base = OTHER; note = 2'-fluorouridine
  modified_base 35: mod_base = OTHER; note = Cytosine phosphorothiorate
  modified_base 37: mod_base = OTHER; note = Adenosine phosphorothiorate
  modified_base 38: mod_base = OTHER; note = Adenosine phosphorothiorate
  modified_base 41: mod_base = OTHER; note = 2'-Omethylguanosine
  modified_base 42: mod_base = OTHER; note = 2'-Omethylguanosine
  modified_base 43: mod_base = OTHER; note = 2'-Omethyluridine
  modified_base 44: mod_base = OTHER; note = 2'-Omethyladenosine
  modified_base 49: mod_base = OTHER; note = 2'-Omethylcytosine
  modified_base 50: mod_base = OTHER; note = 2'-Omethylcytosine
  modified_base 52: mod_base = OTHER; note = 2'-Omethylguanosine
  modified_base 54: mod_base = OTHER; note = Uridine phosphorothiorate
  modified_base 55: mod_base = OTHER; note = Uridine phosphorothiorate
  modified_base 61: mod_base = OTHER; note = 2'-Omethylcytosine
  modified_base 65: mod_base = OTHER; note = 2'-Omethylguanosine
  modified_base 73: mod_base = OTHER; note = 2'-Omethylguanosine

SEQ ID NO: 7196 - RNA, 85 nt, synthetic construct; identical to SEQ ID NO: 3297
  source 1..85: mol_type = other RNA
  modified_base 1: mod_base = OTHER; note = 2'-Omethylguanosine phosphorothiorate
  modified_base 2: mod_base = OTHER; note = 2'-Omethylcytosine
  modified_base 18: mod_base = OTHER; note = 2'-Omethylguanosine phosphorothiorate
  modified_base 22: mod_base = OTHER; note = 2'-Omethyladenosine phosphorothiorate
  modified_base 24: mod_base = OTHER; note = 2'-Omethylguanosine
  modified_base 35: mod_base = OTHER; note = 2'-fluorocytosine
  modified_base 55: mod_base = OTHER; note = 2'-fluorocytosine
  modified_base 56: mod_base = OTHER; note = 2'-Omethylguanosine
  modified_base 60: mod_base = OTHER; note = 2'-fluoroadenosine
  modified_base 80: mod_base = OTHER; note = 2'-Omethylguanosine

SEQ ID NO: 7197 - RNA, 85 nt, synthetic construct; identical to SEQ ID NO: 3310
  source 1..85: mol_type = other RNA
  modified_base 1: mod_base = OTHER; note = 2'-Omethylcytosine
  modified_base 11: mod_base = OTHER; note = Cytosine phosphorothiorate
  modified_base 27: mod_base = OTHER; note = 2'-fluorouridine
  modified_base 34: mod_base = OTHER; note = 2'-fluorouridine
  modified_base 50: mod_base = OTHER; note = Adenosine phosphorothiorate
  modified_base 59: mod_base = OTHER; note = 2'-Omethyluridine
  modified_base 84: mod_base = OTHER; note = 2'-Omethylcytosine

SEQ ID NO: 7198 - RNA, 76 nt, synthetic construct; identical to SEQ ID NO: 3295
  source 1..76: mol_type = other RNA
  modified_base 1: mod_base = OTHER; note = 2'-Omethylcytosine phosphorothiorate
  modified_base 2: mod_base = OTHER; note = 2'-Omethylcytosine
  modified_base 8: mod_base = OTHER; note = 2'-fluorouridine phosphorothiorate
  modified_base 9: mod_base = OTHER; note = 2'-fluoroadenosine
  modified_base 17: mod_base = OTHER; note = 2'-Omethyluridine
  modified_base 26: mod_base = OTHER; note = Guanosine phosphorothiorate
  modified_base 43: mod_base = OTHER; note = 2'-Omethyluridine
  modified_base 52: mod_base = OTHER; note = 2'-Omethylguanosine phosphorothiorate
  modified_base 68: mod_base = OTHER; note = 2'-fluoroguanosine
  modified_base 70: mod_base = OTHER; note = 2'-fluoroadenosine
  modified_base 74: mod_base = OTHER; note = 2'-Omethylcytosine phosphorothiorate
  modified_base 75: mod_base = OTHER; note = Cytosine phosphorothiorate

SEQ ID NO: 7199 - RNA, 76 nt, synthetic construct; identical to SEQ ID NO: 3289
  source 1..76: mol_type = other RNA
  modified_base 1: mod_base = OTHER; note = 2'-Omethylguanosine
  modified_base 2: mod_base = OTHER; note = 2'-Omethylcytosine
  modified_base 3: mod_base = OTHER; note = 2'-Omethylcytosine
  modified_base 4: mod_base = OTHER; note = 2'-Omethyluridine
  modified_base 5: mod_base = OTHER; note = 2'-Omethylguanosine
  modified_base 6: mod_base = OTHER; note = 2'-Omethylguanosine
  modified_base 14: mod_base = OTHER; note = 2'-Omethyladenosine
  modified_base 15: mod_base = OTHER; note = 2'-fluoroguanosine
  modified_base 16: mod_base = OTHER; note = 2'-Omethyluridine
  modified_base 18: mod_base = OTHER; note = 2'-Omethylguanosine
  modified_base 19: mod_base = OTHER; note = 2'-Omethylguanosine
  modified_base 25: mod_base = OTHER; note = 2'-Omethylcytosine
  modified_base 33: mod_base = OTHER; note = 2'-fluorouridine
  modified_base 35: mod_base = OTHER; note = Uridine phosphorothiorate
  modified_base 37: mod_base = OTHER; note = Adenosine phosphorothiorate
  modified_base 38: mod_base = OTHER; note = Adenosine phosphorothiorate
  modified_base 41: mod_base = OTHER; note = 2'-Omethyluridine
  modified_base 42: mod_base = OTHER; note = 2'-Omethylguanosine
  modified_base 43: mod_base = OTHER; note = 2'-Omethyladenosine
  modified_base 44: mod_base = OTHER; note = 2'-Omethylguanosine
  modified_base 49: mod_base = OTHER; note = 2'-Omethylcytosine
  modified_base 50: mod_base = OTHER; note = 2'-Omethyladenosine
  modified_base 52: mod_base = OTHER; note = 2'-Omethylguanosine
  modified_base 54: mod_base = OTHER; note = 2'-Omethyluridine
  modified_base 55: mod_base = OTHER; note = Uridine phosphorothiorate
  modified_base 56: mod_base = OTHER; note = 2'-Omethylcytosine
  modified_base 57: mod_base = OTHER; note = 2'-fluoroadenosine
  modified_base 59: mod_base = OTHER; note = 2'-Omethylguanosine
  modified_base 61: mod_base = OTHER; note = 2'-Omethylcytosine
  modified_base 65: mod_base = OTHER; note = 2'-Omethylguanosine
  modified_base 73: mod_base = OTHER; note = 2'-Omethylguanosine

SEQ ID NO: 7200 - RNA, 76 nt, synthetic construct; identical to SEQ ID NO: 625
  source 1..76: mol_type = other RNA
  modified_base 1: mod_base = OTHER; note = 2'-Omethylguanosine phosphorothiorate
  modified_base 2: mod_base = OTHER; note = 2'-Omethylguanosine phosphorothiorate
  modified_base 4: mod_base = OTHER; note = 2'-Omethyluridine
  modified_base 34: mod_base = OTHER; note = 2'-Omethyluridine
  modified_base 61: mod_base = OTHER; note = Cytosine phosphorothiorate
  modified_base 62: mod_base = OTHER; note = 2'-O-(2-Methoxyethyl) 5-methylcytosine
  modified_base 74: mod_base = OTHER; note = Cytosine phosphorothiorate
  modified_base 75: mod_base = OTHER; note = 2'-Omethylcytosine phosphorothiorate
  modified_base 76: mod_base = OTHER; note = 2'-Omethyladenosine

SEQ ID NO: 7201 - RNA, 76 nt, synthetic construct; identical to SEQ ID NO: 625
  source 1..76: mol_type = other RNA
  modified_base 1: mod_base = OTHER; note = 2'-Omethylguanosine
  modified_base 3: mod_base = OTHER; note = 2'-Omethylcytosine phosphorothiorate
  modified_base 4: mod_base = OTHER; note = 2'-fluorouridine
  modified_base 5: mod_base = OTHER; note = 2'-Omethylcytosine
  modified_base 9: mod_base = OTHER; note = Guanosine phosphorothiorate
  modified_base 10: mod_base = OTHER; note = 2'-Omethylguanosine
  modified_base 11: mod_base = OTHER; note = 2'-fluorocytosine
  modified_base 12: mod_base = OTHER; note = 2'-fluoroguanosine
  modified_base 13: mod_base = OTHER; note = 2'-Omethylcytosine
  modified_base 15: mod_base = OTHER; note = 2'-Omethyladenosine
  modified_base 16: mod_base = OTHER; note = 2'-fluorouridine
  modified_base 20: mod_base = OTHER; note = 2'-fluorouridine phosphorothiorate
  modified_base 21: mod_base = OTHER; note = Adenosine phosphorothiorate
  modified_base 25: mod_base = OTHER; note = 2'-Omethylcytosine phosphorothiorate
  modified_base 26: mod_base = OTHER; note = 2'-Omethyladenosine
  modified_base 27: mod_base = OTHER; note = Uridine phosphorothiorate
  modified_base 28: mod_base = OTHER; note = 2'-fluorouridine
  modified_base 29: mod_base = OTHER; note = 2'-Omethylguanosine phosphorothiorate
  modified_base 30: mod_base = OTHER; note = 2'-Omethylguanosine
  modified_base 32: mod_base = OTHER; note = 2'-fluorocytosine
  modified_base 33: mod_base = OTHER; note = Uridine phosphorothiorate
  modified_base 34: mod_base = OTHER; note = 2'-fluorouridine
  modified_base 37: mod_base = OTHER; note = Adenosine phosphorothiorate
  modified_base 38: mod_base = OTHER; note = 2'-Omethyladenosine
  modified_base 39: mod_base = OTHER; note = 2'-fluorouridine
  modified_base 40: mod_base = OTHER; note = 2'-Omethyluridine
  modified_base 41: mod_base = OTHER; note = 2'-fluorocytosine
  modified_base 43: mod_base = OTHER; note = Adenosine phosphorothiorate
  modified_base 44: mod_base = OTHER; note = 2'-Omethyladenosine
  modified_base 45: mod_base = OTHER; note = 2'-Omethylguanosine
  modified_base 47: mod_base = OTHER; note = 2'-fluorouridine phosphorothiorate
  modified_base 48: mod_base = OTHER; note = 2'-fluorouridine
  modified_base 53: mod_base = OTHER; note = Guanosine phosphorothiorate
  modified_base 54: mod_base = OTHER; note = 2'-fluorouridine
  modified_base 56: mod_base = OTHER; note = Cytosine phosphorothiorate
  modified_base 57: mod_base = OTHER; note = 2'-Omethylguanosine
  modified_base 59: mod_base = OTHER; note = 2'-Omethylguanosine
  modified_base 64: mod_base = OTHER; note = Guanosine phosphorothiorate
  modified_base 65: mod_base = OTHER; note = 2'-fluoroguanosine phosphorothiorate
  modified_base 66: mod_base = OTHER; note = 2'-fluorocytosine
  modified_base 70: mod_base = OTHER; note = 2'-Omethylguanosine
  modified_base 71: mod_base = OTHER; note = 2'-Omethyluridine
  modified_base 75: mod_base = OTHER; note = 2'-fluorocytosine

SEQ ID NO: 7202 - RNA, 76 nt, synthetic construct; identical to SEQ ID NO: 625
  source 1..76: mol_type = other RNA
  modified_base 2: mod_base = OTHER; note = 2'-Omethylguanosine
  modified_base 3: mod_base = OTHER; note = 2'-Omethylcytosine
  modified_base 4: mod_base = OTHER; note = 2'-fluorouridine
  modified_base 6: mod_base = OTHER; note = 2'-fluorocytosine
  modified_base 8: mod_base = OTHER; note = Uridine phosphorothiorate
  modified_base 9: mod_base = OTHER; note = Guanosine phosphorothiorate
  modified_base 10: mod_base = OTHER; note = 2'-fluoroguanosine
  modified_base 12: mod_base = OTHER; note = 2'-Omethylguanosine phosphorothiorate
  modified_base 13: mod_base = OTHER; note = 2'-fluorocytosine
  modified_base 15: mod_base = OTHER; note = 2'-Omethyladenosine
  modified_base 18: mod_base = OTHER; note = Guanosine phosphorothiorate
  modified_base 23: mod_base = OTHER; note = Cytosine phosphorothiorate
  modified_base 25: mod_base = OTHER; note = 2'-fluorocytosine
  modified_base 27: mod_base = OTHER; note = 2'-fluorouridine
  modified_base 30: mod_base = OTHER; note = 2'-fluoroguanosine phosphorothiorate
  modified_base 32: mod_base = OTHER; note = 2'-fluorocytosine
  modified_base 33: mod_base = OTHER; note = 2'-fluorouridine
  modified_base 41: mod_base = OTHER; note = 2'-Omethylcytosine
  modified_base 42: mod_base = OTHER; note = 2'-Omethyladenosine
  modified_base 43: mod_base = OTHER; note = 2'-fluoroadenosine
  modified_base 44: mod_base = OTHER; note = Adenosine phosphorothiorate
  modified_base 45: mod_base = OTHER; note = 2'-Omethylguanosine
  modified_base 51: mod_base = OTHER; note = Guanosine phosphorothiorate
  modified_base 53: mod_base = OTHER; note = 2'-Omethylguanosine
  modified_base 54: mod_base = OTHER; note = 2'-Omethyluridine
  modified_base 56: mod_base = OTHER; note = 2'-fluorocytosine
  modified_base 58: mod_base = OTHER; note = 2'-fluoroadenosine
  modified_base 63: mod_base = OTHER; note = Cytosine phosphorothiorate
  modified_base 67: mod_base = OTHER; note = Guanosine phosphorothiorate
  modified_base 68: mod_base = OTHER; note = 2'-Omethylguanosine
  modified_base 70: mod_base = OTHER; note = 2'-Omethylguanosine
  modified_base 71: mod_base = OTHER; note = 2'-Omethyluridine

SEQ ID NO: 7203 - RNA, 75 nt, synthetic construct; identical to SEQ ID NO: 3336
  source 1..75: mol_type = other RNA
  modified_base 1: mod_base = OTHER; note = Cytosine phosphorothiorate
  modified_base 18: mod_base = OTHER; note = 2'-fluoroguanosine
  modified_base 21: mod_base = OTHER; note = Guanosine phosphorothiorate
  modified_base 39: mod_base = OTHER; note = 2'-fluorocytosine
  modified_base 46: mod_base = OTHER; note = 2'-fluorouridine
  modified_base 47: mod_base = OTHER; note = Cytosine phosphorothiorate
  modified_base 52: mod_base = OTHER; note = 2'-fluoroguanosine
  modified_base 53: mod_base = OTHER; note = 2'-fluorouridine
  modified_base 63: mod_base = OTHER; note = Uridine phosphorothiorate
  modified_base 70: mod_base = OTHER; note = Guanosine phosphorothiorate
  modified_base 73: mod_base = OTHER; note = Cytosine phosphorothiorate
  modified_base 74: mod_base = OTHER; note = Cytosine phosphorothiorate

SEQ ID NO: 7204 - RNA, 85 nt, synthetic construct; identical to SEQ ID NO: 3288
  source 1..85: mol_type = other RNA
  modified_base 1: mod_base = OTHER; note = 2'-Omethylcytosine
  modified_base 15: mod_base = OTHER; note = 2'-Omethyluridine
  modified_base 25: mod_base = OTHER; note = 2'-fluoroguanosine phosphorothiorate
  modified_base 30: mod_base = OTHER; note = 2'-fluoroadenosine
  modified_base 32: mod_base = OTHER; note = 2'-fluorouridine phosphorothiorate
  modified_base 44: mod_base = OTHER; note = Guanosine phosphorothiorate
  modified_base 48: mod_base = OTHER; note = 2'-Omethyladenosine
  modified_base 50: mod_base = OTHER; note = 2'-Omethyladenosine
  modified_base 52: mod_base = OTHER; note = Guanosine phosphorothiorate
  modified_base 56: mod_base = OTHER; note = 2'-fluoroguanosine
  modified_base 57: mod_base = OTHER; note = 2'-Omethylcytosine
  modified_base 60: mod_base = OTHER; note = 2'-fluoroguanosine
  modified_base 66: mod_base = OTHER; note = Guanosine phosphorothiorate
  modified_base 67: mod_base = OTHER; note = 2'-fluoroadenosine phosphorothiorate
  modified_base 74: mod_base = OTHER; note = 2'-fluorocytosine
  modified_base 83: mod_base = OTHER; note = Cytosine phosphorothiorate

SEQ ID NO: 7205 - RNA, 85 nt, synthetic construct; identical to SEQ ID NO: 3297
  source 1..85: mol_type = other RNA
  modified_base 1: mod_base = OTHER; note = 2'-Omethylguanosine phosphorothiorate
  modified_base 2: mod_base = OTHER; note = 2'-Omethylcytosine phosphorothiorate
  modified_base 3: mod_base = OTHER; note = 2'-Omethyluridine
  modified_base 4: mod_base = OTHER; note = 2'-Omethylguanosine
  modified_base 5: mod_base = OTHER; note = 2'-Omethyluridine
  modified_base 6: mod_base = OTHER; note = 2'-Omethylguanosine
  modified_base 16: mod_base = OTHER; note = 2'-Omethyluridine
  modified_base 17: mod_base = OTHER; note = 2'-Omethylguanosine
  modified_base 18: mod_base = OTHER; note = 2'-Omethylguanosine
  modified_base 33: mod_base = OTHER; note = 2'-fluorouridine
  modified_base 35: mod_base = OTHER; note = Cytosine phosphorothiorate
  modified_base 37: mod_base = OTHER; note = Adenosine phosphorothiorate
  modified_base 38: mod_base = OTHER; note = Adenosine phosphorothiorate
  modified_base 44: mod_base = OTHER; note = 2'-Omethyluridine
  modified_base 56: mod_base = OTHER; note = 2'-fluoroguanosine
  modified_base 57: mod_base = OTHER; note = 2'-fluorocytosine
  modified_base 61: mod_base = OTHER; note = 2'-Omethylguanosine
  modified_base 62: mod_base = OTHER; note = 2'-Omethylguanosine
  modified_base 63: mod_base = OTHER; note = 2'-Omethyluridine
  modified_base 65: mod_base = OTHER; note = 2'-Omethylcytosine
  modified_base 68: mod_base = OTHER; note = 2'-Omethyladenosine
  modified_base 70: mod_base = OTHER; note = 2'-Omethylcytosine
  modified_base 71: mod_base = OTHER; note = 2'-Omethylcytosine
  modified_base 72: mod_base = OTHER; note = 2'-fluorouridine
  modified_base 73: mod_base = OTHER; note = 2'-Omethylguanosine
  modified_base 74: mod_base = OTHER; note = 2'-Omethylcytosine
  modified_base 75: mod_base = OTHER; note = 2'-Omethyluridine
  modified_base 76: mod_base = OTHER; note = 2'-Omethylcytosine
  modified_base 77: mod_base = OTHER; note = 2'-Omethyladenosine
  modified_base 82: mod_base = OTHER; note = 2'-Omethylguanosine

SEQ ID NO: 7206 - RNA, 86 nt, synthetic construct; identical to SEQ ID NO: 3290
  source 1..86: mol_type = other RNA
  modified_base 52: mod_base = OTHER; note = 2'-Omethyluridine

SEQ ID NO: 7207 - DNA, 76 bp, synthetic construct; identical to SEQ ID NO: 1924
  source 1..76: mol_type = other DNA
  modified_base 1: mod_base = OTHER; note = 2'-Omethylguanosine phosphorothiorate
  modified_base 3: mod_base = OTHER; note = 2'-O-(2-Methoxyethyl) 5-methylcytosine
  modified_base 4: mod_base = OTHER; note = Uridine phosphorothiorate
  modified_base 8: mod_base = OTHER; note = Uridine phosphorothiorate
  modified_base 9: mod_base = OTHER; note = 2'-O-(2-Methoxyethyl) guanosine
  modified_base 12: mod_base = OTHER; note = Guanosine phosphorothiorate
  modified_base 13: mod_base = OTHER; note = 2'-Omethylcytosine phosphorothiorate
  modified_base 14: mod_base = OTHER; note = 2'-Omethyladenosine
  modified_base 15: mod_base = OTHER; note = Adenosine phosphorothiorate
  modified_base 16: mod_base = OTHER; note = 2'-fluorouridine
  modified_base 21: mod_base = OTHER; note = 2'-fluoroadenosine phosphorothiorate
  modified_base 22: mod_base = OTHER; note = 2'-O-(2-Methoxyethyl) guanosine
  modified_base 24: mod_base = OTHER; note = Guanosine phosphorothiorate
  modified_base 25: mod_base = OTHER; note = 2'-Omethylcytosine
  modified_base 27: mod_base = OTHER; note = 2'-fluorouridine
  modified_base 30: mod_base = OTHER; note = 2'-fluoroguanosine
  modified_base 37: mod_base = OTHER; note = Adenosine phosphorothiorate
  modified_base 38: mod_base = OTHER; note = 2'-Omethyladenosine
  modified_base 40: mod_base = OTHER; note = Uridine phosphorothiorate
  modified_base 41: mod_base = OTHER; note = deoxycytosine phosphorothiorate
  modified_base 42: mod_base = OTHER; note = 2'-O-(2-Methoxyethyl) adenosine
  modified_base 45: mod_base = OTHER; note = 2'-fluoroguanosine
  modified_base 46: mod_base = OTHER; note = Guanosine phosphorothiorate
  modified_base 47: mod_base = OTHER; note = Uridine phosphorothiorate
  modified_base 48: mod_base = OTHER; note = 2'-O-(2-Methoxyethyl) thymine
  modified_base 51: mod_base = OTHER; note = Guanosine phosphorothiorate
  modified_base 52: mod_base = OTHER; note = deoxyguanosine phosphorothiorate
  modified_base 56: mod_base = OTHER; note = 2'-Omethylcytosine phosphorothiorate
  modified_base 60: mod_base = OTHER; note = Uridine phosphorothiorate
  modified_base 67: mod_base = OTHER; note = 2'-Omethylguanosine
  modified_base 69: mod_base = OTHER; note = Adenosine phosphorothiorate
  modified_base 70: mod_base = OTHER; note = 2'-fluoroguanosine
  modified_base 72: mod_base = OTHER; note = Cytosine phosphorothiorate
  modified_base 74: mod_base = OTHER; note = Cytosine phosphorothiorate
  modified_base 75: mod_base = OTHER; note = 2'-Omethylcytosine
  misc_feature 1..4: note = RNA
  misc_feature 5: note = DNA
  misc_feature 6..38: note = RNA
  misc_feature 39: note = DNA
  misc_feature 40: note = RNA
  misc_feature 41: note = DNA
  misc_feature 42..51: note = RNA
  misc_feature 52: note = DNA
  misc_feature 53..63: note = RNA
  misc_feature 64: note = DNA
  misc_feature 65..67: note = RNA
  misc_feature 68: note = DNA
  misc_feature 69..76: note = RNA

SEQ ID NO: 7208 - RNA, 76 nt, synthetic construct; identical to SEQ ID NO: 625
  source 1..76: mol_type = other RNA
  modified_base 3: mod_base = OTHER; note = 2'-Omethylcytosine
  modified_base 4: mod_base = OTHER; note = 2'-Omethyluridine
  modified_base 5: mod_base = OTHER; note = 2'-Omethylcytosine
  modified_base 6: mod_base = OTHER; note = 2'-Omethylcytosine
  modified_base 8: mod_base = OTHER; note = Uridine phosphorothiorate
  modified_base 12: mod_base = OTHER; note = 2'-Omethylguanosine
  modified_base 14: mod_base = OTHER; note = Adenosine phosphorothiorate
  modified_base 15: mod_base = OTHER; note = 2'-Omethyladenosine phosphorothiorate
  modified_base 16: mod_base = OTHER; note = 2'-Omethyluridine
  modified_base 17: mod_base = OTHER; note = Guanosine phosphorothiorate
  modified_base 18: mod_base = OTHER; note = 2'-Omethylguanosine
  modified_base 20: mod_base = OTHER; note = 2'-fluorouridine
  modified_base 21: mod_base = OTHER; note = Adenosine phosphorothiorate
  modified_base 25: mod_base = OTHER; note = 2'-fluorocytosine
  modified_base 28: mod_base = OTHER; note = Uridine phosphorothiorate
  modified_base 34: mod_base = OTHER; note = 2'-Omethyluridine
  modified_base 37: mod_base = OTHER; note = Adenosine phosphorothiorate
  modified_base 38: mod_base = OTHER; note = 2'-Omethyladenosine
  modified_base 40: mod_base = OTHER; note = 2'-fluorouridine
  modified_base 41: mod_base = OTHER; note = 2'-Omethylcytosine
  modified_base 42: mod_base = OTHER; note = Adenosine phosphorothiorate
  modified_base 47: mod_base = OTHER; note = 2'-fluorouridine
  modified_base 49: mod_base = OTHER; note = 2'-fluorocytosine
  modified_base 50: mod_base = OTHER; note = 2'-fluorocytosine
  modified_base 53: mod_base = OTHER; note = 2'-fluoroguanosine
  modified_base 54: mod_base = OTHER; note = Uridine phosphorothiorate
  modified_base 58: mod_base = OTHER; note = 2'-fluoroadenosine
  modified_base 59: mod_base = OTHER; note = 2'-Omethylguanosine
  modified_base 60: mod_base = OTHER; note = 2'-fluorouridine
  modified_base 63: mod_base = OTHER; note = Cytosine phosphorothiorate
  modified_base 64: mod_base = OTHER; note = 2'-fluoroguanosine phosphorothiorate
  modified_base 66: mod_base = OTHER; note = 2'-fluorocytosine phosphorothiorate
  modified_base 70: mod_base = OTHER; note = 2'-Omethylguanosine
  modified_base 73: mod_base = OTHER; note = Guanosine phosphorothiorate

SEQ ID NO: 7209 - RNA, 76 nt, synthetic construct; identical to SEQ ID NO: 3295
  source 1..76: mol_type = other RNA
  modified_base 1: mod_base = OTHER; note = 2'-fluorocytosine
  modified_base 13: mod_base = OTHER; note = 2'-fluorocytosine phosphorothiorate
  modified_base 27: mod_base = OTHER; note = 2'-fluoroguanosine phosphorothiorate
  modified_base 45: mod_base = OTHER; note = 2'-Omethylguanosine
  modified_base 51: mod_base = OTHER; note = 2'-Omethyluridine
  modified_base 53: mod_base = OTHER; note = Guanosine phosphorothiorate
  modified_base 75: mod_base = OTHER; note = 2'-fluorocytosine

SEQ ID NO: 7210 - RNA, 76 nt, synthetic construct; identical to SEQ ID NO: 3289
  source 1..76: mol_type = other RNA
  modified_base 1: mod_base = OTHER; note = 2'-Omethylguanosine
  modified_base 2: mod_base = OTHER; note = 2'-Omethylcytosine
  modified_base 3: mod_base = OTHER; note = 2'-Omethylcytosine
  modified_base 4: mod_base = OTHER; note = 2'-Omethyluridine
  modified_base 5: mod_base = OTHER; note = 2'-Omethylguanosine
  modified_base 6: mod_base = OTHER; note = 2'-Omethylguanosine
  modified_base 49: mod_base = OTHER; note = 2'-Omethylcytosine
  modified_base 50: mod_base = OTHER; note = 2'-Omethyladenosine
  modified_base 51: mod_base = OTHER; note = 2'-Omethylguanosine
  modified_base 52: mod_base = OTHER; note = 2'-Omethylguanosine
  modified_base 53: mod_base = OTHER; note = 2'-Omethylguanosine
  modified_base 54: mod_base = OTHER; note = 2'-Omethyluridine
  modified_base 61: mod_base = OTHER; note = 2'-Omethylcytosine
  modified_base 62: mod_base = OTHER; note = 2'-Omethylcytosine
  modified_base 63: mod_base = OTHER; note = 2'-fluorocytosine
  modified_base 64: mod_base = OTHER; note = 2'-Omethyluridine
  modified_base 65: mod_base = OTHER; note = 2'-Omethylguanosine
  modified_base 66: mod_base = OTHER; note = 2'-Omethyluridine
  modified_base 67: mod_base = OTHER; note = 2'-Omethylcytosine
  modified_base 68: mod_base = OTHER; note = 2'-Omethylcytosine
  modified_base 73: mod_base = OTHER; note = 2'-Omethylguanosine

SEQ ID NO: 7211 - RNA, 76 nt, synthetic construct; identical to SEQ ID NO: 3675
  source 1..76: mol_type = other RNA
  modified_base 1: mod_base = OTHER; note = 2'-Omethylguanosine
  modified_base 10: mod_base = OTHER; note = 2'-Omethylguanosine
  modified_base 13: mod_base = OTHER; note = 2'-Omethylcytosine
  modified_base 17: mod_base = OTHER; note = Guanosine phosphorothiorate
  modified_base 18: mod_base = OTHER; note = 2'-Omethylguanosine
  modified_base 19: mod_base = OTHER; note = Adenosine phosphorothiorate
  modified_base 20: mod_base = OTHER; note = 2'-Omethyluridine
  modified_base 25: mod_base = OTHER; note = 2'-Omethylcytosine
  modified_base 29: mod_base = OTHER; note = 2'-Omethylguanosine
  modified_base 33: mod_base = OTHER; note = 2'-fluorouridine
  modified_base 35: mod_base = OTHER; note = Cytosine phosphorothiorate
  modified_base 37: mod_base = OTHER; note = Adenosine phosphorothiorate
  modified_base 38: mod_base = OTHER; note = Adenosine phosphorothiorate
  modified_base 41: mod_base = OTHER; note = 2'-fluorocytosine phosphorothiorate
  modified_base 43: mod_base = OTHER; note = 2'-Omethylcytosine
  modified_base 44: mod_base = OTHER; note = 2'-fluoroadenosine
  modified_base 46: mod_base = OTHER; note = Guanosine phosphorothiorate
  modified_base 50: mod_base = OTHER; note = 2'-Omethylcytosine
  modified_base 52: mod_base = OTHER; note = 2'-Omethylguanosine
  modified_base 54: mod_base = OTHER; note = Uridine phosphorothiorate
  modified_base 55: mod_base = OTHER; note = Uridine phosphorothiorate
  modified_base 56: mod_base = OTHER; note = 2'-Omethylcytosine
  modified_base 57: mod_base = OTHER; note = Guanosine phosphorothiorate
  modified_base 62: mod_base = OTHER; note = 2'-Omethylcytosine
  modified_base 63: mod_base = OTHER; note = 2'-fluorocytosine
  modified_base 65: mod_base = OTHER; note = 2'-Omethylguanosine
  modified_base 71: mod_base = OTHER; note = 2'-Omethylguanosine
  modified_base 73: mod_base = OTHER; note = 2'-Omethylguanosine

SEQ ID NO: 7212 - RNA, 85 nt, synthetic construct; identical to SEQ ID NO: 3288
  source 1..85: mol_type = other RNA
  modified_base 1: mod_base = OTHER; note = 2'-Omethylcytosine phosphorothiorate
  modified_base 2: mod_base = OTHER; note = 2'-fluorocytosine
  modified_base 14: mod_base = OTHER; note = 2'-fluoroguanosine phosphorothiorate
  modified_base 25: mod_base = OTHER; note = 2'-fluoroguanosine
  modified_base 26: mod_base = OTHER; note = 2'-Omethyluridine phosphorothiorate
  modified_base 27: mod_base = OTHER; note = 2'-fluorouridine
  modified_base 30: mod_base = OTHER; note = 2'-fluoroadenosine
  modified_base 34: mod_base = OTHER; note = 2'-fluorocytosine
  modified_base 36: mod_base = OTHER; note = Guanosine phosphorothiorate
  modified_base 42: mod_base = OTHER; note = Adenosine phosphorothiorate
  modified_base 50: mod_base = OTHER; note = Adenosine phosphorothiorate
  modified_base 53: mod_base = OTHER; note = 2'-Omethyluridine
  modified_base 54: mod_base = OTHER; note = Cytosine phosphorothiorate
  modified_base 58: mod_base = OTHER; note = 2'-fluoroguanosine
  modified_base 60: mod_base = OTHER; note = 2'-fluoroguanosine
  modified_base 65: mod_base = OTHER; note = Cytosine phosphorothiorate
  modified_base 73: mod_base = OTHER; note = 2'-fluoroadenosine
  modified_base 75: mod_base = OTHER; note = Uridine phosphorothiorate
  modified_base 77: mod_base = OTHER; note = 2'-fluorocytosine
  modified_base 84: mod_base = OTHER; note = Cytosine phosphorothiorate

SEQ ID NO: 7213 - RNA, 76 nt, synthetic construct; identical to SEQ ID NO: 3342
  source 1..76: mol_type = other RNA
  modified_base 1: mod_base = OTHER; note = 2'-Omethylguanosine
  modified_base 2: mod_base = OTHER; note = 2'-Omethylguanosine
  modified_base 3: mod_base = OTHER; note = 2'-Omethylcytosine
  modified_base 4: mod_base = OTHER; note = 2'-Omethyluridine
  modified_base 5: mod_base = OTHER; note = 2'-Omethylcytosine
  modified_base 6: mod_base = OTHER; note = 2'-Omethylcytosine
  modified_base 10: mod_base = OTHER; note = 2'-Omethylguanosine
  modified_base 11: mod_base = OTHER; note = 2'-Omethylcytosine
  modified_base 12: mod_base = OTHER; note = 2'-Omethylguanosine
  modified_base 13: mod_base = OTHER; note = 2'-Omethylcytosine
  modified_base 16: mod_base = OTHER; note = 2'-Omethyluridine
  modified_base 17: mod_base = OTHER; note = 2'-Omethylguanosine
  modified_base 18: mod_base = OTHER; note = 2'-Omethylguanosine
  modified_base 20: mod_base = OTHER; note = 2'-Omethyluridine
  modified_base 25: mod_base = OTHER; note = 2'-Omethylcytosine
  modified_base 33: mod_base = OTHER; note = 2'-fluorouridine
  modified_base 35: mod_base = OTHER; note = Cytosine phosphorothiorate
  modified_base 37: mod_base = OTHER; note = Adenosine phosphorothiorate
  modified_base 38: mod_base = OTHER; note = Adenosine phosphorothiorate
  modified_base 41: mod_base = OTHER; note = 2'-fluorocytosine
  modified_base 42: mod_base = OTHER; note = 2'-Omethylguanosine
  modified_base 43: mod_base = OTHER; note = 2'-Omethyladenosine
  modified_base 44: mod_base = OTHER; note = 2'-fluoroadenosine
  modified_base 49: mod_base = OTHER; note = 2'-Omethylcytosine
  modified_base 50: mod_base = OTHER; note = 2'-Omethylcytosine
  modified_base 52: mod_base = OTHER; note = 2'-Omethylguanosine
  modified_base 54: mod_base = OTHER; note = 2'-Omethyluridine
  modified_base 55: mod_base = OTHER; note = Uridine phosphorothiorate
  modified_base 56: mod_base = OTHER; note = 2'-Omethylcytosine
  modified_base 57: mod_base = OTHER; note = 2'-fluoroguanosine
  modified_base 59: mod_base = OTHER; note = 2'-Omethylguanosine
  modified_base 61: mod_base = OTHER; note = 2'-Omethylcytosine
  modified_base 65: mod_base = OTHER; note = 2'-Omethylguanosine
  modified_base 73: mod_base = OTHER; note = 2'-Omethylguanosine

SEQ ID NO: 7214 - RNA, 76 nt, synthetic construct; identical to SEQ ID NO: 625
  source 1..76: mol_type = other RNA
  modified_base 6: mod_base = OTHER; note = 2'-Omethylcytosine
  modified_base 10: mod_base = OTHER; note = 2'-Omethylguanosine
  modified_base 12: mod_base = OTHER; note = 2'-fluoroguanosine
  modified_base 13: mod_base = OTHER; note = 2'-fluorocytosine phosphorothiorate
  modified_base 14: mod_base = OTHER; note = 2'-fluoroadenosine
  modified_base 15: mod_base = OTHER; note = 2'-Omethyladenosine phosphorothiorate
  modified_base 16: mod_base = OTHER; note = 2'-fluorouridine phosphorothiorate
  modified_base 17: mod_base = OTHER; note = Guanosine phosphorothiorate
  modified_base 18: mod_base = OTHER; note = 2'-fluoroguanosine
  modified_base 20: mod_base = OTHER; note = 2'-Omethyluridine
  modified_base 22: mod_base = OTHER; note = Guanosine phosphorothiorate
  modified_base 23: mod_base = OTHER; note = 2'-fluorocytosine
  modified_base 25: mod_base = OTHER; note = 2'-fluorocytosine
  modified_base 28: mod_base = OTHER; note = 2'-fluorouridine
  modified_base 29: mod_base = OTHER; note = 2'-Omethylguanosine
  modified_base 30: mod_base = OTHER; note = Guanosine phosphorothiorate
  modified_base 31: mod_base = OTHER; note = 2'-fluoroadenosine
  modified_base 34: mod_base = OTHER; note = 2'-fluorouridine phosphorothiorate
  modified_base 38: mod_base = OTHER; note = 2'-fluoroadenosine phosphorothiorate
  modified_base 39: mod_base = OTHER; note = 2'-fluorouridine
  modified_base 42: mod_base = OTHER; note = 2'-fluoroadenosine phosphorothiorate
  modified_base 43: mod_base = OTHER; note = 2'-Omethyladenosine
  modified_base 44: mod_base = OTHER; note = Adenosine phosphorothiorate
  modified_base 45: mod_base = OTHER; note = 2'-Omethylguanosine
  modified_base 47: mod_base = OTHER; note = 2'-fluorouridine
  modified_base 49: mod_base = OTHER; note = 2'-Omethylcytosine
  modified_base 51: mod_base = OTHER; note = 2'-Omethylguanosine
  modified_base 53: mod_base = OTHER; note = 2'-Omethylguanosine
  modified_base 56: mod_base = OTHER; note = Cytosine phosphorothiorate
  modified_base 57: mod_base = OTHER; note = 2'-Omethylguanosine phosphorothiorate
  modified_base 59: mod_base = OTHER; note = 2'-Omethylguanosine
  modified_base 63: mod_base = OTHER; note = 2'-fluorocytosine
  modified_base 64: mod_base = OTHER; note = Guanosine phosphorothiorate
  modified_base 65: mod_base = OTHER; note = Guanosine phosphorothiorate
  modified_base 68: mod_base = OTHER; note = 2'-fluoroguanosine
  modified_base 72: mod_base = OTHER; note = 2'-fluorocytosine
  modified_base 73: mod_base = OTHER; note = Guanosine phosphorothiorate
  modified_base 74: mod_base = OTHER; note = 2'-fluorocytosine
  modified_base 76: mod_base = OTHER; note = 2'-fluoroadenosine

SEQ ID NO: 7215 - RNA, 85 nt, synthetic construct; identical to SEQ ID NO: 3286
  source 1..85: mol_type = other RNA
  modified_base 1: mod_base = OTHER; note = 2'-Omethylcytosine
  modified_base 13: mod_base = OTHER; note = Adenosine phosphorothiorate
  modified_base 30: mod_base = OTHER; note = 2'-fluoroadenosine
  modified_base 36: mod_base = OTHER; note = Guanosine phosphorothiorate
  modified_base 44: mod_base = OTHER; note = 2'-Omethylguanosine
  modified_base 52: mod_base = OTHER; note = Guanosine phosphorothiorate
  modified_base 58: mod_base = OTHER; note = 2'-Omethylguanosine
  modified_base 73: mod_base = OTHER; note = Adenosine phosphorothiorate
  modified_base 84: mod_base = OTHER; note = Cytosine phosphorothiorate

SEQ ID NO: 7216 - RNA, 85 nt, synthetic construct; identical to SEQ ID NO: 3297
  source 1..85: mol_type = other RNA
  modified_base 1: mod_base = OTHER; note = 2'-Omethylguanosine phosphorothiorate
  modified_base 2: mod_base = OTHER; note = Cytosine phosphorothiorate
  modified_base 14: mod_base = OTHER; note = Adenosine phosphorothiorate
  modified_base 34: mod_base = OTHER; note = 2'-fluorouridine
  modified_base 44: mod_base = OTHER; note = Uridine phosphorothiorate
  modified_base 46: mod_base = OTHER; note = 2'-fluoroguanosine phosphorothiorate
  modified_base 60: mod_base = OTHER; note = 2'-fluoroadenosine
  modified_base 76: mod_base = OTHER; note = 2'-fluorocytosine
  modified_base 80: mod_base = OTHER; note = 2'-Omethylguanosine

SEQ ID NO: 7217 - RNA, 76 nt, synthetic construct; identical to SEQ ID NO: 3289
  source 1..76: mol_type = other RNA
  modified_base 1: mod_base = OTHER; note = 2'-Omethylguanosine
  modified_base 14: mod_base = OTHER; note = 2'-Omethyladenosine
  modified_base 15: mod_base = OTHER; note = 2'-fluoroguanosine
  modified_base 16: mod_base = OTHER; note = 2'-Omethyluridine
  modified_base 18: mod_base = OTHER; note = 2'-Omethylguanosine
  modified_base 19: mod_base = OTHER; note = 2'-Omethylguanosine
  modified_base 20: mod_base = OTHER; note = 2'-fluorouridine
  modified_base 54: mod_base = OTHER; note = 2'-Omethyluridine phosphorothiorate
  modified_base 55: mod_base = OTHER; note = Uridine phosphorothiorate
  modified_base 56: mod_base = OTHER; note = 2'-Omethylcytosine
  modified_base 57: mod_base = OTHER; note = 2'-Omethyladenosine
  modified_base 59: mod_base = OTHER; note = 2'-Omethylguanosine
  modified_base 73: mod_base = OTHER; note = 2'-Omethylguanosine

SEQ ID NO: 7218 - RNA, 76 nt, synthetic construct
  source 1..76: mol_type = other RNA
ggctccgtggcgcaatggatagcgcattggacttcaaattcaaaggttccgggttcgagtcccggcggagtcacca

SEQ ID NO: 7219 - RNA, 85 nt, synthetic construct; identical to SEQ ID NO: 3297
  source 1..85: mol_type = other RNA
  modified_base 1: mod_base = OTHER; note = 2'-Omethylguanosine
  modified_base 75: mod_base = OTHER; note = 2'-Omethyluridine
  modified_base 76: mod_base = OTHER; note = 2'-Omethylcytosine
  modified_base 77: mod_base = OTHER; note = 2'-Omethyladenosine
  modified_base 78: mod_base = OTHER; note = 2'-Omethylcytosine
  modified_base 80: mod_base = OTHER; note = 2'-Omethylguanosine
  modified_base 81: mod_base = OTHER; note = 2'-Omethylcytosine
  modified_base 82: mod_base = OTHER; note = 2'-Omethylguanosine

SEQ ID NO: 7220 - RNA, 76 nt, synthetic construct; identical to SEQ ID NO: 3316
  source 1..76: mol_type = other RNA
  modified_base 1: mod_base = OTHER; note = 2'-Omethyladenosine
  modified_base 14: mod_base = OTHER; note = 2'-Omethyladenosine
  modified_base 15: mod_base = OTHER; note = 2'-fluoroadenosine
  modified_base 16: mod_base = OTHER; note = 2'-Omethyluridine
  modified_base 17: mod_base = OTHER; note = 2'-Omethylguanosine
  modified_base 18: mod_base = OTHER; note = 2'-Omethylguanosine
  modified_base 19: mod_base = OTHER; note = 2'-fluoroadenosine
  modified_base 20: mod_base = OTHER; note = 2'-Omethyluridine
  modified_base 54: mod_base = OTHER; note = 2'-Omethyluridine phosphorothiorate
  modified_base 55: mod_base = OTHER; note = Uridine phosphorothiorate
  modified_base 56: mod_base = OTHER; note = 2'-Omethylcytosine
  modified_base 57: mod_base = OTHER; note = 2'-Omethylguanosine
  modified_base 59: mod_base = OTHER; note = 2'-Omethylguanosine
  modified_base 73: mod_base = OTHER; note = 2'-Omethylguanosine

SEQ ID NO: 7221 - RNA, 75 nt, synthetic construct; identical to SEQ ID NO: 1045
  source 1..75: mol_type = other RNA
  modified_base 1: mod_base = OTHER; note = 2'-Omethylguanosine phosphorothiorate
  modified_base 2: mod_base = OTHER; note = 2'-Omethylguanosine
  modified_base 3: mod_base = OTHER; note = 2'-Omethyluridine
  modified_base 4: mod_base = OTHER; note = 2'-Omethyluridine
  modified_base 5: mod_base = OTHER; note = 2'-Omethylcytosine
  modified_base 6: mod_base = OTHER; note = 2'-Omethylcytosine
  modified_base 44: mod_base = OTHER; note = 2'-Omethylcytosine
  modified_base 45: mod_base = OTHER; note = 2'-Omethylguanosine
  modified_base 46: mod_base = OTHER; note = 2'-fluoroadenosine
  modified_base 47: mod_base = OTHER; note = 2'-fluorouridine
  modified_base 48: mod_base = OTHER; note = 2'-Omethylcytosine
  modified_base 72: mod_base = OTHER; note = 2'-Omethyluridine

SEQ ID NO: 7222 - RNA, 86 nt, synthetic construct; identical to SEQ ID NO: 3290
  source 1..86: mol_type = other RNA
  modified_base 1: mod_base = OTHER; note = 2'-Omethyladenosine phosphorothiorate
  modified_base 2: mod_base = OTHER; note = 2'-Omethylcytosine
  modified_base 3: mod_base = OTHER; note = 2'-Omethylcytosine
  modified_base 4: mod_base = OTHER; note = 2'-Omethyladenosine
  modified_base 5: mod_base = OTHER; note = 2'-Omethylguanosine
  modified_base 6: mod_base = OTHER; note = 2'-Omethylguanosine
  modified_base 44: mod_base = OTHER; note = 2'-Omethyluridine
  modified_base 57: mod_base = OTHER; note = 2'-fluoroguanosine
  modified_base 58: mod_base = OTHER; note = 2'-Omethylcytosine
  modified_base 59: mod_base = OTHER; note = 2'-Omethylguanosine
  modified_base 83: mod_base = OTHER; note = 2'-Omethyladenosine

SEQ ID NO: 7223 - RNA, 75 nt, synthetic construct; identical to SEQ ID NO: 3311
  source 1..75: mol_type = other RNA
  modified_base 1: mod_base = OTHER; note = 2'-Omethylguanosine phosphorothiorate
  modified_base 2: mod_base = OTHER; note = 2'-Omethylguanosine
  modified_base 13: mod_base = OTHER; note = Uridine phosphorothiorate
  modified_base 14: mod_base = OTHER; note = Adenosine phosphorothiorate
  modified_base 15: mod_base = OTHER; note = 2'-fluoroadenosine
  modified_base 18: mod_base = OTHER; note = 2'-fluoroguanosine
  modified_base 19: mod_base = OTHER; note = 2'-fluorouridine
  modified_base 20: mod_base = OTHER; note = 2'-Omethyladenosine
  modified_base 21: mod_base = OTHER; note = 2'-fluoroadenosine
  modified_base 22: mod_base = OTHER; note = Guanosine phosphorothiorate
  modified_base 23: mod_base = OTHER; note = 2'-fluorocytosine
  modified_base 31: mod_base = OTHER; note = 2'-Omethyladenosine
  modified_base 38: mod_base = OTHER; note = 2'-Omethyladenosine
  modified_base 47: mod_base = OTHER; note = 2'-fluorouridine
  modified_base 65: mod_base = OTHER; note = 2'-fluorouridine
  modified_base 66: mod_base = OTHER; note = 2'-fluoroguanosine
  modified_base 67: mod_base = OTHER; note = Guanosine phosphorothiorate
  modified_base 69: mod_base = OTHER; note = 2'-fluoroadenosine
  modified_base 72: mod_base = OTHER; note = 2'-fluorouridine phosphorothiorate
  modified_base 74: mod_base = OTHER; note = Cytosine phosphorothiorate
  modified_base 75: mod_base = OTHER; note = 2'-Omethyladenosine

SEQ ID NO: 7224 - RNA, 75 nt, synthetic construct; identical to SEQ ID NO: 1045
  source 1..75: mol_type = other RNA
  modified_base 1: mod_base = OTHER; note = 2'-fluoroguanosine
  modified_base 2: mod_base = OTHER; note = Guanosine phosphorothiorate
  modified_base 4: mod_base = OTHER; note = 2'-fluorouridine phosphorothiorate
  modified_base 19: mod_base = OTHER; note = 2'-fluorouridine
  modified_base 20: mod_base = OTHER; note = 2'-Omethyladenosine
  modified_base 21: mod_base = OTHER; note = 2'-fluoroadenosine
  modified_base 22: mod_base = OTHER; note = Guanosine phosphorothiorate
  modified_base 23: mod_base = OTHER; note = 2'-fluorocytosine
  modified_base 28: mod_base = OTHER; note = 2'-fluorouridine
  modified_base 39: mod_base = OTHER; note = Uridine phosphorothiorate
  modified_base 40: mod_base = OTHER; note = 2'-fluorocytosine
  modified_base 47: mod_base = OTHER; note = 2'-fluorouridine phosphorothiorate
  modified_base 53: mod_base = OTHER; note = 2'-fluorouridine phosphorothiorate
  modified_base 64: mod_base = OTHER; note = Guanosine phosphorothiorate
  modified_base 65: mod_base = OTHER; note = Uridine phosphorothiorate
  modified_base 66: mod_base = OTHER; note = 2'-fluoroguanosine
  modified_base 68: mod_base = OTHER; note = 2'-fluoroadenosine
  modified_base 69: mod_base = OTHER; note = Adenosine phosphorothiorate
  modified_base 70: mod_base = OTHER; note = Cytosine phosphorothiorate
  modified_base 72: mod_base = OTHER; note = Uridine phosphorothiorate
  modified_base 73: mod_base = OTHER; note = Cytosine phosphorothiorate

SEQ ID NO: 7225 - RNA, 76 nt, synthetic construct
  source 1..76: mol_type = other RNA
ggctgcttggcgcaatggatagcgcattggacttcaaattcaaaggttaggggttcgagtcccctagcagtcgcca

SEQ ID NO: 7226 - RNA, 75 nt, synthetic construct; identical to SEQ ID NO: 3311
  source 1..75: mol_type = other RNA
  modified_base 1: mod_base = OTHER; note = 2'-fluoroguanosine phosphorothiorate
  modified_base 2: mod_base = OTHER; note = 2'-Omethylguanosine phosphorothiorate
  modified_base 12: mod_base = OTHER; note = 2'-fluoroguanosine
  modified_base 19: mod_base = OTHER; note = 2'-fluorouridine
  modified_base 22: mod_base = OTHER; note = 2'-fluoroguanosine phosphorothiorate
  modified_base 23: mod_base = OTHER; note = 2'-fluorocytosine
  modified_base 39: mod_base = OTHER; note = 2'-Omethyluridine
  modified_base 43: mod_base = OTHER; note = 2'-fluoroguanosine
  modified_base 59: mod_base = OTHER; note = Uridine phosphorothiorate
  modified_base 60: mod_base = OTHER; note = 2'-fluorocytosine
  modified_base 61: mod_base = OTHER; note = 2'-fluorouridine
  modified_base 65: mod_base = OTHER; note = Uridine phosphorothiorate
  modified_base 66: mod_base = OTHER; note = 2'-fluoroguanosine
  modified_base 73: mod_base = OTHER; note = 2'-fluorocytosine phosphorothiorate

SEQ ID NO: 7227 - RNA, 75 nt, synthetic construct; identical to SEQ ID NO: 1045
  source 1..75: mol_type = other RNA
  modified_base 1: mod_base = OTHER; note = 2'-Omethylguanosine
  modified_base 2: mod_base = OTHER; note = 2'-Omethylguanosine
  modified_base 3: mod_base = OTHER; note = 2'-Omethyluridine
  modified_base 4: mod_base = OTHER; note = 2'-Omethyluridine
  modified_base 5: mod_base = OTHER; note = 2'-Omethylcytosine
  modified_base 6: mod_base = OTHER; note = 2'-Omethylcytosine
  modified_base 16: mod_base = OTHER; note = 2'-Omethyluridine
  modified_base 17: mod_base = OTHER; note = 2'-Omethylguanosine
  modified_base 18: mod_base = OTHER; note = 2'-Omethylguanosine
  modified_base 20: mod_base = OTHER; note = 2'-Omethyladenosine
  modified_base 25: mod_base = OTHER; note = 2'-Omethylcytosine
  modified_base 33: mod_base = OTHER; note = 2'-fluorouridine
  modified_base 35: mod_base = OTHER; note = Uridine phosphorothiorate
  modified_base 37: mod_base = OTHER; note = Adenosine phosphorothiorate
  modified_base 38: mod_base = OTHER; note = Adenosine phosphorothiorate
  modified_base 41: mod_base = OTHER; note = 2'-fluorocytosine
  modified_base 42: mod_base = OTHER; note = 2'-Omethyladenosine
  modified_base 43: mod_base = OTHER; note = 2'-Omethylguanosine
  modified_base 44: mod_base = OTHER; note = 2'-fluorocytosine
  modified_base 48: mod_base = OTHER; note = 2'-Omethylcytosine
  modified_base 49: mod_base = OTHER; note = 2'-Omethylcytosine
  modified_base 51: mod_base = OTHER; note = 2'-Omethyladenosine
  modified_base 53: mod_base = OTHER; note = 2'-Omethyluridine
  modified_base 54: mod_base = OTHER; note = Uridine phosphorothiorate
  modified_base 55: mod_base = OTHER; note = 2'-Omethylcytosine
  modified_base 56: mod_base = OTHER; note = 2'-fluoroguanosine
  modified_base 58: mod_base = OTHER; note = 2'-Omethylguanosine
  modified_base 60: mod_base = OTHER; note = 2'-Omethylcytosine
  modified_base 61: mod_base = OTHER; note = 2'-Omethyluridine
  modified_base 62: mod_base = OTHER; note = 2'-fluorocytosine
  modified_base 63: mod_base = OTHER; note = 2'-Omethylguanosine
  modified_base 64: mod_base = OTHER; note = 2'-Omethylguanosine
  modified_base 72: mod_base = OTHER; note = 2'-Omethyluridine

SEQ ID NO: 7228 - DNA, 76 bp, synthetic construct; identical to SEQ ID NO: 1924
  source 1..76: mol_type = other DNA
  modified_base 1: mod_base = OTHER; note = 2'-Omethylguanosine phosphorothiorate
  modified_base 2: mod_base = OTHER; note = deoxyguanosine phosphorothiorate
  modified_base 4: mod_base = OTHER; note = 2'-O-(2-Methoxyethyl) thymine
  modified_base 9: mod_base = OTHER; note = Guanosine phosphorothiorate
  modified_base 10: mod_base = OTHER; note = 2'-O-(2-Methoxyethyl) guanosine
  modified_base 15: mod_base = OTHER; note = Adenosine phosphorothiorate
  modified_base 17: mod_base = OTHER; note = Guanosine phosphorothiorate
  modified_base 19: mod_base = OTHER; note = 2'-fluoroadenosine phosphorothiorate
  modified_base 20: mod_base = OTHER; note = 2'-Omethyluridine
  modified_base 24: mod_base = OTHER; note = 2'-Omethylguanosine
  modified_base 25: mod_base = OTHER; note = 2'-fluorocytosine
  modified_base 28: mod_base = OTHER; note = 2'-Omethyluridine
  modified_base 30: mod_base = OTHER; note = Guanosine phosphorothiorate
  modified_base 31: mod_base = OTHER; note = 2'-fluoroadenosine phosphorothiorate
  modified_base 32: mod_base = OTHER; note = 2'-fluorocytosine
  modified_base 33: mod_base = OTHER; note = Uridine phosphorothiorate
  modified_base 35: mod_base = OTHER; note = Cytosine phosphorothiorate
  modified_base 38: mod_base = OTHER; note = 2'-Omethyladenosine phosphorothiorate
  modified_base 41: mod_base = OTHER; note = Cytosine phosphorothiorate
  modified_base 42: mod_base = OTHER; note = 2'-Omethyladenosine
  modified_base 44: mod_base = OTHER; note = 2'-O-(2-Methoxyethyl) adenosine phosphorothiorate
  modified_base 45: mod_base = OTHER; note = 2'-Omethylguanosine
  modified_base 54: mod_base = OTHER; note = Uridine phosphorothiorate
  modified_base 55: mod_base = OTHER; note = deoxyuridine phosphorothiorate
  modified_base 59: mod_base = OTHER; note = 2'-O-(2-Methoxyethyl) guanosine
  modified_base 62: mod_base = OTHER; note = Cytosine phosphorothiorate
  modified_base 63: mod_base = OTHER; note = 2'-fluorocytosine
  modified_base 76: mod_base = OTHER; note = 2'-O-(2-Methoxyethyl) adenosine
  misc_feature 1: note = RNA
  misc_feature 2: note = DNA
  misc_feature 3..15: note = RNA
  misc_feature 16: note = DNA
  misc_feature 17..28: note = RNA
  misc_feature 29: note = DNA
  misc_feature 30..33: note = RNA
  misc_feature 34: note = DNA
  misc_feature 35..54: note = RNA
  misc_feature 55: note = DNA
  misc_feature 56..64: note = RNA
  misc_feature 65..66: note = DNA
  misc_feature 67..76: note = RNA

SEQ ID NO: 7229 - RNA, 85 nt, synthetic construct; identical to SEQ ID NO: 3297
  source 1..85: mol_type = other RNA
  modified_base 60: mod_base = OTHER; note = 2'-Omethyladenosine
  modified_base 72: mod_base = OTHER; note = 2'-Omethyluridine

SEQ ID NO: 7230 - RNA, 85 nt, synthetic construct; identical to SEQ ID NO: 3317
  source 1..85: mol_type = other RNA
  modified_base 1: mod_base = OTHER; note = 2'-Omethylguanosine phosphorothiorate
  modified_base 2: mod_base = OTHER; note = Cytosine phosphorothiorate
  modified_base 25: mod_base = OTHER; note = 2'-fluorocytosine
  modified_base 44: mod_base = OTHER; note = 2'-Omethyluridine
  modified_base 55: mod_base = OTHER; note = 2'-fluorocytosine
  modified_base 56: mod_base = OTHER; note = 2'-fluoroguanosine phosphorothiorate
  modified_base 80: mod_base = OTHER; note = 2'-Omethylguanosine
  modified_base 82: mod_base = OTHER; note = 2'-fluoroguanosine phosphorothiorate

SEQ ID NO: 7231 - RNA, 76 nt, synthetic construct; identical to SEQ ID NO: 625
  source 1..76: mol_type = other RNA
  modified_base 1: mod_base = OTHER; note = 2'-Omethylguanosine
  modified_base 10: mod_base = OTHER; note = 2'-Omethylguanosine
  modified_base 13: mod_base = OTHER; note = 2'-Omethylcytosine
  modified_base 17: mod_base = OTHER; note = Guanosine phosphorothiorate
  modified_base 18: mod_base = OTHER; note = 2'-Omethylguanosine
  modified_base 19: mod_base = OTHER; note = Adenosine phosphorothiorate
  modified_base 20: mod_base = OTHER; note = 2'-Omethyluridine
  modified_base 29: mod_base = OTHER; note = 2'-Omethylguanosine
  modified_base 33: mod_base = OTHER; note = 2'-fluorouridine
  modified_base 35: mod_base = OTHER; note = Cytosine phosphorothiorate
  modified_base 37: mod_base = OTHER; note = Adenosine phosphorothiorate
  modified_base 38: mod_base = OTHER; note = Adenosine phosphorothiorate
  modified_base 41: mod_base = OTHER; note = 2'-fluorocytosine
  modified_base 43: mod_base = OTHER; note = 2'-Omethyladenosine
  modified_base 44: mod_base = OTHER; note = 2'-fluoroadenosine
  modified_base 46: mod_base = OTHER; note = Guanosine phosphorothiorate
  modified_base 50: mod_base = OTHER; note = 2'-Omethylcytosine
  modified_base 52: mod_base = OTHER; note = 2'-Omethylguanosine
  modified_base 54: mod_base = OTHER; note = Uridine phosphorothiorate
  modified_base 55: mod_base = OTHER; note = Uridine phosphorothiorate
  modified_base 56: mod_base = OTHER; note = 2'-Omethylcytosine
  modified_base 57: mod_base = OTHER; note = Guanosine phosphorothiorate
  modified_base 62: mod_base = OTHER; note = 2'-Omethylcytosine
  modified_base 63: mod_base = OTHER; note = 2'-fluorocytosine
  modified_base 65: mod_base = OTHER; note = 2'-Omethylguanosine
  modified_base 71: mod_base = OTHER; note = 2'-Omethyluridine
  modified_base 73: mod_base = OTHER; note = 2'-Omethylguanosine

SEQ ID NO: 7232 - RNA, 86 nt, synthetic construct; identical to SEQ ID NO: 3290
  source 1..86: mol_type = other RNA
  modified_base 1: mod_base = OTHER; note = 2'-Omethyladenosine
  modified_base 2: mod_base = OTHER; note = 2'-Omethylcytosine
  modified_base 3: mod_base = OTHER; note = 2'-Omethylcytosine
  modified_base 4: mod_base = OTHER; note = 2'-Omethyladenosine
  modified_base 5: mod_base = OTHER; note = 2'-Omethylguanosine
  modified_base 6: mod_base = OTHER; note = 2'-Omethylguanosine
  modified_base 22: mod_base = OTHER; note = 2'-Omethyladenosine
  modified_base 23: mod_base = OTHER; note = 2'-Omethylguanosine
  modified_base 24: mod_base = OTHER; note = 2'-Omethylguanosine
  modified_base 25: mod_base = OTHER; note = 2'-Omethylcytosine

SEQ ID NO: 7233 - RNA, 76 nt, synthetic construct
  source 1..76: mol_type = other RNA
ggctccgtggcgcaatggatagcgcattggacttcaaaagcaaaggttccgggttcgagtcccggcggagtcgcca

SEQ ID NO: 7234 - RNA, 76 nt, synthetic construct; identical to SEQ ID NO: 625
  source 1..76: mol_type = other RNA
  modified_base 1: mod_base = OTHER; note = 2'-Omethylguanosine
  modified_base 17: mod_base = OTHER; note = 2'-Omethylguanosine
  modified_base 18: mod_base = OTHER; note = 2'-Omethylguanosine
  modified_base 50: mod_base = OTHER; note = 2'-Omethylcytosine
  modified_base 52: mod_base = OTHER; note = 2'-Omethylguanosine
  modified_base 54: mod_base = OTHER; note = 2'-Omethylthymine
  modified_base 73: mod_base = OTHER; note = 2'-Omethylguanosine

SEQ ID NO: 7235 - RNA, 76 nt, synthetic construct; identical to SEQ ID NO: 625
  source 1..76: mol_type = other RNA
  modified_base 1: mod_base = OTHER; note = 2'-Omethylguanosine phosphorothiorate
  modified_base 2: mod_base = OTHER; note = 2'-Omethylguanosine phosphorothiorate
  modified_base 73: mod_base = OTHER; note = Guanosine phosphorothiorate
  modified_base 74: mod_base = OTHER; note = Cytosine phosphorothiorate
  modified_base 75: mod_base = OTHER; note = 2'-Omethylcytosine

SEQ ID NO: 7236 - RNA, 75 nt, synthetic construct; identical to SEQ ID NO: 1045
  source 1..75: mol_type = other RNA
  modified_base 1: mod_base = OTHER; note = 2'-Omethylguanosine phosphorothiorate
  modified_base 2: mod_base = OTHER; note = 2'-Omethylguanosine phosphorothiorate
  modified_base 10: mod_base = OTHER; note = 2'-fluoroguanosine
  modified_base 13: mod_base = OTHER; note = 2'-fluorouridine phosphorothiorate
  modified_base 20: mod_base = OTHER; note = 2'-fluoroadenosine
  modified_base 22: mod_base = OTHER; note = 2'-fluoroguanosine
  modified_base 23: mod_base = OTHER; note = Cytosine phosphorothiorate
  modified_base 24: mod_base = OTHER; note = 2'-fluoroadenosine
  modified_base 28: mod_base = OTHER; note = Uridine phosphorothiorate
  modified_base 39: mod_base = OTHER; note = 2'-fluorouridine phosphorothiorate
  modified_base 42: mod_base = OTHER; note = 2'-fluoroadenosine
  modified_base 44: mod_base = OTHER; note = 2'-fluorocytosine
  modified_base 48: mod_base = OTHER; note = 2'-fluorocytosine
  modified_base 51: mod_base = OTHER; note = Adenosine phosphorothiorate
  modified_base 57: mod_base = OTHER; note = 2'-fluoroadenosine
  modified_base 60: mod_base = OTHER; note = Cytosine phosphorothiorate
  modified_base 62: mod_base = OTHER; note = Cytosine phosphorothiorate
  modified_base 68: mod_base = OTHER; note = 2'-fluoroadenosine
  modified_base 73: mod_base = OTHER; note = Cytosine phosphorothiorate
  modified_base 74: mod_base = OTHER; note = 2'-fluorocytosine phosphorothiorate

SEQ ID NO: 7237 - RNA, 75 nt, synthetic construct; identical to SEQ ID NO: 1045
  source 1..75: mol_type = other RNA
  modified_base 2: mod_base = OTHER; note = 2'-Omethylguanosine phosphorothiorate
  modified_base 3: mod_base = OTHER; note = 2'-Omethyluridine
  modified_base 12: mod_base = OTHER; note = Guanosine phosphorothiorate
  modified_base 14: mod_base = OTHER; note = 2'-Omethyladenosine
  modified_base 18: mod_base = OTHER; note = 2'-Omethylguanosine phosphorothiorate
  modified_base 19: mod_base = OTHER; note = 2'-fluorouridine
  modified_base 27: mod_base = OTHER; note = 2'-fluorocytosine
  modified_base 29: mod_base = OTHER; note = 2'-Omethylguanosine
  modified_base 41: mod_base = OTHER; note = 2'-fluorocytosine
  modified_base 44: mod_base = OTHER; note = 2'-Omethylcytosine
  modified_base 47: mod_base = OTHER; note = 2'-fluorouridine phosphorothiorate
  modified_base 55: mod_base = OTHER; note = 2'-Omethylcytosine phosphorothiorate
  modified_base 56: mod_base = OTHER; note = 2'-Omethylguanosine phosphorothiorate
  modified_base 57: mod_base = OTHER; note = 2'-Omethyladenosine phosphorothiorate
  modified_base 72: mod_base = OTHER; note = 2'-Omethyluridine
  modified_base 74: mod_base = OTHER; note = 2'-Omethylcytosine phosphorothiorate

SEQ ID NO: 7238 - RNA, 76 nt, synthetic construct; identical to SEQ ID NO: 625
  source 1..76: mol_type = other RNA
  modified_base 1: mod_base = OTHER; note = 2'-Omethylguanosine
  modified_base 10: mod_base = OTHER; note = 2'-Omethylguanosine
  modified_base 13: mod_base = OTHER; note = 2'-Omethylcytosine
  modified_base 17: mod_base = OTHER; note = Guanosine phosphorothiorate
  modified_base 18: mod_base = OTHER; note = 2'-Omethylguanosine
  modified_base 19: mod_base = OTHER; note = Adenosine phosphorothiorate
  modified_base 20: mod_base = OTHER; note = 2'-Omethyluridine
  modified_base 25: mod_base = OTHER; note = 2'-Omethylcytosine
  modified_base 29: mod_base = OTHER; note = 2'-fluoroguanosine
  modified_base 33: mod_base = OTHER; note = 2'-fluorouridine
  modified_base 35: mod_base = OTHER; note = Cytosine phosphorothiorate
  modified_base 37: mod_base = OTHER; note = Adenosine phosphorothiorate
  modified_base 38: mod_base = OTHER; note = Adenosine phosphorothiorate
  modified_base 43: mod_base = OTHER; note = 2'-Omethyladenosine
  modified_base 44: mod_base = OTHER; note = 2'-fluoroadenosine
  modified_base 46: mod_base = OTHER; note = Guanosine phosphorothiorate
  modified_base 50: mod_base = OTHER; note = 2'-Omethylcytosine
  modified_base 52: mod_base = OTHER; note = 2'-Omethylguanosine
  modified_base 54: mod_base = OTHER; note = Uridine phosphorothiorate
  modified_base 55: mod_base = OTHER; note = Uridine phosphorothiorate
  modified_base 56: mod_base = OTHER; note = 2'-Omethylcytosine
  modified_base 57: mod_base = OTHER; note = Guanosine phosphorothiorate
  modified_base 62: mod_base = OTHER; note = 2'-Omethylcytosine
  modified_base 63: mod_base = OTHER; note = 2'-fluorocytosine
  modified_base 65: mod_base = OTHER; note = 2'-Omethylguanosine
  modified_base 71: mod_base = OTHER; note = 2'-Omethyluridine
  modified_base 73: mod_base = OTHER; note = 2'-Omethylguanosine

SEQ ID NO: 7239 - RNA, 76 nt, synthetic construct; identical to SEQ ID NO: 625
  source 1..76: mol_type = other RNA
  modified_base 3: mod_base = OTHER; note = 2'-Omethylcytosine
  modified_base 4: mod_base = OTHER; note = 2'-Omethyluridine
  modified_base 6: mod_base = OTHER; note = 2'-fluorocytosine
  modified_base 7: mod_base = OTHER; note = Guanosine phosphorothiorate
  modified_base 9: mod_base = OTHER; note = Guanosine phosphorothiorate
  modified_base 10: mod_base = OTHER; note = 2'-Omethylguanosine
  modified_base 11: mod_base = OTHER; note = Cytosine phosphorothiorate
  modified_base 12: mod_base = OTHER; note = Guanosine phosphorothiorate
  modified_base 13: mod_base = OTHER; note = 2'-fluorocytosine
  modified_base 14: mod_base = OTHER; note = 2'-fluoroadenosine
  modified_base 17: mod_base = OTHER; note = 2'-Omethylguanosine phosphorothiorate
  modified_base 18: mod_base = OTHER; note = 2'-fluoroguanosine
  modified_base 20: mod_base = OTHER; note = 2'-fluorouridine
  modified_base 23: mod_base = OTHER; note = 2'-Omethylcytosine
  modified_base 24: mod_base = OTHER; note = 2'-Omethylguanosine
  modified_base 25: mod_base = OTHER; note = 2'-Omethylcytosine
  modified_base 26: mod_base = OTHER; note = 2'-fluoroadenosine
  modified_base 27: mod_base = OTHER; note = Uridine phosphorothiorate
  modified_base 28: mod_base = OTHER; note = 2'-fluorouridine
  modified_base 32: mod_base = OTHER; note = 2'-fluorocytosine
  modified_base 36: mod_base = OTHER; note = Adenosine phosphorothiorate
  modified_base 39: mod_base = OTHER; note = 2'-fluorouridine
  modified_base 42: mod_base = OTHER; note = 2'-fluoroadenosine
  modified_base 44: mod_base = OTHER; note = Adenosine phosphorothiorate
  modified_base 45: mod_base = OTHER; note = 2'-fluoroguanosine
  modified_base 47: mod_base = OTHER; note = 2'-Omethyluridine
  modified_base 48: mod_base = OTHER; note = 2'-Omethyluridine phosphorothiorate
  modified_base 49: mod_base = OTHER; note = 2'-fluorocytosine phosphorothiorate
  modified_base 50: mod_base = OTHER; note = 2'-Omethylcytosine
  modified_base 52: mod_base = OTHER; note = 2'-Omethylguanosine
  modified_base 53: mod_base = OTHER; note = Guanosine phosphorothiorate
  modified_base 54: mod_base = OTHER; note = 2'-Omethyluridine
  modified_base 57: mod_base = OTHER; note = 2'-fluoroguanosine
  modified_base 59: mod_base = OTHER; note = 2'-Omethylguanosine
  modified_base 63: mod_base = OTHER; note = Cytosine phosphorothiorate
  modified_base 64: mod_base = OTHER; note = 2'-fluoroguanosine
  modified_base 65: mod_base = OTHER; note = 2'-Omethylguanosine
  modified_base 69: mod_base = OTHER; note = 2'-fluoroadenosine
  modified_base 71: mod_base = OTHER; note = 2'-fluorouridine phosphorothiorate
  modified_base 72: mod_base = OTHER; note = 2'-fluorocytosine

SEQ ID NO: 7240 - RNA, 76 nt, synthetic construct; identical to SEQ ID NO: 625
  source 1..76: mol_type = other RNA
  modified_base 66: mod_base = OTHER; note = Cytosine phosphorothiorate
  modified_base 67: mod_base = OTHER; note = Guanosine phosphorothiorate
  modified_base 68: mod_base = OTHER; note = Guanosine phosphorothiorate
  modified_base 69: mod_base = OTHER; note = Adenosine phosphorothiorate
  modified_base 70: mod_base = OTHER; note = Guanosine phosphorothiorate
  modified_base 71: mod_base = OTHER; note = Uridine phosphorothiorate
  modified_base 72: mod_base = OTHER; note = Cytosine phosphorothiorate

SEQ ID NO: 7241 - RNA, 76 nt, synthetic construct; identical to SEQ ID NO: 3342
  source 1..76: mol_type = other RNA
  modified_base 1: mod_base = OTHER; note = 2'-Omethylguanosine
  modified_base 61: mod_base = OTHER; note = 2'-Omethylcytosine
  modified_base 62: mod_base = OTHER; note = 2'-Omethylcytosine
  modified_base 64: mod_base = OTHER; note = 2'-Omethylguanosine
  modified_base 65: mod_base = OTHER; note = 2'-Omethylguanosine
  modified_base 66: mod_base = OTHER; note = 2'-Omethylcytosine
  modified_base 67: mod_base = OTHER; note = 2'-Omethylguanosine
  modified_base 68: mod_base = OTHER; note = 2'-Omethylguanosine
  modified_base 69: mod_base = OTHER; note = 2'-Omethyladenosine
  modified_base 70: mod_base = OTHER; note = 2'-fluoroguanosine
  modified_base 71: mod_base = OTHER; note = 2'-Omethyluridine
  modified_base 72: mod_base = OTHER; note = 2'-Omethylcytosine
  modified_base 73: mod_base = OTHER; note = 2'-Omethylguanosine

SEQ ID NO: 7242 - RNA, 76 nt, synthetic construct; identical to SEQ ID NO: 625
  source 1..76: mol_type = other RNA
  modified_base 1: mod_base = OTHER; note = 2'-Omethylguanosine phosphorothiorate
  modified_base 2: mod_base = OTHER; note = 2'-Omethylguanosine
  modified_base 13: mod_base = OTHER; note = 2'-Omethylcytosine
  modified_base 33: mod_base = OTHER; note = 2'-fluorouridine
  modified_base 37: mod_base = OTHER; note = Adenosine phosphorothiorate
  modified_base 52: mod_base = OTHER; note = 2'-Omethylguanosine
  modified_base 54: mod_base = OTHER; note = 2'-Omethyluridine
  modified_base 59: mod_base = OTHER; note = 2'-Omethylguanosine
  modified_base 62: mod_base = OTHER; note = 2'-Omethylcytosine
  modified_base 73: mod_base = OTHER; note = 2'-Omethylguanosine
  modified_base 75: mod_base = OTHER; note = 2'-fluorocytosine phosphorothiorate

SEQ ID NO: 7243 - RNA, 75 nt, synthetic construct; identical to SEQ ID NO: 1045
  source 1..75: mol_type = other RNA
  modified_base 1: mod_base = OTHER; note = Guanosine phosphorothiorate
  modified_base 2: mod_base = OTHER; note = Guanosine phosphorothiorate
  modified_base 12: mod_base = OTHER; note = 2'-Omethylguanosine
  modified_base 19: mod_base = OTHER; note = 2'-fluorouridine
  modified_base 25: mod_base = OTHER; note = 2'-fluorocytosine
  modified_base 33: mod_base = OTHER; note = 2'-Omethyluridine
  modified_base 44: mod_base = OTHER; note = 2'-fluorocytosine
  modified_base 51: mod_base = OTHER; note = 2'-fluoroadenosine phosphorothiorate
  modified_base 74: mod_base = OTHER; note = Cytosine phosphorothiorate

SEQ ID NO: 7244 - RNA, 75 nt, synthetic construct; identical to SEQ ID NO: 3311
  source 1..75: mol_type = other RNA
  modified_base 1: mod_base = OTHER; note = 2'-Omethylguanosine phosphorothiorate
  modified_base 16: mod_base = OTHER; note = Uridine phosphorothiorate
  modified_base 17: mod_base = OTHER; note = Guanosine phosphorothiorate
  modified_base 25: mod_base = OTHER; note = Cytosine phosphorothiorate
  modified_base 31: mod_base = OTHER; note = 2'-Omethyladenosine
  modified_base 38: mod_base = OTHER; note = Adenosine phosphorothiorate
  modified_base 40: mod_base = OTHER; note = 2'-fluorocytosine
  modified_base 42: mod_base = OTHER; note = 2'-fluoroadenosine
  modified_base 49: mod_base = OTHER; note = Cytosine phosphorothiorate
  modified_base 55: mod_base = OTHER; note = Cytosine phosphorothiorate
  modified_base 62: mod_base = OTHER; note = 2'-fluorocytosine
  modified_base 67: mod_base = OTHER; note = 2'-fluoroguanosine
  modified_base 74: mod_base = OTHER; note = Cytosine phosphorothiorate

SEQ ID NO: 7245 - RNA, 86 nt, synthetic construct; identical to SEQ ID NO: 3290
  source 1..86: mol_type = other RNA
  modified_base 1: mod_base = OTHER; note = 2'-Omethyladenosine
  modified_base 64: mod_base = OTHER; note = 2'-Omethyluridine
  modified_base 66: mod_base = OTHER; note = 2'-Omethylcytosine
  modified_base 67: mod_base = OTHER; note = 2'-fluoroguanosine
  modified_base 68: mod_base = OTHER; note = 2'-fluoroadenosine
  modified_base 69: mod_base = OTHER; note = 2'-Omethyladenosine
  modified_base 70: mod_base = OTHER; note = 2'-fluorocytosine
  modified_base 83: mod_base = OTHER; note = 2'-Omethyladenosine

SEQ ID NO: 7246 - RNA, 76 nt, synthetic construct
  source 1..76: mol_type = other RNA
ggctccttggcgcaatggatagcgcactggacttcaaattcagaggttccgggttcgagtcccggaggagtcgcca

SEQ ID NO: 7247 - RNA, 76 nt, synthetic construct
  source 1..76: mol_type = other RNA
ggctccgtggcgcaatggatagcgcattggacttcaaattcaaaggttccgagttcgggtctcggcggagtcgcca

SEQ ID NO: 7248 - RNA, 76 nt, synthetic construct
  source 1..76: mol_type = other RNA
ggctccgtggcgtaatggataacgcattggacttcaaattcaaaggttccgggttcgagtcccggcggggtcgcca

SEQ ID NO: 7249 - RNA, 85 nt, synthetic construct; identical to SEQ ID NO: 3297
  source 1..85: mol_type = other RNA
  modified_base 1: mod_base = OTHER; note = 2'-Omethylguanosine
  modified_base 2: mod_base = OTHER; note = 2'-Omethylcytosine
  modified_base 3: mod_base = OTHER; note = 2'-Omethyluridine
  modified_base 4: mod_base = OTHER; note = 2'-Omethylguanosine
  modified_base 5: mod_base = OTHER; note = 2'-Omethyluridine
  modified_base 6: mod_base = OTHER; note = 2'-Omethylguanosine
  modified_base 10: mod_base = OTHER; note = 2'-Omethylguanosine
  modified_base 13: mod_base = OTHER; note = 2'-Omethylguanosine
  modified_base 17: mod_base = OTHER; note = Guanosine phosphorothiorate
  modified_base 18: mod_base = OTHER; note = 2'-Omethylguanosine
  modified_base 19: mod_base = OTHER; note = Uridine phosphorothiorate
  modified_base 20: mod_base = OTHER; note = 2'-Omethyluridine
  modified_base 25: mod_base = OTHER; note = 2'-Omethylcytosine
  modified_base 29: mod_base = OTHER; note = 2'-Omethylguanosine
  modified_base 33: mod_base = OTHER; note = 2'-fluorouridine
  modified_base 35: mod_base = OTHER; note = Cytosine phosphorothiorate
  modified_base 37: mod_base = OTHER; note = Adenosine phosphorothiorate
  modified_base 38: mod_base = OTHER; note = Adenosine phosphorothiorate
  modified_base 41: mod_base = OTHER; note = 2'-fluorocytosine phosphorothiorate
  modified_base 43: mod_base = OTHER; note = 2'-Omethyladenosine
  modified_base 44: mod_base = OTHER; note = 2'-fluorouridine
  modified_base 56: mod_base = OTHER; note = Guanosine phosphorothiorate
  modified_base 59: mod_base = OTHER; note = 2'-Omethylcytosine
  modified_base 61: mod_base = OTHER; note = 2'-Omethylguanosine
  modified_base 63: mod_base = OTHER; note = Uridine phosphorothiorate
  modified_base 64: mod_base = OTHER; note = Uridine phosphorothiorate
  modified_base 65: mod_base = OTHER; note = 2'-Omethylcytosine
  modified_base 66: mod_base = OTHER; note = Guanosine phosphorothiorate
  modified_base 71: mod_base = OTHER; note = 2'-Omethylcytosine
  modified_base 72: mod_base = OTHER; note = 2'-fluorouridine
  modified_base 74: mod_base = OTHER; note = 2'-Omethylcytosine
  modified_base 80: mod_base = OTHER; note = 2'-Omethylguanosine
  modified_base 82: mod_base = OTHER; note = 2'-Omethylguanosine

SEQ ID NO: 7250 - RNA, 85 nt, synthetic construct; identical to SEQ ID NO: 3297
  source 1..85: mol_type = other RNA
  modified_base 1: mod_base = OTHER; note = 2'-Omethylguanosine phosphorothiorate
  modified_base 2: mod_base = OTHER; note = Cytosine phosphorothiorate
  modified_base 7: mod_base = OTHER; note = Adenosine phosphorothiorate
  modified_base 21: mod_base = OTHER; note = 2'-Omethyladenosine
  modified_base 24: mod_base = OTHER; note = 2'-Omethylguanosine phosphorothiorate
  modified_base 46: mod_base = OTHER; note = 2'-Omethylguanosine
  modified_base 59: mod_base = OTHER; note = 2'-Omethylcytosine phosphorothiorate
  modified_base 82: mod_base = OTHER; note = 2'-Omethylguanosine

SEQ ID NO: 7251 - RNA, 76 nt, synthetic construct; identical to SEQ ID NO: 625
  source 1..76: mol_type = other RNA
  modified_base 4: mod_base = OTHER; note = Uridine phosphorothiorate
  modified_base 5: mod_base = OTHER; note = 2'-fluorocytosine
  modified_base 6: mod_base = OTHER; note = 2'-Omethylcytosine
  modified_base 8: mod_base = OTHER; note = Uridine phosphorothiorate
  modified_base 11: mod_base = OTHER; note = Cytosine phosphorothiorate
  modified_base 12: mod_base = OTHER; note = 2'-fluoroguanosine
  modified_base 13: mod_base = OTHER; note = 2'-Omethylcytosine
  modified_base 17: mod_base = OTHER; note = 2'-Omethylguanosine
  modified_base 19: mod_base = OTHER; note = Adenosine phosphorothiorate
  modified_base 20: mod_base = OTHER; note = 2'-fluorouridine
  modified_base 23: mod_base = OTHER; note = Cytosine phosphorothiorate
  modified_base 24: mod_base = OTHER; note = 2'-fluoroguanosine
  modified_base 25: mod_base = OTHER; note = 2'-Omethylcytosine
  modified_base 27: mod_base = OTHER; note = 2'-fluorouridine
  modified_base 28: mod_base = OTHER; note = 2'-Omethyluridine
  modified_base 29: mod_base = OTHER; note = Guanosine phosphorothiorate
  modified_base 30: mod_base = OTHER; note = 2'-Omethylguanosine
  modified_base 38: mod_base = OTHER; note = 2'-Omethyladenosine phosphorothiorate
  modified_base 39: mod_base = OTHER; note = 2'-Omethyluridine
  modified_base 40: mod_base = OTHER; note = 2'-Omethyluridine
  modified_base 42: mod_base = OTHER; note = 2'-Omethyladenosine
  modified_base 43: mod_base = OTHER; note = 2'-fluoroadenosine
  modified_base 44: mod_base = OTHER; note = 2'-Omethyladenosine
  modified_base 45: mod_base = OTHER; note = 2'-Omethylguanosine
  modified_base 52: mod_base = OTHER; note = 2'-Omethylguanosine
  modified_base 53: mod_base = OTHER; note = 2'-Omethylguanosine phosphorothiorate
  modified_base 54: mod_base = OTHER; note = 2'-Omethyluridine
  modified_base 55: mod_base = OTHER; note = Uridine phosphorothiorate
  modified_base 56: mod_base = OTHER; note = 2'-fluorocytosine
  modified_base 60: mod_base = OTHER; note = Uridine phosphorothiorate
  modified_base 63: mod_base = OTHER; note = 2'-Omethylcytosine
  modified_base 68: mod_base = OTHER; note = Guanosine phosphorothiorate
  modified_base 70: mod_base = OTHER; note = 2'-fluoroguanosine
  modified_base 71: mod_base = OTHER; note = 2'-fluorouridine phosphorothiorate
  modified_base 74: mod_base = OTHER; note = 2'-Omethylcytosine
  modified_base 75: mod_base = OTHER; note = 2'-Omethylcytosine

SEQ ID NO: 7252 - RNA, 76 nt, synthetic construct; identical to SEQ ID NO: 625
  source 1..76: mol_type = other RNA
  modified_base 1: mod_base = OTHER; note = 2'-fluoroguanosine
  modified_base 3: mod_base = OTHER; note = 2'-fluorocytosine
  modified_base 4: mod_base = OTHER; note = 2'-Omethyluridine
  modified_base 6: mod_base = OTHER; note = Cytosine phosphorothiorate
  modified_base 8: mod_base = OTHER; note = Uridine phosphorothiorate
  modified_base 10: mod_base = OTHER; note = Guanosine phosphorothiorate
  modified_base 11: mod_base = OTHER; note = 2'-fluorocytosine phosphorothiorate
  modified_base 12: mod_base = OTHER; note = 2'-Omethylguanosine phosphorothiorate
  modified_base 16: mod_base = OTHER; note = 2'-Omethyluridine
  modified_base 17: mod_base = OTHER; note = Guanosine phosphorothiorate
  modified_base 18: mod_base = OTHER; note = Guanosine phosphorothiorate
  modified_base 20: mod_base = OTHER; note = 2'-Omethyluridine
  modified_base 22: mod_base = OTHER; note = 2'-Omethylguanosine
  modified_base 25: mod_base = OTHER; note = 2'-Omethylcytosine
  modified_base 26: mod_base = OTHER; note = Adenosine phosphorothiorate
  modified_base 27: mod_base = OTHER; note = 2'-fluorouridine
  modified_base 28: mod_base = OTHER; note = Uridine phosphorothiorate
  modified_base 30: mod_base = OTHER; note = Guanosine phosphorothiorate
  modified_base 31: mod_base = OTHER; note = 2'-fluoroadenosine
  modified_base 39: mod_base = OTHER; note = 2'-Omethyluridine
  modified_base 40: mod_base = OTHER; note = Uridine phosphorothiorate
  modified_base 41: mod_base = OTHER; note = 2'-fluorocytosine phosphorothiorate
  modified_base 42: mod_base = OTHER; note = 2'-Omethyladenosine
  modified_base 53: mod_base = OTHER; note = 2'-fluoroguanosine
  modified_base 56: mod_base = OTHER; note = 2'-fluorocytosine
  modified_base 60: mod_base = OTHER; note = Uridine phosphorothiorate
  modified_base 61: mod_base = OTHER; note = 2'-fluorocytosine
  modified_base 65: mod_base = OTHER; note = 2'-fluoroguanosine phosphorothiorate
  modified_base 66: mod_base = OTHER; note = 2'-Omethylcytosine
  modified_base 69: mod_base = OTHER; note = 2'-fluoroadenosine
  modified_base 70: mod_base = OTHER; note = 2'-Omethylguanosine
  modified_base 71: mod_base = OTHER; note = 2'-Omethyluridine
  modified_base 73: mod_base = OTHER; note = 2'-fluoroguanosine phosphorothiorate
  modified_base 74: mod_base = OTHER; note = 2'-fluorocytosine

SEQ ID NO: 7253 - RNA, 75 nt, synthetic construct; identical to SEQ ID NO: 3306
  source 1..75: mol_type = other RNA
  modified_base 1: mod_base = OTHER; note = 2'-Omethylguanosine phosphorothiorate
  modified_base 2: mod_base = OTHER; note = 2'-Omethyladenosine phosphorothiorate
  modified_base 3: mod_base = OTHER; note = 2'-Omethylcytosine
  modified_base 4: mod_base = OTHER; note = 2'-Omethylcytosine
  modified_base 5: mod_base = OTHER; note = 2'-Omethyluridine
  modified_base 6: mod_base = OTHER; note = 2'-Omethylcytosine
  modified_base 16: mod_base = OTHER; note = 2'-Omethylcytosine
  modified_base 17: mod_base = OTHER; note = 2'-Omethylguanosine
  modified_base 18: mod_base = OTHER; note = 2'-Omethylguanosine
  modified_base 32: mod_base = OTHER; note = 2'-fluorouridine
  modified_base 34: mod_base = OTHER; note = Uridine phosphorothiorate
  modified_base 36: mod_base = OTHER; note = Guanosine phosphorothiorate
  modified_base 37: mod_base = OTHER; note = Adenosine phosphorothiorate
  modified_base 43: mod_base = OTHER; note = 2'-Omethyladenosine
  modified_base 44: mod_base = OTHER; note = 2'-Omethylguanosine
  modified_base 45: mod_base = OTHER; note = 2'-fluoroguanosine
  modified_base 46: mod_base = OTHER; note = 2'-fluorouridine
  modified_base 47: mod_base = OTHER; note = 2'-fluorouridine
  modified_base 53: mod_base = OTHER; note = 2'-Omethyluridine
  modified_base 55: mod_base = OTHER; note = 2'-Omethylcytosine
  modified_base 58: mod_base = OTHER; note = 2'-Omethyladenosine
  modified_base 60: mod_base = OTHER; note = 2'-Omethylcytosine
  modified_base 61: mod_base = OTHER; note = 2'-Omethyladenosine
  modified_base 62: mod_base = OTHER; note = 2'-fluorocytosine
  modified_base 63: mod_base = OTHER; note = 2'-Omethylguanosine
  modified_base 64: mod_base = OTHER; note = 2'-Omethyluridine
  modified_base 65: mod_base = OTHER; note = 2'-Omethylcytosine
  modified_base 66: mod_base = OTHER; note = 2'-Omethylguanosine
  modified_base 67: mod_base = OTHER; note = 2'-Omethylguanosine
  modified_base 72: mod_base = OTHER; note = 2'-Omethyladenosine

SEQ ID NO: 7254 - RNA, 85 nt, synthetic construct; identical to SEQ ID NO: 3297
  source 1..85: mol_type = other RNA
  modified_base 1: mod_base = OTHER; note = 2'-Omethylguanosine phosphorothiorate
  modified_base 16: mod_base = OTHER; note = 2'-Omethyluridine phosphorothiorate
  modified_base 24: mod_base = OTHER; note = Guanosine phosphorothiorate
  modified_base 26: mod_base = OTHER; note = 2'-Omethylguanosine
  modified_base 35: mod_base = OTHER; note = 2'-fluorocytosine
  modified_base 47: mod_base = OTHER; note = 2'-Omethylguanosine
  modified_base 80: mod_base = OTHER; note = 2'-fluoroguanosine
  modified_base 81: mod_base = OTHER; note = 2'-fluorocytosine phosphorothiorate

SEQ ID NO: 7255 - RNA, 86 nt, synthetic construct; identical to SEQ ID NO: 3290
  source 1..86: mol_type = other RNA
  modified_base 1: mod_base = OTHER; note = 2'-Omethyladenosine
  modified_base 17: mod_base = OTHER; note = 2'-Omethylguanosine
  modified_base 18: mod_base = OTHER; note = 2'-Omethylguanosine
  modified_base 33: mod_base = OTHER; note = Uridine phosphorothiorate
  modified_base 34: mod_base = OTHER; note = 2'-Omethyluridine
  modified_base 35: mod_base = OTHER; note = Cytosine phosphorothiorate
  modified_base 37: mod_base = OTHER; note = Guanosine phosphorothiorate
  modified_base 38: mod_base = OTHER; note = Adenosine phosphorothiorate
  modified_base 41: mod_base = OTHER; note = 2'-fluorocytosine
  modified_base 42: mod_base = OTHER; note = 2'-Omethyladenosine
  modified_base 43: mod_base = OTHER; note = 2'-Omethyladenosine
  modified_base 44: mod_base = OTHER; note = 2'-fluorouridine
  modified_base 60: mod_base = OTHER; note = 2'-Omethyluridine
  modified_base 62: mod_base = OTHER; note = 2'-Omethylguanosine
  modified_base 83: mod_base = OTHER; note = 2'-Omethyladenosine

SEQ ID NO: 7256 - RNA, 76 nt, synthetic construct; identical to SEQ ID NO: 625
  source 1..76: mol_type = other RNA
  modified_base 1: mod_base = OTHER; note = Guanosine phosphorothiorate
  modified_base 2: mod_base = OTHER; note = Guanosine phosphorothiorate
  modified_base 3: mod_base = OTHER; note = 2'-Omethylcytosine phosphorothiorate
  modified_base 4: mod_base = OTHER; note = 2'-Omethyluridine
  modified_base 7: mod_base = OTHER; note = Guanosine phosphorothiorate
  modified_base 8: mod_base = OTHER; note = Uridine phosphorothiorate
  modified_base 10: mod_base = OTHER; note = 2'-fluoroguanosine
  modified_base 11: mod_base = OTHER; note = Cytosine phosphorothiorate
  modified_base 13: mod_base = OTHER; note = Cytosine phosphorothiorate
  modified_base 14: mod_base = OTHER; note = 2'-fluoroadenosine
  modified_base 15: mod_base = OTHER; note = 2'-Omethyladenosine
  modified_base 18: mod_base = OTHER; note = 2'-Omethylguanosine
  modified_base 22: mod_base = OTHER; note = 2'-fluoroguanosine
  modified_base 29: mod_base = OTHER; note = 2'-fluoroguanosine
  modified_base 30: mod_base = OTHER; note = 2'-fluoroguanosine
  modified_base 31: mod_base = OTHER; note = 2'-fluoroadenosine
  modified_base 38: mod_base = OTHER; note = 2'-fluoroadenosine
  modified_base 40: mod_base = OTHER; note = 2'-fluorouridine
  modified_base 43: mod_base = OTHER; note = 2'-fluoroadenosine
  modified_base 44: mod_base = OTHER; note = 2'-Omethyladenosine
  modified_base 45: mod_base = OTHER; note = 2'-fluoroguanosine
  modified_base 48: mod_base = OTHER; note = 2'-Omethyluridine phosphorothiorate
  modified_base 49: mod_base = OTHER; note = 2'-Omethylcytosine
  modified_base 50: mod_base = OTHER; note = 2'-fluorocytosine
  modified_base 52: mod_base = OTHER; note = 2'-Omethylguanosine
  modified_base 56: mod_base = OTHER; note = Cytosine phosphorothiorate
  modified_base 57: mod_base = OTHER; note = 2'-fluoroguanosine
  modified_base 62: mod_base = OTHER; note = 2'-Omethylcytosine
  modified_base 64: mod_base = OTHER; note = 2'-Omethylguanosine phosphorothiorate
  modified_base 65: mod_base = OTHER; note = 2'-Omethylguanosine
  modified_base 66: mod_base = OTHER; note = Cytosine phosphorothiorate
  modified_base 67: mod_base = OTHER; note = 2'-fluoroguanosine
  modified_base 70: mod_base = OTHER; note = 2'-Omethylguanosine
  modified_base 71: mod_base = OTHER; note = 2'-fluorouridine phosphorothiorate
  modified_base 72: mod_base = OTHER; note = 2'-fluorocytosine
  modified_base 75: mod_base = OTHER; note = 2'-Omethylcytosine
  modified_base 76: mod_base = OTHER; note = 2'-fluoroadenosine

SEQ ID NO: 7257 - RNA, 76 nt, synthetic construct; identical to SEQ ID NO: 625
  source 1..76: mol_type = other RNA
  modified_base 1: mod_base = OTHER; note = 2'-Omethylguanosine phosphorothiorate
  modified_base 2: mod_base = OTHER; note = 2'-Omethylguanosine phosphorothiorate
  modified_base 3: mod_base = OTHER; note = 2'-Omethylcytosine
  modified_base 4: mod_base = OTHER; note = 2'-Omethyluridine
  modified_base 5: mod_base = OTHER; note = 2'-Omethylcytosine
  modified_base 6: mod_base = OTHER; note = 2'-Omethylcytosine
  modified_base 14: mod_base = OTHER; note = 2'-Omethyladenosine
  modified_base 15: mod_base = OTHER; note = 2'-Omethyladenosine
  modified_base 16: mod_base = OTHER; note = 2'-Omethyluridine
  modified_base 17: mod_base = OTHER; note = 2'-Omethylguanosine
  modified_base 18: mod_base = OTHER; note = 2'-Omethylguanosine
  modified_base 20: mod_base = OTHER; note = 2'-Omethyluridine
  modified_base 25: mod_base = OTHER; note = 2'-Omethylcytosine
  modified_base 33: mod_base = OTHER; note = 2'-fluorouridine
  modified_base 35: mod_base = OTHER; note = Cytosine phosphorothiorate
  modified_base 37: mod_base = OTHER; note = Adenosine phosphorothiorate
  modified_base 38: mod_base = OTHER; note = Adenosine phosphorothiorate
  modified_base 41: mod_base = OTHER; note = 2'-fluorocytosine
  modified_base 42: mod_base = OTHER; note = 2'-Omethyladenosine
  modified_base 43: mod_base = OTHER; note = 2'-Omethyladenosine
  modified_base 44: mod_base = OTHER; note = 2'-fluoroadenosine
  modified_base 49: mod_base = OTHER; note = 2'-Omethylcytosine
  modified_base 50: mod_base = OTHER; note = 2'-Omethylcytosine
  modified_base 52: mod_base = OTHER; note = 2'-Omethylguanosine
  modified_base 54: mod_base = OTHER; note = 2'-Omethyluridine
  modified_base 55: mod_base = OTHER; note = Uridine phosphorothiorate
  modified_base 56: mod_base = OTHER; note = 2'-Omethylcytosine
  modified_base 57: mod_base = OTHER; note = 2'-fluoroguanosine
  modified_base 59: mod_base = OTHER; note = 2'-Omethylguanosine
  modified_base 61: mod_base = OTHER; note = 2'-Omethylcytosine
  modified_base 62: mod_base = OTHER; note = 2'-Omethylcytosine
  modified_base 63: mod_base = OTHER; note = 2'-fluorocytosine
  modified_base 64: mod_base = OTHER; note = 2'-Omethylguanosine
  modified_base 65: mod_base = OTHER; note = 2'-Omethylguanosine
  modified_base 75: mod_base = OTHER; note = Cytosine phosphorothiorate
  modified_base 76: mod_base = OTHER; note = 2'-Omethyladenosine

SEQ ID NO: 7258 - DNA, 76 bp, synthetic construct; identical to SEQ ID NO: 1924
  source 1..76: mol_type = other DNA
  modified_base 1: mod_base = OTHER; note = 2'-Omethylguanosine phosphorothiorate
  modified_base 2: mod_base = OTHER; note = 2'-Omethylguanosine
  modified_base 6: mod_base = OTHER; note = Cytosine phosphorothiorate
  modified_base 7: mod_base = OTHER; note = 2'-Omethylguanosine
  modified_base 11: mod_base = OTHER; note = Cytosine phosphorothiorate
  modified_base 12: mod_base = OTHER; note = 2'-Omethylguanosine phosphorothiorate
  modified_base 13: mod_base = OTHER; note = 2'-O-(2-Methoxyethyl) 5-methylcytosine phosphorothiorate
  modified_base 15: mod_base = OTHER; note = 2'-O-(2-Methoxyethyl) adenosine phosphorothiorate
  modified_base 16: mod_base = OTHER; note = 2'-O-(2-Methoxyethyl) thymine
  modified_base 20: mod_base = OTHER; note = Uridine phosphorothiorate
  modified_base 21: mod_base = OTHER; note = 2'-Omethyladenosine
  modified_base 24: mod_base = OTHER; note = Guanosine phosphorothiorate
  modified_base 25: mod_base = OTHER; note = Cytosine phosphorothiorate
  modified_base 26: mod_base = OTHER; note = 2'-Omethyladenosine
  modified_base 30: mod_base = OTHER; note = 2'-fluoroguanosine phosphorothiorate
  modified_base 31: mod_base = OTHER; note = 2'-fluoroadenosine
  modified_base 34: mod_base = OTHER; note = Uridine phosphorothiorate
  modified_base 37: mod_base = OTHER; note = 2'-fluoroadenosine
  modified_base 38: mod_base = OTHER; note = Adenosine phosphorothiorate
  modified_base 39: mod_base = OTHER; note = 2'-O-(2-Methoxyethyl) thymine
  modified_base 40: mod_base = OTHER; note = Uridine phosphorothiorate
  modified_base 42: mod_base = OTHER; note = Adenosine phosphorothiorate
  modified_base 44: mod_base = OTHER; note = Adenosine phosphorothiorate
  modified_base 45: mod_base = OTHER; note = 2'-O-(2-Methoxyethyl) guanosine
  modified_base 46: mod_base = OTHER; note = Guanosine phosphorothiorate
  modified_base 47: mod_base = OTHER; note = Uridine phosphorothiorate
  modified_base 50: mod_base = OTHER; note = 2'-Omethylcytosine
  modified_base 51: mod_base = OTHER; note = 2'-O-(2-Methoxyethyl) guanosine
  modified_base 52: mod_base = OTHER; note = 2'-fluoroguanosine
  modified_base 58: mod_base = OTHER; note = Adenosine phosphorothiorate
  modified_base 59: mod_base = OTHER; note = 2'-O-(2-Methoxyethyl) guanosine
  modified_base 65: mod_base = OTHER; note = Guanosine phosphorothiorate
  modified_base 66: mod_base = OTHER; note = 2'-Omethylcytosine phosphorothiorate
  modified_base 71: mod_base = OTHER; note = Uridine phosphorothiorate
  modified_base 73: mod_base = OTHER; note = 2'-Omethylguanosine
  modified_base 74: mod_base = OTHER; note = 2'-O-(2-Methoxyethyl) 5-methylcytosine
  misc_feature 1..2: note = RNA
  misc_feature 3: note = DNA
  misc_feature 4..13: note = RNA
  misc_feature 14: note = DNA
  misc_feature 15..28: note = RNA
  misc_feature 29: note = DNA
  misc_feature 30..42: note = RNA
  misc_feature 43: note = DNA
  misc_feature 44..47: note = RNA
  misc_feature 48: note = DNA
  misc_feature 49..60: note = RNA
  misc_feature 61: note = DNA
  misc_feature 62..71: note = RNA
  misc_feature 72: note = DNA
  misc_feature 73..76: note = RNA

SEQ ID NO: 7259 - RNA, 75 nt, synthetic construct; identical to SEQ ID NO: 3336
  source 1..75: mol_type = other RNA
  modified_base 13: mod_base = OTHER; note = Adenosine phosphorothiorate
  modified_base 18: mod_base = OTHER; note = 2'-fluoroguanosine phosphorothiorate
  modified_base 21: mod_base = OTHER; note = 2'-fluoroguanosine phosphorothiorate
  modified_base 41: mod_base = OTHER; note = 2'-fluoroguanosine
  modified_base 47: mod_base = OTHER; note = 2'-fluorocytosine
  modified_base 69: mod_base = OTHER; note = 2'-fluoroguanosine phosphorothiorate
  modified_base 73: mod_base = OTHER; note = Cytosine phosphorothiorate

SEQ ID NO: 7260 - RNA, 75 nt, synthetic construct; identical to SEQ ID NO: 3336
  source 1..75: mol_type = other RNA
  modified_base 1: mod_base = OTHER; note = 2'-Omethylcytosine
  modified_base 2: mod_base = OTHER; note = Cytosine phosphorothiorate
  modified_base 8: mod_base = OTHER; note = 2'-fluoroadenosine phosphorothiorate
  modified_base 11: mod_base = OTHER; note = Uridine phosphorothiorate
  modified_base 14: mod_base = OTHER; note = 2'-fluoroguanosine
  modified_base 16: mod_base = OTHER; note = 2'-fluorocytosine
  modified_base 20: mod_base = OTHER; note = 2'-fluoroadenosine
  modified_base 21: mod_base = OTHER; note = 2'-fluoroguanosine
  modified_base 25: mod_base = OTHER; note = 2'-fluoroadenosine
  modified_base 26: mod_base = OTHER; note = Uridine phosphorothiorate
  modified_base 28: mod_base = OTHER; note = 2'-fluoroadenosine
  modified_base 31: mod_base = OTHER; note = 2'-Omethylcytosine phosphorothiorate
  modified_base 33: mod_base = OTHER; note = 2'-fluorocytosine
  modified_base 37: mod_base = OTHER; note = 2'-Omethyladenosine
  modified_base 46: mod_base = OTHER; note = 2'-fluorouridine
  modified_base 47: mod_base = OTHER; note = 2'-fluorocytosine
  modified_base 50: mod_base = OTHER; note = Guanosine phosphorothiorate
  modified_base 52: mod_base = OTHER; note = 2'-fluoroguanosine phosphorothiorate
  modified_base 61: mod_base = OTHER; note = 2'-fluorocytosine
  modified_base 62: mod_base = OTHER; note = Cytosine phosphorothiorate
  modified_base 73: mod_base = OTHER; note = Cytosine phosphorothiorate
  modified_base 74: mod_base = OTHER; note = 2'-Omethylcytosine

SEQ ID NO: 7261 - RNA, 85 nt, synthetic construct; identical to SEQ ID NO: 3297
  source 1..85: mol_type = other RNA
  modified_base 1: mod_base = OTHER; note = 2'-Omethylguanosine phosphorothiorate
  modified_base 2: mod_base = OTHER; note = 2'-Omethylcytosine phosphorothiorate
  modified_base 24: mod_base = OTHER; note = 2'-Omethylguanosine
  modified_base 38: mod_base = OTHER; note = Adenosine phosphorothiorate
  modified_base 44: mod_base = OTHER; note = 2'-fluorouridine phosphorothiorate
  modified_base 65: mod_base = OTHER; note = Cytosine phosphorothiorate
  modified_base 66: mod_base = OTHER; note = 2'-Omethylguanosine
  modified_base 70: mod_base = OTHER; note = 2'-fluorocytosine
  modified_base 83: mod_base = OTHER; note = Cytosine phosphorothiorate
  modified_base 84: mod_base = OTHER; note = 2'-Omethylcytosine

SEQ ID NO: 7262 - RNA, 86 nt, synthetic construct
  source 1..86: mol_type = other RNA
accaggatggccgagtggttaaggcgttggacttcagatccaatggacgcatgtccgcgtgggttcgaaccccactcctggtacca

SEQ ID NO: 7263 - RNA, 76 nt, synthetic construct
  source 1..76: mol_type = other RNA
ggctccgtggcgcaatggatagcgcattggacttcaaattcaaaggttccgggttcatgccccggcggagtcgcca

SEQ ID NO: 7264 - RNA, 74 nt, synthetic construct; identical to SEQ ID NO: 766
  source 1..74: mol_type = other RNA
  modified_base 1: mod_base = OTHER; note = 2'-Omethylguanosine phosphorothiorate
  modified_base 2: mod_base = OTHER; note = 2'-Omethylguanosine
  modified_base 13: mod_base = OTHER; note = 2'-fluorocytosine
  modified_base 73: mod_base = OTHER; note = 2'-Omethylguanosine

SEQ ID NO: 7265 - RNA, 86 nt, synthetic construct; identical to SEQ ID NO: 3290
  source 1..86: mol_type = other RNA
  modified_base 1: mod_base = OTHER; note = 2'-Omethyladenosine
  modified_base 13: mod_base = OTHER; note = 2'-Omethylguanosine
  modified_base 17: mod_base = OTHER; note = 2'-Omethylguanosine
  modified_base 18: mod_base = OTHER; note = 2'-Omethylguanosine
  modified_base 25: mod_base = OTHER; note = 2'-Omethylcytosine
  modified_base 33: mod_base = OTHER; note = Uridine phosphorothiorate
  modified_base 34: mod_base = OTHER; note = 2'-Omethyluridine
  modified_base 35: mod_base = OTHER; note = Cytosine phosphorothiorate
  modified_base 37: mod_base = OTHER; note = Guanosine phosphorothiorate
  modified_base 38: mod_base = OTHER; note = Adenosine phosphorothiorate
  modified_base 41: mod_base = OTHER; note = 2'-Omethylcytosine
  modified_base 42: mod_base = OTHER; note = 2'-Omethyladenosine
  modified_base 43: mod_base = OTHER; note = 2'-Omethyladenosine
  modified_base 44: mod_base = OTHER; note = 2'-Omethyluridine
  modified_base 59: mod_base = OTHER; note = 2'-Omethylguanosine
  modified_base 60: mod_base = OTHER; note = 2'-Omethyluridine
  modified_base 62: mod_base = OTHER; note = 2'-Omethylguanosine
  modified_base 64: mod_base = OTHER; note = Uridine phosphorothiorate
  modified_base 65: mod_base = OTHER; note = Uridine phosphorothiorate
  modified_base 66: mod_base = OTHER; note = 2'-Omethylcytosine
  modified_base 67: mod_base = OTHER; note = Guanosine phosphorothiorate
  modified_base 68: mod_base = OTHER; note = Adenosine phosphorothiorate
  modified_base 69: mod_base = OTHER; note = 2'-Omethyladenosine
  modified_base 71: mod_base = OTHER; note = 2'-Omethylcytosine
  modified_base 75: mod_base = OTHER; note = 2'-Omethylcytosine
  modified_base 83: mod_base = OTHER; note = 2'-Omethyladenosine

SEQ ID NO: 7266 - RNA, 85 nt, synthetic construct
  source 1..85: mol_type = other RNA
gctgtgatggccgaggggttaaggcgttggacttcaaatccaatgggaatttcccgcgcaggttcgaatcctgctcacagcgcca

SEQ ID NO: 7267 - RNA, 76 nt, synthetic construct
  source 1..76: mol_type = other RNA
ggcttcgtggcgcaatggagagcgcattggacttcaaattcaaaggttccgggttcgagtcccggcggagtcgcca

SEQ ID NO: 7268 - RNA, 75 nt, synthetic construct; identical to SEQ ID NO: 3311
  source 1..75: mol_type = other RNA
  modified_base 2: mod_base = OTHER; note = 2'-Omethylguanosine phosphorothiorate
  modified_base 5: mod_base = OTHER; note = 2'-fluorocytosine phosphorothiorate
  modified_base 6: mod_base = OTHER; note = 2'-Omethylcytosine
  modified_base 13: mod_base = OTHER; note = Uridine phosphorothiorate
  modified_base 23: mod_base = OTHER; note = 2'-fluorocytosine
  modified_base 40: mod_base = OTHER; note = 2'-fluorocytosine
  modified_base 48: mod_base = OTHER; note = 2'-fluorocytosine
  modified_base 59: mod_base = OTHER; note = 2'-fluorouridine
  modified_base 64: mod_base = OTHER; note = 2'-fluoroguanosine
  modified_base 69: mod_base = OTHER; note = 2'-fluoroadenosine
  modified_base 73: mod_base = OTHER; note = Cytosine phosphorothiorate

SEQ ID NO: 7269 - RNA, 84 nt, synthetic construct
  source 1..84: mol_type = other RNA
  modified_base 1: mod_base = OTHER; note = 2'-Omethylguanosine
  modified_base 17: mod_base = OTHER; note = 2'-Omethylguanosine
  modified_base 18: mod_base = OTHER; note = 2'-Omethylguanosine
  modified_base 59: mod_base = OTHER; note = 2'-Omethylcytosine
  modified_base 61: mod_base = OTHER; note = 2'-Omethylguanosine
  modified_base 82: mod_base = OTHER; note = 2'-Omethylguanosine
gctgtgatggccgagtggttaaggcgttggacttcaaatccaatggggtctccccgcgcaggttcgaatcctgctcacagcgcc

SEQ ID NO: 7270 - RNA, 86 nt, synthetic construct; identical to SEQ ID NO: 3290
  source 1..86: mol_type = other RNA
  modified_base 83: mod_base = OTHER; note = 2'-Omethyladenosine

SEQ ID NO: 7271 - DNA, 76 bp, synthetic construct; identical to SEQ ID NO: 1924
  source 1..76: mol_type = other DNA
  modified_base 1: mod_base = OTHER; note = 2'-Omethylguanosine phosphorothiorate
  modified_base 2: mod_base = OTHER; note = 2'-Omethylguanosine phosphorothiorate
  modified_base 3: mod_base = OTHER; note = 2'-O-(2-Methoxyethyl) 5-methylcytosine
  modified_base 4: mod_base = OTHER; note = Uridine phosphorothiorate
  modified_base 5: mod_base = OTHER; note = 2'-Omethylcytosine
  modified_base 9: mod_base = OTHER; note = Guanosine phosphorothiorate
  modified_base 11: mod_base = OTHER; note = Cytosine phosphorothiorate
  modified_base 12: mod_base = OTHER; note = 2'-O-(2-Methoxyethyl) guanosine
  modified_base 13: mod_base = OTHER; note = Cytosine phosphorothiorate
  modified_base 14: mod_base = OTHER; note = deoxyadenosine phosphorothiorate
  modified_base 15: mod_base = OTHER; note = 2'-fluoroadenosine
  modified_base 20: mod_base = OTHER; note = 2'-O-(2-Methoxyethyl) thymine phosphorothiorate
  modified_base 22: mod_base = OTHER; note = Guanosine phosphorothiorate
  modified_base 26: mod_base = OTHER; note = Adenosine phosphorothiorate
  modified_base 28: mod_base = OTHER; note = Uridine phosphorothiorate
  modified_base 29: mod_base = OTHER; note = 2'-Omethylguanosine
  modified_base 30: mod_base = OTHER; note = Guanosine phosphorothiorate
  modified_base 31: mod_base = OTHER; note = Adenosine phosphorothiorate
  modified_base 32: mod_base = OTHER; note = 2'-O-(2-Methoxyethyl) 5-methylcytosine phosphorothiorate
  modified_base 36: mod_base = OTHER; note = Adenosine phosphorothiorate
  modified_base 37: mod_base = OTHER; note = 2'-O-(2-Methoxyethyl) adenosine
  modified_base 40: mod_base = OTHER; note = Uridine phosphorothiorate
  modified_base 43: mod_base = OTHER; note = Adenosine phosphorothiorate
  modified_base 44: mod_base = OTHER; note = 2'-O-(2-Methoxyethyl) adenosine
  modified_base 45: mod_base = OTHER; note = 2'-fluoroguanosine
  modified_base 48: mod_base = OTHER; note = 2'-Omethyluridine
  modified_base 53: mod_base = OTHER; note = Guanosine phosphorothiorate
  modified_base 54: mod_base = OTHER; note = 2'-Omethyluridine
  modified_base 55: mod_base = OTHER; note = 2'-fluorouridine phosphorothiorate
  modified_base 56: mod_base = OTHER; note = 2'-fluorocytosine
  modified_base 58: mod_base = OTHER; note = Adenosine phosphorothiorate
  modified_base 59: mod_base = OTHER; note = Guanosine phosphorothiorate
  modified_base 60: mod_base = OTHER; note = 2'-fluorouridine
  modified_base 61: mod_base = OTHER; note = 2'-Omethylcytosine
  modified_base 63: mod_base = OTHER; note = 2'-fluorocytosine
  modified_base 67: mod_base = OTHER; note = Guanosine phosphorothiorate
  modified_base 69: mod_base = OTHER; note = 2'-fluoroadenosine phosphorothiorate
  modified_base 74: mod_base = OTHER; note = deoxycytosine phosphorothiorate
  modified_base 75: mod_base = OTHER; note = 2'-Omethylcytosine phosphorothiorate
  misc_feature 1..13: note = RNA
  misc_feature 14: note = DNA
  misc_feature 15..32: note = RNA
  misc_feature 33: note = DNA
  misc_feature 34..38: note = RNA
  misc_feature 39: note = DNA
  misc_feature 40..73: note = RNA
  misc_feature 74: note = DNA
  misc_feature 75: note = RNA
  misc_feature 76: note = DNA

SEQ ID NO: 7272 - RNA, 76 nt, synthetic construct; identical to SEQ ID NO: 625
  source 1..76: mol_type = other RNA
  modified_base 1: mod_base = OTHER; note = 2'-fluoroguanosine
  modified_base 2: mod_base = OTHER; note = 2'-fluoroguanosine
  modified_base 5: mod_base = OTHER; note = 2'-fluorocytosine
  modified_base 6: mod_base = OTHER; note = 2'-fluorocytosine
  modified_base 10: mod_base = OTHER; note = 2'-Omethylguanosine
  modified_base 14: mod_base = OTHER; note = 2'-Omethyladenosine
  modified_base 18: mod_base = OTHER; note = 2'-Omethylguanosine
  modified_base 21: mod_base = OTHER; note = Adenosine phosphorothiorate
  modified_base 22: mod_base = OTHER; note = 2'-Omethylguanosine
  modified_base 27: mod_base = OTHER; note = 2'-Omethyluridine phosphorothiorate
  modified_base 29: mod_base = OTHER; note = 2'-Omethylguanosine
  modified_base 30: mod_base = OTHER; note = 2'-Omethylguanosine phosphorothiorate
  modified_base 31: mod_base = OTHER; note = 2'-fluoroadenosine
  modified_base 34: mod_base = OTHER; note = 2'-fluorouridine
  modified_base 38: mod_base = OTHER; note = 2'-fluoroadenosine
  modified_base 44: mod_base = OTHER; note = Adenosine phosphorothiorate
  modified_base 46: mod_base = OTHER; note = 2'-Omethylguanosine
  modified_base 48: mod_base = OTHER; note = 2'-Omethyluridine
  modified_base 56: mod_base = OTHER; note = 2'-fluorocytosine phosphorothiorate
  modified_base 57: mod_base = OTHER; note = Guanosine phosphorothiorate
  modified_base 60: mod_base = OTHER; note = 2'-fluorouridine phosphorothiorate
  modified_base 64: mod_base = OTHER; note = 2'-Omethylguanosine phosphorothiorate
  modified_base 65: mod_base = OTHER; note = 2'-fluoroguanosine
  modified_base 66: mod_base = OTHER; note = Cytosine phosphorothiorate
  modified_base 67: mod_base = OTHER; note = 2'-Omethylguanosine
  modified_base 68: mod_base = OTHER; note = 2'-Omethylguanosine
  modified_base 71: mod_base = OTHER; note = 2'-fluorouridine
  modified_base 73: mod_base = OTHER; note = 2'-fluoroguanosine
  modified_base 74: mod_base = OTHER; note = 2'-fluorocytosine

SEQ ID NO: 7273 - RNA, 85 nt, synthetic construct; identical to SEQ ID NO: 3288
  source 1..85: mol_type = other RNA
  modified_base 1: mod_base = OTHER; note = 2'-Omethylcytosine
  modified_base 25: mod_base = OTHER; note = Guanosine phosphorothiorate
  modified_base 26: mod_base = OTHER; note = 2'-fluorouridine
  modified_base 27: mod_base = OTHER; note = 2'-fluorouridine
  modified_base 29: mod_base = OTHER; note = 2'-fluoroguanosine
  modified_base 30: mod_base = OTHER; note = 2'-fluoroadenosine
  modified_base 33: mod_base = OTHER; note = 2'-fluorouridine
  modified_base 34: mod_base = OTHER; note = 2'-Omethylcytosine
  modified_base 35: mod_base = OTHER; note = 2'-fluoroadenosine phosphorothiorate
  modified_base 43: mod_base = OTHER; note = 2'-Omethyluridine
  modified_base 46: mod_base = OTHER; note = 2'-Omethyladenosine
  modified_base 53: mod_base = OTHER; note = 2'-fluorouridine
  modified_base 54: mod_base = OTHER; note = 2'-Omethylcytosine
  modified_base 55: mod_base = OTHER; note = 2'-Omethylcytosine
  modified_base 57: mod_base = OTHER; note = 2'-Omethylcytosine
  modified_base 59: mod_base = OTHER; note = 2'-Omethyluridine
  modified_base 75: mod_base = OTHER; note = 2'-fluorouridine
  modified_base 76: mod_base = OTHER; note = 2'-fluorocytosine
  modified_base 77: mod_base = OTHER; note = Cytosine phosphorothiorate
  modified_base 79: mod_base = OTHER; note = 2'-Omethylguanosine
  modified_base 84: mod_base = OTHER; note = Cytosine phosphorothiorate

SEQ ID NO: 7274 - RNA, 75 nt, synthetic construct; identical to SEQ ID NO: 3299
  source 1..75: mol_type = other RNA
  modified_base 3: mod_base = OTHER; note = 2'-Omethyluridine phosphorothiorate
  modified_base 36: mod_base = OTHER; note = 2'-fluoroadenosine phosphorothiorate
  modified_base 40: mod_base = OTHER; note = 2'-Omethyluridine phosphorothiorate
  modified_base 46: mod_base = OTHER; note = Uridine phosphorothiorate
  modified_base 48: mod_base = OTHER; note = 2'-fluorocytosine
  modified_base 63: mod_base = OTHER; note = 2'-Omethyluridine
  modified_base 73: mod_base = OTHER; note = Cytosine phosphorothiorate

SEQ ID NO: 7275 - RNA, 76 nt, synthetic construct; identical to SEQ ID NO: 625
  source 1..76: mol_type = other RNA
  modified_base 1: mod_base = OTHER; note = 2'-Omethylguanosine
  modified_base 2: mod_base = OTHER; note = 2'-Omethylguanosine
  modified_base 3: mod_base = OTHER; note = 2'-Omethylcytosine
  modified_base 4: mod_base = OTHER; note = 2'-Omethyluridine
  modified_base 5: mod_base = OTHER; note = 2'-Omethylcytosine
  modified_base 6: mod_base = OTHER; note = 2'-Omethylcytosine
  modified_base 14: mod_base = OTHER; note = 2'-Omethyladenosine
  modified_base 15: mod_base = OTHER; note = 2'-fluoroadenosine
  modified_base 16: mod_base = OTHER; note = 2'-Omethyluridine
  modified_base 17: mod_base = OTHER; note = 2'-Omethylguanosine
  modified_base 18: mod_base = OTHER; note = 2'-Omethylguanosine
  modified_base 19: mod_base = OTHER; note = 2'-fluoroadenosine
  modified_base 20: mod_base = OTHER; note = 2'-Omethyluridine
  modified_base 25: mod_base = OTHER; note = 2'-Omethylcytosine
  modified_base 33: mod_base = OTHER; note = 2'-fluorouridine
  modified_base 35: mod_base = OTHER; note = Cytosine phosphorothiorate
  modified_base 37: mod_base = OTHER; note = Adenosine phosphorothiorate
  modified_base 38: mod_base = OTHER; note = Adenosine phosphorothiorate
  modified_base 43: mod_base = OTHER; note = 2'-Omethyladenosine
  modified_base 44: mod_base = OTHER; note = 2'-Omethyladenosine
  modified_base 45: mod_base = OTHER; note = 2'-Omethylguanosine
  modified_base 46: mod_base = OTHER; note = 2'-fluoroguanosine
  modified_base 48: mod_base = OTHER; note = 2'-fluorouridine
  modified_base 49: mod_base = OTHER; note = 2'-Omethylcytosine
  modified_base 50: mod_base = OTHER; note = 2'-Omethylcytosine
  modified_base 51: mod_base = OTHER; note = 2'-Omethylguanosine
  modified_base 52: mod_base = OTHER; note = 2'-fluoroguanosine
  modified_base 53: mod_base = OTHER; note = 2'-Omethylguanosine
  modified_base 56: mod_base = OTHER; note = 2'-Omethylcytosine
  modified_base 57: mod_base = OTHER; note = 2'-Omethylguanosine
  modified_base 61: mod_base = OTHER; note = 2'-Omethylcytosine
  modified_base 62: mod_base = OTHER; note = 2'-Omethylcytosine
  modified_base 63: mod_base = OTHER; note = 2'-fluorocytosine
  modified_base 64: mod_base = OTHER; note = 2'-Omethylguanosine
  modified_base 65: mod_base = OTHER; note = 2'-Omethylguanosine
  modified_base 66: mod_base = OTHER; note = 2'-Omethylcytosine
  modified_base 67: mod_base = OTHER; note = 2'-Omethylguanosine
  modified_base 68: mod_base = OTHER; note = 2'-Omethylguanosine
  modified_base 69: mod_base = OTHER; note = 2'-Omethyladenosine
  modified_base 73: mod_base = OTHER; note = 2'-Omethylguanosine
  modified_base 75: mod_base = OTHER; note = 2'-fluorocytosine phosphorothiorate

SEQ ID NO: 7276 - RNA, 85 nt, synthetic construct; identical to SEQ ID NO: 3301
  source 1..85: mol_type = other RNA
  modified_base 1: mod_base = OTHER; note = 2'-Omethylguanosine phosphorothiorate
  modified_base 2: mod_base = OTHER; note = 2'-Omethylcytosine phosphorothiorate
  modified_base 3: mod_base = OTHER; note = 2'-Omethyluridine phosphorothiorate
  modified_base 4: mod_base = OTHER; note = Guanosine phosphorothiorate
  modified_base 7: mod_base = OTHER; note = 2'-fluoroadenosine
  modified_base 14: mod_base = OTHER; note = 2'-Omethyladenosine
  modified_base 18: mod_base = OTHER; note = 2'-Omethylguanosine phosphorothiorate
  modified_base 22: mod_base = OTHER; note = 2'-Omethyladenosine
  modified_base 24: mod_base = OTHER; note = 2'-Omethylguanosine
  modified_base 25: mod_base = OTHER; note = 2'-Omethylcytosine phosphorothiorate
  modified_base 27: mod_base = OTHER; note = 2'-fluorouridine
  modified_base 34: mod_base = OTHER; note = 2'-fluorouridine phosphorothiorate
  modified_base 35: mod_base = OTHER; note = 2'-fluorouridine
  modified_base 44: mod_base = OTHER; note = 2'-Omethyluridine
  modified_base 46: mod_base = OTHER; note = 2'-Omethylguanosine
  modified_base 53: mod_base = OTHER; note = 2'-fluorocytosine
  modified_base 56: mod_base = OTHER; note = Guanosine phosphorothiorate
  modified_base 57: mod_base = OTHER; note = 2'-Omethylcytosine
  modified_base 59: mod_base = OTHER; note = 2'-Omethylcytosine phosphorothiorate
  modified_base 61: mod_base = OTHER; note = 2'-Omethylguanosine
  modified_base 63: mod_base = OTHER; note = 2'-fluorouridine
  modified_base 71: mod_base = OTHER; note = Cytosine phosphorothiorate
  modified_base 72: mod_base = OTHER; note = 2'-fluorouridine
  modified_base 73: mod_base = OTHER; note = 2'-fluoroguanosine
  modified_base 81: mod_base = OTHER; note = Cytosine phosphorothiorate
  modified_base 82: mod_base = OTHER; note = 2'-Omethylguanosine

SEQ ID NO: 7277 - RNA, 86 nt, synthetic construct; identical to SEQ ID NO: 3290
  source 1..86: mol_type = other RNA
  modified_base 36: mod_base = OTHER; note = 2'-fluoroadenosine

SEQ ID NO: 7278 - DNA, 74 bp, synthetic construct; identical to SEQ ID NO: 3384
  source 1..74: mol_type = other DNA
  modified_base 1: mod_base = OTHER; note = 2'-Omethylguanosine phosphorothiorate
  modified_base 2: mod_base = OTHER; note = 2'-Omethylguanosine phosphorothiorate
  modified_base 19: mod_base = OTHER; note = Adenosine phosphorothiorate
  modified_base 29: mod_base = OTHER; note = 2'-O-(2-Methoxyethyl) guanosine
  modified_base 68: mod_base = OTHER; note = 2'-fluoroguanosine
  modified_base 73: mod_base = OTHER; note = 2'-Omethylguanosine
  misc_feature 1..19: note = RNA
  misc_feature 20: note = DNA
  misc_feature 21..43: note = RNA
  misc_feature 44: note = DNA
  misc_feature 45..71: note = RNA
  misc_feature 72: note = DNA
  misc_feature 73..74: note = RNA

SEQ ID NO: 7279 - RNA, 76 nt, synthetic construct; identical to SEQ ID NO: 3795
  source 1..76: mol_type = other RNA
  modified_base 1: mod_base = OTHER; note = 2'-Omethylguanosine phosphorothiorate
  modified_base 2: mod_base = OTHER; note = 2'-Omethylcytosine
  modified_base 3: mod_base = OTHER; note = 2'-Omethylcytosine
  modified_base 4: mod_base = OTHER; note = 2'-Omethyluridine
  modified_base 5: mod_base = OTHER; note = 2'-Omethylcytosine
  modified_base 6: mod_base = OTHER; note = 2'-Omethylcytosine
  modified_base 27: mod_base = OTHER; note = 2'-Omethyluridine
  modified_base 28: mod_base = OTHER; note = 2'-Omethylcytosine
  modified_base 29: mod_base = OTHER; note = 2'-fluoroguanosine
  modified_base 30: mod_base = OTHER; note = 2'-Omethylguanosine
  modified_base 40: mod_base = OTHER; note = 2'-fluorocytosine
  modified_base 41: mod_base = OTHER; note = 2'-Omethylcytosine
  modified_base 42: mod_base = OTHER; note = 2'-Omethylguanosine
  modified_base 43: mod_base = OTHER; note = 2'-Omethylguanosine
  modified_base 73: mod_base = OTHER; note = 2'-Omethylguanosine

SEQ ID NO: 7280 - RNA, 76 nt, synthetic construct; identical to SEQ ID NO: 625
  source 1..76: mol_type = other RNA
  modified_base 1: mod_base = OTHER; note = Guanosine phosphorothiorate
  modified_base 2: mod_base = OTHER; note = 2'-Omethylguanosine
  modified_base 7: mod_base = OTHER; note = Guanosine phosphorothiorate
  modified_base 11: mod_base = OTHER; note = 2'-fluorocytosine phosphorothiorate
  modified_base 12: mod_base = OTHER; note = 2'-Omethylguanosine
  modified_base 13: mod_base = OTHER; note = 2'-Omethylcytosine
  modified_base 15: mod_base = OTHER; note = 2'-fluoroadenosine
  modified_base 16: mod_base = OTHER; note = 2'-Omethyluridine
  modified_base 18: mod_base = OTHER; note = 2'-fluoroguanosine phosphorothiorate
  modified_base 20: mod_base = OTHER; note = 2'-fluorouridine
  modified_base 23: mod_base = OTHER; note = 2'-fluorocytosine
  modified_base 25: mod_base = OTHER; note = Cytosine phosphorothiorate
  modified_base 26: mod_base = OTHER; note = Adenosine phosphorothiorate
  modified_base 30: mod_base = OTHER; note = 2'-Omethylguanosine phosphorothiorate
  modified_base 31: mod_base = OTHER; note = 2'-fluoroadenosine
  modified_base 34: mod_base = OTHER; note = 2'-Omethyluridine
  modified_base 38: mod_base = OTHER; note = Adenosine phosphorothiorate
  modified_base 41: mod_base = OTHER; note = 2'-Omethylcytosine
  modified_base 43: mod_base = OTHER; note = 2'-Omethyladenosine
  modified_base 45: mod_base = OTHER; note = 2'-Omethylguanosine
  modified_base 47: mod_base = OTHER; note = 2'-Omethyluridine
  modified_base 50: mod_base = OTHER; note = 2'-Omethylcytosine
  modified_base 57: mod_base = OTHER; note = 2'-fluoroguanosine
  modified_base 59: mod_base = OTHER; note = 2'-fluoroguanosine
  modified_base 61: mod_base = OTHER; note = 2'-fluorocytosine phosphorothiorate
  modified_base 62: mod_base = OTHER; note = 2'-fluorocytosine phosphorothiorate
  modified_base 65: mod_base = OTHER; note = 2'-fluoroguanosine
  modified_base 67: mod_base = OTHER; note = 2'-fluoroguanosine
  modified_base 71: mod_base = OTHER; note = 2'-Omethyluridine
  modified_base 72: mod_base = OTHER; note = 2'-fluorocytosine
  modified_base 74: mod_base = OTHER; note = Cytosine phosphorothiorate
  modified_base 76: mod_base = OTHER; note = 2'-Omethyladenosine

SEQ ID NO: 7281 - RNA, 76 nt, synthetic construct; identical to SEQ ID NO: 625
  source 1..76: mol_type = other RNA
  modified_base 1: mod_base = OTHER; note = 2'-Omethylguanosine phosphorothiorate
  modified_base 2: mod_base = OTHER; note = 2'-Omethylguanosine phosphorothiorate
  modified_base 3: mod_base = OTHER; note = 2'-Omethylcytosine phosphorothiorate
  modified_base 4: mod_base = OTHER; note = 2'-Omethyluridine phosphorothiorate
  modified_base 5: mod_base = OTHER; note = 2'-Omethylcytosine phosphorothiorate
  modified_base 6: mod_base = OTHER; note = 2'-Omethylcytosine phosphorothiorate
  modified_base 22: mod_base = OTHER; note = 2'-Omethylguanosine
  modified_base 23: mod_base = OTHER; note = 2'-Omethylcytosine
  modified_base 24: mod_base = OTHER; note = 2'-Omethylguanosine
  modified_base 25: mod_base = OTHER; note = 2'-Omethylcytosine
  modified_base 40: mod_base = OTHER; note = 2'-fluorouridine
  modified_base 41: mod_base = OTHER; note = 2'-fluorocytosine
  modified_base 42: mod_base = OTHER; note = 2'-fluoroadenosine
  modified_base 43: mod_base = OTHER; note = 2'-fluoroadenosine
  modified_base 49: mod_base = OTHER; note = 2'-Omethylcytosine
  modified_base 50: mod_base = OTHER; note = 2'-Omethylcytosine
  modified_base 51: mod_base = OTHER; note = 2'-Omethylguanosine
  modified_base 52: mod_base = OTHER; note = 2'-Omethylguanosine
  modified_base 53: mod_base = OTHER; note = 2'-Omethylguanosine
  modified_base 54: mod_base = OTHER; note = Uridine phosphorothiorate
  modified_base 55: mod_base = OTHER; note = Uridine phosphorothiorate
  modified_base 56: mod_base = OTHER; note = Cytosine phosphorothiorate
  modified_base 57: mod_base = OTHER; note = Guanosine phosphorothiorate
  modified_base 61: mod_base = OTHER; note = 2'-Omethylcytosine
  modified_base 62: mod_base = OTHER; note = 2'-Omethylcytosine
  modified_base 63: mod_base = OTHER; note = 2'-Omethylcytosine
  modified_base 64: mod_base = OTHER; note = 2'-Omethylguanosine
  modified_base 65: mod_base = OTHER; note = 2'-Omethylguanosine
  modified_base 66: mod_base = OTHER; note = 2'-Omethylcytosine
  modified_base 67: mod_base = OTHER; note = 2'-Omethylguanosine
  modified_base 68: mod_base = OTHER; note = 2'-Omethylguanosine
  modified_base 69: mod_base = OTHER; note = 2'-Omethyladenosine

SEQ ID NO: 7282 - RNA, 76 nt, synthetic construct; identical to SEQ ID NO: 625
  source 1..76: mol_type = other RNA
  modified_base 1: mod_base = OTHER; note = 2'-Omethylguanosine
  modified_base 10: mod_base = OTHER; note = 2'-Omethylguanosine
  modified_base 13: mod_base = OTHER; note = 2'-Omethylcytosine
  modified_base 17: mod_base = OTHER; note = 2'-Omethylguanosine phosphorothiorate
  modified_base 18: mod_base = OTHER; note = 2'-Omethylguanosine
  modified_base 19: mod_base = OTHER; note = Adenosine phosphorothiorate
  modified_base 20: mod_base = OTHER; note = 2'-Omethyluridine
  modified_base 25: mod_base = OTHER; note = 2'-Omethylcytosine
  modified_base 29: mod_base = OTHER; note = 2'-Omethylguanosine
  modified_base 33: mod_base = OTHER; note = 2'-fluorouridine
  modified_base 35: mod_base = OTHER; note = Cytosine phosphorothiorate
  modified_base 37: mod_base = OTHER; note = Adenosine phosphorothiorate
  modified_base 38: mod_base = OTHER; note = Adenosine phosphorothiorate
  modified_base 41: mod_base = OTHER; note = 2'-fluorocytosine phosphorothiorate
  modified_base 43: mod_base = OTHER; note = 2'-Omethyladenosine
  modified_base 44: mod_base = OTHER; note = 2'-fluoroadenosine
  modified_base 50: mod_base = OTHER; note = 2'-Omethylcytosine
  modified_base 52: mod_base = OTHER; note = 2'-Omethylguanosine
  modified_base 54: mod_base = OTHER; note = Uridine phosphorothiorate
  modified_base 55: mod_base = OTHER; note = Uridine phosphorothiorate
  modified_base 56: mod_base = OTHER; note = 2'-Omethylcytosine
  modified_base 57: mod_base = OTHER; note = Guanosine phosphorothiorate
  modified_base 62: mod_base = OTHER; note = 2'-Omethylcytosine
  modified_base 63: mod_base = OTHER; note = 2'-fluorocytosine
  modified_base 65: mod_base = OTHER; note = 2'-Omethylguanosine
  modified_base 71: mod_base = OTHER; note = 2'-Omethyluridine
  modified_base 73: mod_base = OTHER; note = 2'-Omethylguanosine

SEQ ID NO: 7283 - RNA, 76 nt, synthetic construct; identical to SEQ ID NO: 625
  source 1..76: mol_type = other RNA
  modified_base 2: mod_base = OTHER; note = 2'-fluoroguanosine
  modified_base 3: mod_base = OTHER; note = 2'-Omethylcytosine
  modified_base 4: mod_base = OTHER; note = 2'-fluorouridine
  modified_base 5: mod_base = OTHER; note = 2'-fluorocytosine
  modified_base 6: mod_base = OTHER; note = Cytosine phosphorothiorate
  modified_base 11: mod_base = OTHER; note = 2'-Omethylcytosine
  modified_base 12: mod_base = OTHER; note = 2'-fluoroguanosine
  modified_base 13: mod_base = OTHER; note = 2'-Omethylcytosine
  modified_base 15: mod_base = OTHER; note = 2'-Omethyladenosine phosphorothiorate
  modified_base 16: mod_base = OTHER; note = 2'-Omethyluridine
  modified_base 17: mod_base = OTHER; note = 2'-Omethylguanosine phosphorothiorate
  modified_base 18: mod_base = OTHER; note = 2'-fluoroguanosine
  modified_base 22: mod_base = OTHER; note = Guanosine phosphorothiorate
  modified_base 23: mod_base = OTHER; note = 2'-fluorocytosine
  modified_base 26: mod_base = OTHER; note = 2'-Omethyladenosine
  modified_base 31: mod_base = OTHER; note = 2'-fluoroadenosine
  modified_base 40: mod_base = OTHER; note = Uridine phosphorothiorate
  modified_base 41: mod_base = OTHER; note = 2'-Omethylcytosine
  modified_base 42: mod_base = OTHER; note = 2'-Omethyladenosine phosphorothiorate
  modified_base 43: mod_base = OTHER; note = 2'-Omethyladenosine
  modified_base 44: mod_base = OTHER; note = 2'-fluoroadenosine
  modified_base 48: mod_base = OTHER; note = 2'-fluorouridine
  modified_base 50: mod_base = OTHER; note = 2'-fluorocytosine
  modified_base 52: mod_base = OTHER; note = 2'-fluoroguanosine phosphorothiorate
  modified_base 54: mod_base = OTHER; note = 2'-Omethyluridine phosphorothiorate
  modified_base 56: mod_base = OTHER; note = 2'-fluorocytosine
  modified_base 57: mod_base = OTHER; note = 2'-Omethylguanosine
  modified_base 59: mod_base = OTHER; note = 2'-fluoroguanosine
  modified_base 63: mod_base = OTHER; note = Cytosine phosphorothiorate
  modified_base 64: mod_base = OTHER; note = 2'-fluoroguanosine
  modified_base 65: mod_base = OTHER; note = 2'-fluoroguanosine
  modified_base 66: mod_base = OTHER; note = 2'-fluorocytosine
  modified_base 67: mod_base = OTHER; note = Guanosine phosphorothiorate
  modified_base 69: mod_base = OTHER; note = Adenosine phosphorothiorate
  modified_base 70: mod_base = OTHER; note = 2'-fluoroguanosine
  modified_base 72: mod_base = OTHER; note = Cytosine phosphorothiorate

SEQ ID NO: 7284 - RNA, 76 nt, synthetic construct; identical to SEQ ID NO: 3342
  source 1..76: mol_type = other RNA
  modified_base 1: mod_base = OTHER; note = 2'-Omethylguanosine
  modified_base 2: mod_base = OTHER; note = 2'-Omethylguanosine
  modified_base 3: mod_base = OTHER; note = 2'-Omethylcytosine
  modified_base 4: mod_base = OTHER; note = 2'-Omethyluridine
  modified_base 5: mod_base = OTHER; note = 2'-Omethylcytosine
  modified_base 6: mod_base = OTHER; note = 2'-Omethylcytosine
  modified_base 16: mod_base = OTHER; note = 2'-Omethyluridine
  modified_base 17: mod_base = OTHER; note = 2'-Omethylguanosine
  modified_base 18: mod_base = OTHER; note = 2'-Omethylguanosine
  modified_base 33: mod_base = OTHER; note = 2'-fluorouridine
  modified_base 35: mod_base = OTHER; note = Cytosine phosphorothiorate
  modified_base 37: mod_base = OTHER; note = Adenosine phosphorothiorate
  modified_base 38: mod_base = OTHER; note = Adenosine phosphorothiorate
  modified_base 44: mod_base = OTHER; note = 2'-Omethyladenosine
  modified_base 45: mod_base = OTHER; note = 2'-Omethylguanosine
  modified_base 46: mod_base = OTHER; note = 2'-fluoroguanosine
  modified_base 47: mod_base = OTHER; note = 2'-fluorouridine
  modified_base 48: mod_base = OTHER; note = 2'-fluorouridine
  modified_base 56: mod_base = OTHER; note = 2'-Omethylcytosine
  modified_base 59: mod_base = OTHER; note = 2'-Omethylguanosine
  modified_base 61: mod_base = OTHER; note = 2'-Omethylcytosine
  modified_base 62: mod_base = OTHER; note = 2'-Omethylcytosine
  modified_base 63: mod_base = OTHER; note = 2'-fluorocytosine
  modified_base 64: mod_base = OTHER; note = 2'-Omethylguanosine
  modified_base 65: mod_base = OTHER; note = 2'-Omethylguanosine
  modified_base 66: mod_base = OTHER; note = 2'-Omethylcytosine
  modified_base 67: mod_base = OTHER; note = 2'-Omethylguanosine
  modified_base 68: mod_base = OTHER; note = 2'-Omethylguanosine
  modified_base 73: mod_base = OTHER; note = 2'-Omethylguanosine

SEQ ID NO: 7285 - RNA, 76 nt, synthetic construct; identical to SEQ ID NO: 3295
  source 1..76: mol_type = other RNA
  modified_base 1: mod_base = OTHER; note = 2'-Omethylcytosine phosphorothiorate
  modified_base 2: mod_base = OTHER; note = 2'-fluorocytosine phosphorothiorate
  modified_base 3: mod_base = OTHER; note = 2'-fluorouridine
  modified_base 4: mod_base = OTHER; note = 2'-Omethyluridine phosphorothiorate
  modified_base 8: mod_base = OTHER; note = 2'-Omethyluridine phosphorothiorate
  modified_base 12: mod_base = OTHER; note = 2'-fluorouridine phosphorothiorate
  modified_base 13: mod_base = OTHER; note = 2'-fluorocytosine
  modified_base 21: mod_base = OTHER; note = 2'-Omethyladenosine
  modified_base 36: mod_base = OTHER; note = 2'-Omethyladenosine
  modified_base 45: mod_base = OTHER; note = 2'-fluoroguanosine phosphorothiorate
  modified_base 46: mod_base = OTHER; note = 2'-fluoroguanosine phosphorothiorate
  modified_base 49: mod_base = OTHER; note = 2'-fluoroguanosine phosphorothiorate
  modified_base 52: mod_base = OTHER; note = 2'-fluoroguanosine phosphorothiorate
  modified_base 58: mod_base = OTHER; note = 2'-fluoroadenosine phosphorothiorate
  modified_base 64: mod_base = OTHER; note = 2'-fluoroguanosine
  modified_base 74: mod_base = OTHER; note = 2'-fluorocytosine

SEQ ID NO: 7286 - RNA, 85 nt, synthetic construct; identical to SEQ ID NO: 3317
  source 1..85: mol_type = other RNA
  modified_base 1: mod_base = OTHER; note = 2'-Omethylguanosine phosphorothiorate
  modified_base 2: mod_base = OTHER; note = 2'-Omethylcytosine
  modified_base 14: mod_base = OTHER; note = 2'-Omethyladenosine phosphorothiorate
  modified_base 17: mod_base = OTHER; note = 2'-fluoroguanosine
  modified_base 29: mod_base = OTHER; note = 2'-fluoroguanosine
  modified_base 51: mod_base = OTHER; note = 2'-Omethyluridine phosphorothiorate
  modified_base 62: mod_base = OTHER; note = 2'-fluoroguanosine phosphorothiorate
  modified_base 80: mod_base = OTHER; note = 2'-Omethylguanosine phosphorothiorate

SEQ ID NO: 7287 - RNA, 76 nt, synthetic construct; identical to SEQ ID NO: 625
  source 1..76: mol_type = other RNA
  modified_base 1: mod_base = OTHER; note = 2'-Omethylguanosine
  modified_base 2: mod_base = OTHER; note = 2'-Omethylguanosine
  modified_base 3: mod_base = OTHER; note = 2'-Omethylcytosine
  modified_base 10: mod_base = OTHER; note = 2'-Omethylguanosine
  modified_base 11: mod_base = OTHER; note = 2'-Omethylcytosine
  modified_base 12: mod_base = OTHER; note = 2'-Omethylguanosine
  modified_base 13: mod_base = OTHER; note = 2'-Omethylcytosine
  modified_base 14: mod_base = OTHER; note = 2'-Omethyladenosine
  modified_base 15: mod_base = OTHER; note = 2'-fluoroadenosine
  modified_base 16: mod_base = OTHER; note = 2'-Omethyluridine
  modified_base 17: mod_base = OTHER; note = 2'-Omethylguanosine
  modified_base 18: mod_base = OTHER; note = 2'-Omethylguanosine
  modified_base 19: mod_base = OTHER; note = 2'-fluoroadenosine
  modified_base 20: mod_base = OTHER; note = 2'-Omethyluridine
  modified_base 22: mod_base = OTHER; note = 2'-Omethylguanosine
  modified_base 23: mod_base = OTHER; note = 2'-Omethylcytosine
  modified_base 24: mod_base = OTHER; note = 2'-Omethylguanosine
  modified_base 25: mod_base = OTHER; note = 2'-Omethylcytosine
  modified_base 38: mod_base = OTHER; note = Adenosine phosphorothiorate
  modified_base 39: mod_base = OTHER; note = Uridine phosphorothiorate
  modified_base 40: mod_base = OTHER; note = 2'-fluorouridine
  modified_base 43: mod_base = OTHER; note = 2'-Omethyladenosine
  modified_base 44: mod_base = OTHER; note = 2'-Omethyladenosine
  modified_base 45: mod_base = OTHER; note = 2'-Omethylguanosine
  modified_base 46: mod_base = OTHER; note = 2'-fluoroguanosine
  modified_base 48: mod_base = OTHER; note = 2'-fluorouridine
  modified_base 49: mod_base = OTHER; note = 2'-Omethylcytosine
  modified_base 50: mod_base = OTHER; note = 2'-Omethylcytosine
  modified_base 54: mod_base = OTHER; note = Uridine phosphorothiorate
  modified_base 55: mod_base = OTHER; note = Uridine phosphorothiorate
  modified_base 56: mod_base = OTHER; note = 2'-Omethylcytosine
  modified_base 57: mod_base = OTHER; note = Guanosine phosphorothiorate
  modified_base 61: mod_base = OTHER; note = 2'-Omethylcytosine
  modified_base 62: mod_base = OTHER; note = 2'-Omethylcytosine
  modified_base 63: mod_base = OTHER; note = 2'-fluorocytosine
  modified_base 64: mod_base = OTHER; note = 2'-Omethylguanosine
  modified_base 65: mod_base = OTHER; note = 2'-Omethylguanosine
  modified_base 66: mod_base = OTHER; note = 2'-Omethylcytosine
  modified_base 67: mod_base = OTHER; note = 2'-Omethylguanosine
  modified_base 68: mod_base = OTHER; note = 2'-Omethylguanosine
  modified_base 69: mod_base = OTHER; note = 2'-Omethyladenosine
  modified_base 70: mod_base = OTHER; note = 2'-fluoroguanosine

SEQ ID NO: 7288 - RNA, 85 nt, synthetic construct; identical to SEQ ID NO: 3317
  source 1..85: mol_type = other RNA
  modified_base 1: mod_base = OTHER; note = 2'-Omethylguanosine phosphorothiorate
  modified_base 2: mod_base = OTHER; note = 2'-Omethylcytosine
  modified_base 11: mod_base = OTHER; note = Cytosine phosphorothiorate
  modified_base 17: mod_base = OTHER; note = 2'-fluoroguanosine phosphorothiorate
  modified_base 23: mod_base = OTHER; note = 2'-Omethylguanosine phosphorothiorate
  modified_base 27: mod_base = OTHER; note = Uridine phosphorothiorate
  modified_base 29: mod_base = OTHER; note = 2'-fluoroguanosine
  modified_base 30: mod_base = OTHER; note = Guanosine phosphorothiorate
  modified_base 37: mod_base = OTHER; note = Adenosine phosphorothiorate
  modified_base 44: mod_base = OTHER; note = 2'-Omethyluridine
  modified_base 46: mod_base = OTHER; note = 2'-Omethylguanosine
  modified_base 47: mod_base = OTHER; note = 2'-Omethylguanosine
  modified_base 48: mod_base = OTHER; note = 2'-fluoroguanosine
  modified_base 50: mod_base = OTHER; note = Cytosine phosphorothiorate
  modified_base 57: mod_base = OTHER; note = 2'-fluorocytosine
  modified_base 58: mod_base = OTHER; note = 2'-Omethylguanosine
  modified_base 60: mod_base = OTHER; note = 2'-fluoroadenosine
  modified_base 61: mod_base = OTHER; note = 2'-fluoroguanosine phosphorothiorate
  modified_base 68: mod_base = OTHER; note = 2'-fluoroadenosine
  modified_base 81: mod_base = OTHER; note = 2'-fluorocytosine phosphorothiorate
  modified_base 83: mod_base = OTHER; note = Cytosine phosphorothiorate

SEQ ID NO: 7289 - RNA, 73 nt, synthetic construct; identical to SEQ ID NO: 935
  source 1..73: mol_type = other RNA
  modified_base 1: mod_base = OTHER; note = 2'-Omethylguanosine phosphorothiorate
  modified_base 2: mod_base = OTHER; note = 2'-Omethylguanosine phosphorothiorate
  modified_base 45: mod_base = OTHER; note = 2'-fluoroguanosine
  modified_base 57: mod_base = OTHER; note = 2'-fluoroguanosine
  modified_base 68: mod_base = OTHER; note = 2'-fluoroguanosine

SEQ ID NO: 7290 - RNA, 76 nt, synthetic construct; identical to SEQ ID NO: 3318
  source 1..76: mol_type = other RNA
  modified_base 10: mod_base = OTHER; note = 2'-Omethylguanosine
  modified_base 11: mod_base = OTHER; note = 2'-Omethylcytosine
  modified_base 12: mod_base = OTHER; note = 2'-Omethyluridine
  modified_base 13: mod_base = OTHER; note = 2'-Omethylcytosine
  modified_base 22: mod_base = OTHER; note = 2'-Omethylguanosine
  modified_base 23: mod_base = OTHER; note = 2'-Omethyladenosine
  modified_base 24: mod_base = OTHER; note = 2'-Omethylguanosine
  modified_base 25: mod_base = OTHER; note = 2'-Omethylcytosine
  modified_base 49: mod_base = OTHER; note = 2'-Omethylguanosine
  modified_base 50: mod_base = OTHER; note = 2'-Omethylcytosine
  modified_base 51: mod_base = OTHER; note = 2'-Omethyluridine
  modified_base 52: mod_base = OTHER; note = 2'-Omethylguanosine
  modified_base 53: mod_base = OTHER; note = 2'-Omethylguanosine

SEQ ID NO: 7291 - RNA, 76 nt, synthetic construct; identical to SEQ ID NO: 625
  source 1..76: mol_type = other RNA
  modified_base 5: mod_base = OTHER; note = 2'-fluorocytosine
  modified_base 6: mod_base = OTHER; note = 2'-fluorocytosine
  modified_base 7: mod_base = OTHER; note = Guanosine phosphorothiorate
  modified_base 11: mod_base = OTHER; note = Cytosine phosphorothiorate
  modified_base 12: mod_base = OTHER; note = 2'-fluoroguanosine
  modified_base 13: mod_base = OTHER; note = 2'-Omethylcytosine
  modified_base 18: mod_base = OTHER; note = 2'-fluoroguanosine
  modified_base 20: mod_base = OTHER; note = 2'-Omethyluridine phosphorothiorate
  modified_base 24: mod_base = OTHER; note = 2'-Omethylguanosine phosphorothiorate
  modified_base 27: mod_base = OTHER; note = 2'-Omethyluridine
  modified_base 31: mod_base = OTHER; note = 2'-fluoroadenosine
  modified_base 33: mod_base = OTHER; note = Uridine phosphorothiorate
  modified_base 34: mod_base = OTHER; note = 2'-fluorouridine
  modified_base 37: mod_base = OTHER; note = Adenosine phosphorothiorate
  modified_base 38: mod_base = OTHER; note = 2'-Omethyladenosine
  modified_base 40: mod_base = OTHER; note = Uridine phosphorothiorate
  modified_base 43: mod_base = OTHER; note = 2'-fluoroadenosine
  modified_base 44: mod_base = OTHER; note = 2'-fluoroadenosine
  modified_base 45: mod_base = OTHER; note = 2'-Omethylguanosine
  modified_base 48: mod_base = OTHER; note = 2'-Omethyluridine
  modified_base 52: mod_base = OTHER; note = 2'-Omethylguanosine
  modified_base 53: mod_base = OTHER; note = 2'-Omethylguanosine
  modified_base 56: mod_base = OTHER; note = Cytosine phosphorothiorate
  modified_base 59: mod_base = OTHER; note = 2'-Omethylguanosine phosphorothiorate
  modified_base 60: mod_base = OTHER; note = 2'-fluorouridine
  modified_base 62: mod_base = OTHER; note = 2'-Omethylcytosine
  modified_base 64: mod_base = OTHER; note = 2'-Omethylguanosine
  modified_base 66: mod_base = OTHER; note = 2'-Omethylcytosine
  modified_base 67: mod_base = OTHER; note = Guanosine phosphorothiorate
  modified_base 68: mod_base = OTHER; note = Guanosine phosphorothiorate
  modified_base 69: mod_base = OTHER; note = 2'-fluoroadenosine
  modified_base 70: mod_base = OTHER; note = 2'-fluoroguanosine
  modified_base 72: mod_base = OTHER; note = 2'-Omethylcytosine
  modified_base 73: mod_base = OTHER; note = 2'-fluoroguanosine
  modified_base 74: mod_base = OTHER; note = Cytosine phosphorothiorate
  modified_base 75: mod_base = OTHER; note = 2'-fluorocytosine

SEQ ID NO: 7292 - RNA, 76 nt, synthetic construct; identical to SEQ ID NO: 3318
  source 1..76: mol_type = other RNA
  modified_base 1: mod_base = OTHER; note = 2'-Omethylcytosine
  modified_base 35: mod_base = OTHER; note = Uridine phosphorothiorate
  modified_base 37: mod_base = OTHER; note = Guanosine phosphorothiorate
  modified_base 38: mod_base = OTHER; note = Adenosine phosphorothiorate
  modified_base 73: mod_base = OTHER; note = 2'-Omethyladenosine

SEQ ID NO: 7293 - RNA, 85 nt, synthetic construct; identical to SEQ ID NO: 3286
  source 1..85: mol_type = other RNA
  modified_base 1: mod_base = OTHER; note = 2'-fluorocytosine phosphorothiorate
  modified_base 11: mod_base = OTHER; note = Cytosine phosphorothiorate
  modified_base 17: mod_base = OTHER; note = 2'-Omethylguanosine
  modified_base 26: mod_base = OTHER; note = 2'-Omethyluridine
  modified_base 47: mod_base = OTHER; note = 2'-Omethylcytosine
  modified_base 59: mod_base = OTHER; note = 2'-Omethyluridine
  modified_base 77: mod_base = OTHER; note = Cytosine phosphorothiorate
  modified_base 84: mod_base = OTHER; note = 2'-fluorocytosine

SEQ ID NO: 7294 - RNA, 82 nt, synthetic construct
  source 1..82: mol_type = other RNA
gtagtcgtggccgagtggttaaggcgatggacttcaaatccattggggtttccccgcgcaggttcgaatcctgccgactacg

SEQ ID NO: 7295 - RNA, 76 nt, synthetic construct; identical to SEQ ID NO: 3289
  source 1..76: mol_type = other RNA
  modified_base 1: mod_base = OTHER; note = 2'-Omethylguanosine phosphorothiorate
  modified_base 2: mod_base = OTHER; note = 2'-Omethylcytosine phosphorothiorate
  modified_base 3: mod_base = OTHER; note = 2'-Omethylcytosine
  modified_base 4: mod_base = OTHER; note = 2'-Omethyluridine
  modified_base 5: mod_base = OTHER; note = 2'-Omethylguanosine
  modified_base 6: mod_base = OTHER; note = 2'-Omethylguanosine
  modified_base 16: mod_base = OTHER; note = 2'-Omethyluridine
  modified_base 18: mod_base = OTHER; note = 2'-Omethylguanosine
  modified_base 19: mod_base = OTHER; note = 2'-Omethylguanosine
  modified_base 33: mod_base = OTHER; note = 2'-fluorouridine
  modified_base 35: mod_base = OTHER; note = Uridine phosphorothiorate
  modified_base 37: mod_base = OTHER; note = Adenosine phosphorothiorate
  modified_base 38: mod_base = OTHER; note = Adenosine phosphorothiorate
  modified_base 44: mod_base = OTHER; note = 2'-Omethylguanosine
  modified_base 45: mod_base = OTHER; note = 2'-Omethylguanosine
  modified_base 46: mod_base = OTHER; note = 2'-fluoroguanosine
  modified_base 47: mod_base = OTHER; note = 2'-fluorouridine
  modified_base 48: mod_base = OTHER; note = 2'-fluorocytosine
  modified_base 52: mod_base = OTHER; note = 2'-Omethylguanosine
  modified_base 53: mod_base = OTHER; note = 2'-Omethylguanosine
  modified_base 54: mod_base = OTHER; note = 2'-Omethyluridine
  modified_base 56: mod_base = OTHER; note = 2'-Omethylcytosine
  modified_base 59: mod_base = OTHER; note = 2'-Omethylguanosine
  modified_base 61: mod_base = OTHER; note = 2'-Omethylcytosine
  modified_base 62: mod_base = OTHER; note = 2'-Omethylcytosine
  modified_base 63: mod_base = OTHER; note = 2'-fluorocytosine
  modified_base 64: mod_base = OTHER; note = 2'-Omethyluridine
  modified_base 65: mod_base = OTHER; note = 2'-Omethylguanosine
  modified_base 66: mod_base = OTHER; note = 2'-Omethyluridine
  modified_base 67: mod_base = OTHER; note = 2'-Omethylcytosine
  modified_base 68: mod_base = OTHER; note = 2'-Omethylcytosine
  modified_base 73: mod_base = OTHER; note = 2'-Omethylguanosine

SEQ ID NO: 7296 - RNA, 74 nt, synthetic construct; identical to SEQ ID NO: 3293
  source 1..74: mol_type = other RNA
  modified_base 4: mod_base = OTHER; note = 2'-Omethyluridine
  modified_base 5: mod_base = OTHER; note = Cytosine phosphorothiorate
  modified_base 24: mod_base = OTHER; note = 2'-fluoroguanosine
  modified_base 42: mod_base = OTHER; note = 2'-fluoroadenosine
  modified_base 44: mod_base = OTHER; note = 2'-fluoroguanosine
  modified_base 73: mod_base = OTHER; note = 2'-Omethylcytosine phosphorothiorate

SEQ ID NO: 7297 - RNA, 85 nt, synthetic construct
  source 1..85: mol_type = other RNA
gctgtgatggccgagtggttaaggcgttggacttcaaatccaatggggtctccccgcgcaggttcgaaccctgctcgcagcgcca

SEQ ID NO: 7298 - RNA, 76 nt, synthetic construct; identical to SEQ ID NO: 625
  source 1..76: mol_type = other RNA
  modified_base 1: mod_base = OTHER; note = 2'-Omethylguanosine phosphorothiorate
  modified_base 2: mod_base = OTHER; note = 2'-Omethylguanosine
  modified_base 12: mod_base = OTHER; note = 2'-Omethylguanosine
  modified_base 13: mod_base = OTHER; note = 2'-Omethylcytosine
  modified_base 33: mod_base = OTHER; note = 2'-fluorouridine
  modified_base 35: mod_base = OTHER; note = Cytosine phosphorothiorate
  modified_base 37: mod_base = OTHER; note = Adenosine phosphorothiorate
  modified_base 38: mod_base = OTHER; note = Adenosine phosphorothiorate
  modified_base 52: mod_base = OTHER; note = 2'-Omethylguanosine
  modified_base 62: mod_base = OTHER; note = 2'-Omethylcytosine
  modified_base 73: mod_base = OTHER; note = 2'-Omethylguanosine
  modified_base 75: mod_base = OTHER; note = 2'-fluorocytosine phosphorothiorate

SEQ ID NO: 7299 - RNA, 76 nt, synthetic construct; identical to SEQ ID NO: 625
  source 1..76: mol_type = other RNA
  modified_base 1: mod_base = OTHER; note = 2'-Omethylguanosine
  modified_base 2: mod_base = OTHER; note = 2'-Omethylguanosine phosphorothiorate
  modified_base 13: mod_base = OTHER; note = 2'-Omethylcytosine
  modified_base 17: mod_base = OTHER; note = Guanosine phosphorothiorate
  modified_base 18: mod_base = OTHER; note = 2'-Omethylguanosine
  modified_base 19: mod_base = OTHER; note = Adenosine phosphorothiorate
  modified_base 20: mod_base = OTHER; note = 2'-Omethyluridine
  modified_base 25: mod_base = OTHER; note = 2'-Omethylcytosine
  modified_base 29: mod_base = OTHER; note = 2'-Omethylguanosine
  modified_base 33: mod_base = OTHER; note = 2'-fluorouridine
  modified_base 35: mod_base = OTHER; note = Cytosine phosphorothiorate
  modified_base 37: mod_base = OTHER; note = Adenosine phosphorothiorate
  modified_base 38: mod_base = OTHER; note = Adenosine phosphorothiorate
  modified_base 41: mod_base = OTHER; note = 2'-fluorocytosine phosphorothiorate
  modified_base 43: mod_base = OTHER; note = 2'-Omethyladenosine
  modified_base 44: mod_base = OTHER; note = 2'-fluoroadenosine
  modified_base 46: mod_base = OTHER; note = Guanosine phosphorothiorate
  modified_base 50: mod_base = OTHER; note = 2'-Omethylcytosine
  modified_base 52: mod_base = OTHER; note = 2'-Omethylguanosine
  modified_base 54: mod_base = OTHER; note = Uridine phosphorothiorate
  modified_base 55: mod_base = OTHER; note = Uridine phosphorothiorate
  modified_base 56: mod_base = OTHER; note = 2'-Omethylcytosine
  modified_base 57: mod_base = OTHER; note = Guanosine phosphorothiorate
  modified_base 62: mod_base = OTHER; note = 2'-Omethylcytosine
  modified_base 63: mod_base = OTHER; note = 2'-fluorocytosine
  modified_base 65: mod_base = OTHER; note = 2'-Omethylguanosine
  modified_base 71: mod_base = OTHER; note = 2'-Omethyluridine
  modified_base 73: mod_base = OTHER; note = 2'-Omethylguanosine

SEQ ID NO: 7300 - RNA, 76 nt, synthetic construct; identical to SEQ ID NO: 3289
  source 1..76: mol_type = other RNA
  modified_base 1: mod_base = OTHER; note = 2'-Omethylguanosine phosphorothiorate
  modified_base 2: mod_base = OTHER; note = 2'-Omethylcytosine phosphorothiorate
  modified_base 75: mod_base = OTHER; note = Cytosine phosphorothiorate
  modified_base 76: mod_base = OTHER; note = 2'-Omethyladenosine

SEQ ID NO: 7301 - RNA, 76 nt, synthetic construct; identical to SEQ ID NO: 625
  source 1..76: mol_type = other RNA
  modified_base 1: mod_base = OTHER; note = 2'-fluoroguanosine
  modified_base 2: mod_base = OTHER; note = 2'-fluoroguanosine
  modified_base 4: mod_base = OTHER; note = 2'-Omethyluridine
  modified_base 5: mod_base = OTHER; note = 2'-Omethylcytosine phosphorothiorate
  modified_base 6: mod_base = OTHER; note = 2'-Omethylcytosine
  modified_base 11: mod_base = OTHER; note = Cytosine phosphorothiorate
  modified_base 12: mod_base = OTHER; note = 2'-Omethylguanosine
  modified_base 13: mod_base = OTHER; note = 2'-Omethylcytosine
  modified_base 20: mod_base = OTHER; note = 2'-Omethyluridine
  modified_base 22: mod_base = OTHER; note = Guanosine phosphorothiorate
  modified_base 23: mod_base = OTHER; note = 2'-Omethylcytosine phosphorothiorate
  modified_base 25: mod_base = OTHER; note = 2'-Omethylcytosine
  modified_base 26: mod_base = OTHER; note = 2'-Omethyladenosine
  modified_base 28: mod_base = OTHER; note = 2'-fluorouridine
  modified_base 29: mod_base = OTHER; note = 2'-fluoroguanosine
  modified_base 33: mod_base = OTHER; note = 2'-fluorouridine phosphorothiorate
  modified_base 34: mod_base = OTHER; note = 2'-fluorouridine
  modified_base 40: mod_base = OTHER; note = 2'-Omethyluridine
  modified_base 41: mod_base = OTHER; note = Cytosine phosphorothiorate
  modified_base 42: mod_base = OTHER; note = 2'-Omethyladenosine
  modified_base 43: mod_base = OTHER; note = 2'-fluoroadenosine phosphorothiorate
  modified_base 44: mod_base = OTHER; note = 2'-fluoroadenosine
  modified_base 46: mod_base = OTHER; note = 2'-fluoroguanosine
  modified_base 47: mod_base = OTHER; note = 2'-fluorouridine
  modified_base 49: mod_base = OTHER; note = 2'-Omethylcytosine
  modified_base 53: mod_base = OTHER; note = Guanosine phosphorothiorate
  modified_base 54: mod_base = OTHER; note = 2'-Omethyluridine
  modified_base 58: mod_base = OTHER; note = Adenosine phosphorothiorate
  modified_base 59: mod_base = OTHER; note = 2'-fluoroguanosine
  modified_base 60: mod_base = OTHER; note = 2'-Omethyluridine
  modified_base 62: mod_base = OTHER; note = 2'-Omethylcytosine
  modified_base 64: mod_base = OTHER; note = 2'-Omethylguanosine
  modified_base 65: mod_base = OTHER; note = 2'-fluoroguanosine
  modified_base 68: mod_base = OTHER; note = 2'-fluoroguanosine
  modified_base 70: mod_base = OTHER; note = 2'-Omethylguanosine
  modified_base 71: mod_base = OTHER; note = Uridine phosphorothiorate
  modified_base 72: mod_base = OTHER; note = 2'-Omethylcytosine
  modified_base 73: mod_base = OTHER; note = Guanosine phosphorothiorate
  modified_base 74: mod_base = OTHER; note = 2'-Omethylcytosine
  modified_base 75: mod_base = OTHER; note = Cytosine phosphorothiorate
  modified_base 76: mod_base = OTHER; note = 2'-Omethyladenosine

SEQ ID NO: 7302 - RNA, 76 nt, synthetic construct; identical to SEQ ID NO: 3295
  source 1..76: mol_type = other RNA
  modified_base 1: mod_base = OTHER; note = 2'-Omethylcytosine
  modified_base 2: mod_base = OTHER; note = 2'-Omethylcytosine
  modified_base 5: mod_base = OTHER; note = 2'-fluorocytosine phosphorothiorate
  modified_base 10: mod_base = OTHER; note = 2'-Omethylguanosine
  modified_base 20: mod_base = OTHER; note = 2'-fluorouridine phosphorothiorate
  modified_base 39: mod_base = OTHER; note = 2'-Omethyluridine phosphorothiorate
  modified_base 48: mod_base = OTHER; note = 2'-Omethylcytosine
  modified_base 52: mod_base = OTHER; note = 2'-Omethylguanosine phosphorothiorate
  modified_base 75: mod_base = OTHER; note = 2'-fluorocytosine

SEQ ID NO: 7303 - RNA, 85 nt, synthetic construct; identical to SEQ ID NO: 3317
  source 1..85: mol_type = other RNA
  modified_base 1: mod_base = OTHER; note = 2'-Omethylguanosine phosphorothiorate
  modified_base 4: mod_base = OTHER; note = Guanosine phosphorothiorate
  modified_base 35: mod_base = OTHER; note = 2'-fluorouridine
  modified_base 37: mod_base = OTHER; note = 2'-Omethyladenosine
  modified_base 46: mod_base = OTHER; note = 2'-Omethylguanosine
  modified_base 59: mod_base = OTHER; note = 2'-Omethylcytosine phosphorothiorate
  modified_base 61: mod_base = OTHER; note = 2'-fluoroguanosine phosphorothiorate
  modified_base 82: mod_base = OTHER; note = 2'-Omethylguanosine

SEQ ID NO: 7304 - RNA, 75 nt, synthetic construct; identical to SEQ ID NO: 3311
  source 1..75: mol_type = other RNA
  modified_base 1: mod_base = OTHER; note = Guanosine phosphorothiorate
  modified_base 2: mod_base = OTHER; note = 2'-Omethylguanosine phosphorothiorate
  modified_base 12: mod_base = OTHER; note = Guanosine phosphorothiorate
  modified_base 16: mod_base = OTHER; note = 2'-fluorouridine
  modified_base 22: mod_base = OTHER; note = 2'-fluoroguanosine
  modified_base 42: mod_base = OTHER; note = 2'-fluoroadenosine
  modified_base 43: mod_base = OTHER; note = 2'-fluoroguanosine
  modified_base 47: mod_base = OTHER; note = 2'-fluorouridine
  modified_base 65: mod_base = OTHER; note = Uridine phosphorothiorate
  modified_base 66: mod_base = OTHER; note = Guanosine phosphorothiorate
  modified_base 67: mod_base = OTHER; note = 2'-fluoroguanosine
  modified_base 73: mod_base = OTHER; note = Cytosine phosphorothiorate
  modified_base 74: mod_base = OTHER; note = 2'-fluorocytosine phosphorothiorate

SEQ ID NO: 7305 - RNA, 76 nt, synthetic construct; identical to SEQ ID NO: 3329
  source 1..76: mol_type = other RNA
  modified_base 1: mod_base = OTHER; note = 2'-Omethylguanosine phosphorothiorate
  modified_base 2: mod_base = OTHER; note = 2'-Omethylguanosine phosphorothiorate
  modified_base 13: mod_base = OTHER; note = 2'-fluorocytosine
  modified_base 14: mod_base = OTHER; note = 2'-fluoroadenosine
  modified_base 54: mod_base = OTHER; note = 2'-fluorouridine
  modified_base 59: mod_base = OTHER; note = 2'-Omethylguanosine
  modified_base 75: mod_base = OTHER; note = Cytosine phosphorothiorate
  modified_base 76: mod_base = OTHER; note = 2'-Omethyladenosine

SEQ ID NO: 7306 - RNA, 76 nt, synthetic construct; identical to SEQ ID NO: 625
  source 1..76: mol_type = other RNA
  modified_base 5: mod_base = OTHER; note = 2'-fluorocytosine
  modified_base 11: mod_base = OTHER; note = 2'-fluorocytosine
  modified_base 14: mod_base = OTHER; note = 2'-Omethyladenosine
  modified_base 15: mod_base = OTHER; note = Adenosine phosphorothiorate
  modified_base 16: mod_base = OTHER; note = 2'-fluorouridine
  modified_base 20: mod_base = OTHER; note = 2'-Omethyluridine
  modified_base 22: mod_base = OTHER; note = 2'-fluoroguanosine phosphorothiorate
  modified_base 24: mod_base = OTHER; note = 2'-fluoroguanosine
  modified_base 26: mod_base = OTHER; note = 2'-Omethyladenosine
  modified_base 27: mod_base = OTHER; note = 2'-Omethyluridine
  modified_base 29: mod_base = OTHER; note = 2'-fluoroguanosine
  modified_base 30: mod_base = OTHER; note = 2'-Omethylguanosine
  modified_base 34: mod_base = OTHER; note = 2'-Omethyluridine phosphorothiorate
  modified_base 38: mod_base = OTHER; note = 2'-fluoroadenosine
  modified_base 41: mod_base = OTHER; note = 2'-fluorocytosine phosphorothiorate
  modified_base 42: mod_base = OTHER; note = 2'-Omethyladenosine
  modified_base 44: mod_base = OTHER; note = 2'-Omethyladenosine
  modified_base 45: mod_base = OTHER; note = 2'-fluoroguanosine
  modified_base 47: mod_base = OTHER; note = 2'-fluorouridine
  modified_base 51: mod_base = OTHER; note = 2'-Omethylguanosine
  modified_base 55: mod_base = OTHER; note = Uridine phosphorothiorate
  modified_base 56: mod_base = OTHER; note = 2'-fluorocytosine
  modified_base 59: mod_base = OTHER; note = 2'-Omethylguanosine
  modified_base 61: mod_base = OTHER; note = 2'-fluorocytosine
  modified_base 62: mod_base = OTHER; note = 2'-Omethylcytosine
  modified_base 63: mod_base = OTHER; note = 2'-Omethylcytosine
  modified_base 66: mod_base = OTHER; note = 2'-fluorocytosine
  modified_base 69: mod_base = OTHER; note = 2'-fluoroadenosine phosphorothiorate
  modified_base 70: mod_base = OTHER; note = 2'-fluoroguanosine phosphorothiorate
  modified_base 74: mod_base = OTHER; note = 2'-fluorocytosine
  modified_base 75: mod_base = OTHER; note = 2'-fluorocytosine
  modified_base 76: mod_base = OTHER; note = 2'-Omethyladenosine

SEQ ID NO: 7307 - RNA, 86 nt, synthetic construct; identical to SEQ ID NO: 3290
  source 1..86: mol_type = other RNA
  modified_base 1: mod_base = OTHER; note = 2'-Omethyladenosine
  modified_base 16: mod_base = OTHER; note = 2'-Omethyluridine
  modified_base 17: mod_base = OTHER; note = 2'-Omethylguanosine
  modified_base 18: mod_base = OTHER; note = 2'-Omethylguanosine
  modified_base 64: mod_base = OTHER; note = 2'-Omethyluridine phosphorothiorate
  modified_base 65: mod_base = OTHER; note = Uridine phosphorothiorate
  modified_base 66: mod_base = OTHER; note = 2'-Omethylcytosine
  modified_base 69: mod_base = OTHER; note = 2'-Omethyladenosine
  modified_base 83: mod_base = OTHER; note = 2'-Omethyladenosine

SEQ ID NO: 7308 - RNA, 85 nt, synthetic construct; identical to SEQ ID NO: 3317
  source 1..85: mol_type = other RNA
  modified_base 1: mod_base = OTHER; note = 2'-Omethylguanosine phosphorothiorate
  modified_base 2: mod_base = OTHER; note = 2'-Omethylcytosine
  modified_base 3: mod_base = OTHER; note = Uridine phosphorothiorate
  modified_base 4: mod_base = OTHER; note = Guanosine phosphorothiorate
  modified_base 17: mod_base = OTHER; note = 2'-Omethylguanosine phosphorothiorate
  modified_base 21: mod_base = OTHER; note = 2'-Omethyladenosine
  modified_base 26: mod_base = OTHER; note = Guanosine phosphorothiorate
  modified_base 27: mod_base = OTHER; note = Uridine phosphorothiorate
  modified_base 33: mod_base = OTHER; note = 2'-fluorouridine
  modified_base 37: mod_base = OTHER; note = 2'-Omethyladenosine
  modified_base 44: mod_base = OTHER; note = Uridine phosphorothiorate
  modified_base 46: mod_base = OTHER; note = 2'-Omethylguanosine
  modified_base 47: mod_base = OTHER; note = 2'-Omethylguanosine
  modified_base 48: mod_base = OTHER; note = 2'-Omethylguanosine phosphorothiorate
  modified_base 56: mod_base = OTHER; note = 2'-fluoroguanosine
  modified_base 57: mod_base = OTHER; note = 2'-fluorocytosine
  modified_base 61: mod_base = OTHER; note = 2'-Omethylguanosine
  modified_base 71: mod_base = OTHER; note = Cytosine phosphorothiorate
  modified_base 78: mod_base = OTHER; note = Cytosine phosphorothiorate
  modified_base 84: mod_base = OTHER; note = 2'-Omethylcytosine phosphorothiorate

SEQ ID NO: 7309 - RNA, 85 nt, synthetic construct; identical to SEQ ID NO: 3297
  source 1..85: mol_type = other RNA
  modified_base 1: mod_base = OTHER; note = 2'-Omethylguanosine
  modified_base 2: mod_base = OTHER; note = 2'-Omethylcytosine
  modified_base 3: mod_base = OTHER; note = 2'-Omethyluridine
  modified_base 4: mod_base = OTHER; note = 2'-Omethylguanosine
  modified_base 5: mod_base = OTHER; note = 2'-Omethyluridine
  modified_base 6: mod_base = OTHER; note = 2'-Omethylguanosine
  modified_base 75: mod_base = OTHER; note = 2'-Omethyluridine
  modified_base 76: mod_base = OTHER; note = 2'-Omethylcytosine
  modified_base 77: mod_base = OTHER; note = 2'-Omethyladenosine
  modified_base 82: mod_base = OTHER; note = 2'-Omethylguanosine

SEQ ID NO: 7310 - RNA, 76 nt, synthetic construct; identical to SEQ ID NO: 625
  source 1..76: mol_type = other RNA
  modified_base 1: mod_base = OTHER; note = 2'-fluoroguanosine
  modified_base 4: mod_base = OTHER; note = 2'-Omethyluridine
  modified_base 5: mod_base = OTHER; note = 2'-fluorocytosine
  modified_base 7: mod_base = OTHER; note = Guanosine phosphorothiorate
  modified_base 12: mod_base = OTHER; note = 2'-Omethylguanosine
  modified_base 16: mod_base = OTHER; note = 2'-Omethyluridine phosphorothiorate
  modified_base 17: mod_base = OTHER; note = 2'-Omethylguanosine
  modified_base 20: mod_base = OTHER; note = 2'-Omethyluridine phosphorothiorate
  modified_base 22: mod_base = OTHER; note = 2'-Omethylguanosine
  modified_base 23: mod_base = OTHER; note = 2'-fluorocytosine
  modified_base 24: mod_base = OTHER; note = 2'-fluoroguanosine
  modified_base 25: mod_base = OTHER; note = Cytosine phosphorothiorate
  modified_base 26: mod_base = OTHER; note = 2'-fluoroadenosine
  modified_base 27: mod_base = OTHER; note = Uridine phosphorothiorate
  modified_base 28: mod_base = OTHER; note = 2'-fluorouridine
  modified_base 29: mod_base = OTHER; note = Guanosine phosphorothiorate
  modified_base 30: mod_base = OTHER; note = 2'-fluoroguanosine
  modified_base 31: mod_base = OTHER; note = 2'-Omethyladenosine
  modified_base 34: mod_base = OTHER; note = Uridine phosphorothiorate
  modified_base 39: mod_base = OTHER; note = 2'-fluorouridine
  modified_base 41: mod_base = OTHER; note = 2'-fluorocytosine
  modified_base 42: mod_base = OTHER; note = 2'-Omethyladenosine
  modified_base 44: mod_base = OTHER; note = 2'-fluoroadenosine phosphorothiorate
  modified_base 45: mod_base = OTHER; note = 2'-Omethylguanosine
  modified_base 47: mod_base = OTHER; note = 2'-Omethyluridine
  modified_base 48: mod_base = OTHER; note = 2'-Omethyluridine
  modified_base 52: mod_base = OTHER; note = Guanosine phosphorothiorate
  modified_base 53: mod_base = OTHER; note = 2'-fluoroguanosine
  modified_base 56: mod_base = OTHER; note = Cytosine phosphorothiorate
  modified_base 67: mod_base = OTHER; note = 2'-Omethylguanosine
  modified_base 69: mod_base = OTHER; note = 2'-fluoroadenosine
  modified_base 70: mod_base = OTHER; note = 2'-Omethylguanosine phosphorothiorate
  modified_base 71: mod_base = OTHER; note = 2'-fluorouridine
  modified_base 74: mod_base = OTHER; note = 2'-Omethylcytosine phosphorothiorate
  modified_base 76: mod_base = OTHER; note = 2'-Omethyladenosine

SEQ ID NO: 7311 - RNA, 76 nt, synthetic construct; identical to SEQ ID NO: 625
  source 1..76: mol_type = other RNA
  modified_base 1: mod_base = OTHER; note = 2'-Omethylguanosine phosphorothiorate
  modified_base 2: mod_base = OTHER; note = 2'-Omethylguanosine phosphorothiorate
  modified_base 3: mod_base = OTHER; note = 2'-Omethylcytosine
  modified_base 4: mod_base = OTHER; note = 2'-Omethyluridine
  modified_base 5: mod_base = OTHER; note = 2'-Omethylcytosine
  modified_base 6: mod_base = OTHER; note = 2'-Omethylcytosine
  modified_base 14: mod_base = OTHER; note = 2'-Omethyladenosine
  modified_base 15: mod_base = OTHER; note = 2'-Omethyladenosine
  modified_base 16: mod_base = OTHER; note = 2'-Omethyluridine
  modified_base 17: mod_base = OTHER; note = 2'-Omethylguanosine
  modified_base 18: mod_base = OTHER; note = 2'-Omethylguanosine
  modified_base 20: mod_base = OTHER; note = 2'-Omethyluridine
  modified_base 22: mod_base = OTHER; note = 2'-Omethylguanosine
  modified_base 23: mod_base = OTHER; note = 2'-Omethylcytosine
  modified_base 24: mod_base = OTHER; note = 2'-Omethylguanosine
  modified_base 25: mod_base = OTHER; note = 2'-Omethylcytosine
  modified_base 33: mod_base = OTHER; note = 2'-fluorouridine
  modified_base 35: mod_base = OTHER; note = Cytosine phosphorothiorate
  modified_base 37: mod_base = OTHER; note = Adenosine phosphorothiorate
  modified_base 38: mod_base = OTHER; note = Adenosine phosphorothiorate
  modified_base 41: mod_base = OTHER; note = 2'-Omethylcytosine
  modified_base 42: mod_base = OTHER; note = 2'-Omethyladenosine
  modified_base 43: mod_base = OTHER; note = 2'-Omethyladenosine
  modified_base 44: mod_base = OTHER; note = 2'-Omethyladenosine
  modified_base 49: mod_base = OTHER; note = 2'-Omethylcytosine
  modified_base 50: mod_base = OTHER; note = 2'-Omethylcytosine
  modified_base 52: mod_base = OTHER; note = 2'-Omethylguanosine
  modified_base 54: mod_base = OTHER; note = 2'-Omethyluridine
  modified_base 55: mod_base = OTHER; note = Uridine phosphorothiorate
  modified_base 56: mod_base = OTHER; note = 2'-Omethylcytosine
  modified_base 57: mod_base = OTHER; note = 2'-fluoroguanosine
  modified_base 59: mod_base = OTHER; note = 2'-Omethylguanosine
  modified_base 61: mod_base = OTHER; note = 2'-Omethylcytosine
  modified_base 62: mod_base = OTHER; note = 2'-Omethylcytosine
  modified_base 63: mod_base = OTHER; note = 2'-fluorocytosine
  modified_base 64: mod_base = OTHER; note = 2'-Omethylguanosine
  modified_base 65: mod_base = OTHER; note = 2'-Omethylguanosine
  modified_base 74: mod_base = OTHER; note = Cytosine phosphorothiorate
  modified_base 75: mod_base = OTHER; note = 2'-Omethylcytosine phosphorothiorate

SEQ ID NO: 7312 - RNA, 85 nt, synthetic construct; identical to SEQ ID NO: 3297
  source 1..85: mol_type = other RNA
  modified_base 1: mod_base = OTHER; note = 2'-Omethylguanosine
  modified_base 3: mod_base = OTHER; note = 2'-Omethyluridine
  modified_base 14: mod_base = OTHER; note = 2'-Omethyladenosine
  modified_base 26: mod_base = OTHER; note = Guanosine phosphorothiorate
  modified_base 50: mod_base = OTHER; note = 2'-Omethylcytosine phosphorothiorate

SEQ ID NO: 7313 - RNA, 85 nt, synthetic construct; identical to SEQ ID NO: 3317
  source 1..85: mol_type = other RNA
  modified_base 2: mod_base = OTHER; note = 2'-Omethylcytosine phosphorothiorate
  modified_base 6: mod_base = OTHER; note = 2'-fluoroguanosine
  modified_base 27: mod_base = OTHER; note = 2'-Omethyluridine
  modified_base 52: mod_base = OTHER; note = 2'-Omethylcytosine phosphorothiorate
  modified_base 55: mod_base = OTHER; note = 2'-fluorocytosine
  modified_base 82: mod_base = OTHER; note = 2'-Omethylguanosine

SEQ ID NO: 7314 - RNA, 85 nt, synthetic construct; identical to SEQ ID NO: 3288
  source 1..85: mol_type = other RNA
  modified_base 1: mod_base = OTHER; note = 2'-Omethylcytosine
  modified_base 3: mod_base = OTHER; note = 2'-fluoroadenosine phosphorothiorate
  modified_base 27: mod_base = OTHER; note = 2'-fluorouridine
  modified_base 29: mod_base = OTHER; note = 2'-fluoroguanosine
  modified_base 32: mod_base = OTHER; note = 2'-fluorouridine
  modified_base 36: mod_base = OTHER; note = Guanosine phosphorothiorate
  modified_base 37: mod_base = OTHER; note = 2'-fluoroadenosine phosphorothiorate
  modified_base 45: mod_base = OTHER; note = 2'-fluoroguanosine phosphorothiorate
  modified_base 48: mod_base = OTHER; note = Adenosine phosphorothiorate
  modified_base 51: mod_base = OTHER; note = Uridine phosphorothiorate
  modified_base 58: mod_base = OTHER; note = Guanosine phosphorothiorate
  modified_base 65: mod_base = OTHER; note = 2'-fluorocytosine phosphorothiorate
  modified_base 72: mod_base = OTHER; note = Cytosine phosphorothiorate
  modified_base 73: mod_base = OTHER; note = 2'-fluoroadenosine
  modified_base 77: mod_base = OTHER; note = 2'-fluorocytosine

SEQ ID NO: 7315 - RNA, 75 nt, synthetic construct; identical to SEQ ID NO: 3299
  source 1..75: mol_type = other RNA
  modified_base 2: mod_base = OTHER; note = 2'-Omethylcytosine phosphorothiorate
  modified_base 4: mod_base = OTHER; note = 2'-Omethylguanosine phosphorothiorate
  modified_base 5: mod_base = OTHER; note = 2'-Omethylguanosine phosphorothiorate
  modified_base 40: mod_base = OTHER; note = 2'-fluorouridine
  modified_base 49: mod_base = OTHER; note = 2'-fluoroadenosine
  modified_base 50: mod_base = OTHER; note = 2'-fluoroguanosine
  modified_base 60: mod_base = OTHER; note = 2'-fluorocytosine phosphorothiorate
  modified_base 74: mod_base = OTHER; note = Cytosine phosphorothiorate

SEQ ID NO: 7316 - RNA, 73 nt, synthetic construct; identical to SEQ ID NO: 4612
  source 1..73: mol_type = other RNA
  modified_base 1: mod_base = OTHER; note = 2'-Omethylcytosine
  modified_base 2: mod_base = OTHER; note = 2'-Omethylcytosine
  modified_base 3: mod_base = OTHER; note = 2'-Omethyluridine
  modified_base 4: mod_base = OTHER; note = 2'-Omethyluridine
  modified_base 5: mod_base = OTHER; note = 2'-Omethylcytosine
  modified_base 6: mod_base = OTHER; note = 2'-Omethylguanosine

SEQ ID NO: 7317 - RNA, 76 nt, synthetic construct; identical to SEQ ID NO: 3289
  source 1..76: mol_type = other RNA
  modified_base 1: mod_base = OTHER; note = 2'-Omethylguanosine
  modified_base 40: mod_base = OTHER; note = 2'-fluorocytosine
  modified_base 41: mod_base = OTHER; note = 2'-Omethyluridine phosphorothiorate
  modified_base 42: mod_base = OTHER; note = 2'-fluoroguanosine
  modified_base 43: mod_base = OTHER; note = 2'-Omethyladenosine phosphorothiorate
  modified_base 73: mod_base = OTHER; note = 2'-Omethylguanosine

SEQ ID NO: 7318 - RNA, 76 nt, synthetic construct; identical to SEQ ID NO: 625
  source 1..76: mol_type = other RNA
  modified_base 3: mod_base = OTHER; note = 2'-Omethylcytosine
  modified_base 5: mod_base = OTHER; note = 2'-Omethylcytosine
  modified_base 10: mod_base = OTHER; note = 2'-fluoroguanosine
  modified_base 11: mod_base = OTHER; note = 2'-fluorocytosine
  modified_base 12: mod_base = OTHER; note = 2'-fluoroguanosine
  modified_base 15: mod_base = OTHER; note = 2'-Omethyladenosine
  modified_base 18: mod_base = OTHER; note = 2'-fluoroguanosine
  modified_base 22: mod_base = OTHER; note = 2'-fluoroguanosine
  modified_base 23: mod_base = OTHER; note = 2'-Omethylcytosine
  modified_base 26: mod_base = OTHER; note = 2'-Omethyladenosine
  modified_base 27: mod_base = OTHER; note = Uridine phosphorothiorate
  modified_base 28: mod_base = OTHER; note = 2'-fluorouridine
  modified_base 29: mod_base = OTHER; note = 2'-fluoroguanosine phosphorothiorate
  modified_base 30: mod_base = OTHER; note = 2'-fluoroguanosine
  modified_base 31: mod_base = OTHER; note = 2'-Omethyladenosine
  modified_base 34: mod_base = OTHER; note = 2'-fluorouridine
  modified_base 38: mod_base = OTHER; note = 2'-fluoroadenosine
  modified_base 39: mod_base = OTHER; note = Uridine phosphorothiorate
  modified_base 40: mod_base = OTHER; note = 2'-Omethyluridine phosphorothiorate
  modified_base 41: mod_base = OTHER; note = 2'-fluorocytosine
  modified_base 42: mod_base = OTHER; note = 2'-fluoroadenosine
  modified_base 44: mod_base = OTHER; note = 2'-Omethyladenosine
  modified_base 48: mod_base = OTHER; note = 2'-fluorouridine
  modified_base 50: mod_base = OTHER; note = 2'-fluorocytosine
  modified_base 53: mod_base = OTHER; note = 2'-Omethylguanosine
  modified_base 54: mod_base = OTHER; note = 2'-fluorouridine
  modified_base 57: mod_base = OTHER; note = 2'-fluoroguanosine
  modified_base 59: mod_base = OTHER; note = 2'-Omethylguanosine
  modified_base 60: mod_base = OTHER; note = 2'-fluorouridine
  modified_base 62: mod_base = OTHER; note = 2'-fluorocytosine
  modified_base 64: mod_base = OTHER; note = 2'-fluoroguanosine
  modified_base 66: mod_base = OTHER; note = Cytosine phosphorothiorate
  modified_base 67: mod_base = OTHER; note = 2'-Omethylguanosine
  modified_base 68: mod_base = OTHER; note = 2'-fluoroguanosine
  modified_base 70: mod_base = OTHER; note = Guanosine phosphorothiorate
  modified_base 74: mod_base = OTHER; note = 2'-Omethylcytosine
  modified_base 75: mod_base = OTHER; note = 2'-Omethylcytosine

SEQ ID NO: 7319 - RNA, 76 nt, synthetic construct; identical to SEQ ID NO: 625
  source 1..76: mol_type = other RNA
  modified_base 1: mod_base = OTHER; note = 2'-Omethylguanosine
  modified_base 2: mod_base = OTHER; note = 2'-Omethylguanosine
  modified_base 3: mod_base = OTHER; note = Cytosine phosphorothiorate
  modified_base 4: mod_base = OTHER; note = 2'-Omethyluridine
  modified_base 5: mod_base = OTHER; note = Cytosine phosphorothiorate
  modified_base 9: mod_base = OTHER; note = Guanosine phosphorothiorate
  modified_base 11: mod_base = OTHER; note = 2'-fluorocytosine
  modified_base 12: mod_base = OTHER; note = 2'-fluoroguanosine
  modified_base 14: mod_base = OTHER; note = 2'-fluoroadenosine
  modified_base 18: mod_base = OTHER; note = 2'-Omethylguanosine
  modified_base 19: mod_base = OTHER; note = Adenosine phosphorothiorate
  modified_base 20: mod_base = OTHER; note = 2'-fluorouridine
  modified_base 23: mod_base = OTHER; note = 2'-fluorocytosine
  modified_base 25: mod_base = OTHER; note = Cytosine phosphorothiorate
  modified_base 26: mod_base = OTHER; note = 2'-Omethyladenosine phosphorothiorate
  modified_base 27: mod_base = OTHER; note = 2'-fluorouridine
  modified_base 29: mod_base = OTHER; note = 2'-fluoroguanosine
  modified_base 30: mod_base = OTHER; note = 2'-fluoroguanosine phosphorothiorate
  modified_base 31: mod_base = OTHER; note = 2'-Omethyladenosine
  modified_base 46: mod_base = OTHER; note = 2'-fluoroguanosine
  modified_base 47: mod_base = OTHER; note = 2'-Omethyluridine
  modified_base 48: mod_base = OTHER; note = 2'-Omethyluridine
  modified_base 49: mod_base = OTHER; note = 2'-Omethylcytosine
  modified_base 51: mod_base = OTHER; note = 2'-Omethylguanosine
  modified_base 53: mod_base = OTHER; note = 2'-fluoroguanosine
  modified_base 54: mod_base = OTHER; note = 2'-Omethyluridine
  modified_base 56: mod_base = OTHER; note = 2'-fluorocytosine phosphorothiorate
  modified_base 58: mod_base = OTHER; note = 2'-fluoroadenosine
  modified_base 59: mod_base = OTHER; note = 2'-Omethylguanosine
  modified_base 60: mod_base = OTHER; note = Uridine phosphorothiorate
  modified_base 61: mod_base = OTHER; note = 2'-fluorocytosine
  modified_base 62: mod_base = OTHER; note = Cytosine phosphorothiorate
  modified_base 63: mod_base = OTHER; note = 2'-Omethylcytosine
  modified_base 64: mod_base = OTHER; note = 2'-fluoroguanosine
  modified_base 66: mod_base = OTHER; note = Cytosine phosphorothiorate
  modified_base 67: mod_base = OTHER; note = 2'-Omethylguanosine
  modified_base 69: mod_base = OTHER; note = 2'-Omethyladenosine
  modified_base 70: mod_base = OTHER; note = 2'-fluoroguanosine
  modified_base 73: mod_base = OTHER; note = 2'-fluoroguanosine
  modified_base 74: mod_base = OTHER; note = 2'-Omethylcytosine

SEQ ID NO: 7320 - RNA, 76 nt, synthetic construct; identical to SEQ ID NO: 625
  source 1..76: mol_type = other RNA
  modified_base 1: mod_base = OTHER; note = Guanosine phosphorothiorate
  modified_base 2: mod_base = OTHER; note = 2'-fluoroguanosine
  modified_base 5: mod_base = OTHER; note = 2'-Omethylcytosine
  modified_base 8: mod_base = OTHER; note = Uridine phosphorothiorate
  modified_base 9: mod_base = OTHER; note = Guanosine phosphorothiorate
  modified_base 10: mod_base = OTHER; note = 2'-Omethylguanosine phosphorothiorate
  modified_base 11: mod_base = OTHER; note = Cytosine phosphorothiorate
  modified_base 12: mod_base = OTHER; note = 2'-Omethylguanosine
  modified_base 13: mod_base = OTHER; note = 2'-fluorocytosine
  modified_base 15: mod_base = OTHER; note = Adenosine phosphorothiorate
  modified_base 25: mod_base = OTHER; note = 2'-fluorocytosine phosphorothiorate
  modified_base 28: mod_base = OTHER; note = 2'-fluorouridine
  modified_base 29: mod_base = OTHER; note = 2'-fluoroguanosine
  modified_base 33: mod_base = OTHER; note = 2'-fluorouridine
  modified_base 34: mod_base = OTHER; note = Uridine phosphorothiorate
  modified_base 37: mod_base = OTHER; note = Adenosine phosphorothiorate
  modified_base 39: mod_base = OTHER; note = 2'-fluorouridine phosphorothiorate
  modified_base 43: mod_base = OTHER; note = 2'-Omethyladenosine
  modified_base 44: mod_base = OTHER; note = 2'-Omethyladenosine phosphorothiorate
  modified_base 45: mod_base = OTHER; note = 2'-fluoroguanosine
  modified_base 46: mod_base = OTHER; note = 2'-Omethylguanosine
  modified_base 51: mod_base = OTHER; note = 2'-Omethylguanosine
  modified_base 53: mod_base = OTHER; note = 2'-fluoroguanosine
  modified_base 58: mod_base = OTHER; note = Adenosine phosphorothiorate
  modified_base 60: mod_base = OTHER; note = 2'-fluorouridine
  modified_base 62: mod_base = OTHER; note = 2'-Omethylcytosine phosphorothiorate
  modified_base 63: mod_base = OTHER; note = Cytosine phosphorothiorate
  modified_base 66: mod_base = OTHER; note = 2'-fluorocytosine
  modified_base 70: mod_base = OTHER; note = 2'-Omethylguanosine
  modified_base 71: mod_base = OTHER; note = 2'-Omethyluridine
  modified_base 72: mod_base = OTHER; note = 2'-fluorocytosine
  modified_base 74: mod_base = OTHER; note = 2'-Omethylcytosine
  modified_base 75: mod_base = OTHER; note = 2'-Omethylcytosine

SEQ ID NO: 7321 - DNA, 76 bp, synthetic construct; identical to SEQ ID NO: 1924
  source 1..76: mol_type = other DNA
  modified_base 1: mod_base = OTHER; note = 2'-Omethylguanosine phosphorothiorate
  modified_base 2: mod_base = OTHER; note = 2'-Omethylguanosine
  modified_base 14: mod_base = OTHER; note = Adenosine phosphorothiorate
  modified_base 15: mod_base = OTHER; note = Adenosine phosphorothiorate
  modified_base 16: mod_base = OTHER; note = 2'-fluorouridine
  modified_base 20: mod_base = OTHER; note = 2'-O-(2-Methoxyethyl) thymine
  modified_base 38: mod_base = OTHER; note = Adenosine phosphorothiorate
  modified_base 66: mod_base = OTHER; note = 2'-O-(2-Methoxyethyl) 5-methylcytosine
  modified_base 75: mod_base = OTHER; note = Cytosine phosphorothiorate
  modified_base 76: mod_base = OTHER; note = 2'-Omethyladenosine
  misc_feature 1..38: note = RNA
  misc_feature 39: note = DNA
  misc_feature 40..60: note = RNA
  misc_feature 61: note = DNA
  misc_feature 62..76: note = RNA

SEQ ID NO: 7322 - RNA, 76 nt, synthetic construct
  source 1..76: mol_type = other RNA
ggctccgtggcgcaatggatagcgcattggacttcaaattcaacggttcggggttcgagtccccgcggagtcgcca

SEQ ID NO: 7323 - RNA, 76 nt, synthetic construct; identical to SEQ ID NO: 625
  source 1..76: mol_type = other RNA
  modified_base 1: mod_base = OTHER; note = Guanosine phosphorothiorate
  modified_base 2: mod_base = OTHER; note = 2'-fluoroguanosine
  modified_base 5: mod_base = OTHER; note = 2'-Omethylcytosine
  modified_base 11: mod_base = OTHER; note = 2'-fluorocytosine phosphorothiorate
  modified_base 12: mod_base = OTHER; note = 2'-Omethylguanosine
  modified_base 13: mod_base = OTHER; note = 2'-fluorocytosine
  modified_base 14: mod_base = OTHER; note = Adenosine phosphorothiorate
  modified_base 16: mod_base = OTHER; note = Uridine phosphorothiorate
  modified_base 17: mod_base = OTHER; note = 2'-Omethylguanosine
  modified_base 24: mod_base = OTHER; note = Guanosine phosphorothiorate
  modified_base 25: mod_base = OTHER; note = 2'-Omethylcytosine
  modified_base 27: mod_base = OTHER; note = 2'-fluorouridine
  modified_base 28: mod_base = OTHER; note = 2'-fluorouridine phosphorothiorate
  modified_base 29: mod_base = OTHER; note = 2'-Omethylguanosine
  modified_base 38: mod_base = OTHER; note = 2'-fluoroadenosine
  modified_base 39: mod_base = OTHER; note = 2'-fluorouridine
  modified_base 41: mod_base = OTHER; note = 2'-fluorocytosine
  modified_base 45: mod_base = OTHER; note = 2'-fluoroguanosine
  modified_base 48: mod_base = OTHER; note = Uridine phosphorothiorate
  modified_base 49: mod_base = OTHER; note = 2'-fluorocytosine phosphorothiorate
  modified_base 50: mod_base = OTHER; note = 2'-fluorocytosine
  modified_base 51: mod_base = OTHER; note = 2'-Omethylguanosine
  modified_base 53: mod_base = OTHER; note = 2'-Omethylguanosine phosphorothiorate
  modified_base 54: mod_base = OTHER; note = 2'-Omethyluridine
  modified_base 56: mod_base = OTHER; note = 2'-Omethylcytosine
  modified_base 57: mod_base = OTHER; note = 2'-fluoroguanosine
  modified_base 59: mod_base = OTHER; note = 2'-fluoroguanosine phosphorothiorate
  modified_base 62: mod_base = OTHER; note = 2'-Omethylcytosine
  modified_base 65: mod_base = OTHER; note = 2'-Omethylguanosine
  modified_base 66: mod_base = OTHER; note = 2'-Omethylcytosine
  modified_base 67: mod_base = OTHER; note = 2'-fluoroguanosine
  modified_base 68: mod_base = OTHER; note = Guanosine phosphorothiorate
  modified_base 69: mod_base = OTHER; note = 2'-fluoroadenosine
  modified_base 72: mod_base = OTHER; note = 2'-Omethylcytosine
  modified_base 73: mod_base = OTHER; note = 2'-Omethylguanosine
  modified_base 74: mod_base = OTHER; note = 2'-Omethylcytosine

SEQ ID NO: 7324 - RNA, 75 nt, synthetic construct; identical to SEQ ID NO: 3299
  source 1..75: mol_type = other RNA
  modified_base 3: mod_base = OTHER; note = 2'-Omethyluridine phosphorothiorate
  modified_base 11: mod_base = OTHER; note = Uridine phosphorothiorate
  modified_base 18: mod_base = OTHER; note = 2'-fluoroguanosine
  modified_base 21: mod_base = OTHER; note = 2'-fluoroguanosine
  modified_base 23: mod_base = OTHER; note = 2'-fluoroguanosine
  modified_base 38: mod_base = OTHER; note = 2'-Omethyluridine phosphorothiorate
  modified_base 47: mod_base = OTHER; note = 2'-fluorocytosine
  modified_base 49: mod_base = OTHER; note = 2'-fluoroadenosine
  modified_base 73: mod_base = OTHER; note = Cytosine phosphorothiorate
  modified_base 74: mod_base = OTHER; note = Cytosine phosphorothiorate

SEQ ID NO: 7325 - RNA, 75 nt, synthetic construct; identical to SEQ ID NO: 3306
  source 1..75: mol_type = other RNA
  modified_base 60: mod_base = OTHER; note = 2'-Omethylcytosine
  modified_base 61: mod_base = OTHER; note = 2'-Omethyladenosine
  modified_base 62: mod_base = OTHER; note = 2'-Omethylcytosine
  modified_base 63: mod_base = OTHER; note = 2'-Omethylguanosine
  modified_base 64: mod_base = OTHER; note = 2'-Omethyluridine

SEQ ID NO: 7326 - RNA, 85 nt, synthetic construct; identical to SEQ ID NO: 3288
  source 1..85: mol_type = other RNA
  modified_base 1: mod_base = OTHER; note = 2'-fluorocytosine phosphorothiorate
  modified_base 11: mod_base = OTHER; note = Cytosine phosphorothiorate
  modified_base 22: mod_base = OTHER; note = 2'-fluoroguanosine
  modified_base 42: mod_base = OTHER; note = 2'-Omethyladenosine
  modified_base 50: mod_base = OTHER; note = Adenosine phosphorothiorate
  modified_base 55: mod_base = OTHER; note = 2'-Omethylcytosine
  modified_base 58: mod_base = OTHER; note = Guanosine phosphorothiorate
  modified_base 84: mod_base = OTHER; note = 2'-fluorocytosine

SEQ ID NO: 7327 - RNA, 76 nt, synthetic construct; identical to SEQ ID NO: 625
  source 1..76: mol_type = other RNA
  modified_base 1: mod_base = OTHER; note = 2'-Omethylguanosine
  modified_base 17: mod_base = OTHER; note = 2'-Omethylguanosine
  modified_base 18: mod_base = OTHER; note = 2'-Omethylguanosine
  modified_base 33: mod_base = OTHER; note = 2'-fluorouridine
  modified_base 34: mod_base = OTHER; note = Thymine
  modified_base 50: mod_base = OTHER; note = 2'-Omethylcytosine
  modified_base 52: mod_base = OTHER; note = 2'-Omethylguanosine
  modified_base 55: mod_base = OTHER; note = Uridine phosphorothiorate
  modified_base 73: mod_base = OTHER; note = 2'-Omethylguanosine

SEQ ID NO: 7328 - RNA, 75 nt, synthetic construct; identical to SEQ ID NO: 3306
  source 1..75: mol_type = other RNA
  modified_base 1: mod_base = OTHER; note = 2'-Omethylguanosine phosphorothiorate
  modified_base 2: mod_base = OTHER; note = 2'-Omethyladenosine
  modified_base 3: mod_base = OTHER; note = 2'-Omethylcytosine
  modified_base 4: mod_base = OTHER; note = 2'-Omethylcytosine
  modified_base 5: mod_base = OTHER; note = 2'-Omethyluridine
  modified_base 6: mod_base = OTHER; note = 2'-Omethylcytosine
  modified_base 16: mod_base = OTHER; note = 2'-Omethylcytosine
  modified_base 17: mod_base = OTHER; note = 2'-Omethylguanosine
  modified_base 18: mod_base = OTHER; note = 2'-Omethylguanosine
  modified_base 32: mod_base = OTHER; note = 2'-fluorouridine
  modified_base 34: mod_base = OTHER; note = Uridine phosphorothiorate
  modified_base 36: mod_base = OTHER; note = Guanosine phosphorothiorate
  modified_base 37: mod_base = OTHER; note = Adenosine phosphorothiorate
  modified_base 43: mod_base = OTHER; note = 2'-Omethyladenosine
  modified_base 44: mod_base = OTHER; note = 2'-Omethylguanosine
  modified_base 45: mod_base = OTHER; note = 2'-fluoroguanosine
  modified_base 46: mod_base = OTHER; note = 2'-fluorouridine
  modified_base 47: mod_base = OTHER; note = 2'-fluorouridine
  modified_base 48: mod_base = OTHER; note = 2'-Omethylguanosine
  modified_base 49: mod_base = OTHER; note = 2'-Omethylcytosine
  modified_base 50: mod_base = OTHER; note = 2'-Omethylguanosine
  modified_base 51: mod_base = OTHER; note = 2'-Omethyluridine
  modified_base 52: mod_base = OTHER; note = 2'-Omethylguanosine
  modified_base 53: mod_base = OTHER; note = 2'-Omethyluridine
  modified_base 55: mod_base = OTHER; note = 2'-Omethylcytosine
  modified_base 58: mod_base = OTHER; note = 2'-Omethyladenosine
  modified_base 60: mod_base = OTHER; note = 2'-Omethylcytosine
  modified_base 61: mod_base = OTHER; note = 2'-Omethyladenosine
  modified_base 62: mod_base = OTHER; note = 2'-fluorocytosine
  modified_base 63: mod_base = OTHER; note = 2'-Omethylguanosine
  modified_base 64: mod_base = OTHER; note = 2'-Omethyluridine
  modified_base 65: mod_base = OTHER; note = 2'-Omethylcytosine
  modified_base 66: mod_base = OTHER; note = 2'-Omethylguanosine
  modified_base 67: mod_base = OTHER; note = 2'-Omethylguanosine
  modified_base 72: mod_base = OTHER; note = 2'-Omethyladenosine

SEQ ID NO: 7329 - RNA, 76 nt, synthetic construct; identical to SEQ ID NO: 625
  source 1..76: mol_type = other RNA
  modified_base 1: mod_base = OTHER; note = 2'-fluoroguanosine
  modified_base 12: mod_base = OTHER; note = Guanosine phosphorothiorate
  modified_base 13: mod_base = OTHER; note = 2'-fluorocytosine
  modified_base 14: mod_base = OTHER; note = Adenosine phosphorothiorate
  modified_base 18: mod_base = OTHER; note = Guanosine phosphorothiorate
  modified_base 19: mod_base = OTHER; note = Adenosine phosphorothiorate
  modified_base 20: mod_base = OTHER; note = 2'-fluorouridine
  modified_base 22: mod_base = OTHER; note = 2'-Omethylguanosine phosphorothiorate
  modified_base 24: mod_base = OTHER; note = 2'-Omethylguanosine
  modified_base 25: mod_base = OTHER; note = 2'-Omethylcytosine
  modified_base 27: mod_base = OTHER; note = Uridine phosphorothiorate
  modified_base 28: mod_base = OTHER; note = 2'-Omethyluridine phosphorothiorate
  modified_base 29: mod_base = OTHER; note = Guanosine phosphorothiorate
  modified_base 30: mod_base = OTHER; note = Guanosine phosphorothiorate
  modified_base 33: mod_base = OTHER; note = 2'-fluorouridine
  modified_base 40: mod_base = OTHER; note = 2'-fluorouridine phosphorothiorate
  modified_base 42: mod_base = OTHER; note = 2'-fluoroadenosine
  modified_base 43: mod_base = OTHER; note = 2'-fluoroadenosine
  modified_base 44: mod_base = OTHER; note = 2'-Omethyladenosine
  modified_base 49: mod_base = OTHER; note = 2'-fluorocytosine phosphorothiorate
  modified_base 50: mod_base = OTHER; note = 2'-fluorocytosine
  modified_base 52: mod_base = OTHER; note = 2'-fluoroguanosine
  modified_base 59: mod_base = OTHER; note = 2'-fluoroguanosine
  modified_base 60: mod_base = OTHER; note = 2'-Omethyluridine
  modified_base 62: mod_base = OTHER; note = Cytosine phosphorothiorate
  modified_base 63: mod_base = OTHER; note = 2'-Omethylcytosine
  modified_base 67: mod_base = OTHER; note = Guanosine phosphorothiorate
  modified_base 69: mod_base = OTHER; note = 2'-fluoroadenosine
  modified_base 70: mod_base = OTHER; note = 2'-Omethylguanosine
  modified_base 73: mod_base = OTHER; note = 2'-fluoroguanosine phosphorothiorate
  modified_base 74: mod_base = OTHER; note = 2'-fluorocytosine
  modified_base 75: mod_base = OTHER; note = 2'-fluorocytosine

SEQ ID NO: 7330 - RNA, 76 nt, synthetic construct; identical to SEQ ID NO: 3318
  source 1..76: mol_type = other RNA
  modified_base 1: mod_base = OTHER; note = 2'-Omethylcytosine
  modified_base 13: mod_base = OTHER; note = 2'-Omethylcytosine
  modified_base 14: mod_base = OTHER; note = 2'-Omethyladenosine
  modified_base 15: mod_base = OTHER; note = 2'-Omethylguanosine
  modified_base 16: mod_base = OTHER; note = 2'-Omethyluridine
  modified_base 18: mod_base = OTHER; note = 2'-Omethylguanosine
  modified_base 19: mod_base = OTHER; note = 2'-Omethylguanosine
  modified_base 20: mod_base = OTHER; note = Uridine phosphorothiorate
  modified_base 21: mod_base = OTHER; note = Adenosine phosphorothiorate
  modified_base 25: mod_base = OTHER; note = 2'-Omethylcytosine
  modified_base 33: mod_base = OTHER; note = 2'-fluorouridine
  modified_base 34: mod_base = OTHER; note = 2'-Omethylcytosine
  modified_base 35: mod_base = OTHER; note = Uridine phosphorothiorate
  modified_base 37: mod_base = OTHER; note = Guanosine phosphorothiorate
  modified_base 38: mod_base = OTHER; note = Adenosine phosphorothiorate
  modified_base 49: mod_base = OTHER; note = 2'-Omethylguanosine
  modified_base 50: mod_base = OTHER; note = 2'-Omethylcytosine
  modified_base 51: mod_base = OTHER; note = 2'-Omethyluridine
  modified_base 52: mod_base = OTHER; note = 2'-Omethylguanosine
  modified_base 53: mod_base = OTHER; note = 2'-Omethylguanosine
  modified_base 54: mod_base = OTHER; note = Uridine phosphorothiorate
  modified_base 55: mod_base = OTHER; note = Uridine phosphorothiorate
  modified_base 61: mod_base = OTHER; note = 2'-Omethylcytosine
  modified_base 65: mod_base = OTHER; note = 2'-Omethylcytosine
  modified_base 73: mod_base = OTHER; note = 2'-Omethyladenosine

SEQ ID NO: 7331 - RNA, 76 nt, synthetic construct; identical to SEQ ID NO: 625
  source 1..76: mol_type = other RNA
  modified_base 1: mod_base = OTHER; note = 2'-Omethylguanosine phosphorothiorate
  modified_base 2: mod_base = OTHER; note = 2'-Omethylguanosine phosphorothiorate
  modified_base 3: mod_base = OTHER; note = 2'-Omethylcytosine phosphorothiorate
  modified_base 4: mod_base = OTHER; note = 2'-Omethyluridine phosphorothiorate
  modified_base 5: mod_base = OTHER; note = 2'-Omethylcytosine phosphorothiorate
  modified_base 6: mod_base = OTHER; note = 2'-Omethylcytosine phosphorothiorate
  modified_base 10: mod_base = OTHER; note = 2'-Omethylguanosine
  modified_base 11: mod_base = OTHER; note = 2'-Omethylcytosine
  modified_base 12: mod_base = OTHER; note = 2'-Omethylguanosine
  modified_base 13: mod_base = OTHER; note = 2'-Omethylcytosine
  modified_base 54: mod_base = OTHER; note = Uridine phosphorothiorate
  modified_base 55: mod_base = OTHER; note = Uridine phosphorothiorate
  modified_base 56: mod_base = OTHER; note = Cytosine phosphorothiorate
  modified_base 57: mod_base = OTHER; note = Guanosine phosphorothiorate

SEQ ID NO: 7332 - RNA, 86 nt, synthetic construct; identical to SEQ ID NO: 3290
  source 1..86: mol_type = other RNA
  modified_base 1: mod_base = OTHER; note = 2'-Omethyladenosine
  modified_base 14: mod_base = OTHER; note = 2'-Omethyladenosine
  modified_base 16: mod_base = OTHER; note = 2'-Omethyluridine
  modified_base 20: mod_base = OTHER; note = 2'-Omethyluridine
  modified_base 83: mod_base = OTHER; note = 2'-Omethyladenosine

SEQ ID NO: 7333 - RNA, 76 nt, synthetic construct; identical to SEQ ID NO: 625
  source 1..76: mol_type = other RNA
  modified_base 1: mod_base = OTHER; note = 2'-Omethylguanosine phosphorothiorate
  modified_base 2: mod_base = OTHER; note = 2'-Omethylguanosine phosphorothiorate
  modified_base 3: mod_base = OTHER; note = 2'-Omethylcytosine phosphorothiorate
  modified_base 4: mod_base = OTHER; note = 2'-Omethyluridine phosphorothiorate
  modified_base 5: mod_base = OTHER; note = 2'-Omethylcytosine phosphorothiorate
  modified_base 6: mod_base = OTHER; note = 2'-Omethylcytosine phosphorothiorate
  modified_base 10: mod_base = OTHER; note = 2'-Omethylguanosine
  modified_base 11: mod_base = OTHER; note = 2'-Omethylcytosine
  modified_base 12: mod_base = OTHER; note = 2'-Omethylguanosine
  modified_base 13: mod_base = OTHER; note = 2'-Omethylcytosine
  modified_base 49: mod_base = OTHER; note = 2'-Omethylcytosine
  modified_base 50: mod_base = OTHER; note = 2'-Omethylcytosine
  modified_base 51: mod_base = OTHER; note = 2'-Omethylguanosine
  modified_base 52: mod_base = OTHER; note = 2'-Omethylguanosine
  modified_base 53: mod_base = OTHER; note = 2'-Omethylguanosine
  modified_base 54: mod_base = OTHER; note = Uridine phosphorothiorate
  modified_base 55: mod_base = OTHER; note = Uridine phosphorothiorate
  modified_base 56: mod_base = OTHER; note = Cytosine phosphorothiorate
  modified_base 57: mod_base = OTHER; note = Guanosine phosphorothiorate
  modified_base 61: mod_base = OTHER; note = 2'-Omethylcytosine
  modified_base 62: mod_base = OTHER; note = 2'-Omethylcytosine
  modified_base 63: mod_base = OTHER; note = 2'-Omethylcytosine
  modified_base 64: mod_base = OTHER; note = 2'-Omethylguanosine
  modified_base 65: mod_base = OTHER; note = 2'-Omethylguanosine
  modified_base 66: mod_base = OTHER; note = 2'-Omethylcytosine
  modified_base 67: mod_base = OTHER; note = 2'-Omethylguanosine
  modified_base 68: mod_base = OTHER; note = 2'-Omethylguanosine
  modified_base 69: mod_base = OTHER; note = 2'-Omethyladenosine

SEQ ID NO: 7334 - RNA, 76 nt, synthetic construct; identical to SEQ ID NO: 625
  source 1..76: mol_type = other RNA
  modified_base 1: mod_base = OTHER; note = Guanosine phosphorothiorate
  modified_base 3: mod_base = OTHER; note = 2'-Omethylcytosine
  modified_base 4: mod_base = OTHER; note = Uridine phosphorothiorate
  modified_base 5: mod_base = OTHER; note = 2'-Omethylcytosine
  modified_base 6: mod_base = OTHER; note = 2'-Omethylcytosine
  modified_base 7: mod_base = OTHER; note = Guanosine phosphorothiorate
  modified_base 9: mod_base = OTHER; note = Guanosine phosphorothiorate
  modified_base 10: mod_base = OTHER; note = 2'-Omethylguanosine
  modified_base 11: mod_base = OTHER; note = 2'-Omethylcytosine
  modified_base 12: mod_base = OTHER; note = 2'-fluoroguanosine
  modified_base 13: mod_base = OTHER; note = 2'-fluorocytosine
  modified_base 22: mod_base = OTHER; note = 2'-fluoroguanosine
  modified_base 24: mod_base = OTHER; note = 2'-Omethylguanosine
  modified_base 28: mod_base = OTHER; note = 2'-fluorouridine phosphorothiorate
  modified_base 29: mod_base = OTHER; note = 2'-Omethylguanosine
  modified_base 31: mod_base = OTHER; note = 2'-Omethyladenosine
  modified_base 34: mod_base = OTHER; note = 2'-fluorouridine
  modified_base 39: mod_base = OTHER; note = 2'-fluorouridine
  modified_base 40: mod_base = OTHER; note = 2'-fluorouridine phosphorothiorate
  modified_base 41: mod_base = OTHER; note = 2'-Omethylcytosine
  modified_base 42: mod_base = OTHER; note = Adenosine phosphorothiorate
  modified_base 43: mod_base = OTHER; note = 2'-Omethyladenosine
  modified_base 45: mod_base = OTHER; note = Guanosine phosphorothiorate
  modified_base 47: mod_base = OTHER; note = 2'-Omethyluridine phosphorothiorate
  modified_base 48: mod_base = OTHER; note = Uridine phosphorothiorate
  modified_base 49: mod_base = OTHER; note = 2'-Omethylcytosine
  modified_base 52: mod_base = OTHER; note = 2'-fluoroguanosine
  modified_base 53: mod_base = OTHER; note = 2'-fluoroguanosine phosphorothiorate
  modified_base 54: mod_base = OTHER; note = Uridine phosphorothiorate
  modified_base 58: mod_base = OTHER; note = Adenosine phosphorothiorate
  modified_base 59: mod_base = OTHER; note = 2'-Omethylguanosine
  modified_base 60: mod_base = OTHER; note = 2'-Omethyluridine
  modified_base 62: mod_base = OTHER; note = 2'-fluorocytosine
  modified_base 64: mod_base = OTHER; note = 2'-Omethylguanosine
  modified_base 65: mod_base = OTHER; note = 2'-fluoroguanosine
  modified_base 66: mod_base = OTHER; note = 2'-Omethylcytosine
  modified_base 74: mod_base = OTHER; note = 2'-fluorocytosine
  modified_base 75: mod_base = OTHER; note = Cytosine phosphorothiorate

SEQ ID NO: 7335 - RNA, 86 nt, synthetic construct; identical to SEQ ID NO: 3290
  source 1..86: mol_type = other RNA
  modified_base 1: mod_base = OTHER; note = 2'-Omethyladenosine
  modified_base 10: mod_base = OTHER; note = 2'-Omethylguanosine
  modified_base 11: mod_base = OTHER; note = 2'-Omethylcytosine
  modified_base 12: mod_base = OTHER; note = 2'-Omethylcytosine
  modified_base 13: mod_base = OTHER; note = 2'-Omethylguanosine
  modified_base 14: mod_base = OTHER; note = 2'-Omethyladenosine
  modified_base 15: mod_base = OTHER; note = 2'-Omethylguanosine
  modified_base 16: mod_base = OTHER; note = 2'-Omethyluridine
  modified_base 17: mod_base = OTHER; note = 2'-Omethylguanosine
  modified_base 18: mod_base = OTHER; note = 2'-Omethylguanosine
  modified_base 19: mod_base = OTHER; note = Uridine phosphorothiorate
  modified_base 20: mod_base = OTHER; note = 2'-Omethyluridine
  modified_base 21: mod_base = OTHER; note = Adenosine phosphorothiorate
  modified_base 22: mod_base = OTHER; note = 2'-Omethyladenosine
  modified_base 23: mod_base = OTHER; note = 2'-Omethylguanosine
  modified_base 24: mod_base = OTHER; note = 2'-Omethylguanosine
  modified_base 25: mod_base = OTHER; note = 2'-Omethylcytosine
  modified_base 33: mod_base = OTHER; note = 2'-fluorouridine
  modified_base 34: mod_base = OTHER; note = 2'-Omethyluridine
  modified_base 35: mod_base = OTHER; note = Cytosine phosphorothiorate
  modified_base 37: mod_base = OTHER; note = Guanosine phosphorothiorate
  modified_base 38: mod_base = OTHER; note = Adenosine phosphorothiorate
  modified_base 59: mod_base = OTHER; note = 2'-Omethylguanosine
  modified_base 60: mod_base = OTHER; note = 2'-Omethyluridine
  modified_base 62: mod_base = OTHER; note = 2'-Omethylguanosine
  modified_base 64: mod_base = OTHER; note = Uridine phosphorothiorate
  modified_base 65: mod_base = OTHER; note = Uridine phosphorothiorate
  modified_base 71: mod_base = OTHER; note = 2'-Omethylcytosine
  modified_base 75: mod_base = OTHER; note = 2'-Omethylcytosine
  modified_base 83: mod_base = OTHER; note = 2'-Omethyladenosine

SEQ ID NO: 7336 - RNA, 76 nt, synthetic construct; identical to SEQ ID NO: 3318
  source 1..76: mol_type = other RNA
  modified_base 27: mod_base = OTHER; note = 2'-Omethylguanosine
  modified_base 28: mod_base = OTHER; note = 2'-Omethyladenosine
  modified_base 29: mod_base = OTHER; note = 2'-Omethylguanosine
  modified_base 30: mod_base = OTHER; note = 2'-Omethylguanosine
  modified_base 31: mod_base = OTHER; note = 2'-Omethyladenosine

SEQ ID NO: 7337 - RNA, 76 nt, synthetic construct; identical to SEQ ID NO: 625
  source 1..76: mol_type = other RNA
  modified_base 1: mod_base = OTHER; note = 2'-Omethylguanosine phosphorothiorate
  modified_base 2: mod_base = OTHER; note = 2'-Omethylguanosine
  modified_base 13: mod_base = OTHER; note = 2'-Omethylcytosine
  modified_base 33: mod_base = OTHER; note = 2'-fluorouridine
  modified_base 35: mod_base = OTHER; note = Cytosine phosphorothiorate
  modified_base 37: mod_base = OTHER; note = Adenosine phosphorothiorate
  modified_base 52: mod_base = OTHER; note = 2'-Omethylguanosine
  modified_base 62: mod_base = OTHER; note = 2'-Omethylcytosine
  modified_base 73: mod_base = OTHER; note = 2'-Omethylguanosine
  modified_base 75: mod_base = OTHER; note = 2'-fluorocytosine phosphorothiorate
  modified_base 76: mod_base = OTHER; note = 2'-Omethyladenosine

SEQ ID NO: 7338 - RNA, 76 nt, synthetic construct; identical to SEQ ID NO: 625
  source 1..76: mol_type = other RNA
  modified_base 1: mod_base = OTHER; note = 2'-Omethylguanosine phosphorothiorate
  modified_base 2: mod_base = OTHER; note = 2'-Omethylguanosine phosphorothiorate
  modified_base 73: mod_base = OTHER; note = Guanosine phosphorothiorate
  modified_base 74: mod_base = OTHER; note = 2'-O-(2-Methoxyethyl) 5-methylcytosine phosphorothiorate
  modified_base 75: mod_base = OTHER; note = 2'-Omethylcytosine

SEQ ID NO: 7339 - RNA, 75 nt, synthetic construct; identical to SEQ ID NO: 3311
  source 1..75: mol_type = other RNA
  modified_base 1: mod_base = OTHER; note = 2'-fluoroguanosine phosphorothiorate
  modified_base 2: mod_base = OTHER; note = 2'-Omethylguanosine phosphorothiorate
  modified_base 11: mod_base = OTHER; note = Uridine phosphorothiorate
  modified_base 12: mod_base = OTHER; note = Guanosine phosphorothiorate
  modified_base 17: mod_base = OTHER; note = Guanosine phosphorothiorate
  modified_base 19: mod_base = OTHER; note = 2'-fluorouridine
  modified_base 38: mod_base = OTHER; note = Adenosine phosphorothiorate
  modified_base 41: mod_base = OTHER; note = 2'-fluorocytosine
  modified_base 42: mod_base = OTHER; note = 2'-fluoroadenosine
  modified_base 49: mod_base = OTHER; note = Cytosine phosphorothiorate
  modified_base 55: mod_base = OTHER; note = 2'-fluorocytosine phosphorothiorate
  modified_base 67: mod_base = OTHER; note = Guanosine phosphorothiorate
  modified_base 68: mod_base = OTHER; note = 2'-fluoroadenosine
  modified_base 73: mod_base = OTHER; note = Cytosine phosphorothiorate
  modified_base 74: mod_base = OTHER; note = 2'-Omethylcytosine

SEQ ID NO: 7340 - RNA, 76 nt, synthetic construct; identical to SEQ ID NO: 625
  source 1..76: mol_type = other RNA
  modified_base 1: mod_base = OTHER; note = 2'-Omethylguanosine phosphorothiorate
  modified_base 2: mod_base = OTHER; note = 2'-Omethylguanosine
  modified_base 17: mod_base = OTHER; note = 2'-Omethylguanosine
  modified_base 33: mod_base = OTHER; note = 2'-fluorouridine
  modified_base 35: mod_base = OTHER; note = Cytosine phosphorothiorate
  modified_base 37: mod_base = OTHER; note = Adenosine phosphorothiorate
  modified_base 38: mod_base = OTHER; note = Adenosine phosphorothiorate
  modified_base 52: mod_base = OTHER; note = 2'-Omethylguanosine
  modified_base 73: mod_base = OTHER; note = 2'-Omethylguanosine
  modified_base 75: mod_base = OTHER; note = 2'-fluorocytosine phosphorothiorate

SEQ ID NO: 7341 - RNA, 76 nt, synthetic construct; identical to SEQ ID NO: 3316
  source 1..76: mol_type = other RNA
  modified_base 1: mod_base = OTHER; note = 2'-Omethyladenosine phosphorothiorate
  modified_base 2: mod_base = OTHER; note = 2'-Omethylcytosine
  modified_base 3: mod_base = OTHER; note = 2'-Omethylcytosine
  modified_base 4: mod_base = OTHER; note = 2'-Omethyladenosine
  modified_base 5: mod_base = OTHER; note = 2'-Omethyladenosine
  modified_base 6: mod_base = OTHER; note = 2'-Omethylcytosine
  modified_base 27: mod_base = OTHER; note = 2'-Omethyluridine
  modified_base 28: mod_base = OTHER; note = 2'-Omethyluridine
  modified_base 29: mod_base = OTHER; note = 2'-fluoroguanosine
  modified_base 30: mod_base = OTHER; note = 2'-Omethylguanosine
  modified_base 40: mod_base = OTHER; note = 2'-fluorouridine
  modified_base 41: mod_base = OTHER; note = 2'-Omethylcytosine
  modified_base 42: mod_base = OTHER; note = 2'-Omethyladenosine
  modified_base 43: mod_base = OTHER; note = 2'-Omethyladenosine
  modified_base 73: mod_base = OTHER; note = 2'-Omethylguanosine

SEQ ID NO: 7342 - RNA, 76 nt, synthetic construct
  source 1..76: mol_type = other RNA
ggctccgtggcgcaatggatagcgcattggtcttcaaaatcaaaggctccgggttcgagtcccggcggagtcgcca

SEQ ID NO: 7343 - RNA, 73 nt, synthetic construct; identical to SEQ ID NO: 935
  source 1..73: mol_type = other RNA
  modified_base 1: mod_base = OTHER; note = 2'-Omethylguanosine
  modified_base 2: mod_base = OTHER; note = 2'-Omethylguanosine
  modified_base 3: mod_base = OTHER; note = 2'-Omethylcytosine
  modified_base 4: mod_base = OTHER; note = 2'-Omethyluridine
  modified_base 5: mod_base = OTHER; note = 2'-Omethylcytosine
  modified_base 6: mod_base = OTHER; note = 2'-Omethylcytosine
  modified_base 10: mod_base = OTHER; note = 2'-Omethylguanosine
  modified_base 11: mod_base = OTHER; note = 2'-Omethylcytosine
  modified_base 12: mod_base = OTHER; note = 2'-Omethylguanosine
  modified_base 13: mod_base = OTHER; note = 2'-Omethylcytosine
  modified_base 22: mod_base = OTHER; note = 2'-Omethylguanosine
  modified_base 23: mod_base = OTHER; note = 2'-Omethylcytosine
  modified_base 24: mod_base = OTHER; note = 2'-Omethylguanosine
  modified_base 25: mod_base = OTHER; note = 2'-Omethylcytosine
  modified_base 73: mod_base = OTHER; note = 2'-Omethylguanosine

SEQ ID NO: 7344 - RNA, 75 nt, synthetic construct; identical to SEQ ID NO: 3336
  source 1..75: mol_type = other RNA
  modified_base 2: mod_base = OTHER; note = Cytosine phosphorothiorate
  modified_base 12: mod_base = OTHER; note = 2'-fluorocytosine phosphorothiorate
  modified_base 21: mod_base = OTHER; note = 2'-fluoroguanosine
  modified_base 22: mod_base = OTHER; note = 2'-Omethyladenosine
  modified_base 28: mod_base = OTHER; note = 2'-fluoroadenosine
  modified_base 29: mod_base = OTHER; note = 2'-fluoroguanosine
  modified_base 30: mod_base = OTHER; note = 2'-Omethyladenosine phosphorothiorate
  modified_base 35: mod_base = OTHER; note = 2'-fluoroadenosine
  modified_base 38: mod_base = OTHER; note = 2'-fluorouridine
  modified_base 45: mod_base = OTHER; note = 2'-fluoroguanosine
  modified_base 47: mod_base = OTHER; note = 2'-Omethylcytosine
  modified_base 49: mod_base = OTHER; note = Adenosine phosphorothiorate
  modified_base 53: mod_base = OTHER; note = Uridine phosphorothiorate
  modified_base 60: mod_base = OTHER; note = 2'-fluorocytosine
  modified_base 68: mod_base = OTHER; note = 2'-fluoroadenosine phosphorothiorate
  modified_base 74: mod_base = OTHER; note = Cytosine phosphorothiorate

SEQ ID NO: 7345 - RNA, 75 nt, synthetic construct; identical to SEQ ID NO: 3306
  source 1..75: mol_type = other RNA
  modified_base 1: mod_base = OTHER; note = 2'-Omethylguanosine phosphorothiorate
  modified_base 2: mod_base = OTHER; note = 2'-Omethyladenosine phosphorothiorate
  modified_base 14: mod_base = OTHER; note = 2'-Omethyladenosine
  modified_base 17: mod_base = OTHER; note = 2'-Omethylguanosine
  modified_base 18: mod_base = OTHER; note = 2'-Omethylguanosine
  modified_base 21: mod_base = OTHER; note = 2'-Omethylguanosine
  modified_base 24: mod_base = OTHER; note = 2'-Omethylcytosine
  modified_base 26: mod_base = OTHER; note = 2'-Omethyluridine
  modified_base 32: mod_base = OTHER; note = 2'-fluorouridine
  modified_base 40: mod_base = OTHER; note = 2'-Omethyladenosine phosphorothiorate
  modified_base 43: mod_base = OTHER; note = 2'-Omethyladenosine phosphorothiorate
  modified_base 44: mod_base = OTHER; note = 2'-Omethylguanosine
  modified_base 45: mod_base = OTHER; note = 2'-fluoroguanosine
  modified_base 46: mod_base = OTHER; note = 2'-fluorouridine
  modified_base 47: mod_base = OTHER; note = 2'-fluorouridine
  modified_base 51: mod_base = OTHER; note = 2'-Omethyluridine
  modified_base 54: mod_base = OTHER; note = Uridine phosphorothiorate
  modified_base 70: mod_base = OTHER; note = 2'-Omethyluridine
  modified_base 72: mod_base = OTHER; note = 2'-Omethyladenosine

SEQ ID NO: 7346 - RNA, 86 nt, synthetic construct; identical to SEQ ID NO: 3290
  source 1..86: mol_type = other RNA
  modified_base 24: mod_base = OTHER; note = Guanosine phosphorothiorate

SEQ ID NO: 7347 - RNA, 86 nt, synthetic construct; identical to SEQ ID NO: 3290
  source 1..86: mol_type = other RNA
  modified_base 60: mod_base = OTHER; note = 2'-Omethyluridine

SEQ ID NO: 7348 - RNA, 75 nt, synthetic construct; identical to SEQ ID NO: 3336
  source 1..75: mol_type = other RNA
  modified_base 1: mod_base = OTHER; note = 2'-Omethylcytosine
  modified_base 2: mod_base = OTHER; note = 2'-Omethylcytosine
  modified_base 20: mod_base = OTHER; note = 2'-fluoroadenosine phosphorothiorate
  modified_base 36: mod_base = OTHER; note = 2'-Omethyladenosine
  modified_base 47: mod_base = OTHER; note = 2'-fluorocytosine
  modified_base 52: mod_base = OTHER; note = 2'-fluoroguanosine
  modified_base 73: mod_base = OTHER; note = Cytosine phosphorothiorate
  modified_base 74: mod_base = OTHER; note = Cytosine phosphorothiorate
  modified_base 75: mod_base = OTHER; note = 2'-Omethyladenosine

SEQ ID NO: 7349 - RNA, 76 nt, synthetic construct; identical to SEQ ID NO: 625
  source 1..76: mol_type = other RNA
  modified_base 1: mod_base = OTHER; note = 2'-Omethylguanosine
  modified_base 2: mod_base = OTHER; note = 2'-Omethylguanosine
  modified_base 3: mod_base = OTHER; note = 2'-Omethylcytosine
  modified_base 4: mod_base = OTHER; note = 2'-Omethyluridine
  modified_base 5: mod_base = OTHER; note = 2'-Omethylcytosine
  modified_base 6: mod_base = OTHER; note = 2'-Omethylcytosine
  modified_base 10: mod_base = OTHER; note = 2'-Omethylguanosine
  modified_base 11: mod_base = OTHER; note = 2'-Omethylcytosine
  modified_base 12: mod_base = OTHER; note = 2'-Omethylguanosine
  modified_base 13: mod_base = OTHER; note = 2'-Omethylcytosine
  modified_base 14: mod_base = OTHER; note = 2'-Omethyladenosine
  modified_base 15: mod_base = OTHER; note = 2'-fluoroadenosine
  modified_base 16: mod_base = OTHER; note = 2'-Omethyluridine
  modified_base 17: mod_base = OTHER; note = 2'-Omethylguanosine
  modified_base 18: mod_base = OTHER; note = 2'-Omethylguanosine
  modified_base 19: mod_base = OTHER; note = 2'-fluoroadenosine
  modified_base 20: mod_base = OTHER; note = 2'-Omethyluridine
  modified_base 21: mod_base = OTHER; note = 2'-fluoroadenosine
  modified_base 22: mod_base = OTHER; note = 2'-Omethylguanosine
  modified_base 23: mod_base = OTHER; note = 2'-Omethylcytosine
  modified_base 24: mod_base = OTHER; note = 2'-Omethylguanosine
  modified_base 25: mod_base = OTHER; note = 2'-Omethylcytosine
  modified_base 29: mod_base = OTHER; note = 2'-Omethylguanosine
  modified_base 33: mod_base = OTHER; note = 2'-fluorouridine
  modified_base 35: mod_base = OTHER; note = Cytosine phosphorothiorate
  modified_base 37: mod_base = OTHER; note = Adenosine phosphorothiorate
  modified_base 38: mod_base = OTHER; note = Adenosine phosphorothiorate
  modified_base 41: mod_base = OTHER; note = 2'-fluorocytosine phosphorothiorate
  modified_base 43: mod_base = OTHER; note = 2'-Omethyladenosine
  modified_base 44: mod_base = OTHER; note = 2'-fluoroadenosine
  modified_base 45: mod_base = OTHER; note = 2'-fluoroguanosine
  modified_base 46: mod_base = OTHER; note = Guanosine phosphorothiorate
  modified_base 49: mod_base = OTHER; note = 2'-Omethylcytosine
  modified_base 50: mod_base = OTHER; note = 2'-Omethylcytosine
  modified_base 51: mod_base = OTHER; note = 2'-Omethylguanosine
  modified_base 52: mod_base = OTHER; note = 2'-fluoroguanosine
  modified_base 53: mod_base = OTHER; note = 2'-Omethylguanosine
  modified_base 54: mod_base = OTHER; note = Uridine phosphorothiorate
  modified_base 55: mod_base = OTHER; note = Uridine phosphorothiorate
  modified_base 56: mod_base = OTHER; note = 2'-Omethylcytosine
  modified_base 57: mod_base = OTHER; note = 2'-O-(2-Methoxyethyl) guanosine
  modified_base 59: mod_base = OTHER; note = 2'-Omethylguanosine
  modified_base 61: mod_base = OTHER; note = 2'-Omethylcytosine
  modified_base 62: mod_base = OTHER; note = 2'-Omethylcytosine
  modified_base 63: mod_base = OTHER; note = 2'-fluorocytosine
  modified_base 64: mod_base = OTHER; note = 2'-Omethylguanosine
  modified_base 65: mod_base = OTHER; note = 2'-Omethylguanosine
  modified_base 66: mod_base = OTHER; note = 2'-Omethylcytosine
  modified_base 67: mod_base = OTHER; note = 2'-Omethylguanosine
  modified_base 68: mod_base = OTHER; note = 2'-fluoroguanosine
  modified_base 69: mod_base = OTHER; note = 2'-fluoroadenosine
  modified_base 71: mod_base = OTHER; note = 2'-Omethyluridine
  modified_base 73: mod_base = OTHER; note = 2'-Omethylguanosine
  modified_base 74: mod_base = OTHER; note = Cytosine phosphorothiorate
  modified_base 75: mod_base = OTHER; note = 2'-fluorocytosine phosphorothiorate

SEQ ID NO: 7350 - RNA, 76 nt, synthetic construct; identical to SEQ ID NO: 625
  source 1..76: mol_type = other RNA
  modified_base 1: mod_base = OTHER; note = 2'-Omethylguanosine phosphorothiorate
  modified_base 2: mod_base = OTHER; note = 2'-Omethylguanosine
  modified_base 10: mod_base = OTHER; note = 2'-fluoroguanosine
  modified_base 15: mod_base = OTHER; note = Adenosine phosphorothiorate
  modified_base 16: mod_base = OTHER; note = 2'-O-(2-Methoxyethyl) thymine
  modified_base 50: mod_base = OTHER; note = 2'-O-(2-Methoxyethyl) 5-methylcytosine
  modified_base 62: mod_base = OTHER; note = 2'-O-(2-Methoxyethyl) 5-methylcytosine
  modified_base 72: mod_base = OTHER; note = 2'-O-(2-Methoxyethyl) 5-methylcytosine

SEQ ID NO: 7351 - RNA, 85 nt, synthetic construct; identical to SEQ ID NO: 3288
  source 1..85: mol_type = other RNA
  modified_base 1: mod_base = OTHER; note = 2'-Omethylcytosine
  modified_base 8: mod_base = OTHER; note = Guanosine phosphorothiorate
  modified_base 19: mod_base = OTHER; note = Uridine phosphorothiorate
  modified_base 20: mod_base = OTHER; note = 2'-fluoroadenosine
  modified_base 27: mod_base = OTHER; note = 2'-fluorouridine
  modified_base 28: mod_base = OTHER; note = 2'-Omethylguanosine phosphorothiorate
  modified_base 29: mod_base = OTHER; note = 2'-fluoroguanosine
  modified_base 33: mod_base = OTHER; note = 2'-fluorouridine
  modified_base 36: mod_base = OTHER; note = 2'-fluoroguanosine
  modified_base 42: mod_base = OTHER; note = Adenosine phosphorothiorate
  modified_base 46: mod_base = OTHER; note = 2'-Omethyladenosine
  modified_base 52: mod_base = OTHER; note = 2'-fluoroguanosine
  modified_base 54: mod_base = OTHER; note = 2'-fluorocytosine
  modified_base 73: mod_base = OTHER; note = 2'-fluoroadenosine
  modified_base 84: mod_base = OTHER; note = Cytosine phosphorothiorate
  modified_base 85: mod_base = OTHER; note = 2'-fluoroadenosine

SEQ ID NO: 7352 - RNA, 76 nt, synthetic construct
  source 1..76: mol_type = other RNA
ggcttcgtggcgcaatggatagcgcaatggacttcaaattcataggttccgggttcgagtcccggcggagtcgcca

SEQ ID NO: 7353 - RNA, 85 nt, synthetic construct; identical to SEQ ID NO: 3297
  source 1..85: mol_type = other RNA
  modified_base 1: mod_base = OTHER; note = 2'-Omethylguanosine phosphorothiorate
  modified_base 2: mod_base = OTHER; note = 2'-Omethylcytosine
  modified_base 21: mod_base = OTHER; note = 2'-Omethyladenosine
  modified_base 30: mod_base = OTHER; note = Guanosine phosphorothiorate
  modified_base 50: mod_base = OTHER; note = 2'-Omethylcytosine
  modified_base 61: mod_base = OTHER; note = 2'-Omethylguanosine
  modified_base 64: mod_base = OTHER; note = 2'-fluorouridine
  modified_base 82: mod_base = OTHER; note = 2'-Omethylguanosine

SEQ ID NO: 7354 - RNA, 85 nt, synthetic construct; identical to SEQ ID NO: 3286
  source 1..85: mol_type = other RNA
  modified_base 1: mod_base = OTHER; note = 2'-Omethylcytosine phosphorothiorate
  modified_base 2: mod_base = OTHER; note = 2'-fluorocytosine phosphorothiorate
  modified_base 14: mod_base = OTHER; note = Guanosine phosphorothiorate
  modified_base 16: mod_base = OTHER; note = 2'-fluoroguanosine
  modified_base 25: mod_base = OTHER; note = Guanosine phosphorothiorate
  modified_base 26: mod_base = OTHER; note = 2'-fluorouridine phosphorothiorate
  modified_base 27: mod_base = OTHER; note = 2'-fluorouridine
  modified_base 30: mod_base = OTHER; note = 2'-fluoroadenosine
  modified_base 34: mod_base = OTHER; note = 2'-fluorouridine
  modified_base 39: mod_base = OTHER; note = Cytosine phosphorothiorate
  modified_base 43: mod_base = OTHER; note = 2'-Omethyluridine
  modified_base 46: mod_base = OTHER; note = Adenosine phosphorothiorate
  modified_base 47: mod_base = OTHER; note = 2'-fluorocytosine
  modified_base 50: mod_base = OTHER; note = 2'-Omethyladenosine
  modified_base 52: mod_base = OTHER; note = 2'-Omethylguanosine
  modified_base 56: mod_base = OTHER; note = 2'-fluoroguanosine phosphorothiorate
  modified_base 57: mod_base = OTHER; note = 2'-Omethylcytosine
  modified_base 61: mod_base = OTHER; note = Guanosine phosphorothiorate
  modified_base 76: mod_base = OTHER; note = 2'-fluorocytosine
  modified_base 84: mod_base = OTHER; note = Cytosine phosphorothiorate
  modified_base 85: mod_base = OTHER; note = 2'-Omethyladenosine

SEQ ID NO: 7355 - RNA, 76 nt, synthetic construct; identical to SEQ ID NO: 625
  source 1..76: mol_type = other RNA
  modified_base 1: mod_base = OTHER; note = 2'-Omethylguanosine
  modified_base 40: mod_base = OTHER; note = 2'-fluorouridine phosphorothiorate
  modified_base 41: mod_base = OTHER; note = 2'-O-(2-Methoxyethyl) 5-methylcytosine phosphorothiorate
  modified_base 42: mod_base = OTHER; note = 2'-Omethyladenosine phosphorothiorate
  modified_base 43: mod_base = OTHER; note = 2'-Omethyladenosine phosphorothiorate
  modified_base 73: mod_base = OTHER; note = 2'-Omethylguanosine

SEQ ID NO: 7356 - RNA, 76 nt, synthetic construct; identical to SEQ ID NO: 3318
  source 1..76: mol_type = other RNA
  modified_base 1: mod_base = OTHER; note = 2'-Omethylcytosine phosphorothiorate
  modified_base 2: mod_base = OTHER; note = 2'-Omethylcytosine phosphorothiorate
  modified_base 74: mod_base = OTHER; note = 2'-Omethylcytosine phosphorothiorate
  modified_base 75: mod_base = OTHER; note = 2'-Omethylcytosine phosphorothiorate

SEQ ID NO: 7357 - RNA, 85 nt, synthetic construct; identical to SEQ ID NO: 3301
  source 1..85: mol_type = other RNA
  modified_base 1: mod_base = OTHER; note = Guanosine phosphorothiorate
  modified_base 2: mod_base = OTHER; note = 2'-Omethylcytosine
  modified_base 11: mod_base = OTHER; note = 2'-Omethylcytosine phosphorothiorate
  modified_base 12: mod_base = OTHER; note = 2'-Omethylcytosine phosphorothiorate
  modified_base 28: mod_base = OTHER; note = 2'-Omethyluridine phosphorothiorate
  modified_base 36: mod_base = OTHER; note = 2'-fluoroadenosine
  modified_base 37: mod_base = OTHER; note = 2'-Omethyladenosine phosphorothiorate
  modified_base 38: mod_base = OTHER; note = 2'-fluoroadenosine
  modified_base 42: mod_base = OTHER; note = 2'-Omethyladenosine phosphorothiorate
  modified_base 48: mod_base = OTHER; note = Guanosine phosphorothiorate
  modified_base 50: mod_base = OTHER; note = 2'-Omethylcytosine phosphorothiorate
  modified_base 72: mod_base = OTHER; note = 2'-fluorouridine
  modified_base 81: mod_base = OTHER; note = 2'-Omethylcytosine phosphorothiorate
  modified_base 82: mod_base = OTHER; note = 2'-fluoroguanosine
  modified_base 83: mod_base = OTHER; note = 2'-fluorocytosine phosphorothiorate

SEQ ID NO: 7358 - RNA, 76 nt, synthetic construct; identical to SEQ ID NO: 625
  source 1..76: mol_type = other RNA
  modified_base 1: mod_base = OTHER; note = 2'-Omethylguanosine phosphorothiorate
  modified_base 2: mod_base = OTHER; note = 2'-Omethylguanosine phosphorothiorate
  modified_base 3: mod_base = OTHER; note = 2'-Omethylcytosine
  modified_base 4: mod_base = OTHER; note = 2'-Omethyluridine
  modified_base 5: mod_base = OTHER; note = 2'-Omethylcytosine
  modified_base 6: mod_base = OTHER; note = 2'-Omethylcytosine
  modified_base 16: mod_base = OTHER; note = 2'-Omethyluridine
  modified_base 17: mod_base = OTHER; note = 2'-Omethylguanosine
  modified_base 18: mod_base = OTHER; note = 2'-Omethylguanosine
  modified_base 20: mod_base = OTHER; note = 2'-Omethyluridine
  modified_base 25: mod_base = OTHER; note = 2'-Omethylcytosine
  modified_base 33: mod_base = OTHER; note = 2'-fluorouridine
  modified_base 35: mod_base = OTHER; note = Cytosine phosphorothiorate
  modified_base 37: mod_base = OTHER; note = Adenosine phosphorothiorate
  modified_base 38: mod_base = OTHER; note = Adenosine phosphorothiorate
  modified_base 41: mod_base = OTHER; note = 2'-fluorocytosine
  modified_base 42: mod_base = OTHER; note = 2'-Omethyladenosine
  modified_base 43: mod_base = OTHER; note = 2'-Omethyladenosine
  modified_base 44: mod_base = OTHER; note = 2'-fluoroadenosine
  modified_base 49: mod_base = OTHER; note = 2'-Omethylcytosine
  modified_base 50: mod_base = OTHER; note = 2'-Omethylcytosine
  modified_base 52: mod_base = OTHER; note = 2'-Omethylguanosine
  modified_base 54: mod_base = OTHER; note = 2'-Omethyluridine
  modified_base 55: mod_base = OTHER; note = Uridine phosphorothiorate
  modified_base 56: mod_base = OTHER; note = 2'-Omethylcytosine
  modified_base 57: mod_base = OTHER; note = 2'-fluoroguanosine
  modified_base 59: mod_base = OTHER; note = 2'-Omethylguanosine
  modified_base 61: mod_base = OTHER; note = 2'-Omethylcytosine
  modified_base 62: mod_base = OTHER; note = 2'-Omethylcytosine
  modified_base 63: mod_base = OTHER; note = 2'-fluorocytosine
  modified_base 64: mod_base = OTHER; note = 2'-Omethylguanosine
  modified_base 65: mod_base = OTHER; note = 2'-Omethylguanosine
  modified_base 74: mod_base = OTHER; note = Cytosine phosphorothiorate
  modified_base 75: mod_base = OTHER; note = 2'-Omethylcytosine

SEQ ID NO: 7359 - RNA, 85 nt, synthetic construct; identical to SEQ ID NO: 3286
  source 1..85: mol_type = other RNA
  modified_base 1: mod_base = OTHER; note = 2'-Omethylcytosine phosphorothiorate
  modified_base 2: mod_base = OTHER; note = 2'-Omethylcytosine
  modified_base 4: mod_base = OTHER; note = Guanosine phosphorothiorate
  modified_base 11: mod_base = OTHER; note = Cytosine phosphorothiorate
  modified_base 18: mod_base = OTHER; note = 2'-fluorouridine
  modified_base 26: mod_base = OTHER; note = Uridine phosphorothiorate
  modified_base 28: mod_base = OTHER; note = Guanosine phosphorothiorate
  modified_base 34: mod_base = OTHER; note = Uridine phosphorothiorate
  modified_base 50: mod_base = OTHER; note = 2'-fluoroadenosine
  modified_base 52: mod_base = OTHER; note = 2'-fluoroguanosine phosphorothiorate
  modified_base 56: mod_base = OTHER; note = 2'-Omethylguanosine
  modified_base 58: mod_base = OTHER; note = 2'-Omethylguanosine
  modified_base 64: mod_base = OTHER; note = Uridine phosphorothiorate

SEQ ID NO: 7360 - RNA, 85 nt, synthetic construct; identical to SEQ ID NO: 3317
  source 1..85: mol_type = other RNA
  modified_base 2: mod_base = OTHER; note = 2'-Omethylcytosine
  modified_base 5: mod_base = OTHER; note = Uridine phosphorothiorate
  modified_base 19: mod_base = OTHER; note = 2'-Omethyluridine
  modified_base 46: mod_base = OTHER; note = 2'-Omethylguanosine
  modified_base 61: mod_base = OTHER; note = Guanosine phosphorothiorate
  modified_base 82: mod_base = OTHER; note = 2'-Omethylguanosine

SEQ ID NO: 7361 - RNA, 76 nt, synthetic construct; identical to SEQ ID NO: 625
  source 1..76: mol_type = other RNA
  modified_base 1: mod_base = OTHER; note = 2'-Omethylguanosine
  modified_base 2: mod_base = OTHER; note = 2'-Omethylguanosine
  modified_base 3: mod_base = OTHER; note = 2'-Omethylcytosine
  modified_base 10: mod_base = OTHER; note = 2'-Omethylguanosine
  modified_base 11: mod_base = OTHER; note = 2'-Omethylcytosine
  modified_base 12: mod_base = OTHER; note = 2'-Omethylguanosine
  modified_base 13: mod_base = OTHER; note = 2'-Omethylcytosine
  modified_base 14: mod_base = OTHER; note = 2'-Omethyladenosine
  modified_base 15: mod_base = OTHER; note = 2'-fluoroadenosine
  modified_base 16: mod_base = OTHER; note = 2'-Omethyluridine
  modified_base 17: mod_base = OTHER; note = 2'-Omethylguanosine
  modified_base 18: mod_base = OTHER; note = 2'-Omethylguanosine
  modified_base 19: mod_base = OTHER; note = 2'-fluoroadenosine
  modified_base 20: mod_base = OTHER; note = 2'-Omethyluridine
  modified_base 21: mod_base = OTHER; note = 2'-fluoroadenosine
  modified_base 22: mod_base = OTHER; note = 2'-Omethylguanosine
  modified_base 23: mod_base = OTHER; note = 2'-Omethylcytosine
  modified_base 24: mod_base = OTHER; note = 2'-Omethylguanosine
  modified_base 25: mod_base = OTHER; note = 2'-Omethylcytosine
  modified_base 38: mod_base = OTHER; note = Adenosine phosphorothiorate
  modified_base 39: mod_base = OTHER; note = Uridine phosphorothiorate
  modified_base 40: mod_base = OTHER; note = 2'-fluorouridine
  modified_base 43: mod_base = OTHER; note = 2'-Omethyladenosine
  modified_base 44: mod_base = OTHER; note = 2'-Omethyladenosine
  modified_base 45: mod_base = OTHER; note = 2'-Omethylguanosine
  modified_base 46: mod_base = OTHER; note = 2'-fluoroguanosine
  modified_base 48: mod_base = OTHER; note = 2'-fluorouridine
  modified_base 49: mod_base = OTHER; note = 2'-Omethylcytosine
  modified_base 50: mod_base = OTHER; note = 2'-Omethylcytosine
  modified_base 54: mod_base = OTHER; note = 2'-Omethyluridine phosphorothiorate
  modified_base 55: mod_base = OTHER; note = Uridine phosphorothiorate
  modified_base 56: mod_base = OTHER; note = 2'-Omethylcytosine
  modified_base 57: mod_base = OTHER; note = 2'-fluoroguanosine
  modified_base 61: mod_base = OTHER; note = 2'-Omethylcytosine
  modified_base 62: mod_base = OTHER; note = 2'-Omethylcytosine
  modified_base 63: mod_base = OTHER; note = 2'-fluorocytosine
  modified_base 64: mod_base = OTHER; note = 2'-Omethylguanosine
  modified_base 65: mod_base = OTHER; note = 2'-Omethylguanosine
  modified_base 66: mod_base = OTHER; note = 2'-Omethylcytosine
  modified_base 67: mod_base = OTHER; note = 2'-Omethylguanosine
  modified_base 68: mod_base = OTHER; note = 2'-Omethylguanosine

SEQ ID NO: 7362 - RNA, 75 nt, synthetic construct; identical to SEQ ID NO: 1045
  source 1..75: mol_type = other RNA
  modified_base 2: mod_base = OTHER; note = 2'-Omethylguanosine phosphorothiorate
  modified_base 12: mod_base = OTHER; note = Guanosine phosphorothiorate
  modified_base 14: mod_base = OTHER; note = 2'-Omethyladenosine
  modified_base 20: mod_base = OTHER; note = Adenosine phosphorothiorate
  modified_base 22: mod_base = OTHER; note = 2'-fluoroguanosine
  modified_base 48: mod_base = OTHER; note = 2'-fluorocytosine
  modified_base 56: mod_base = OTHER; note = 2'-Omethylguanosine
  modified_base 68: mod_base = OTHER; note = 2'-fluoroadenosine
  modified_base 73: mod_base = OTHER; note = Cytosine phosphorothiorate
  modified_base 74: mod_base = OTHER; note = Cytosine phosphorothiorate

SEQ ID NO: 7363 - RNA, 86 nt, synthetic construct; identical to SEQ ID NO: 3290
  source 1..86: mol_type = other RNA
  modified_base 84: mod_base = OTHER; note = 2'-fluorocytosine

SEQ ID NO: 7364 - RNA, 76 nt, synthetic construct; identical to SEQ ID NO: 625
  source 1..76: mol_type = other RNA
  modified_base 3: mod_base = OTHER; note = 2'-Omethylcytosine
  modified_base 6: mod_base = OTHER; note = 2'-Omethylcytosine
  modified_base 10: mod_base = OTHER; note = Guanosine phosphorothiorate
  modified_base 11: mod_base = OTHER; note = 2'-Omethylcytosine
  modified_base 12: mod_base = OTHER; note = 2'-Omethylguanosine
  modified_base 15: mod_base = OTHER; note = 2'-fluoroadenosine
  modified_base 16: mod_base = OTHER; note = 2'-fluorouridine
  modified_base 18: mod_base = OTHER; note = 2'-fluoroguanosine
  modified_base 24: mod_base = OTHER; note = 2'-Omethylguanosine
  modified_base 29: mod_base = OTHER; note = 2'-fluoroguanosine phosphorothiorate
  modified_base 31: mod_base = OTHER; note = 2'-fluoroadenosine
  modified_base 34: mod_base = OTHER; note = 2'-fluorouridine
  modified_base 40: mod_base = OTHER; note = Uridine phosphorothiorate
  modified_base 44: mod_base = OTHER; note = 2'-fluoroadenosine
  modified_base 46: mod_base = OTHER; note = 2'-Omethylguanosine
  modified_base 50: mod_base = OTHER; note = 2'-fluorocytosine
  modified_base 51: mod_base = OTHER; note = Guanosine phosphorothiorate
  modified_base 52: mod_base = OTHER; note = 2'-fluoroguanosine phosphorothiorate
  modified_base 55: mod_base = OTHER; note = Uridine phosphorothiorate
  modified_base 57: mod_base = OTHER; note = Guanosine phosphorothiorate
  modified_base 58: mod_base = OTHER; note = 2'-fluoroadenosine
  modified_base 59: mod_base = OTHER; note = 2'-fluoroguanosine
  modified_base 60: mod_base = OTHER; note = Uridine phosphorothiorate
  modified_base 61: mod_base = OTHER; note = 2'-Omethylcytosine phosphorothiorate
  modified_base 63: mod_base = OTHER; note = 2'-Omethylcytosine phosphorothiorate
  modified_base 67: mod_base = OTHER; note = 2'-Omethylguanosine
  modified_base 68: mod_base = OTHER; note = Guanosine phosphorothiorate
  modified_base 70: mod_base = OTHER; note = Guanosine phosphorothiorate
  modified_base 71: mod_base = OTHER; note = Uridine phosphorothiorate
  modified_base 72: mod_base = OTHER; note = 2'-fluorocytosine
  modified_base 73: mod_base = OTHER; note = 2'-fluoroguanosine

SEQ ID NO: 7365 - RNA, 74 nt, synthetic construct; identical to SEQ ID NO: 766
  source 1..74: mol_type = other RNA
  modified_base 1: mod_base = OTHER; note = 2'-Omethylguanosine phosphorothiorate
  modified_base 2: mod_base = OTHER; note = 2'-Omethylguanosine phosphorothiorate
  modified_base 18: mod_base = OTHER; note = 2'-fluoroguanosine
  modified_base 72: mod_base = OTHER; note = 2'-Omethylcytosine
  modified_base 73: mod_base = OTHER; note = 2'-Omethylguanosine

SEQ ID NO: 7366 - RNA, 76 nt, synthetic construct; identical to SEQ ID NO: 3342
  source 1..76: mol_type = other RNA
  modified_base 1: mod_base = OTHER; note = 2'-Omethylguanosine phosphorothiorate
  modified_base 2: mod_base = OTHER; note = 2'-Omethylguanosine phosphorothiorate
  modified_base 74: mod_base = OTHER; note = Cytosine phosphorothiorate
  modified_base 75: mod_base = OTHER; note = 2'-Omethylcytosine

SEQ ID NO: 7367 - RNA, 75 nt, synthetic construct; identical to SEQ ID NO: 3306
  source 1..75: mol_type = other RNA
  modified_base 1: mod_base = OTHER; note = 2'-Omethylguanosine phosphorothiorate
  modified_base 2: mod_base = OTHER; note = 2'-Omethyladenosine phosphorothiorate
  modified_base 3: mod_base = OTHER; note = 2'-Omethylcytosine
  modified_base 4: mod_base = OTHER; note = 2'-Omethylcytosine
  modified_base 5: mod_base = OTHER; note = 2'-Omethyluridine
  modified_base 6: mod_base = OTHER; note = 2'-Omethylcytosine
  modified_base 43: mod_base = OTHER; note = 2'-Omethyladenosine
  modified_base 44: mod_base = OTHER; note = 2'-Omethylguanosine
  modified_base 48: mod_base = OTHER; note = 2'-Omethylguanosine
  modified_base 49: mod_base = OTHER; note = 2'-Omethylcytosine
  modified_base 50: mod_base = OTHER; note = 2'-Omethylguanosine
  modified_base 51: mod_base = OTHER; note = 2'-Omethyluridine
  modified_base 52: mod_base = OTHER; note = 2'-Omethylguanosine
  modified_base 53: mod_base = OTHER; note = 2'-Omethyluridine
  modified_base 60: mod_base = OTHER; note = 2'-Omethylcytosine
  modified_base 61: mod_base = OTHER; note = 2'-Omethyladenosine
  modified_base 62: mod_base = OTHER; note = 2'-fluorocytosine
  modified_base 63: mod_base = OTHER; note = 2'-Omethylguanosine
  modified_base 64: mod_base = OTHER; note = 2'-Omethyluridine
  modified_base 65: mod_base = OTHER; note = 2'-Omethylcytosine
  modified_base 66: mod_base = OTHER; note = 2'-Omethylguanosine
  modified_base 67: mod_base = OTHER; note = 2'-Omethylguanosine
  modified_base 72: mod_base = OTHER; note = 2'-Omethyladenosine

SEQ ID NO: 7368 - RNA, 76 nt, synthetic construct; identical to SEQ ID NO: 625
  source 1..76: mol_type = other RNA
  modified_base 1: mod_base = OTHER; note = 2'-Omethylguanosine phosphorothiorate
  modified_base 2: mod_base = OTHER; note = 2'-Omethylguanosine phosphorothiorate
  modified_base 3: mod_base = OTHER; note = 2'-Omethylcytosine
  modified_base 4: mod_base = OTHER; note = 2'-Omethyluridine
  modified_base 5: mod_base = OTHER; note = 2'-Omethylcytosine
  modified_base 6: mod_base = OTHER; note = 2'-Omethylcytosine
  modified_base 10: mod_base = OTHER; note = 2'-Omethylguanosine
  modified_base 11: mod_base = OTHER; note = 2'-Omethylcytosine
  modified_base 12: mod_base = OTHER; note = 2'-Omethylguanosine
  modified_base 13: mod_base = OTHER; note = 2'-Omethylcytosine
  modified_base 14: mod_base = OTHER; note = 2'-Omethyladenosine
  modified_base 15: mod_base = OTHER; note = 2'-fluoroadenosine
  modified_base 16: mod_base = OTHER; note = 2'-Omethyluridine
  modified_base 17: mod_base = OTHER; note = 2'-Omethylguanosine
  modified_base 18: mod_base = OTHER; note = 2'-Omethylguanosine
  modified_base 19: mod_base = OTHER; note = 2'-fluoroadenosine
  modified_base 20: mod_base = OTHER; note = 2'-Omethyluridine
  modified_base 21: mod_base = OTHER; note = 2'-fluoroadenosine
  modified_base 22: mod_base = OTHER; note = 2'-Omethylguanosine
  modified_base 23: mod_base = OTHER; note = 2'-Omethylcytosine
  modified_base 24: mod_base = OTHER; note = 2'-Omethylguanosine
  modified_base 25: mod_base = OTHER; note = 2'-Omethylcytosine
  modified_base 38: mod_base = OTHER; note = Adenosine phosphorothiorate
  modified_base 39: mod_base = OTHER; note = Uridine phosphorothiorate
  modified_base 40: mod_base = OTHER; note = 2'-fluorouridine
  modified_base 43: mod_base = OTHER; note = 2'-Omethyladenosine
  modified_base 44: mod_base = OTHER; note = 2'-Omethyladenosine
  modified_base 45: mod_base = OTHER; note = 2'-Omethylguanosine
  modified_base 46: mod_base = OTHER; note = 2'-fluoroguanosine
  modified_base 48: mod_base = OTHER; note = 2'-fluorouridine
  modified_base 49: mod_base = OTHER; note = 2'-Omethylcytosine
  modified_base 50: mod_base = OTHER; note = 2'-Omethylcytosine
  modified_base 51: mod_base = OTHER; note = 2'-Omethylguanosine
  modified_base 52: mod_base = OTHER; note = 2'-Omethylguanosine
  modified_base 53: mod_base = OTHER; note = 2'-Omethylguanosine
  modified_base 54: mod_base = OTHER; note = 2'-Omethyluridine
  modified_base 61: mod_base = OTHER; note = 2'-Omethylcytosine
  modified_base 62: mod_base = OTHER; note = 2'-Omethylcytosine
  modified_base 63: mod_base = OTHER; note = 2'-fluorocytosine
  modified_base 64: mod_base = OTHER; note = 2'-Omethylguanosine
  modified_base 65: mod_base = OTHER; note = 2'-Omethylguanosine
  modified_base 66: mod_base = OTHER; note = 2'-Omethylcytosine
  modified_base 67: mod_base = OTHER; note = 2'-Omethylguanosine
  modified_base 68: mod_base = OTHER; note = 2'-Omethylguanosine

SEQ ID NO: 7369 - RNA, 75 nt, synthetic construct; identical to SEQ ID NO: 1045
  source 1..75: mol_type = other RNA
  modified_base 1: mod_base = OTHER; note = 2'-Omethylguanosine phosphorothiorate
  modified_base 12: mod_base = OTHER; note = Guanosine phosphorothiorate
  modified_base 13: mod_base = OTHER; note = 2'-fluorouridine
  modified_base 20: mod_base = OTHER; note = 2'-fluoroadenosine
  modified_base 23: mod_base = OTHER; note = 2'-fluorocytosine
  modified_base 31: mod_base = OTHER; note = 2'-fluoroadenosine
  modified_base 41: mod_base = OTHER; note = 2'-fluorocytosine
  modified_base 42: mod_base = OTHER; note = 2'-fluoroadenosine
  modified_base 59: mod_base = OTHER; note = 2'-fluorouridine
  modified_base 67: mod_base = OTHER; note = Guanosine phosphorothiorate
  modified_base 73: mod_base = OTHER; note = Cytosine phosphorothiorate

SEQ ID NO: 7370 - RNA, 76 nt, synthetic construct; identical to SEQ ID NO: 3447
  source 1..76: mol_type = other RNA
  modified_base 1: mod_base = OTHER; note = 2'-Omethylguanosine
  modified_base 2: mod_base = OTHER; note = 2'-Omethylcytosine
  modified_base 3: mod_base = OTHER; note = 2'-Omethylcytosine
  modified_base 4: mod_base = OTHER; note = 2'-Omethylcytosine
  modified_base 5: mod_base = OTHER; note = 2'-Omethylguanosine
  modified_base 6: mod_base = OTHER; note = 2'-Omethyladenosine
  modified_base 16: mod_base = OTHER; note = 2'-Omethyluridine
  modified_base 17: mod_base = OTHER; note = 2'-Omethylguanosine
  modified_base 18: mod_base = OTHER; note = 2'-Omethylguanosine
  modified_base 20: mod_base = OTHER; note = 2'-Omethyluridine
  modified_base 22: mod_base = OTHER; note = 2'-Omethylguanosine
  modified_base 23: mod_base = OTHER; note = 2'-Omethylcytosine
  modified_base 24: mod_base = OTHER; note = 2'-Omethylguanosine
  modified_base 25: mod_base = OTHER; note = 2'-Omethylcytosine
  modified_base 33: mod_base = OTHER; note = 2'-fluorouridine
  modified_base 35: mod_base = OTHER; note = Cytosine phosphorothiorate
  modified_base 37: mod_base = OTHER; note = Adenosine phosphorothiorate
  modified_base 38: mod_base = OTHER; note = Adenosine phosphorothiorate
  modified_base 41: mod_base = OTHER; note = 2'-Omethylcytosine
  modified_base 42: mod_base = OTHER; note = 2'-Omethyladenosine
  modified_base 43: mod_base = OTHER; note = 2'-Omethyladenosine
  modified_base 44: mod_base = OTHER; note = 2'-Omethyladenosine
  modified_base 45: mod_base = OTHER; note = 2'-Omethylguanosine
  modified_base 46: mod_base = OTHER; note = 2'-fluoroguanosine
  modified_base 48: mod_base = OTHER; note = 2'-fluorouridine
  modified_base 49: mod_base = OTHER; note = 2'-Omethylcytosine
  modified_base 50: mod_base = OTHER; note = 2'-Omethylcytosine
  modified_base 52: mod_base = OTHER; note = 2'-Omethylguanosine
  modified_base 54: mod_base = OTHER; note = 2'-Omethyluridine
  modified_base 55: mod_base = OTHER; note = Uridine phosphorothiorate
  modified_base 56: mod_base = OTHER; note = 2'-Omethylcytosine
  modified_base 57: mod_base = OTHER; note = 2'-fluoroguanosine
  modified_base 59: mod_base = OTHER; note = 2'-Omethylguanosine
  modified_base 61: mod_base = OTHER; note = 2'-Omethylcytosine
  modified_base 65: mod_base = OTHER; note = 2'-Omethylguanosine
  modified_base 73: mod_base = OTHER; note = 2'-Omethylguanosine

SEQ ID NO: 7371 - RNA, 85 nt, synthetic construct; identical to SEQ ID NO: 3301
  source 1..85: mol_type = other RNA
  modified_base 1: mod_base = OTHER; note = 2'-Omethylguanosine phosphorothiorate
  modified_base 2: mod_base = OTHER; note = 2'-Omethylcytosine
  modified_base 5: mod_base = OTHER; note = 2'-Omethyluridine phosphorothiorate
  modified_base 10: mod_base = OTHER; note = 2'-fluoroguanosine
  modified_base 19: mod_base = OTHER; note = Uridine phosphorothiorate
  modified_base 22: mod_base = OTHER; note = 2'-fluoroadenosine
  modified_base 31: mod_base = OTHER; note = 2'-Omethyladenosine phosphorothiorate
  modified_base 36: mod_base = OTHER; note = 2'-fluoroadenosine
  modified_base 41: mod_base = OTHER; note = Cytosine phosphorothiorate
  modified_base 48: mod_base = OTHER; note = 2'-Omethylguanosine
  modified_base 50: mod_base = OTHER; note = 2'-Omethylcytosine
  modified_base 57: mod_base = OTHER; note = 2'-fluorocytosine phosphorothiorate
  modified_base 59: mod_base = OTHER; note = 2'-fluorocytosine
  modified_base 60: mod_base = OTHER; note = 2'-Omethyladenosine
  modified_base 62: mod_base = OTHER; note = 2'-Omethylguanosine phosphorothiorate
  modified_base 72: mod_base = OTHER; note = 2'-fluorouridine
  modified_base 78: mod_base = OTHER; note = Cytosine phosphorothiorate
  modified_base 82: mod_base = OTHER; note = 2'-Omethylguanosine
  modified_base 84: mod_base = OTHER; note = 2'-Omethylcytosine phosphorothiorate

SEQ ID NO: 7372 - RNA, 76 nt, synthetic construct; identical to SEQ ID NO: 625
  source 1..76: mol_type = other RNA
  modified_base 1: mod_base = OTHER; note = 2'-Omethylguanosine phosphorothiorate
  modified_base 2: mod_base = OTHER; note = 2'-Omethylguanosine phosphorothiorate
  modified_base 22: mod_base = OTHER; note = Guanosine phosphorothiorate
  modified_base 23: mod_base = OTHER; note = 2'-O-(2-Methoxyethyl) 5-methylcytosine
  modified_base 42: mod_base = OTHER; note = 2'-Omethyladenosine
  modified_base 54: mod_base = OTHER; note = 2'-fluorouridine
  modified_base 64: mod_base = OTHER; note = Guanosine phosphorothiorate
  modified_base 65: mod_base = OTHER; note = 2'-O-(2-Methoxyethyl) guanosine
  modified_base 74: mod_base = OTHER; note = Cytosine phosphorothiorate
  modified_base 75: mod_base = OTHER; note = 2'-Omethylcytosine phosphorothiorate
  modified_base 76: mod_base = OTHER; note = 2'-Omethyladenosine

SEQ ID NO: 7373 - RNA, 76 nt, synthetic construct; identical to SEQ ID NO: 3332
  source 1..76: mol_type = other RNA
  modified_base 1: mod_base = OTHER; note = 2'-Omethylguanosine phosphorothiorate
  modified_base 2: mod_base = OTHER; note = 2'-Omethylguanosine phosphorothiorate
  modified_base 52: mod_base = OTHER; note = Guanosine phosphorothiorate
  modified_base 74: mod_base = OTHER; note = Cytosine phosphorothiorate
  modified_base 75: mod_base = OTHER; note = 2'-Omethylcytosine

SEQ ID NO: 7374 - RNA, 76 nt, synthetic construct; identical to SEQ ID NO: 625
  source 1..76: mol_type = other RNA
  modified_base 1: mod_base = OTHER; note = 2'-Omethylguanosine phosphorothiorate
  modified_base 2: mod_base = OTHER; note = 2'-Omethylguanosine
  modified_base 3: mod_base = OTHER; note = 2'-Omethylcytosine
  modified_base 4: mod_base = OTHER; note = 2'-Omethyluridine
  modified_base 5: mod_base = OTHER; note = 2'-Omethylcytosine
  modified_base 6: mod_base = OTHER; note = 2'-Omethylcytosine
  modified_base 9: mod_base = OTHER; note = Guanosine phosphorothiorate
  modified_base 10: mod_base = OTHER; note = 2'-Omethylguanosine
  modified_base 11: mod_base = OTHER; note = 2'-Omethylcytosine
  modified_base 12: mod_base = OTHER; note = 2'-Omethylguanosine
  modified_base 13: mod_base = OTHER; note = 2'-Omethylcytosine
  modified_base 14: mod_base = OTHER; note = 2'-Omethyladenosine
  modified_base 15: mod_base = OTHER; note = 2'-fluoroadenosine
  modified_base 16: mod_base = OTHER; note = 2'-Omethyluridine
  modified_base 17: mod_base = OTHER; note = 2'-Omethylguanosine
  modified_base 18: mod_base = OTHER; note = 2'-Omethylguanosine
  modified_base 19: mod_base = OTHER; note = Adenosine phosphorothiorate
  modified_base 20: mod_base = OTHER; note = 2'-Omethyluridine
  modified_base 21: mod_base = OTHER; note = 2'-fluoroadenosine
  modified_base 22: mod_base = OTHER; note = 2'-Omethylguanosine
  modified_base 23: mod_base = OTHER; note = 2'-Omethylcytosine
  modified_base 24: mod_base = OTHER; note = 2'-Omethylguanosine
  modified_base 25: mod_base = OTHER; note = 2'-Omethylcytosine
  modified_base 29: mod_base = OTHER; note = 2'-Omethylguanosine
  modified_base 33: mod_base = OTHER; note = 2'-fluorouridine
  modified_base 35: mod_base = OTHER; note = Cytosine phosphorothiorate
  modified_base 37: mod_base = OTHER; note = Adenosine phosphorothiorate
  modified_base 38: mod_base = OTHER; note = Adenosine phosphorothiorate
  modified_base 40: mod_base = OTHER; note = 2'-fluorouridine
  modified_base 41: mod_base = OTHER; note = 2'-Omethylcytosine
  modified_base 42: mod_base = OTHER; note = 2'-Omethyladenosine
  modified_base 43: mod_base = OTHER; note = 2'-Omethyladenosine
  modified_base 44: mod_base = OTHER; note = 2'-fluoroadenosine
  modified_base 46: mod_base = OTHER; note = Guanosine phosphorothiorate
  modified_base 49: mod_base = OTHER; note = 2'-Omethylcytosine
  modified_base 50: mod_base = OTHER; note = 2'-Omethylcytosine
  modified_base 51: mod_base = OTHER; note = 2'-Omethylguanosine
  modified_base 52: mod_base = OTHER; note = 2'-Omethylguanosine
  modified_base 53: mod_base = OTHER; note = 2'-Omethylguanosine
  modified_base 54: mod_base = OTHER; note = Uridine phosphorothiorate
  modified_base 55: mod_base = OTHER; note = Uridine phosphorothiorate
  modified_base 56: mod_base = OTHER; note = 2'-Omethylcytosine
  modified_base 57: mod_base = OTHER; note = 2'-Omethylguanosine
  modified_base 59: mod_base = OTHER; note = 2'-O-(2-Methoxyethyl) guanosine
  modified_base 61: mod_base = OTHER; note = 2'-Omethylcytosine
  modified_base 62: mod_base = OTHER; note = 2'-Omethylcytosine
  modified_base 63: mod_base = OTHER; note = 2'-fluorocytosine
  modified_base 64: mod_base = OTHER; note = 2'-Omethylguanosine
  modified_base 65: mod_base = OTHER; note = 2'-Omethylguanosine
  modified_base 66: mod_base = OTHER; note = 2'-Omethylcytosine
  modified_base 67: mod_base = OTHER; note = 2'-Omethylguanosine
  modified_base 68: mod_base = OTHER; note = 2'-Omethylguanosine
  modified_base 69: mod_base = OTHER; note = 2'-fluoroadenosine
  modified_base 70: mod_base = OTHER; note = 2'-fluoroguanosine
  modified_base 71: mod_base = OTHER; note = 2'-Omethyluridine
  modified_base 73: mod_base = OTHER; note = 2'-Omethylguanosine
  modified_base 74: mod_base = OTHER; note = Cytosine phosphorothiorate
  modified_base 75: mod_base = OTHER; note = 2'-fluorocytosine phosphorothiorate

SEQ ID NO: 7375 - RNA, 76 nt, synthetic construct; identical to SEQ ID NO: 625
  source 1..76: mol_type = other RNA
  modified_base 1: mod_base = OTHER; note = 2'-fluoroguanosine
  modified_base 2: mod_base = OTHER; note = 2'-Omethylguanosine
  modified_base 3: mod_base = OTHER; note = 2'-fluorocytosine
  modified_base 6: mod_base = OTHER; note = 2'-Omethylcytosine
  modified_base 10: mod_base = OTHER; note = 2'-fluoroguanosine phosphorothiorate
  modified_base 13: mod_base = OTHER; note = 2'-Omethylcytosine
  modified_base 15: mod_base = OTHER; note = Adenosine phosphorothiorate
  modified_base 16: mod_base = OTHER; note = 2'-Omethyluridine
  modified_base 20: mod_base = OTHER; note = 2'-Omethyluridine
  modified_base 21: mod_base = OTHER; note = Adenosine phosphorothiorate
  modified_base 22: mod_base = OTHER; note = 2'-fluoroguanosine phosphorothiorate
  modified_base 24: mod_base = OTHER; note = 2'-Omethylguanosine
  modified_base 25: mod_base = OTHER; note = 2'-Omethylcytosine
  modified_base 28: mod_base = OTHER; note = 2'-Omethyluridine
  modified_base 29: mod_base = OTHER; note = 2'-Omethylguanosine
  modified_base 34: mod_base = OTHER; note = 2'-fluorouridine
  modified_base 38: mod_base = OTHER; note = 2'-Omethyladenosine
  modified_base 40: mod_base = OTHER; note = 2'-Omethyluridine
  modified_base 41: mod_base = OTHER; note = 2'-fluorocytosine
  modified_base 43: mod_base = OTHER; note = 2'-fluoroadenosine
  modified_base 44: mod_base = OTHER; note = 2'-fluoroadenosine
  modified_base 46: mod_base = OTHER; note = 2'-fluoroguanosine
  modified_base 47: mod_base = OTHER; note = Uridine phosphorothiorate
  modified_base 48: mod_base = OTHER; note = 2'-Omethyluridine
  modified_base 49: mod_base = OTHER; note = 2'-Omethylcytosine phosphorothiorate
  modified_base 50: mod_base = OTHER; note = 2'-fluorocytosine phosphorothiorate
  modified_base 51: mod_base = OTHER; note = 2'-Omethylguanosine
  modified_base 64: mod_base = OTHER; note = 2'-fluoroguanosine
  modified_base 65: mod_base = OTHER; note = Guanosine phosphorothiorate
  modified_base 66: mod_base = OTHER; note = Cytosine phosphorothiorate
  modified_base 70: mod_base = OTHER; note = 2'-Omethylguanosine
  modified_base 71: mod_base = OTHER; note = 2'-fluorouridine
  modified_base 72: mod_base = OTHER; note = 2'-Omethylcytosine
  modified_base 73: mod_base = OTHER; note = 2'-Omethylguanosine
  modified_base 75: mod_base = OTHER; note = Cytosine phosphorothiorate
  modified_base 76: mod_base = OTHER; note = 2'-Omethyladenosine

SEQ ID NO: 7376 - RNA, 85 nt, synthetic construct; identical to SEQ ID NO: 3310
  source 1..85: mol_type = other RNA
  modified_base 1: mod_base = OTHER; note = 2'-Omethylcytosine
  modified_base 36: mod_base = OTHER; note = 2'-Omethylguanosine
  modified_base 56: mod_base = OTHER; note = 2'-Omethylguanosine
  modified_base 58: mod_base = OTHER; note = 2'-Omethylguanosine
  modified_base 64: mod_base = OTHER; note = Uridine phosphorothiorate

SEQ ID NO: 7377 - RNA, 76 nt, synthetic construct; identical to SEQ ID NO: 625
  source 1..76: mol_type = other RNA
  modified_base 1: mod_base = OTHER; note = 2'-Omethylguanosine phosphorothiorate
  modified_base 2: mod_base = OTHER; note = 2'-Omethylguanosine phosphorothiorate
  modified_base 3: mod_base = OTHER; note = 2'-Omethylcytosine phosphorothiorate
  modified_base 4: mod_base = OTHER; note = 2'-Omethyluridine phosphorothiorate
  modified_base 5: mod_base = OTHER; note = 2'-Omethylcytosine phosphorothiorate
  modified_base 6: mod_base = OTHER; note = 2'-Omethylcytosine phosphorothiorate
  modified_base 10: mod_base = OTHER; note = 2'-Omethylguanosine
  modified_base 11: mod_base = OTHER; note = 2'-Omethylcytosine
  modified_base 12: mod_base = OTHER; note = 2'-Omethylguanosine
  modified_base 13: mod_base = OTHER; note = 2'-Omethylcytosine
  modified_base 14: mod_base = OTHER; note = 2'-Omethyladenosine
  modified_base 15: mod_base = OTHER; note = 2'-Omethyladenosine
  modified_base 16: mod_base = OTHER; note = 2'-Omethyluridine
  modified_base 17: mod_base = OTHER; note = 2'-Omethylguanosine
  modified_base 18: mod_base = OTHER; note = 2'-Omethylguanosine
  modified_base 19: mod_base = OTHER; note = 2'-Omethyladenosine
  modified_base 20: mod_base = OTHER; note = 2'-Omethyluridine
  modified_base 40: mod_base = OTHER; note = 2'-fluorouridine
  modified_base 41: mod_base = OTHER; note = 2'-fluorocytosine
  modified_base 42: mod_base = OTHER; note = 2'-fluoroadenosine
  modified_base 43: mod_base = OTHER; note = 2'-fluoroadenosine
  modified_base 44: mod_base = OTHER; note = 2'-Omethyladenosine
  modified_base 45: mod_base = OTHER; note = 2'-Omethylguanosine
  modified_base 46: mod_base = OTHER; note = 2'-Omethylguanosine
  modified_base 49: mod_base = OTHER; note = 2'-Omethylcytosine
  modified_base 50: mod_base = OTHER; note = 2'-Omethylcytosine
  modified_base 51: mod_base = OTHER; note = 2'-Omethylguanosine
  modified_base 52: mod_base = OTHER; note = 2'-Omethylguanosine
  modified_base 53: mod_base = OTHER; note = 2'-Omethylguanosine
  modified_base 54: mod_base = OTHER; note = Uridine phosphorothiorate
  modified_base 55: mod_base = OTHER; note = Uridine phosphorothiorate
  modified_base 56: mod_base = OTHER; note = Cytosine phosphorothiorate
  modified_base 57: mod_base = OTHER; note = Guanosine phosphorothiorate
  modified_base 61: mod_base = OTHER; note = 2'-Omethylcytosine
  modified_base 62: mod_base = OTHER; note = 2'-Omethylcytosine
  modified_base 63: mod_base = OTHER; note = 2'-Omethylcytosine
  modified_base 64: mod_base = OTHER; note = 2'-Omethylguanosine
  modified_base 65: mod_base = OTHER; note = 2'-Omethylguanosine
  modified_base 66: mod_base = OTHER; note = 2'-Omethylcytosine
  modified_base 67: mod_base = OTHER; note = 2'-Omethylguanosine
  modified_base 68: mod_base = OTHER; note = 2'-Omethylguanosine
  modified_base 69: mod_base = OTHER; note = 2'-Omethyladenosine

SEQ ID NO: 7378 - RNA, 74 nt, synthetic construct; identical to SEQ ID NO: 3293
  source 1..74: mol_type = other RNA
  modified_base 1: mod_base = OTHER; note = 2'-fluoroadenosine
  modified_base 2: mod_base = OTHER; note = Cytosine phosphorothiorate
  modified_base 4: mod_base = OTHER; note = 2'-fluorouridine
  modified_base 6: mod_base = OTHER; note = 2'-fluoroguanosine
  modified_base 9: mod_base = OTHER; note = 2'-fluoroguanosine
  modified_base 12: mod_base = OTHER; note = 2'-Omethylcytosine
  modified_base 24: mod_base = OTHER; note = 2'-Omethylguanosine
  modified_base 26: mod_base = OTHER; note = 2'-fluorocytosine
  modified_base 33: mod_base = OTHER; note = 2'-fluorouridine
  modified_base 40: mod_base = OTHER; note = 2'-fluoroguanosine
  modified_base 42: mod_base = OTHER; note = Adenosine phosphorothiorate
  modified_base 43: mod_base = OTHER; note = Guanosine phosphorothiorate
  modified_base 48: mod_base = OTHER; note = 2'-fluorocytosine
  modified_base 50: mod_base = OTHER; note = Uridine phosphorothiorate
  modified_base 51: mod_base = OTHER; note = 2'-fluoroguanosine
  modified_base 62: mod_base = OTHER; note = Guanosine phosphorothiorate
  modified_base 73: mod_base = OTHER; note = 2'-Omethylcytosine phosphorothiorate
  modified_base 74: mod_base = OTHER; note = 2'-Omethyladenosine

SEQ ID NO: 7379 - RNA, 76 nt, synthetic construct; identical to SEQ ID NO: 625
  source 1..76: mol_type = other RNA
  modified_base 2: mod_base = OTHER; note = 2'-fluoroguanosine
  modified_base 3: mod_base = OTHER; note = Cytosine phosphorothiorate
  modified_base 4: mod_base = OTHER; note = 2'-Omethyluridine phosphorothiorate
  modified_base 5: mod_base = OTHER; note = 2'-fluorocytosine
  modified_base 11: mod_base = OTHER; note = 2'-fluorocytosine
  modified_base 12: mod_base = OTHER; note = 2'-fluoroguanosine
  modified_base 13: mod_base = OTHER; note = Cytosine phosphorothiorate
  modified_base 14: mod_base = OTHER; note = 2'-fluoroadenosine phosphorothiorate
  modified_base 15: mod_base = OTHER; note = 2'-fluoroadenosine phosphorothiorate
  modified_base 16: mod_base = OTHER; note = 2'-fluorouridine
  modified_base 18: mod_base = OTHER; note = 2'-fluoroguanosine
  modified_base 20: mod_base = OTHER; note = Uridine phosphorothiorate
  modified_base 22: mod_base = OTHER; note = 2'-fluoroguanosine
  modified_base 26: mod_base = OTHER; note = 2'-Omethyladenosine
  modified_base 29: mod_base = OTHER; note = 2'-fluoroguanosine
  modified_base 33: mod_base = OTHER; note = Uridine phosphorothiorate
  modified_base 40: mod_base = OTHER; note = 2'-fluorouridine
  modified_base 42: mod_base = OTHER; note = Adenosine phosphorothiorate
  modified_base 43: mod_base = OTHER; note = 2'-Omethyladenosine
  modified_base 44: mod_base = OTHER; note = 2'-Omethyladenosine
  modified_base 45: mod_base = OTHER; note = 2'-Omethylguanosine
  modified_base 46: mod_base = OTHER; note = Guanosine phosphorothiorate
  modified_base 47: mod_base = OTHER; note = 2'-fluorouridine
  modified_base 50: mod_base = OTHER; note = 2'-Omethylcytosine
  modified_base 51: mod_base = OTHER; note = Guanosine phosphorothiorate
  modified_base 52: mod_base = OTHER; note = 2'-Omethylguanosine phosphorothiorate
  modified_base 53: mod_base = OTHER; note = 2'-Omethylguanosine
  modified_base 56: mod_base = OTHER; note = Cytosine phosphorothiorate
  modified_base 58: mod_base = OTHER; note = 2'-fluoroadenosine
  modified_base 60: mod_base = OTHER; note = 2'-Omethyluridine
  modified_base 61: mod_base = OTHER; note = Cytosine phosphorothiorate
  modified_base 62: mod_base = OTHER; note = 2'-Omethylcytosine
  modified_base 64: mod_base = OTHER; note = 2'-fluoroguanosine
  modified_base 65: mod_base = OTHER; note = 2'-Omethylguanosine phosphorothiorate
  modified_base 70: mod_base = OTHER; note = 2'-Omethylguanosine
  modified_base 72: mod_base = OTHER; note = 2'-Omethylcytosine
  modified_base 74: mod_base = OTHER; note = 2'-fluorocytosine
  modified_base 75: mod_base = OTHER; note = 2'-fluorocytosine

SEQ ID NO: 7380 - RNA, 77 nt, synthetic construct
  source 1..77: mol_type = other RNA
gtccctgtggcgcaatggattagcgcattggacttcaaattcaaaggttccgggttcgagtcccggcagggatgcca

SEQ ID NO: 7381 - RNA, 85 nt, synthetic construct; identical to SEQ ID NO: 3297
  source 1..85: mol_type = other RNA
  modified_base 39: mod_base = OTHER; note = 2'-Omethyluridine
  modified_base 40: mod_base = OTHER; note = 2'-Omethylcytosine
  modified_base 41: mod_base = OTHER; note = 2'-Omethylcytosine
  modified_base 42: mod_base = OTHER; note = 2'-Omethyladenosine
  modified_base 43: mod_base = OTHER; note = 2'-Omethyladenosine

SEQ ID NO: 7382 - RNA, 85 nt, synthetic construct; identical to SEQ ID NO: 3301
  source 1..85: mol_type = other RNA
  modified_base 1: mod_base = OTHER; note = 2'-Omethylguanosine
  modified_base 2: mod_base = OTHER; note = Cytosine phosphorothiorate
  modified_base 3: mod_base = OTHER; note = Uridine phosphorothiorate
  modified_base 5: mod_base = OTHER; note = Uridine phosphorothiorate
  modified_base 13: mod_base = OTHER; note = 2'-Omethylguanosine phosphorothiorate
  modified_base 16: mod_base = OTHER; note = 2'-fluorouridine phosphorothiorate
  modified_base 18: mod_base = OTHER; note = 2'-Omethylguanosine
  modified_base 23: mod_base = OTHER; note = 2'-fluoroguanosine phosphorothiorate
  modified_base 26: mod_base = OTHER; note = Guanosine phosphorothiorate
  modified_base 27: mod_base = OTHER; note = 2'-Omethyluridine phosphorothiorate
  modified_base 37: mod_base = OTHER; note = 2'-fluoroadenosine phosphorothiorate
  modified_base 41: mod_base = OTHER; note = 2'-Omethylcytosine phosphorothiorate
  modified_base 44: mod_base = OTHER; note = 2'-Omethyluridine phosphorothiorate
  modified_base 46: mod_base = OTHER; note = 2'-Omethylguanosine
  modified_base 48: mod_base = OTHER; note = 2'-Omethylguanosine
  modified_base 59: mod_base = OTHER; note = Cytosine phosphorothiorate
  modified_base 81: mod_base = OTHER; note = 2'-fluorocytosine
  modified_base 82: mod_base = OTHER; note = 2'-fluoroguanosine
  modified_base 84: mod_base = OTHER; note = 2'-Omethylcytosine phosphorothiorate

SEQ ID NO: 7383 - RNA, 85 nt, synthetic construct; identical to SEQ ID NO: 3297
  source 1..85: mol_type = other RNA
  modified_base 1: mod_base = OTHER; note = 2'-Omethylguanosine
  modified_base 16: mod_base = OTHER; note = 2'-Omethyluridine
  modified_base 17: mod_base = OTHER; note = 2'-Omethylguanosine
  modified_base 18: mod_base = OTHER; note = 2'-Omethylguanosine
  modified_base 63: mod_base = OTHER; note = 2'-Omethyluridine phosphorothiorate
  modified_base 64: mod_base = OTHER; note = Uridine phosphorothiorate
  modified_base 65: mod_base = OTHER; note = 2'-Omethylcytosine
  modified_base 66: mod_base = OTHER; note = 2'-fluoroguanosine
  modified_base 67: mod_base = OTHER; note = 2'-fluoroadenosine
  modified_base 68: mod_base = OTHER; note = 2'-Omethyladenosine
  modified_base 69: mod_base = OTHER; note = 2'-fluorouridine
  modified_base 82: mod_base = OTHER; note = 2'-Omethylguanosine

SEQ ID NO: 7384 - RNA, 76 nt, synthetic construct; identical to SEQ ID NO: 625
  source 1..76: mol_type = other RNA
  modified_base 1: mod_base = OTHER; note = 2'-fluoroguanosine
  modified_base 2: mod_base = OTHER; note = 2'-fluoroguanosine
  modified_base 3: mod_base = OTHER; note = Cytosine phosphorothiorate
  modified_base 4: mod_base = OTHER; note = 2'-fluorouridine
  modified_base 5: mod_base = OTHER; note = Cytosine phosphorothiorate
  modified_base 10: mod_base = OTHER; note = 2'-fluoroguanosine
  modified_base 15: mod_base = OTHER; note = 2'-fluoroadenosine phosphorothiorate
  modified_base 23: mod_base = OTHER; note = 2'-Omethylcytosine
  modified_base 24: mod_base = OTHER; note = 2'-Omethylguanosine
  modified_base 25: mod_base = OTHER; note = 2'-Omethylcytosine
  modified_base 26: mod_base = OTHER; note = 2'-Omethyladenosine
  modified_base 27: mod_base = OTHER; note = 2'-fluorouridine
  modified_base 28: mod_base = OTHER; note = 2'-Omethyluridine
  modified_base 30: mod_base = OTHER; note = 2'-fluoroguanosine
  modified_base 31: mod_base = OTHER; note = 2'-Omethyladenosine
  modified_base 34: mod_base = OTHER; note = 2'-fluorouridine phosphorothiorate
  modified_base 39: mod_base = OTHER; note = 2'-fluorouridine
  modified_base 46: mod_base = OTHER; note = 2'-Omethylguanosine phosphorothiorate
  modified_base 47: mod_base = OTHER; note = 2'-Omethyluridine
  modified_base 48: mod_base = OTHER; note = 2'-Omethyluridine
  modified_base 50: mod_base = OTHER; note = 2'-fluorocytosine
  modified_base 53: mod_base = OTHER; note = Guanosine phosphorothiorate
  modified_base 54: mod_base = OTHER; note = Uridine phosphorothiorate
  modified_base 62: mod_base = OTHER; note = 2'-Omethylcytosine
  modified_base 64: mod_base = OTHER; note = Guanosine phosphorothiorate
  modified_base 65: mod_base = OTHER; note = 2'-fluoroguanosine
  modified_base 67: mod_base = OTHER; note = 2'-fluoroguanosine phosphorothiorate
  modified_base 69: mod_base = OTHER; note = 2'-Omethyladenosine
  modified_base 71: mod_base = OTHER; note = Uridine phosphorothiorate
  modified_base 72: mod_base = OTHER; note = 2'-Omethylcytosine
  modified_base 74: mod_base = OTHER; note = 2'-Omethylcytosine
  modified_base 76: mod_base = OTHER; note = 2'-fluoroadenosine

SEQ ID NO: 7385 - RNA, 76 nt, synthetic construct; identical to SEQ ID NO: 625
  source 1..76: mol_type = other RNA
  modified_base 1: mod_base = OTHER; note = 2'-Omethylguanosine phosphorothiorate
  modified_base 2: mod_base = OTHER; note = 2'-Omethylguanosine
  modified_base 33: mod_base = OTHER; note = 2'-fluorouridine
  modified_base 37: mod_base = OTHER; note = Adenosine phosphorothiorate
  modified_base 52: mod_base = OTHER; note = 2'-Omethylguanosine
  modified_base 57: mod_base = OTHER; note = 2'-Omethylguanosine
  modified_base 62: mod_base = OTHER; note = 2'-Omethylcytosine
  modified_base 73: mod_base = OTHER; note = 2'-Omethylguanosine
  modified_base 75: mod_base = OTHER; note = 2'-Omethylcytosine phosphorothiorate

SEQ ID NO: 7386 - RNA, 75 nt, synthetic construct; identical to SEQ ID NO: 3336
  source 1..75: mol_type = other RNA
  modified_base 2: mod_base = OTHER; note = Cytosine phosphorothiorate
  modified_base 3: mod_base = OTHER; note = 2'-Omethyluridine phosphorothiorate
  modified_base 13: mod_base = OTHER; note = 2'-fluoroadenosine
  modified_base 14: mod_base = OTHER; note = 2'-fluoroguanosine
  modified_base 41: mod_base = OTHER; note = Guanosine phosphorothiorate
  modified_base 74: mod_base = OTHER; note = Cytosine phosphorothiorate

SEQ ID NO: 7387 - RNA, 85 nt, synthetic construct; identical to SEQ ID NO: 3317
  source 1..85: mol_type = other RNA
  modified_base 1: mod_base = OTHER; note = 2'-Omethylguanosine phosphorothiorate
  modified_base 3: mod_base = OTHER; note = 2'-Omethyluridine
  modified_base 9: mod_base = OTHER; note = 2'-fluoroguanosine
  modified_base 10: mod_base = OTHER; note = 2'-fluoroguanosine
  modified_base 14: mod_base = OTHER; note = 2'-Omethyladenosine phosphorothiorate
  modified_base 17: mod_base = OTHER; note = 2'-Omethylguanosine
  modified_base 22: mod_base = OTHER; note = 2'-Omethyladenosine
  modified_base 23: mod_base = OTHER; note = 2'-Omethylguanosine
  modified_base 26: mod_base = OTHER; note = 2'-fluoroguanosine phosphorothiorate
  modified_base 34: mod_base = OTHER; note = 2'-fluorocytosine phosphorothiorate
  modified_base 46: mod_base = OTHER; note = 2'-Omethylguanosine
  modified_base 48: mod_base = OTHER; note = 2'-Omethylguanosine
  modified_base 53: mod_base = OTHER; note = 2'-Omethylcytosine
  modified_base 55: mod_base = OTHER; note = 2'-Omethylcytosine
  modified_base 57: mod_base = OTHER; note = 2'-Omethylcytosine
  modified_base 83: mod_base = OTHER; note = 2'-fluorocytosine phosphorothiorate

SEQ ID NO: 7388 - RNA, 76 nt, synthetic construct; identical to SEQ ID NO: 625
  source 1..76: mol_type = other RNA
  modified_base 1: mod_base = OTHER; note = 2'-Omethylguanosine phosphorothiorate
  modified_base 2: mod_base = OTHER; note = 2'-Omethylguanosine phosphorothiorate
  modified_base 21: mod_base = OTHER; note = Adenosine phosphorothiorate
  modified_base 22: mod_base = OTHER; note = 2'-fluoroguanosine
  modified_base 40: mod_base = OTHER; note = Uridine phosphorothiorate
  modified_base 41: mod_base = OTHER; note = 2'-O-(2-Methoxyethyl) 5-methylcytosine
  modified_base 44: mod_base = OTHER; note = Adenosine phosphorothiorate
  modified_base 52: mod_base = OTHER; note = 2'-Omethylguanosine
  modified_base 74: mod_base = OTHER; note = Cytosine phosphorothiorate
  modified_base 75: mod_base = OTHER; note = 2'-Omethylcytosine phosphorothiorate
  modified_base 76: mod_base = OTHER; note = 2'-Omethyladenosine

SEQ ID NO: 7389 - RNA, 76 nt, synthetic construct; identical to SEQ ID NO: 625
  source 1..76: mol_type = other RNA
  modified_base 1: mod_base = OTHER; note = 2'-Omethylguanosine
  modified_base 10: mod_base = OTHER; note = 2'-Omethylguanosine
  modified_base 13: mod_base = OTHER; note = 2'-Omethylcytosine
  modified_base 18: mod_base = OTHER; note = 2'-Omethylguanosine
  modified_base 19: mod_base = OTHER; note = Adenosine phosphorothiorate
  modified_base 20: mod_base = OTHER; note = 2'-Omethyluridine
  modified_base 25: mod_base = OTHER; note = 2'-Omethylcytosine
  modified_base 29: mod_base = OTHER; note = 2'-Omethylguanosine
  modified_base 33: mod_base = OTHER; note = 2'-fluorouridine
  modified_base 35: mod_base = OTHER; note = Cytosine phosphorothiorate
  modified_base 37: mod_base = OTHER; note = Adenosine phosphorothiorate
  modified_base 38: mod_base = OTHER; note = Adenosine phosphorothiorate
  modified_base 41: mod_base = OTHER; note = 2'-fluorocytosine
  modified_base 43: mod_base = OTHER; note = 2'-Omethyladenosine
  modified_base 44: mod_base = OTHER; note = 2'-fluoroadenosine
  modified_base 46: mod_base = OTHER; note = Guanosine phosphorothiorate
  modified_base 50: mod_base = OTHER; note = 2'-Omethylcytosine
  modified_base 52: mod_base = OTHER; note = 2'-Omethylguanosine
  modified_base 54: mod_base = OTHER; note = Uridine phosphorothiorate
  modified_base 55: mod_base = OTHER; note = Uridine phosphorothiorate
  modified_base 56: mod_base = OTHER; note = 2'-Omethylcytosine
  modified_base 57: mod_base = OTHER; note = Guanosine phosphorothiorate
  modified_base 62: mod_base = OTHER; note = 2'-Omethylcytosine
  modified_base 63: mod_base = OTHER; note = 2'-fluorocytosine
  modified_base 65: mod_base = OTHER; note = 2'-Omethylguanosine
  modified_base 71: mod_base = OTHER; note = 2'-Omethyluridine
  modified_base 73: mod_base = OTHER; note = 2'-Omethylguanosine

SEQ ID NO: 7390 - RNA, 76 nt, synthetic construct; identical to SEQ ID NO: 625
  source 1..76: mol_type = other RNA
  modified_base 10: mod_base = OTHER; note = 2'-Omethylguanosine
  modified_base 11: mod_base = OTHER; note = 2'-Omethylcytosine
  modified_base 12: mod_base = OTHER; note = 2'-Omethylguanosine
  modified_base 13: mod_base = OTHER; note = 2'-Omethylcytosine
  modified_base 22: mod_base = OTHER; note = 2'-Omethylguanosine
  modified_base 23: mod_base = OTHER; note = 2'-Omethylcytosine
  modified_base 24: mod_base = OTHER; note = 2'-Omethylguanosine
  modified_base 25: mod_base = OTHER; note = 2'-Omethylcytosine
  modified_base 40: mod_base = OTHER; note = 2'-fluorouridine
  modified_base 41: mod_base = OTHER; note = 2'-fluorocytosine
  modified_base 42: mod_base = OTHER; note = 2'-fluoroadenosine
  modified_base 43: mod_base = OTHER; note = 2'-fluoroadenosine
  modified_base 49: mod_base = OTHER; note = 2'-Omethylcytosine
  modified_base 50: mod_base = OTHER; note = 2'-Omethylcytosine
  modified_base 51: mod_base = OTHER; note = 2'-Omethylguanosine
  modified_base 52: mod_base = OTHER; note = 2'-Omethylguanosine
  modified_base 53: mod_base = OTHER; note = 2'-Omethylguanosine

SEQ ID NO: 7391 - RNA, 74 nt, synthetic construct; identical to SEQ ID NO: 3293
  source 1..74: mol_type = other RNA
  modified_base 3: mod_base = OTHER; note = Cytosine phosphorothiorate
  modified_base 9: mod_base = OTHER; note = 2'-fluoroguanosine
  modified_base 33: mod_base = OTHER; note = 2'-Omethyluridine phosphorothiorate
  modified_base 46: mod_base = OTHER; note = Uridine phosphorothiorate
  modified_base 48: mod_base = OTHER; note = 2'-fluorocytosine
  modified_base 73: mod_base = OTHER; note = 2'-Omethylcytosine

SEQ ID NO: 7392 - RNA, 76 nt, synthetic construct; identical to SEQ ID NO: 625
  source 1..76: mol_type = other RNA
  modified_base 22: mod_base = OTHER; note = 2'-Omethylguanosine
  modified_base 23: mod_base = OTHER; note = 2'-Omethylcytosine
  modified_base 24: mod_base = OTHER; note = 2'-Omethylguanosine
  modified_base 25: mod_base = OTHER; note = 2'-Omethylcytosine
  modified_base 54: mod_base = OTHER; note = Uridine phosphorothiorate
  modified_base 55: mod_base = OTHER; note = Uridine phosphorothiorate
  modified_base 56: mod_base = OTHER; note = Cytosine phosphorothiorate
  modified_base 57: mod_base = OTHER; note = Guanosine phosphorothiorate

SEQ ID NO: 7393 - RNA, 76 nt, synthetic construct; identical to SEQ ID NO: 3490
  source 1..76: mol_type = other RNA
  modified_base 1: mod_base = OTHER; note = 2'-Omethylguanosine
  modified_base 14: mod_base = OTHER; note = 2'-Omethyladenosine
  modified_base 15: mod_base = OTHER; note = 2'-fluoroadenosine
  modified_base 16: mod_base = OTHER; note = 2'-Omethyluridine
  modified_base 17: mod_base = OTHER; note = 2'-Omethylguanosine
  modified_base 18: mod_base = OTHER; note = 2'-Omethylguanosine
  modified_base 19: mod_base = OTHER; note = 2'-fluoroadenosine
  modified_base 20: mod_base = OTHER; note = 2'-Omethyluridine
  modified_base 54: mod_base = OTHER; note = 2'-Omethyluridine phosphorothiorate
  modified_base 55: mod_base = OTHER; note = Uridine phosphorothiorate
  modified_base 56: mod_base = OTHER; note = 2'-Omethylcytosine
  modified_base 57: mod_base = OTHER; note = 2'-Omethylguanosine
  modified_base 59: mod_base = OTHER; note = 2'-Omethylguanosine
  modified_base 73: mod_base = OTHER; note = 2'-Omethylguanosine

SEQ ID NO: 7394 - RNA, 85 nt, synthetic construct; identical to SEQ ID NO: 3297
  source 1..85: mol_type = other RNA
  modified_base 1: mod_base = OTHER; note = 2'-Omethylguanosine
  modified_base 16: mod_base = OTHER; note = 2'-Omethyluridine
  modified_base 17: mod_base = OTHER; note = 2'-Omethylguanosine
  modified_base 18: mod_base = OTHER; note = 2'-Omethylguanosine
  modified_base 63: mod_base = OTHER; note = 2'-Omethyluridine
  modified_base 65: mod_base = OTHER; note = 2'-Omethylcytosine
  modified_base 68: mod_base = OTHER; note = 2'-Omethyladenosine
  modified_base 82: mod_base = OTHER; note = 2'-Omethylguanosine

SEQ ID NO: 7395 - RNA, 76 nt, synthetic construct; identical to SEQ ID NO: 3289
  source 1..76: mol_type = other RNA
  modified_base 1: mod_base = OTHER; note = 2'-Omethylguanosine
  modified_base 14: mod_base = OTHER; note = 2'-Omethyladenosine
  modified_base 15: mod_base = OTHER; note = 2'-fluoroguanosine
  modified_base 16: mod_base = OTHER; note = 2'-Omethyluridine
  modified_base 18: mod_base = OTHER; note = 2'-Omethylguanosine
  modified_base 19: mod_base = OTHER; note = 2'-Omethylguanosine
  modified_base 20: mod_base = OTHER; note = 2'-fluorouridine
  modified_base 54: mod_base = OTHER; note = 2'-Omethyluridine
  modified_base 56: mod_base = OTHER; note = 2'-Omethylcytosine
  modified_base 59: mod_base = OTHER; note = 2'-Omethylguanosine
  modified_base 73: mod_base = OTHER; note = 2'-Omethylguanosine

SEQ ID NO: 7396 - RNA, 76 nt, synthetic construct; identical to SEQ ID NO: 625
  source 1..76: mol_type = other RNA
  modified_base 8: mod_base = OTHER; note = Thymine

SEQ ID NO: 7397 - RNA, 75 nt, synthetic construct; identical to SEQ ID NO: 3299
  source 1..75: mol_type = other RNA
  modified_base 10: mod_base = OTHER; note = 2'-Omethylcytosine
  modified_base 14: mod_base = OTHER; note = 2'-Omethylguanosine
  modified_base 17: mod_base = OTHER; note = 2'-fluoroguanosine
  modified_base 18: mod_base = OTHER; note = 2'-fluoroguanosine
  modified_base 19: mod_base = OTHER; note = 2'-fluorouridine
  modified_base 28: mod_base = OTHER; note = 2'-fluoroadenosine
  modified_base 30: mod_base = OTHER; note = 2'-fluoroadenosine phosphorothiorate
  modified_base 39: mod_base = OTHER; note = 2'-Omethylcytosine
  modified_base 46: mod_base = OTHER; note = 2'-fluorouridine
  modified_base 47: mod_base = OTHER; note = 2'-Omethylcytosine phosphorothiorate
  modified_base 48: mod_base = OTHER; note = Cytosine phosphorothiorate
  modified_base 49: mod_base = OTHER; note = 2'-fluoroadenosine
  modified_base 57: mod_base = OTHER; note = 2'-fluoroadenosine phosphorothiorate
  modified_base 61: mod_base = OTHER; note = 2'-fluorocytosine
  modified_base 64: mod_base = OTHER; note = 2'-fluoroguanosine phosphorothiorate
  modified_base 74: mod_base = OTHER; note = Cytosine phosphorothiorate
  modified_base 75: mod_base = OTHER; note = 2'-fluoroadenosine

SEQ ID NO: 7398 - RNA, 85 nt, synthetic construct; identical to SEQ ID NO: 3310
  source 1..85: mol_type = other RNA
  modified_base 1: mod_base = OTHER; note = 2'-Omethylcytosine phosphorothiorate
  modified_base 3: mod_base = OTHER; note = 2'-Omethyladenosine
  modified_base 17: mod_base = OTHER; note = Guanosine phosphorothiorate
  modified_base 35: mod_base = OTHER; note = Adenosine phosphorothiorate
  modified_base 43: mod_base = OTHER; note = 2'-Omethyluridine
  modified_base 46: mod_base = OTHER; note = 2'-Omethyladenosine
  modified_base 59: mod_base = OTHER; note = 2'-Omethyluridine
  modified_base 84: mod_base = OTHER; note = Cytosine phosphorothiorate

SEQ ID NO: 7399 - RNA, 74 nt, synthetic construct; identical to SEQ ID NO: 766
  source 1..74: mol_type = other RNA
  modified_base 1: mod_base = OTHER; note = 2'-Omethylguanosine phosphorothiorate
  modified_base 2: mod_base = OTHER; note = 2'-Omethylguanosine phosphorothiorate
  modified_base 72: mod_base = OTHER; note = 2'-Omethylcytosine
  modified_base 73: mod_base = OTHER; note = 2'-Omethylguanosine

SEQ ID NO: 7400 - RNA, 85 nt, synthetic construct; identical to SEQ ID NO: 3297
  source 1..85: mol_type = other RNA
  modified_base 1: mod_base = OTHER; note = 2'-Omethylguanosine
  modified_base 2: mod_base = OTHER; note = 2'-Omethylcytosine
  modified_base 3: mod_base = OTHER; note = 2'-Omethyluridine
  modified_base 4: mod_base = OTHER; note = 2'-Omethylguanosine
  modified_base 5: mod_base = OTHER; note = 2'-Omethyluridine
  modified_base 6: mod_base = OTHER; note = 2'-Omethylguanosine
  modified_base 58: mod_base = OTHER; note = 2'-Omethylguanosine
  modified_base 59: mod_base = OTHER; note = 2'-Omethylcytosine
  modified_base 60: mod_base = OTHER; note = 2'-Omethyladenosine
  modified_base 61: mod_base = OTHER; note = 2'-Omethylguanosine
  modified_base 62: mod_base = OTHER; note = 2'-Omethylguanosine

SEQ ID NO: 7401 - RNA, 74 nt, synthetic construct; identical to SEQ ID NO: 3293
  source 1..74: mol_type = other RNA
  modified_base 1: mod_base = OTHER; note = 2'-Omethyladenosine phosphorothiorate
  modified_base 4: mod_base = OTHER; note = Uridine phosphorothiorate
  modified_base 10: mod_base = OTHER; note = 2'-Omethylcytosine phosphorothiorate
  modified_base 21: mod_base = OTHER; note = 2'-fluorocytosine
  modified_base 26: mod_base = OTHER; note = 2'-fluorocytosine
  modified_base 46: mod_base = OTHER; note = 2'-fluorouridine
  modified_base 48: mod_base = OTHER; note = 2'-fluorocytosine
  modified_base 73: mod_base = OTHER; note = 2'-Omethylcytosine phosphorothiorate

SEQ ID NO: 7402 - RNA, 76 nt, synthetic construct; identical to SEQ ID NO: 3318
  source 1..76: mol_type = other RNA
  modified_base 18: mod_base = OTHER; note = 2'-Omethylguanosine
  modified_base 52: mod_base = OTHER; note = 2'-Omethylguanosine

SEQ ID NO: 7403 - RNA, 76 nt, synthetic construct; identical to SEQ ID NO: 625
  source 1..76: mol_type = other RNA
  modified_base 1: mod_base = OTHER; note = 2'-Omethylguanosine
  modified_base 2: mod_base = OTHER; note = Guanosine phosphorothiorate
  modified_base 3: mod_base = OTHER; note = 2'-Omethylcytosine phosphorothiorate
  modified_base 4: mod_base = OTHER; note = 2'-Omethyluridine
  modified_base 10: mod_base = OTHER; note = 2'-Omethylguanosine
  modified_base 12: mod_base = OTHER; note = Guanosine phosphorothiorate
  modified_base 13: mod_base = OTHER; note = 2'-fluorocytosine
  modified_base 15: mod_base = OTHER; note = 2'-Omethyladenosine
  modified_base 20: mod_base = OTHER; note = 2'-Omethyluridine
  modified_base 24: mod_base = OTHER; note = 2'-Omethylguanosine phosphorothiorate
  modified_base 25: mod_base = OTHER; note = Cytosine phosphorothiorate
  modified_base 26: mod_base = OTHER; note = 2'-Omethyladenosine
  modified_base 28: mod_base = OTHER; note = 2'-Omethyluridine
  modified_base 29: mod_base = OTHER; note = Guanosine phosphorothiorate
  modified_base 30: mod_base = OTHER; note = 2'-Omethylguanosine phosphorothiorate
  modified_base 31: mod_base = OTHER; note = 2'-fluoroadenosine
  modified_base 40: mod_base = OTHER; note = 2'-fluorouridine
  modified_base 41: mod_base = OTHER; note = 2'-fluorocytosine
  modified_base 42: mod_base = OTHER; note = 2'-Omethyladenosine phosphorothiorate
  modified_base 43: mod_base = OTHER; note = 2'-fluoroadenosine
  modified_base 49: mod_base = OTHER; note = 2'-fluorocytosine
  modified_base 50: mod_base = OTHER; note = 2'-Omethylcytosine
  modified_base 51: mod_base = OTHER; note = 2'-Omethylguanosine
  modified_base 52: mod_base = OTHER; note = 2'-Omethylguanosine
  modified_base 53: mod_base = OTHER; note = 2'-fluoroguanosine
  modified_base 54: mod_base = OTHER; note = 2'-Omethyluridine phosphorothiorate
  modified_base 56: mod_base = OTHER; note = 2'-fluorocytosine
  modified_base 58: mod_base = OTHER; note = 2'-fluoroadenosine
  modified_base 61: mod_base = OTHER; note = 2'-fluorocytosine
  modified_base 64: mod_base = OTHER; note = 2'-Omethylguanosine
  modified_base 66: mod_base = OTHER; note = 2'-Omethylcytosine
  modified_base 67: mod_base = OTHER; note = 2'-fluoroguanosine
  modified_base 69: mod_base = OTHER; note = 2'-fluoroadenosine
  modified_base 74: mod_base = OTHER; note = 2'-Omethylcytosine
  modified_base 76: mod_base = OTHER; note = 2'-Omethyladenosine

SEQ ID NO: 7404 - RNA, 76 nt, synthetic construct; identical to SEQ ID NO: 3325
  source 1..76: mol_type = other RNA
  modified_base 1: mod_base = OTHER; note = 2'-Omethyluridine
  modified_base 2: mod_base = OTHER; note = 2'-Omethyladenosine
  modified_base 3: mod_base = OTHER; note = 2'-Omethylcytosine
  modified_base 4: mod_base = OTHER; note = 2'-Omethyladenosine
  modified_base 5: mod_base = OTHER; note = 2'-Omethylcytosine
  modified_base 6: mod_base = OTHER; note = 2'-Omethylcytosine
  modified_base 10: mod_base = OTHER; note = 2'-Omethylguanosine
  modified_base 11: mod_base = OTHER; note = 2'-Omethylcytosine
  modified_base 12: mod_base = OTHER; note = 2'-Omethylguanosine
  modified_base 13: mod_base = OTHER; note = 2'-Omethylcytosine
  modified_base 14: mod_base = OTHER; note = 2'-Omethyladenosine
  modified_base 15: mod_base = OTHER; note = 2'-fluoroadenosine
  modified_base 16: mod_base = OTHER; note = 2'-Omethyluridine
  modified_base 17: mod_base = OTHER; note = 2'-Omethylguanosine
  modified_base 18: mod_base = OTHER; note = 2'-Omethylguanosine
  modified_base 19: mod_base = OTHER; note = 2'-fluoroadenosine
  modified_base 20: mod_base = OTHER; note = 2'-Omethyluridine
  modified_base 25: mod_base = OTHER; note = 2'-Omethylcytosine
  modified_base 33: mod_base = OTHER; note = 2'-fluorouridine
  modified_base 35: mod_base = OTHER; note = Cytosine phosphorothiorate
  modified_base 37: mod_base = OTHER; note = Adenosine phosphorothiorate
  modified_base 38: mod_base = OTHER; note = Adenosine phosphorothiorate
  modified_base 41: mod_base = OTHER; note = 2'-Omethylcytosine
  modified_base 42: mod_base = OTHER; note = 2'-Omethyladenosine
  modified_base 43: mod_base = OTHER; note = 2'-Omethyladenosine
  modified_base 44: mod_base = OTHER; note = 2'-Omethyladenosine
  modified_base 49: mod_base = OTHER; note = 2'-Omethylcytosine
  modified_base 50: mod_base = OTHER; note = 2'-Omethylcytosine
  modified_base 52: mod_base = OTHER; note = 2'-Omethylguanosine
  modified_base 54: mod_base = OTHER; note = 2'-Omethyluridine
  modified_base 55: mod_base = OTHER; note = Uridine phosphorothiorate
  modified_base 56: mod_base = OTHER; note = 2'-Omethylcytosine
  modified_base 57: mod_base = OTHER; note = 2'-fluoroguanosine
  modified_base 59: mod_base = OTHER; note = 2'-Omethylguanosine
  modified_base 61: mod_base = OTHER; note = 2'-Omethylcytosine
  modified_base 65: mod_base = OTHER; note = 2'-Omethylguanosine
  modified_base 73: mod_base = OTHER; note = 2'-Omethylguanosine

SEQ ID NO: 7405 - RNA, 76 nt, synthetic construct
  source 1..76: mol_type = other RNA
ggctccgtggcgcaatggatagcgcattggacttcaaattcaaaggttccgggttgcaagcccggcggagtcgcca

SEQ ID NO: 7406 - RNA, 76 nt, synthetic construct; identical to SEQ ID NO: 625
  source 1..76: mol_type = other RNA
  modified_base 41: mod_base = OTHER; note = 2'-O-(2-Methoxyethyl) 5-methylcytosine

SEQ ID NO: 7407 - RNA, 76 nt, synthetic construct; identical to SEQ ID NO: 625
  source 1..76: mol_type = other RNA
  modified_base 2: mod_base = OTHER; note = 2'-fluoroguanosine
  modified_base 3: mod_base = OTHER; note = 2'-Omethylcytosine
  modified_base 4: mod_base = OTHER; note = Uridine phosphorothiorate
  modified_base 5: mod_base = OTHER; note = 2'-Omethylcytosine
  modified_base 6: mod_base = OTHER; note = 2'-fluorocytosine
  modified_base 11: mod_base = OTHER; note = 2'-Omethylcytosine
  modified_base 12: mod_base = OTHER; note = 2'-Omethylguanosine
  modified_base 13: mod_base = OTHER; note = 2'-Omethylcytosine
  modified_base 14: mod_base = OTHER; note = 2'-fluoroadenosine
  modified_base 16: mod_base = OTHER; note = 2'-Omethyluridine phosphorothiorate
  modified_base 17: mod_base = OTHER; note = 2'-Omethylguanosine
  modified_base 20: mod_base = OTHER; note = 2'-Omethyluridine
  modified_base 26: mod_base = OTHER; note = 2'-fluoroadenosine
  modified_base 27: mod_base = OTHER; note = 2'-fluorouridine
  modified_base 29: mod_base = OTHER; note = Guanosine phosphorothiorate
  modified_base 30: mod_base = OTHER; note = 2'-Omethylguanosine
  modified_base 32: mod_base = OTHER; note = 2'-fluorocytosine
  modified_base 33: mod_base = OTHER; note = 2'-fluorouridine
  modified_base 34: mod_base = OTHER; note = Uridine phosphorothiorate
  modified_base 39: mod_base = OTHER; note = Uridine phosphorothiorate
  modified_base 40: mod_base = OTHER; note = 2'-fluorouridine
  modified_base 41: mod_base = OTHER; note = 2'-Omethylcytosine
  modified_base 42: mod_base = OTHER; note = 2'-fluoroadenosine
  modified_base 43: mod_base = OTHER; note = 2'-fluoroadenosine
  modified_base 45: mod_base = OTHER; note = 2'-Omethylguanosine
  modified_base 46: mod_base = OTHER; note = 2'-Omethylguanosine
  modified_base 48: mod_base = OTHER; note = 2'-Omethyluridine
  modified_base 50: mod_base = OTHER; note = 2'-Omethylcytosine
  modified_base 54: mod_base = OTHER; note = Uridine phosphorothiorate
  modified_base 56: mod_base = OTHER; note = 2'-fluorocytosine
  modified_base 59: mod_base = OTHER; note = 2'-fluoroguanosine phosphorothiorate
  modified_base 60: mod_base = OTHER; note = 2'-Omethyluridine
  modified_base 61: mod_base = OTHER; note = 2'-Omethylcytosine
  modified_base 62: mod_base = OTHER; note = 2'-fluorocytosine
  modified_base 72: mod_base = OTHER; note = 2'-Omethylcytosine
  modified_base 73: mod_base = OTHER; note = Guanosine phosphorothiorate
  modified_base 74: mod_base = OTHER; note = 2'-fluorocytosine
  modified_base 75: mod_base = OTHER; note = Cytosine phosphorothiorate

SEQ ID NO: 7408 - RNA, 76 nt, synthetic construct; identical to SEQ ID NO: 3289
  source 1..76: mol_type = other RNA
  modified_base 1: mod_base = OTHER; note = 2'-Omethylguanosine
  modified_base 4: mod_base = OTHER; note = 2'-Omethyluridine
  modified_base 6: mod_base = OTHER; note = 2'-Omethylguanosine
  modified_base 10: mod_base = OTHER; note = 2'-Omethylguanosine
  modified_base 11: mod_base = OTHER; note = 2'-Omethylcytosine
  modified_base 12: mod_base = OTHER; note = 2'-Omethyluridine
  modified_base 13: mod_base = OTHER; note = 2'-Omethylcytosine
  modified_base 18: mod_base = OTHER; note = 2'-Omethylguanosine
  modified_base 19: mod_base = OTHER; note = 2'-Omethylguanosine
  modified_base 22: mod_base = OTHER; note = 2'-Omethylguanosine
  modified_base 25: mod_base = OTHER; note = 2'-Omethylcytosine
  modified_base 29: mod_base = OTHER; note = 2'-Omethyladenosine
  modified_base 30: mod_base = OTHER; note = 2'-Omethylguanosine
  modified_base 41: mod_base = OTHER; note = 2'-Omethyluridine
  modified_base 42: mod_base = OTHER; note = 2'-Omethylguanosine
  modified_base 43: mod_base = OTHER; note = 2'-Omethyladenosine
  modified_base 45: mod_base = OTHER; note = 2'-Omethylguanosine
  modified_base 49: mod_base = OTHER; note = 2'-Omethylcytosine
  modified_base 50: mod_base = OTHER; note = 2'-Omethyladenosine
  modified_base 52: mod_base = OTHER; note = 2'-Omethylguanosine
  modified_base 56: mod_base = OTHER; note = 2'-Omethylcytosine
  modified_base 59: mod_base = OTHER; note = 2'-Omethylguanosine
  modified_base 61: mod_base = OTHER; note = 2'-Omethylcytosine
  modified_base 62: mod_base = OTHER; note = 2'-Omethylcytosine
  modified_base 65: mod_base = OTHER; note = 2'-Omethylguanosine
  modified_base 66: mod_base = OTHER; note = 2'-Omethyluridine
  modified_base 67: mod_base = OTHER; note = 2'-Omethylcytosine
  modified_base 68: mod_base = OTHER; note = 2'-Omethylcytosine
  modified_base 69: mod_base = OTHER; note = 2'-Omethyladenosine
  modified_base 71: mod_base = OTHER; note = 2'-Omethylguanosine
  modified_base 72: mod_base = OTHER; note = 2'-Omethylcytosine
  modified_base 73: mod_base = OTHER; note = 2'-Omethylguanosine
  modified_base 76: mod_base = OTHER; note = 2'-Omethyladenosine

SEQ ID NO: 7409 - RNA, 76 nt, synthetic construct; identical to SEQ ID NO: 625
  source 1..76: mol_type = other RNA
  modified_base 3: mod_base = OTHER; note = 2'-Omethylcytosine
  modified_base 6: mod_base = OTHER; note = 2'-fluorocytosine
  modified_base 10: mod_base = OTHER; note = 2'-fluoroguanosine
  modified_base 12: mod_base = OTHER; note = 2'-fluoroguanosine
  modified_base 17: mod_base = OTHER; note = 2'-Omethylguanosine
  modified_base 25: mod_base = OTHER; note = 2'-Omethylcytosine
  modified_base 26: mod_base = OTHER; note = 2'-fluoroadenosine phosphorothiorate
  modified_base 27: mod_base = OTHER; note = 2'-fluorouridine
  modified_base 28: mod_base = OTHER; note = 2'-Omethyluridine
  modified_base 29: mod_base = OTHER; note = Guanosine phosphorothiorate
  modified_base 30: mod_base = OTHER; note = 2'-Omethylguanosine
  modified_base 34: mod_base = OTHER; note = 2'-fluorouridine
  modified_base 40: mod_base = OTHER; note = 2'-Omethyluridine
  modified_base 41: mod_base = OTHER; note = 2'-Omethylcytosine
  modified_base 44: mod_base = OTHER; note = 2'-Omethyladenosine
  modified_base 47: mod_base = OTHER; note = 2'-Omethyluridine
  modified_base 51: mod_base = OTHER; note = Guanosine phosphorothiorate
  modified_base 54: mod_base = OTHER; note = 2'-Omethyluridine
  modified_base 57: mod_base = OTHER; note = Guanosine phosphorothiorate
  modified_base 60: mod_base = OTHER; note = 2'-fluorouridine
  modified_base 63: mod_base = OTHER; note = Cytosine phosphorothiorate
  modified_base 66: mod_base = OTHER; note = 2'-fluorocytosine
  modified_base 67: mod_base = OTHER; note = 2'-fluoroguanosine
  modified_base 70: mod_base = OTHER; note = 2'-Omethylguanosine
  modified_base 71: mod_base = OTHER; note = 2'-fluorouridine
  modified_base 72: mod_base = OTHER; note = 2'-fluorocytosine
  modified_base 73: mod_base = OTHER; note = 2'-fluoroguanosine phosphorothiorate
  modified_base 74: mod_base = OTHER; note = Cytosine phosphorothiorate
  modified_base 75: mod_base = OTHER; note = Cytosine phosphorothiorate
  modified_base 76: mod_base = OTHER; note = 2'-fluoroadenosine

SEQ ID NO: 7410 - RNA, 76 nt, synthetic construct; identical to SEQ ID NO: 625
  source 1..76: mol_type = other RNA
  modified_base 1: mod_base = OTHER; note = 2'-Omethylguanosine
  modified_base 2: mod_base = OTHER; note = 2'-Omethylguanosine
  modified_base 3: mod_base = OTHER; note = 2'-Omethylcytosine
  modified_base 4: mod_base = OTHER; note = 2'-Omethyluridine
  modified_base 5: mod_base = OTHER; note = 2'-Omethylcytosine
  modified_base 6: mod_base = OTHER; note = 2'-Omethylcytosine
  modified_base 10: mod_base = OTHER; note = 2'-Omethylguanosine
  modified_base 11: mod_base = OTHER; note = 2'-Omethylcytosine
  modified_base 12: mod_base = OTHER; note = 2'-Omethylguanosine
  modified_base 13: mod_base = OTHER; note = 2'-Omethylcytosine
  modified_base 14: mod_base = OTHER; note = 2'-Omethyladenosine
  modified_base 15: mod_base = OTHER; note = 2'-fluoroadenosine phosphorothiorate
  modified_base 16: mod_base = OTHER; note = 2'-Omethyluridine
  modified_base 17: mod_base = OTHER; note = 2'-Omethylguanosine
  modified_base 18: mod_base = OTHER; note = 2'-fluoroguanosine phosphorothiorate
  modified_base 19: mod_base = OTHER; note = 2'-Omethyladenosine phosphorothiorate
  modified_base 20: mod_base = OTHER; note = 2'-Omethyluridine
  modified_base 21: mod_base = OTHER; note = 2'-fluoroadenosine phosphorothiorate
  modified_base 22: mod_base = OTHER; note = 2'-Omethylguanosine
  modified_base 23: mod_base = OTHER; note = 2'-Omethylcytosine
  modified_base 24: mod_base = OTHER; note = 2'-Omethylguanosine
  modified_base 25: mod_base = OTHER; note = 2'-Omethylcytosine
  modified_base 26: mod_base = OTHER; note = 2'-Omethyladenosine phosphorothiorate
  modified_base 28: mod_base = OTHER; note = 2'-Omethyluridine phosphorothiorate
  modified_base 29: mod_base = OTHER; note = 2'-Omethylguanosine
  modified_base 31: mod_base = OTHER; note = 2'-Omethyladenosine phosphorothiorate
  modified_base 32: mod_base = OTHER; note = 2'-Omethylcytosine phosphorothiorate
  modified_base 33: mod_base = OTHER; note = 2'-fluorouridine
  modified_base 35: mod_base = OTHER; note = Cytosine phosphorothiorate
  modified_base 36: mod_base = OTHER; note = 2'-Omethyladenosine phosphorothiorate
  modified_base 37: mod_base = OTHER; note = Adenosine phosphorothiorate
  modified_base 38: mod_base = OTHER; note = Adenosine phosphorothiorate
  modified_base 39: mod_base = OTHER; note = 2'-Omethyluridine phosphorothiorate
  modified_base 40: mod_base = OTHER; note = 2'-Omethyluridine
  modified_base 41: mod_base = OTHER; note = 2'-Omethylcytosine
  modified_base 42: mod_base = OTHER; note = Adenosine phosphorothiorate
  modified_base 44: mod_base = OTHER; note = 2'-Omethyladenosine
  modified_base 45: mod_base = OTHER; note = Guanosine phosphorothiorate
  modified_base 49: mod_base = OTHER; note = 2'-Omethylcytosine
  modified_base 50: mod_base = OTHER; note = 2'-Omethylcytosine
  modified_base 52: mod_base = OTHER; note = 2'-Omethylguanosine
  modified_base 53: mod_base = OTHER; note = 2'-Omethylguanosine phosphorothiorate
  modified_base 54: mod_base = OTHER; note = Uridine phosphorothiorate
  modified_base 55: mod_base = OTHER; note = Uridine phosphorothiorate
  modified_base 56: mod_base = OTHER; note = Cytosine phosphorothiorate
  modified_base 57: mod_base = OTHER; note = 2'-Omethylguanosine
  modified_base 59: mod_base = OTHER; note = 2'-Omethylguanosine phosphorothiorate
  modified_base 60: mod_base = OTHER; note = 2'-Omethyluridine phosphorothiorate
  modified_base 61: mod_base = OTHER; note = 2'-Omethylcytosine
  modified_base 62: mod_base = OTHER; note = 2'-Omethylcytosine
  modified_base 63: mod_base = OTHER; note = 2'-fluorocytosine
  modified_base 64: mod_base = OTHER; note = 2'-Omethylguanosine
  modified_base 65: mod_base = OTHER; note = 2'-fluoroguanosine
  modified_base 66: mod_base = OTHER; note = 2'-fluorocytosine
  modified_base 67: mod_base = OTHER; note = 2'-Omethylguanosine phosphorothiorate
  modified_base 68: mod_base = OTHER; note = 2'-fluoroguanosine
  modified_base 69: mod_base = OTHER; note = 2'-fluoroadenosine
  modified_base 71: mod_base = OTHER; note = 2'-Omethyluridine phosphorothiorate
  modified_base 72: mod_base = OTHER; note = 2'-Omethylcytosine phosphorothiorate
  modified_base 73: mod_base = OTHER; note = 2'-Omethylguanosine
  modified_base 74: mod_base = OTHER; note = 2'-fluorocytosine phosphorothiorate
  modified_base 75: mod_base = OTHER; note = 2'-fluorocytosine phosphorothiorate
  modified_base 76: mod_base = OTHER; note = 2'-Omethyladenosine

SEQ ID NO: 7411 - RNA, 76 nt, synthetic construct; identical to SEQ ID NO: 3447
  source 1..76: mol_type = other RNA
  modified_base 1: mod_base = OTHER; note = 2'-Omethylguanosine
  modified_base 10: mod_base = OTHER; note = 2'-Omethylguanosine
  modified_base 13: mod_base = OTHER; note = 2'-Omethylcytosine
  modified_base 17: mod_base = OTHER; note = Guanosine phosphorothiorate
  modified_base 18: mod_base = OTHER; note = 2'-Omethylguanosine
  modified_base 19: mod_base = OTHER; note = Adenosine phosphorothiorate
  modified_base 20: mod_base = OTHER; note = 2'-Omethyluridine
  modified_base 25: mod_base = OTHER; note = 2'-Omethylcytosine
  modified_base 29: mod_base = OTHER; note = 2'-Omethylguanosine
  modified_base 33: mod_base = OTHER; note = 2'-fluorouridine
  modified_base 35: mod_base = OTHER; note = Cytosine phosphorothiorate
  modified_base 37: mod_base = OTHER; note = Adenosine phosphorothiorate
  modified_base 38: mod_base = OTHER; note = Adenosine phosphorothiorate
  modified_base 41: mod_base = OTHER; note = 2'-fluorocytosine phosphorothiorate
  modified_base 43: mod_base = OTHER; note = 2'-Omethyladenosine
  modified_base 44: mod_base = OTHER; note = 2'-fluoroadenosine
  modified_base 46: mod_base = OTHER; note = Guanosine phosphorothiorate
  modified_base 50: mod_base = OTHER; note = 2'-Omethylcytosine
  modified_base 52: mod_base = OTHER; note = 2'-Omethylguanosine
  modified_base 54: mod_base = OTHER; note = Uridine phosphorothiorate
  modified_base 55: mod_base = OTHER; note = Uridine phosphorothiorate
  modified_base 56: mod_base = OTHER; note = 2'-Omethylcytosine
  modified_base 57: mod_base = OTHER; note = Guanosine phosphorothiorate
  modified_base 62: mod_base = OTHER; note = 2'-Omethylcytosine
  modified_base 63: mod_base = OTHER; note = 2'-fluorocytosine
  modified_base 65: mod_base = OTHER; note = 2'-Omethylguanosine
  modified_base 71: mod_base = OTHER; note = 2'-Omethylguanosine
  modified_base 73: mod_base = OTHER; note = 2'-Omethylguanosine

SEQ ID NO: 7412 - RNA, 85 nt, synthetic construct; identical to SEQ ID NO: 3317
  source 1..85: mol_type = other RNA
  modified_base 1: mod_base = OTHER; note = 2'-Omethylguanosine phosphorothiorate
  modified_base 2: mod_base = OTHER; note = Cytosine phosphorothiorate
  modified_base 12: mod_base = OTHER; note = 2'-Omethylcytosine
  modified_base 22: mod_base = OTHER; note = 2'-Omethyladenosine
  modified_base 26: mod_base = OTHER; note = 2'-fluoroguanosine
  modified_base 34: mod_base = OTHER; note = 2'-fluorocytosine
  modified_base 35: mod_base = OTHER; note = 2'-fluorouridine
  modified_base 45: mod_base = OTHER; note = 2'-Omethylguanosine
  modified_base 48: mod_base = OTHER; note = 2'-Omethylguanosine phosphorothiorate
  modified_base 82: mod_base = OTHER; note = 2'-fluoroguanosine phosphorothiorate

SEQ ID NO: 7413 - RNA, 85 nt, synthetic construct; identical to SEQ ID NO: 3297
  source 1..85: mol_type = other RNA
  modified_base 1: mod_base = OTHER; note = 2'-Omethylguanosine phosphorothiorate
  modified_base 2: mod_base = OTHER; note = 2'-Omethylcytosine
  modified_base 3: mod_base = OTHER; note = 2'-Omethyluridine
  modified_base 44: mod_base = OTHER; note = Uridine phosphorothiorate
  modified_base 59: mod_base = OTHER; note = 2'-Omethylcytosine
  modified_base 84: mod_base = OTHER; note = Cytosine phosphorothiorate
  modified_base 85: mod_base = OTHER; note = 2'-Omethyladenosine

SEQ ID NO: 7414 - RNA, 76 nt, synthetic construct; identical to SEQ ID NO: 3289
  source 1..76: mol_type = other RNA
  modified_base 1: mod_base = OTHER; note = 2'-Omethylguanosine
  modified_base 2: mod_base = OTHER; note = 2'-Omethylcytosine
  modified_base 3: mod_base = OTHER; note = 2'-Omethylcytosine
  modified_base 4: mod_base = OTHER; note = 2'-Omethyluridine
  modified_base 5: mod_base = OTHER; note = 2'-Omethylguanosine
  modified_base 6: mod_base = OTHER; note = 2'-Omethylguanosine
  modified_base 10: mod_base = OTHER; note = 2'-Omethylguanosine
  modified_base 11: mod_base = OTHER; note = 2'-Omethylcytosine
  modified_base 12: mod_base = OTHER; note = 2'-Omethyluridine
  modified_base 13: mod_base = OTHER; note = 2'-Omethylcytosine
  modified_base 14: mod_base = OTHER; note = 2'-Omethyladenosine
  modified_base 15: mod_base = OTHER; note = 2'-fluoroguanosine
  modified_base 16: mod_base = OTHER; note = 2'-Omethyluridine
  modified_base 18: mod_base = OTHER; note = 2'-Omethylguanosine
  modified_base 19: mod_base = OTHER; note = 2'-Omethylguanosine
  modified_base 20: mod_base = OTHER; note = 2'-fluorouridine
  modified_base 22: mod_base = OTHER; note = 2'-Omethylguanosine
  modified_base 23: mod_base = OTHER; note = 2'-Omethyladenosine
  modified_base 24: mod_base = OTHER; note = 2'-Omethylguanosine
  modified_base 25: mod_base = OTHER; note = 2'-Omethylcytosine
  modified_base 33: mod_base = OTHER; note = 2'-fluorouridine
  modified_base 35: mod_base = OTHER; note = Uridine phosphorothiorate
  modified_base 37: mod_base = OTHER; note = Adenosine phosphorothiorate
  modified_base 38: mod_base = OTHER; note = Adenosine phosphorothiorate
  modified_base 41: mod_base = OTHER; note = 2'-Omethyluridine
  modified_base 42: mod_base = OTHER; note = 2'-Omethylguanosine
  modified_base 43: mod_base = OTHER; note = 2'-Omethyladenosine
  modified_base 44: mod_base = OTHER; note = 2'-Omethylguanosine
  modified_base 49: mod_base = OTHER; note = 2'-Omethylcytosine
  modified_base 50: mod_base = OTHER; note = 2'-Omethyladenosine
  modified_base 52: mod_base = OTHER; note = 2'-Omethylguanosine
  modified_base 54: mod_base = OTHER; note = 2'-Omethyluridine
  modified_base 55: mod_base = OTHER; note = Uridine phosphorothiorate
  modified_base 56: mod_base = OTHER; note = 2'-Omethylcytosine
  modified_base 57: mod_base = OTHER; note = 2'-fluoroadenosine
  modified_base 59: mod_base = OTHER; note = 2'-Omethylguanosine
  modified_base 61: mod_base = OTHER; note = 2'-Omethylcytosine
  modified_base 65: mod_base = OTHER; note = 2'-Omethylguanosine
  modified_base 73: mod_base = OTHER; note = 2'-Omethylguanosine

SEQ ID NO: 7415 - RNA, 76 nt, synthetic construct; identical to SEQ ID NO: 625
  source 1..76: mol_type = other RNA
  modified_base 1: mod_base = OTHER; note = 2'-Omethylguanosine
  modified_base 10: mod_base = OTHER; note = 2'-Omethylguanosine
  modified_base 13: mod_base = OTHER; note = 2'-Omethylcytosine
  modified_base 17: mod_base = OTHER; note = Guanosine phosphorothiorate
  modified_base 18: mod_base = OTHER; note = 2'-Omethylguanosine
  modified_base 19: mod_base = OTHER; note = Adenosine phosphorothiorate
  modified_base 20: mod_base = OTHER; note = 2'-Omethyluridine
  modified_base 25: mod_base = OTHER; note = 2'-Omethylcytosine
  modified_base 29: mod_base = OTHER; note = 2'-Omethylguanosine
  modified_base 33: mod_base = OTHER; note = 2'-fluorouridine
  modified_base 35: mod_base = OTHER; note = Cytosine phosphorothiorate
  modified_base 37: mod_base = OTHER; note = Adenosine phosphorothiorate
  modified_base 38: mod_base = OTHER; note = Adenosine phosphorothiorate
  modified_base 43: mod_base = OTHER; note = 2'-Omethyladenosine
  modified_base 44: mod_base = OTHER; note = 2'-fluoroadenosine
  modified_base 46: mod_base = OTHER; note = Guanosine phosphorothiorate
  modified_base 50: mod_base = OTHER; note = 2'-Omethylcytosine
  modified_base 52: mod_base = OTHER; note = 2'-Omethylguanosine
  modified_base 54: mod_base = OTHER; note = Uridine phosphorothiorate
  modified_base 55: mod_base = OTHER; note = Uridine phosphorothiorate
  modified_base 56: mod_base = OTHER; note = 2'-Omethylcytosine
  modified_base 57: mod_base = OTHER; note = Guanosine phosphorothiorate
  modified_base 62: mod_base = OTHER; note = 2'-Omethylcytosine
  modified_base 65: mod_base = OTHER; note = 2'-Omethylguanosine
  modified_base 71: mod_base = OTHER; note = 2'-Omethyluridine
  modified_base 73: mod_base = OTHER; note = 2'-Omethylguanosine

SEQ ID NO: 7416 - RNA, 76 nt, synthetic construct; identical to SEQ ID NO: 625
  source 1..76: mol_type = other RNA
  modified_base 1: mod_base = OTHER; note = 2'-Omethylguanosine phosphorothiorate
  modified_base 2: mod_base = OTHER; note = 2'-Omethylguanosine phosphorothiorate
  modified_base 3: mod_base = OTHER; note = 2'-Omethylcytosine phosphorothiorate
  modified_base 4: mod_base = OTHER; note = 2'-Omethyluridine phosphorothiorate
  modified_base 5: mod_base = OTHER; note = 2'-Omethylcytosine phosphorothiorate
  modified_base 6: mod_base = OTHER; note = 2'-Omethylcytosine phosphorothiorate
  modified_base 10: mod_base = OTHER; note = 2'-Omethylguanosine
  modified_base 11: mod_base = OTHER; note = 2'-Omethylcytosine
  modified_base 12: mod_base = OTHER; note = 2'-Omethylguanosine
  modified_base 13: mod_base = OTHER; note = 2'-Omethylcytosine
  modified_base 22: mod_base = OTHER; note = 2'-Omethylguanosine
  modified_base 23: mod_base = OTHER; note = 2'-Omethylcytosine
  modified_base 24: mod_base = OTHER; note = 2'-Omethylguanosine
  modified_base 25: mod_base = OTHER; note = 2'-Omethylcytosine
  modified_base 40: mod_base = OTHER; note = 2'-fluorouridine
  modified_base 41: mod_base = OTHER; note = 2'-fluorocytosine
  modified_base 42: mod_base = OTHER; note = 2'-fluoroadenosine
  modified_base 43: mod_base = OTHER; note = 2'-fluoroadenosine
  modified_base 44: mod_base = OTHER; note = 2'-Omethyladenosine
  modified_base 45: mod_base = OTHER; note = 2'-Omethylguanosine
  modified_base 46: mod_base = OTHER; note = 2'-Omethylguanosine
  modified_base 61: mod_base = OTHER; note = 2'-Omethylcytosine
  modified_base 62: mod_base = OTHER; note = 2'-Omethylcytosine
  modified_base 63: mod_base = OTHER; note = 2'-Omethylcytosine
  modified_base 64: mod_base = OTHER; note = 2'-Omethylguanosine
  modified_base 65: mod_base = OTHER; note = 2'-Omethylguanosine
  modified_base 66: mod_base = OTHER; note = 2'-Omethylcytosine
  modified_base 67: mod_base = OTHER; note = 2'-Omethylguanosine
  modified_base 68: mod_base = OTHER; note = 2'-Omethylguanosine
  modified_base 69: mod_base = OTHER; note = 2'-Omethyladenosine

SEQ ID NO: 7417 - RNA, 73 nt, synthetic construct; identical to SEQ ID NO: 935
  source 1..73: mol_type = other RNA
  modified_base 1: mod_base = OTHER; note = 2'-Omethylguanosine
  modified_base 35: mod_base = OTHER; note = Cytosine phosphorothiorate
  modified_base 37: mod_base = OTHER; note = Adenosine phosphorothiorate
  modified_base 38: mod_base = OTHER; note = Adenosine phosphorothiorate
  modified_base 73: mod_base = OTHER; note = 2'-Omethylguanosine

SEQ ID NO: 7418 - RNA, 76 nt, synthetic construct; identical to SEQ ID NO: 625
  source 1..76: mol_type = other RNA
  modified_base 3: mod_base = OTHER; note = 2'-fluorocytosine
  modified_base 4: mod_base = OTHER; note = 2'-fluorouridine
  modified_base 5: mod_base = OTHER; note = 2'-fluorocytosine
  modified_base 6: mod_base = OTHER; note = Cytosine phosphorothiorate
  modified_base 7: mod_base = OTHER; note = Guanosine phosphorothiorate
  modified_base 9: mod_base = OTHER; note = Guanosine phosphorothiorate
  modified_base 12: mod_base = OTHER; note = Guanosine phosphorothiorate
  modified_base 13: mod_base = OTHER; note = 2'-fluorocytosine
  modified_base 16: mod_base = OTHER; note = Uridine phosphorothiorate
  modified_base 22: mod_base = OTHER; note = 2'-Omethylguanosine
  modified_base 30: mod_base = OTHER; note = 2'-Omethylguanosine
  modified_base 33: mod_base = OTHER; note = 2'-fluorouridine phosphorothiorate
  modified_base 34: mod_base = OTHER; note = 2'-Omethyluridine phosphorothiorate
  modified_base 40: mod_base = OTHER; note = 2'-Omethyluridine
  modified_base 41: mod_base = OTHER; note = 2'-fluorocytosine
  modified_base 42: mod_base = OTHER; note = 2'-fluoroadenosine
  modified_base 43: mod_base = OTHER; note = 2'-Omethyladenosine
  modified_base 47: mod_base = OTHER; note = 2'-Omethyluridine
  modified_base 48: mod_base = OTHER; note = 2'-Omethyluridine phosphorothiorate
  modified_base 49: mod_base = OTHER; note = 2'-Omethylcytosine
  modified_base 52: mod_base = OTHER; note = 2'-Omethylguanosine
  modified_base 53: mod_base = OTHER; note = 2'-Omethylguanosine
  modified_base 56: mod_base = OTHER; note = 2'-Omethylcytosine
  modified_base 62: mod_base = OTHER; note = Cytosine phosphorothiorate
  modified_base 63: mod_base = OTHER; note = 2'-fluorocytosine phosphorothiorate
  modified_base 65: mod_base = OTHER; note = 2'-fluoroguanosine
  modified_base 66: mod_base = OTHER; note = 2'-Omethylcytosine
  modified_base 68: mod_base = OTHER; note = Guanosine phosphorothiorate
  modified_base 69: mod_base = OTHER; note = 2'-fluoroadenosine phosphorothiorate
  modified_base 70: mod_base = OTHER; note = 2'-Omethylguanosine phosphorothiorate
  modified_base 71: mod_base = OTHER; note = 2'-fluorouridine
  modified_base 73: mod_base = OTHER; note = 2'-Omethylguanosine
  modified_base 75: mod_base = OTHER; note = 2'-Omethylcytosine

SEQ ID NO: 7419 - RNA, 75 nt, synthetic construct; identical to SEQ ID NO: 3306
  source 1..75: mol_type = other RNA
  modified_base 1: mod_base = OTHER; note = 2'-Omethylguanosine
  modified_base 19: mod_base = OTHER; note = 2'-fluorouridine
  modified_base 20: mod_base = OTHER; note = 2'-Omethyladenosine
  modified_base 21: mod_base = OTHER; note = 2'-Omethylguanosine
  modified_base 72: mod_base = OTHER; note = 2'-Omethyladenosine

SEQ ID NO: 7420 - RNA, 75 nt, synthetic construct; identical to SEQ ID NO: 3336
  source 1..75: mol_type = other RNA
  modified_base 2: mod_base = OTHER; note = 2'-Omethylcytosine phosphorothiorate
  modified_base 15: mod_base = OTHER; note = 2'-fluorouridine
  modified_base 22: mod_base = OTHER; note = 2'-fluoroadenosine
  modified_base 46: mod_base = OTHER; note = 2'-fluorouridine
  modified_base 47: mod_base = OTHER; note = Cytosine phosphorothiorate
  modified_base 58: mod_base = OTHER; note = 2'-fluoroguanosine
  modified_base 63: mod_base = OTHER; note = 2'-Omethyluridine phosphorothiorate
  modified_base 71: mod_base = OTHER; note = 2'-fluorocytosine
  modified_base 72: mod_base = OTHER; note = Guanosine phosphorothiorate

SEQ ID NO: 7421 - RNA, 75 nt, synthetic construct; identical to SEQ ID NO: 1045
  source 1..75: mol_type = other RNA
  modified_base 1: mod_base = OTHER; note = 2'-Omethylguanosine phosphorothiorate
  modified_base 2: mod_base = OTHER; note = 2'-Omethylguanosine
  modified_base 12: mod_base = OTHER; note = 2'-Omethylguanosine
  modified_base 13: mod_base = OTHER; note = Uridine phosphorothiorate
  modified_base 22: mod_base = OTHER; note = 2'-fluoroguanosine
  modified_base 23: mod_base = OTHER; note = 2'-fluorocytosine
  modified_base 27: mod_base = OTHER; note = Cytosine phosphorothiorate
  modified_base 28: mod_base = OTHER; note = 2'-fluorouridine
  modified_base 40: mod_base = OTHER; note = Cytosine phosphorothiorate
  modified_base 41: mod_base = OTHER; note = 2'-fluorocytosine
  modified_base 46: mod_base = OTHER; note = 2'-fluoroadenosine
  modified_base 55: mod_base = OTHER; note = 2'-Omethylcytosine
  modified_base 63: mod_base = OTHER; note = Guanosine phosphorothiorate
  modified_base 64: mod_base = OTHER; note = Guanosine phosphorothiorate
  modified_base 67: mod_base = OTHER; note = 2'-fluoroguanosine
  modified_base 73: mod_base = OTHER; note = Cytosine phosphorothiorate
  modified_base 74: mod_base = OTHER; note = 2'-Omethylcytosine

SEQ ID NO: 7422 - RNA, 76 nt, synthetic construct; identical to SEQ ID NO: 625
  source 1..76: mol_type = other RNA
  modified_base 4: mod_base = OTHER; note = Thymine
  modified_base 27: mod_base = OTHER; note = Thymine
  modified_base 28: mod_base = OTHER; note = Thymine
  modified_base 39: mod_base = OTHER; note = Thymine
  modified_base 40: mod_base = OTHER; note = Thymine
  modified_base 71: mod_base = OTHER; note = Thymine

SEQ ID NO: 7423 - RNA, 86 nt, synthetic construct; identical to SEQ ID NO: 3290
  source 1..86: mol_type = other RNA
  modified_base 79: mod_base = OTHER; note = 2'-Omethyluridine

SEQ ID NO: 7424 - RNA, 75 nt, synthetic construct; identical to SEQ ID NO: 3311
  source 1..75: mol_type = other RNA
  modified_base 1: mod_base = OTHER; note = 2'-fluoroguanosine phosphorothiorate
  modified_base 2: mod_base = OTHER; note = 2'-fluoroguanosine phosphorothiorate
  modified_base 11: mod_base = OTHER; note = 2'-Omethyluridine phosphorothiorate
  modified_base 16: mod_base = OTHER; note = 2'-fluorouridine phosphorothiorate
  modified_base 21: mod_base = OTHER; note = Adenosine phosphorothiorate
  modified_base 22: mod_base = OTHER; note = 2'-fluoroguanosine
  modified_base 25: mod_base = OTHER; note = 2'-fluorocytosine
  modified_base 28: mod_base = OTHER; note = 2'-Omethyluridine
  modified_base 29: mod_base = OTHER; note = 2'-fluoroguanosine
  modified_base 34: mod_base = OTHER; note = 2'-fluorocytosine phosphorothiorate
  modified_base 42: mod_base = OTHER; note = 2'-fluoroadenosine
  modified_base 44: mod_base = OTHER; note = 2'-fluorocytosine
  modified_base 50: mod_base = OTHER; note = 2'-fluoroguanosine
  modified_base 51: mod_base = OTHER; note = 2'-fluoroadenosine phosphorothiorate
  modified_base 53: mod_base = OTHER; note = Uridine phosphorothiorate
  modified_base 62: mod_base = OTHER; note = Cytosine phosphorothiorate
  modified_base 63: mod_base = OTHER; note = Guanosine phosphorothiorate
  modified_base 65: mod_base = OTHER; note = 2'-fluorouridine
  modified_base 68: mod_base = OTHER; note = Adenosine phosphorothiorate
  modified_base 72: mod_base = OTHER; note = Uridine phosphorothiorate
  modified_base 73: mod_base = OTHER; note = Cytosine phosphorothiorate
  modified_base 74: mod_base = OTHER; note = 2'-fluorocytosine phosphorothiorate

SEQ ID NO: 7425 - RNA, 75 nt, synthetic construct; identical to SEQ ID NO: 3311
  source 1..75: mol_type = other RNA
  modified_base 5: mod_base = OTHER; note = 2'-fluorocytosine phosphorothiorate
  modified_base 7: mod_base = OTHER; note = 2'-fluoroadenosine phosphorothiorate
  modified_base 13: mod_base = OTHER; note = 2'-Omethyluridine
  modified_base 21: mod_base = OTHER; note = 2'-fluoroadenosine
  modified_base 30: mod_base = OTHER; note = 2'-Omethylguanosine
  modified_base 42: mod_base = OTHER; note = 2'-fluoroadenosine
  modified_base 49: mod_base = OTHER; note = 2'-fluorocytosine
  modified_base 53: mod_base = OTHER; note = 2'-Omethyluridine
  modified_base 62: mod_base = OTHER; note = 2'-fluorocytosine
  modified_base 68: mod_base = OTHER; note = Adenosine phosphorothiorate
  modified_base 69: mod_base = OTHER; note = 2'-fluoroadenosine
  modified_base 72: mod_base = OTHER; note = Uridine phosphorothiorate
  modified_base 75: mod_base = OTHER; note = 2'-fluoroadenosine

SEQ ID NO: 7426 - RNA, 86 nt, synthetic construct; identical to SEQ ID NO: 3290
  source 1..86: mol_type = other RNA
  modified_base 1: mod_base = OTHER; note = 2'-Omethyladenosine
  modified_base 2: mod_base = OTHER; note = 2'-Omethylcytosine
  modified_base 3: mod_base = OTHER; note = 2'-Omethylcytosine
  modified_base 4: mod_base = OTHER; note = 2'-Omethyladenosine
  modified_base 5: mod_base = OTHER; note = 2'-Omethylguanosine
  modified_base 6: mod_base = OTHER; note = 2'-Omethylguanosine
  modified_base 13: mod_base = OTHER; note = 2'-Omethylguanosine
  modified_base 14: mod_base = OTHER; note = 2'-Omethyladenosine
  modified_base 15: mod_base = OTHER; note = 2'-Omethylguanosine
  modified_base 16: mod_base = OTHER; note = 2'-Omethyluridine
  modified_base 17: mod_base = OTHER; note = 2'-Omethylguanosine
  modified_base 18: mod_base = OTHER; note = 2'-Omethylguanosine
  modified_base 19: mod_base = OTHER; note = Uridine phosphorothiorate
  modified_base 20: mod_base = OTHER; note = 2'-Omethyluridine
  modified_base 21: mod_base = OTHER; note = Adenosine phosphorothiorate
  modified_base 25: mod_base = OTHER; note = 2'-Omethylcytosine
  modified_base 33: mod_base = OTHER; note = 2'-fluorouridine
  modified_base 34: mod_base = OTHER; note = 2'-Omethyluridine
  modified_base 35: mod_base = OTHER; note = Cytosine phosphorothiorate
  modified_base 37: mod_base = OTHER; note = Guanosine phosphorothiorate
  modified_base 38: mod_base = OTHER; note = Adenosine phosphorothiorate
  modified_base 41: mod_base = OTHER; note = 2'-Omethylcytosine
  modified_base 42: mod_base = OTHER; note = 2'-Omethyladenosine
  modified_base 43: mod_base = OTHER; note = 2'-Omethyladenosine
  modified_base 44: mod_base = OTHER; note = 2'-Omethyluridine
  modified_base 59: mod_base = OTHER; note = 2'-Omethylguanosine
  modified_base 60: mod_base = OTHER; note = 2'-Omethyluridine
  modified_base 62: mod_base = OTHER; note = 2'-Omethylguanosine
  modified_base 64: mod_base = OTHER; note = Uridine phosphorothiorate
  modified_base 65: mod_base = OTHER; note = Uridine phosphorothiorate
  modified_base 71: mod_base = OTHER; note = 2'-Omethylcytosine
  modified_base 75: mod_base = OTHER; note = 2'-Omethylcytosine
  modified_base 83: mod_base = OTHER; note = 2'-Omethyladenosine

SEQ ID NO: 7427 - RNA, 76 nt, synthetic construct; identical to SEQ ID NO: 625
  source 1..76: mol_type = other RNA
  modified_base 1: mod_base = OTHER; note = 2'-Omethylguanosine phosphorothiorate
  modified_base 2: mod_base = OTHER; note = 2'-Omethylguanosine phosphorothiorate
  modified_base 3: mod_base = OTHER; note = 2'-Omethylcytosine phosphorothiorate
  modified_base 4: mod_base = OTHER; note = 2'-Omethyluridine phosphorothiorate
  modified_base 5: mod_base = OTHER; note = 2'-Omethylcytosine phosphorothiorate
  modified_base 6: mod_base = OTHER; note = 2'-Omethylcytosine phosphorothiorate
  modified_base 10: mod_base = OTHER; note = 2'-Omethylguanosine
  modified_base 11: mod_base = OTHER; note = 2'-Omethylcytosine
  modified_base 12: mod_base = OTHER; note = 2'-Omethylguanosine
  modified_base 13: mod_base = OTHER; note = 2'-Omethylcytosine
  modified_base 22: mod_base = OTHER; note = 2'-Omethylguanosine
  modified_base 23: mod_base = OTHER; note = 2'-Omethylcytosine
  modified_base 24: mod_base = OTHER; note = 2'-Omethylguanosine
  modified_base 25: mod_base = OTHER; note = 2'-Omethylcytosine
  modified_base 40: mod_base = OTHER; note = 2'-fluorouridine
  modified_base 41: mod_base = OTHER; note = 2'-fluorocytosine
  modified_base 42: mod_base = OTHER; note = 2'-fluoroadenosine
  modified_base 43: mod_base = OTHER; note = 2'-fluoroadenosine
  modified_base 49: mod_base = OTHER; note = 2'-Omethylcytosine
  modified_base 50: mod_base = OTHER; note = 2'-Omethylcytosine
  modified_base 51: mod_base = OTHER; note = 2'-Omethylguanosine
  modified_base 52: mod_base = OTHER; note = 2'-Omethylguanosine
  modified_base 53: mod_base = OTHER; note = 2'-Omethylguanosine
  modified_base 54: mod_base = OTHER; note = Uridine phosphorothiorate
  modified_base 55: mod_base = OTHER; note = Uridine phosphorothiorate
  modified_base 56: mod_base = OTHER; note = Cytosine phosphorothiorate
  modified_base 57: mod_base = OTHER; note = Guanosine phosphorothiorate

SEQ ID NO: 7428 - RNA, 75 nt, synthetic construct; identical to SEQ ID NO: 3311
  source 1..75: mol_type = other RNA
  modified_base 1: mod_base = OTHER; note = 2'-Omethylguanosine
  modified_base 2: mod_base = OTHER; note = 2'-fluoroguanosine phosphorothiorate
  modified_base 3: mod_base = OTHER; note = 2'-fluorouridine phosphorothiorate
  modified_base 11: mod_base = OTHER; note = 2'-fluorouridine
  modified_base 16: mod_base = OTHER; note = 2'-fluorouridine phosphorothiorate
  modified_base 21: mod_base = OTHER; note = Adenosine phosphorothiorate
  modified_base 22: mod_base = OTHER; note = 2'-fluoroguanosine
  modified_base 24: mod_base = OTHER; note = 2'-fluoroadenosine
  modified_base 25: mod_base = OTHER; note = 2'-fluorocytosine
  modified_base 26: mod_base = OTHER; note = 2'-fluorouridine phosphorothiorate
  modified_base 28: mod_base = OTHER; note = 2'-Omethyluridine
  modified_base 32: mod_base = OTHER; note = 2'-fluorocytosine
  modified_base 36: mod_base = OTHER; note = 2'-fluoroadenosine
  modified_base 38: mod_base = OTHER; note = 2'-fluoroadenosine phosphorothiorate
  modified_base 49: mod_base = OTHER; note = 2'-fluorocytosine phosphorothiorate
  modified_base 56: mod_base = OTHER; note = 2'-Omethylguanosine
  modified_base 61: mod_base = OTHER; note = Uridine phosphorothiorate
  modified_base 62: mod_base = OTHER; note = 2'-fluorocytosine
  modified_base 64: mod_base = OTHER; note = 2'-fluoroguanosine
  modified_base 67: mod_base = OTHER; note = Guanosine phosphorothiorate
  modified_base 68: mod_base = OTHER; note = 2'-fluoroadenosine
  modified_base 74: mod_base = OTHER; note = Cytosine phosphorothiorate
  modified_base 75: mod_base = OTHER; note = 2'-Omethyladenosine

SEQ ID NO: 7429 - RNA, 76 nt, synthetic construct; identical to SEQ ID NO: 3325
  source 1..76: mol_type = other RNA
  modified_base 1: mod_base = OTHER; note = 2'-Omethyluridine
  modified_base 14: mod_base = OTHER; note = 2'-Omethyladenosine
  modified_base 15: mod_base = OTHER; note = 2'-Omethyladenosine
  modified_base 16: mod_base = OTHER; note = 2'-Omethyluridine
  modified_base 17: mod_base = OTHER; note = 2'-Omethylguanosine
  modified_base 18: mod_base = OTHER; note = 2'-Omethylguanosine
  modified_base 19: mod_base = OTHER; note = Adenosine phosphorothiorate
  modified_base 20: mod_base = OTHER; note = 2'-Omethyluridine
  modified_base 21: mod_base = OTHER; note = Adenosine phosphorothiorate
  modified_base 33: mod_base = OTHER; note = 2'-fluorouridine
  modified_base 34: mod_base = OTHER; note = 2'-Omethyluridine
  modified_base 35: mod_base = OTHER; note = Cytosine phosphorothiorate
  modified_base 37: mod_base = OTHER; note = Adenosine phosphorothiorate
  modified_base 38: mod_base = OTHER; note = Adenosine phosphorothiorate
  modified_base 41: mod_base = OTHER; note = 2'-Omethylcytosine
  modified_base 42: mod_base = OTHER; note = 2'-Omethyladenosine
  modified_base 43: mod_base = OTHER; note = 2'-Omethyladenosine
  modified_base 44: mod_base = OTHER; note = 2'-Omethyladenosine
  modified_base 50: mod_base = OTHER; note = 2'-Omethylcytosine
  modified_base 52: mod_base = OTHER; note = 2'-Omethylguanosine
  modified_base 73: mod_base = OTHER; note = 2'-Omethylguanosine

SEQ ID NO: 7430 - RNA, 74 nt, synthetic construct; identical to SEQ ID NO: 3293
  source 1..74: mol_type = other RNA
  modified_base 1: mod_base = OTHER; note = 2'-fluoroadenosine
  modified_base 2: mod_base = OTHER; note = 2'-fluorocytosine
  modified_base 4: mod_base = OTHER; note = Uridine phosphorothiorate
  modified_base 6: mod_base = OTHER; note = Guanosine phosphorothiorate
  modified_base 10: mod_base = OTHER; note = 2'-Omethylcytosine phosphorothiorate
  modified_base 17: mod_base = OTHER; note = 2'-fluoroguanosine phosphorothiorate
  modified_base 24: mod_base = OTHER; note = 2'-fluoroguanosine phosphorothiorate
  modified_base 27: mod_base = OTHER; note = 2'-fluorouridine
  modified_base 37: mod_base = OTHER; note = 2'-fluorouridine
  modified_base 44: mod_base = OTHER; note = Guanosine phosphorothiorate
  modified_base 49: mod_base = OTHER; note = 2'-fluoroguanosine
  modified_base 50: mod_base = OTHER; note = Uridine phosphorothiorate
  modified_base 56: mod_base = OTHER; note = 2'-fluoroadenosine phosphorothiorate
  modified_base 62: mod_base = OTHER; note = Guanosine phosphorothiorate
  modified_base 73: mod_base = OTHER; note = 2'-Omethylcytosine phosphorothiorate

SEQ ID NO: 7431 - RNA, 86 nt, synthetic construct; identical to SEQ ID NO: 3290
  source 1..86: mol_type = other RNA
  modified_base 51: mod_base = OTHER; note = 2'-Omethyladenosine

SEQ ID NO: 7432 - RNA, 76 nt, synthetic construct
  source 1..76: mol_type = other RNA
ggctccgtggcgcaatggatagcgcagtcgacttcaaattgacaggttccgggttcgagtcccggcggagtcgcca

SEQ ID NO: 7433 - RNA, 73 nt, synthetic construct; identical to SEQ ID NO: 935
  source 1..73: mol_type = other RNA
  modified_base 1: mod_base = OTHER; note = 2'-Omethylguanosine phosphorothiorate
  modified_base 2: mod_base = OTHER; note = 2'-Omethylguanosine
  modified_base 3: mod_base = OTHER; note = 2'-Omethylcytosine
  modified_base 4: mod_base = OTHER; note = 2'-Omethyluridine
  modified_base 5: mod_base = OTHER; note = 2'-Omethylcytosine
  modified_base 6: mod_base = OTHER; note = 2'-Omethylcytosine
  modified_base 14: mod_base = OTHER; note = 2'-Omethyladenosine
  modified_base 15: mod_base = OTHER; note = 2'-fluoroadenosine
  modified_base 16: mod_base = OTHER; note = 2'-Omethyluridine
  modified_base 17: mod_base = OTHER; note = 2'-Omethylguanosine
  modified_base 18: mod_base = OTHER; note = 2'-Omethylguanosine
  modified_base 19: mod_base = OTHER; note = 2'-fluoroadenosine
  modified_base 20: mod_base = OTHER; note = 2'-Omethyluridine
  modified_base 54: mod_base = OTHER; note = 2'-Omethyluridine
  modified_base 56: mod_base = OTHER; note = 2'-Omethylcytosine
  modified_base 57: mod_base = OTHER; note = 2'-fluoroguanosine
  modified_base 59: mod_base = OTHER; note = 2'-Omethylguanosine
  modified_base 72: mod_base = OTHER; note = 2'-Omethylcytosine

SEQ ID NO: 7434 - RNA, 85 nt, synthetic construct; identical to SEQ ID NO: 3286
  source 1..85: mol_type = other RNA
  modified_base 10: mod_base = OTHER; note = Cytosine phosphorothiorate
  modified_base 30: mod_base = OTHER; note = 2'-fluoroadenosine
  modified_base 54: mod_base = OTHER; note = 2'-Omethylcytosine
  modified_base 64: mod_base = OTHER; note = 2'-fluorouridine
  modified_base 85: mod_base = OTHER; note = 2'-fluoroadenosine

SEQ ID NO: 7435 - RNA, 86 nt, synthetic construct; identical to SEQ ID NO: 3290
  source 1..86: mol_type = other RNA
  modified_base 10: mod_base = OTHER; note = Guanosine phosphorothiorate

SEQ ID NO: 7436 - RNA, 75 nt, synthetic construct; identical to SEQ ID NO: 3299
  source 1..75: mol_type = other RNA
  modified_base 1: mod_base = OTHER; note = 2'-Omethylcytosine phosphorothiorate
  modified_base 3: mod_base = OTHER; note = Uridine phosphorothiorate
  modified_base 14: mod_base = OTHER; note = Guanosine phosphorothiorate
  modified_base 26: mod_base = OTHER; note = 2'-Omethyluridine phosphorothiorate
  modified_base 27: mod_base = OTHER; note = 2'-fluorocytosine
  modified_base 37: mod_base = OTHER; note = 2'-Omethyladenosine phosphorothiorate
  modified_base 73: mod_base = OTHER; note = Cytosine phosphorothiorate
  modified_base 74: mod_base = OTHER; note = Cytosine phosphorothiorate

SEQ ID NO: 7437 - RNA, 75 nt, synthetic construct; identical to SEQ ID NO: 1045
  source 1..75: mol_type = other RNA
  modified_base 1: mod_base = OTHER; note = 2'-Omethylguanosine
  modified_base 2: mod_base = OTHER; note = 2'-Omethylguanosine
  modified_base 23: mod_base = OTHER; note = 2'-fluorocytosine
  modified_base 37: mod_base = OTHER; note = 2'-fluoroadenosine
  modified_base 46: mod_base = OTHER; note = 2'-fluoroadenosine
  modified_base 54: mod_base = OTHER; note = 2'-Omethyluridine
  modified_base 63: mod_base = OTHER; note = 2'-fluoroguanosine

SEQ ID NO: 7438 - RNA, 76 nt, synthetic construct; identical to SEQ ID NO: 625
  source 1..76: mol_type = other RNA
  modified_base 1: mod_base = OTHER; note = 2'-Omethylguanosine
  modified_base 2: mod_base = OTHER; note = 2'-Omethylguanosine
  modified_base 3: mod_base = OTHER; note = 2'-fluorocytosine
  modified_base 4: mod_base = OTHER; note = 2'-Omethyluridine phosphorothiorate
  modified_base 5: mod_base = OTHER; note = 2'-fluorocytosine
  modified_base 10: mod_base = OTHER; note = 2'-fluoroguanosine
  modified_base 11: mod_base = OTHER; note = Cytosine phosphorothiorate
  modified_base 12: mod_base = OTHER; note = 2'-Omethylguanosine
  modified_base 14: mod_base = OTHER; note = 2'-Omethyladenosine
  modified_base 17: mod_base = OTHER; note = 2'-Omethylguanosine
  modified_base 21: mod_base = OTHER; note = Adenosine phosphorothiorate
  modified_base 22: mod_base = OTHER; note = 2'-Omethylguanosine
  modified_base 24: mod_base = OTHER; note = 2'-Omethylguanosine
  modified_base 25: mod_base = OTHER; note = 2'-fluorocytosine
  modified_base 30: mod_base = OTHER; note = 2'-Omethylguanosine
  modified_base 31: mod_base = OTHER; note = 2'-Omethyladenosine
  modified_base 36: mod_base = OTHER; note = Adenosine phosphorothiorate
  modified_base 42: mod_base = OTHER; note = 2'-Omethyladenosine
  modified_base 44: mod_base = OTHER; note = 2'-fluoroadenosine
  modified_base 47: mod_base = OTHER; note = 2'-fluorouridine
  modified_base 50: mod_base = OTHER; note = 2'-fluorocytosine phosphorothiorate
  modified_base 52: mod_base = OTHER; note = Guanosine phosphorothiorate
  modified_base 54: mod_base = OTHER; note = 2'-fluorouridine
  modified_base 61: mod_base = OTHER; note = 2'-fluorocytosine
  modified_base 65: mod_base = OTHER; note = 2'-fluoroguanosine
  modified_base 67: mod_base = OTHER; note = 2'-fluoroguanosine
  modified_base 68: mod_base = OTHER; note = Guanosine phosphorothiorate
  modified_base 69: mod_base = OTHER; note = 2'-fluoroadenosine
  modified_base 70: mod_base = OTHER; note = 2'-Omethylguanosine phosphorothiorate
  modified_base 71: mod_base = OTHER; note = 2'-Omethyluridine
  modified_base 72: mod_base = OTHER; note = 2'-Omethylcytosine
  modified_base 73: mod_base = OTHER; note = 2'-fluoroguanosine
  modified_base 74: mod_base = OTHER; note = Cytosine phosphorothiorate
  modified_base 75: mod_base = OTHER; note = 2'-Omethylcytosine

SEQ ID NO: 7439 - RNA, 75 nt, synthetic construct; identical to SEQ ID NO: 1045
  source 1..75: mol_type = other RNA
  modified_base 2: mod_base = OTHER; note = 2'-Omethylguanosine phosphorothiorate
  modified_base 3: mod_base = OTHER; note = 2'-Omethyluridine phosphorothiorate
  modified_base 5: mod_base = OTHER; note = 2'-fluorocytosine phosphorothiorate
  modified_base 6: mod_base = OTHER; note = 2'-Omethylcytosine phosphorothiorate
  modified_base 15: mod_base = OTHER; note = 2'-fluoroadenosine phosphorothiorate
  modified_base 16: mod_base = OTHER; note = 2'-Omethyluridine phosphorothiorate
  modified_base 28: mod_base = OTHER; note = 2'-Omethyluridine
  modified_base 45: mod_base = OTHER; note = 2'-Omethylguanosine
  modified_base 49: mod_base = OTHER; note = 2'-Omethylcytosine
  modified_base 58: mod_base = OTHER; note = 2'-Omethylguanosine
  modified_base 59: mod_base = OTHER; note = 2'-fluorouridine
  modified_base 60: mod_base = OTHER; note = 2'-Omethylcytosine
  modified_base 62: mod_base = OTHER; note = 2'-Omethylcytosine phosphorothiorate
  modified_base 72: mod_base = OTHER; note = 2'-Omethyluridine
  modified_base 73: mod_base = OTHER; note = 2'-Omethylcytosine phosphorothiorate
  modified_base 74: mod_base = OTHER; note = 2'-Omethylcytosine phosphorothiorate
  modified_base 75: mod_base = OTHER; note = 2'-Omethyladenosine

SEQ ID NO: 7440 - RNA, 85 nt, synthetic construct; identical to SEQ ID NO: 3297
  source 1..85: mol_type = other RNA
  modified_base 1: mod_base = OTHER; note = 2'-Omethylguanosine phosphorothiorate
  modified_base 2: mod_base = OTHER; note = Cytosine phosphorothiorate
  modified_base 17: mod_base = OTHER; note = 2'-Omethylguanosine phosphorothiorate
  modified_base 25: mod_base = OTHER; note = 2'-Omethylcytosine
  modified_base 36: mod_base = OTHER; note = 2'-fluoroadenosine
  modified_base 46: mod_base = OTHER; note = Guanosine phosphorothiorate

SEQ ID NO: 7441 - RNA, 76 nt, synthetic construct; identical to SEQ ID NO: 3289
  source 1..76: mol_type = other RNA
  modified_base 1: mod_base = OTHER; note = 2'-Omethylguanosine
  modified_base 14: mod_base = OTHER; note = 2'-Omethyladenosine phosphorothiorate
  modified_base 15: mod_base = OTHER; note = 2'-Omethylguanosine phosphorothiorate
  modified_base 16: mod_base = OTHER; note = 2'-Omethyluridine phosphorothiorate
  modified_base 18: mod_base = OTHER; note = 2'-Omethylguanosine phosphorothiorate
  modified_base 19: mod_base = OTHER; note = 2'-Omethylguanosine phosphorothiorate
  modified_base 20: mod_base = OTHER; note = Uridine phosphorothiorate
  modified_base 21: mod_base = OTHER; note = Adenosine phosphorothiorate
  modified_base 50: mod_base = OTHER; note = 2'-Omethyladenosine
  modified_base 52: mod_base = OTHER; note = 2'-Omethylguanosine
  modified_base 73: mod_base = OTHER; note = 2'-Omethylguanosine

SEQ ID NO: 7442 - RNA, 76 nt, synthetic construct; identical to SEQ ID NO: 3295
  source 1..76: mol_type = other RNA
  modified_base 1: mod_base = OTHER; note = 2'-fluorocytosine
  modified_base 4: mod_base = OTHER; note = 2'-Omethyluridine phosphorothiorate
  modified_base 15: mod_base = OTHER; note = Guanosine phosphorothiorate
  modified_base 26: mod_base = OTHER; note = 2'-Omethylguanosine
  modified_base 38: mod_base = OTHER; note = 2'-fluoroadenosine phosphorothiorate
  modified_base 43: mod_base = OTHER; note = 2'-fluorouridine
  modified_base 48: mod_base = OTHER; note = 2'-Omethylcytosine
  modified_base 52: mod_base = OTHER; note = 2'-Omethylguanosine phosphorothiorate

SEQ ID NO: 7443 - RNA, 76 nt, synthetic construct; identical to SEQ ID NO: 625
  source 1..76: mol_type = other RNA
  modified_base 54: mod_base = OTHER; note = Thymine
  modified_base 55: mod_base = OTHER; note = Thymine
  modified_base 60: mod_base = OTHER; note = Thymine

SEQ ID NO: 7444 - RNA, 75 nt, synthetic construct; identical to SEQ ID NO: 1045
  source 1..75: mol_type = other RNA
  modified_base 1: mod_base = OTHER; note = 2'-fluoroguanosine phosphorothiorate
  modified_base 2: mod_base = OTHER; note = 2'-Omethylguanosine phosphorothiorate
  modified_base 12: mod_base = OTHER; note = Guanosine phosphorothiorate
  modified_base 22: mod_base = OTHER; note = Guanosine phosphorothiorate
  modified_base 24: mod_base = OTHER; note = 2'-fluoroadenosine
  modified_base 28: mod_base = OTHER; note = 2'-Omethyluridine
  modified_base 36: mod_base = OTHER; note = 2'-fluoroadenosine
  modified_base 59: mod_base = OTHER; note = 2'-Omethyluridine
  modified_base 60: mod_base = OTHER; note = 2'-fluorocytosine
  modified_base 65: mod_base = OTHER; note = 2'-fluorouridine
  modified_base 73: mod_base = OTHER; note = Cytosine phosphorothiorate
  modified_base 74: mod_base = OTHER; note = 2'-Omethylcytosine

SEQ ID NO: 7445 - RNA, 76 nt, synthetic construct; identical to SEQ ID NO: 625
  source 1..76: mol_type = other RNA
  modified_base 2: mod_base = OTHER; note = 2'-Omethylguanosine phosphorothiorate
  modified_base 3: mod_base = OTHER; note = 2'-fluorocytosine
  modified_base 5: mod_base = OTHER; note = 2'-fluorocytosine
  modified_base 7: mod_base = OTHER; note = Guanosine phosphorothiorate
  modified_base 10: mod_base = OTHER; note = 2'-Omethylguanosine
  modified_base 11: mod_base = OTHER; note = 2'-Omethylcytosine
  modified_base 12: mod_base = OTHER; note = 2'-Omethylguanosine
  modified_base 13: mod_base = OTHER; note = 2'-Omethylcytosine phosphorothiorate
  modified_base 14: mod_base = OTHER; note = 2'-fluoroadenosine
  modified_base 15: mod_base = OTHER; note = Adenosine phosphorothiorate
  modified_base 16: mod_base = OTHER; note = 2'-fluorouridine
  modified_base 23: mod_base = OTHER; note = Cytosine phosphorothiorate
  modified_base 24: mod_base = OTHER; note = 2'-Omethylguanosine
  modified_base 27: mod_base = OTHER; note = 2'-Omethyluridine
  modified_base 29: mod_base = OTHER; note = 2'-Omethylguanosine
  modified_base 31: mod_base = OTHER; note = 2'-Omethyladenosine
  modified_base 32: mod_base = OTHER; note = 2'-fluorocytosine
  modified_base 34: mod_base = OTHER; note = 2'-Omethyluridine
  modified_base 38: mod_base = OTHER; note = 2'-fluoroadenosine
  modified_base 40: mod_base = OTHER; note = 2'-fluorouridine
  modified_base 41: mod_base = OTHER; note = Cytosine phosphorothiorate
  modified_base 43: mod_base = OTHER; note = 2'-Omethyladenosine
  modified_base 46: mod_base = OTHER; note = 2'-fluoroguanosine
  modified_base 48: mod_base = OTHER; note = 2'-fluorouridine
  modified_base 49: mod_base = OTHER; note = Cytosine phosphorothiorate
  modified_base 50: mod_base = OTHER; note = 2'-Omethylcytosine phosphorothiorate
  modified_base 51: mod_base = OTHER; note = 2'-Omethylguanosine
  modified_base 53: mod_base = OTHER; note = Guanosine phosphorothiorate
  modified_base 54: mod_base = OTHER; note = 2'-Omethyluridine
  modified_base 56: mod_base = OTHER; note = 2'-Omethylcytosine
  modified_base 57: mod_base = OTHER; note = 2'-fluoroguanosine
  modified_base 59: mod_base = OTHER; note = 2'-Omethylguanosine
  modified_base 61: mod_base = OTHER; note = 2'-Omethylcytosine
  modified_base 63: mod_base = OTHER; note = 2'-fluorocytosine
  modified_base 66: mod_base = OTHER; note = 2'-Omethylcytosine
  modified_base 68: mod_base = OTHER; note = 2'-fluoroguanosine
  modified_base 69: mod_base = OTHER; note = 2'-fluoroadenosine
  modified_base 71: mod_base = OTHER; note = 2'-Omethyluridine
  modified_base 74: mod_base = OTHER; note = 2'-fluorocytosine
  modified_base 76: mod_base = OTHER; note = 2'-Omethyladenosine

SEQ ID NO: 7446 - RNA, 86 nt, synthetic construct; identical to SEQ ID NO: 3290
  source 1..86: mol_type = other RNA
  modified_base 1: mod_base = OTHER; note = 2'-Omethyladenosine
  modified_base 2: mod_base = OTHER; note = 2'-Omethylcytosine
  modified_base 3: mod_base = OTHER; note = 2'-Omethylcytosine
  modified_base 4: mod_base = OTHER; note = 2'-Omethyladenosine
  modified_base 5: mod_base = OTHER; note = 2'-Omethylguanosine
  modified_base 6: mod_base = OTHER; note = 2'-Omethylguanosine
  modified_base 71: mod_base = OTHER; note = 2'-Omethylcytosine
  modified_base 72: mod_base = OTHER; note = 2'-Omethylcytosine
  modified_base 73: mod_base = OTHER; note = 2'-fluorocytosine
  modified_base 74: mod_base = OTHER; note = 2'-Omethyladenosine
  modified_base 75: mod_base = OTHER; note = 2'-Omethylcytosine
  modified_base 76: mod_base = OTHER; note = 2'-Omethyluridine
  modified_base 77: mod_base = OTHER; note = 2'-Omethylcytosine
  modified_base 78: mod_base = OTHER; note = 2'-Omethylcytosine
  modified_base 83: mod_base = OTHER; note = 2'-Omethyladenosine

SEQ ID NO: 7447 - RNA, 75 nt, synthetic construct; identical to SEQ ID NO: 3336
  source 1..75: mol_type = other RNA
  modified_base 1: mod_base = OTHER; note = Cytosine phosphorothiorate
  modified_base 10: mod_base = OTHER; note = 2'-fluorocytosine
  modified_base 13: mod_base = OTHER; note = 2'-Omethyladenosine
  modified_base 21: mod_base = OTHER; note = Guanosine phosphorothiorate
  modified_base 23: mod_base = OTHER; note = 2'-fluoroguanosine
  modified_base 26: mod_base = OTHER; note = 2'-fluorouridine phosphorothiorate
  modified_base 37: mod_base = OTHER; note = 2'-fluoroadenosine
  modified_base 38: mod_base = OTHER; note = 2'-fluorouridine
  modified_base 42: mod_base = OTHER; note = 2'-Omethyladenosine phosphorothiorate
  modified_base 50: mod_base = OTHER; note = 2'-fluoroguanosine
  modified_base 51: mod_base = OTHER; note = Guanosine phosphorothiorate
  modified_base 57: mod_base = OTHER; note = 2'-Omethyladenosine phosphorothiorate
  modified_base 58: mod_base = OTHER; note = Guanosine phosphorothiorate
  modified_base 62: mod_base = OTHER; note = Cytosine phosphorothiorate
  modified_base 64: mod_base = OTHER; note = 2'-fluoroguanosine phosphorothiorate
  modified_base 72: mod_base = OTHER; note = 2'-Omethylguanosine
  modified_base 74: mod_base = OTHER; note = 2'-fluorocytosine

SEQ ID NO: 7448 - RNA, 85 nt, synthetic construct; identical to SEQ ID NO: 3297
  source 1..85: mol_type = other RNA
  modified_base 1: mod_base = OTHER; note = 2'-Omethylguanosine phosphorothiorate
  modified_base 2: mod_base = OTHER; note = 2'-Omethylcytosine phosphorothiorate
  modified_base 8: mod_base = OTHER; note = 2'-fluorouridine
  modified_base 14: mod_base = OTHER; note = 2'-Omethyladenosine phosphorothiorate
  modified_base 24: mod_base = OTHER; note = Guanosine phosphorothiorate
  modified_base 30: mod_base = OTHER; note = 2'-fluoroguanosine phosphorothiorate
  modified_base 61: mod_base = OTHER; note = Guanosine phosphorothiorate
  modified_base 63: mod_base = OTHER; note = 2'-Omethyluridine

SEQ ID NO: 7449 - RNA, 76 nt, synthetic construct; identical to SEQ ID NO: 625
  source 1..76: mol_type = other RNA
  modified_base 1: mod_base = OTHER; note = 2'-Omethylguanosine phosphorothiorate
  modified_base 2: mod_base = OTHER; note = 2'-Omethylguanosine phosphorothiorate
  modified_base 3: mod_base = OTHER; note = 2'-Omethylcytosine
  modified_base 4: mod_base = OTHER; note = 2'-Omethyluridine
  modified_base 5: mod_base = OTHER; note = 2'-Omethylcytosine
  modified_base 6: mod_base = OTHER; note = 2'-Omethylcytosine
  modified_base 10: mod_base = OTHER; note = 2'-Omethylguanosine
  modified_base 11: mod_base = OTHER; note = 2'-Omethylcytosine
  modified_base 12: mod_base = OTHER; note = 2'-Omethylguanosine
  modified_base 13: mod_base = OTHER; note = 2'-Omethylcytosine
  modified_base 14: mod_base = OTHER; note = 2'-Omethyladenosine
  modified_base 15: mod_base = OTHER; note = 2'-fluoroadenosine
  modified_base 16: mod_base = OTHER; note = 2'-Omethyluridine
  modified_base 17: mod_base = OTHER; note = 2'-Omethylguanosine
  modified_base 18: mod_base = OTHER; note = 2'-Omethylguanosine
  modified_base 19: mod_base = OTHER; note = 2'-fluoroadenosine
  modified_base 20: mod_base = OTHER; note = 2'-Omethyluridine
  modified_base 22: mod_base = OTHER; note = 2'-Omethylguanosine
  modified_base 23: mod_base = OTHER; note = 2'-Omethylcytosine
  modified_base 24: mod_base = OTHER; note = 2'-Omethylguanosine
  modified_base 25: mod_base = OTHER; note = 2'-Omethylcytosine
  modified_base 33: mod_base = OTHER; note = 2'-fluorouridine
  modified_base 35: mod_base = OTHER; note = Cytosine phosphorothiorate
  modified_base 37: mod_base = OTHER; note = Adenosine phosphorothiorate
  modified_base 38: mod_base = OTHER; note = Adenosine phosphorothiorate
  modified_base 40: mod_base = OTHER; note = 2'-fluorouridine
  modified_base 41: mod_base = OTHER; note = 2'-fluorocytosine
  modified_base 42: mod_base = OTHER; note = 2'-fluoroadenosine
  modified_base 43: mod_base = OTHER; note = 2'-fluoroadenosine
  modified_base 49: mod_base = OTHER; note = 2'-Omethylcytosine
  modified_base 50: mod_base = OTHER; note = 2'-Omethylcytosine
  modified_base 51: mod_base = OTHER; note = 2'-Omethylguanosine
  modified_base 52: mod_base = OTHER; note = 2'-Omethylguanosine
  modified_base 53: mod_base = OTHER; note = 2'-Omethylguanosine
  modified_base 54: mod_base = OTHER; note = 2'-Omethyluridine
  modified_base 56: mod_base = OTHER; note = 2'-Omethylcytosine
  modified_base 59: mod_base = OTHER; note = 2'-Omethylguanosine
  modified_base 61: mod_base = OTHER; note = 2'-Omethylcytosine
  modified_base 62: mod_base = OTHER; note = 2'-Omethylcytosine
  modified_base 63: mod_base = OTHER; note = 2'-fluorocytosine
  modified_base 64: mod_base = OTHER; note = 2'-Omethylguanosine
  modified_base 65: mod_base = OTHER; note = 2'-Omethylguanosine
  modified_base 66: mod_base = OTHER; note = 2'-Omethylcytosine
  modified_base 67: mod_base = OTHER; note = 2'-Omethylguanosine
  modified_base 68: mod_base = OTHER; note = 2'-Omethylguanosine
  modified_base 73: mod_base = OTHER; note = 2'-Omethylguanosine

SEQ ID NO: 7450 - RNA, 75 nt, synthetic construct; identical to SEQ ID NO: 1045
  source 1..75: mol_type = other RNA
  modified_base 1: mod_base = OTHER; note = 2'-Omethylguanosine phosphorothiorate
  modified_base 9: mod_base = OTHER; note = Guanosine phosphorothiorate
  modified_base 10: mod_base = OTHER; note = Guanosine phosphorothiorate
  modified_base 29: mod_base = OTHER; note = 2'-Omethylguanosine
  modified_base 38: mod_base = OTHER; note = 2'-fluoroadenosine
  modified_base 49: mod_base = OTHER; note = 2'-fluorocytosine phosphorothiorate
  modified_base 55: mod_base = OTHER; note = 2'-fluorocytosine phosphorothiorate
  modified_base 67: mod_base = OTHER; note = Guanosine phosphorothiorate
  modified_base 73: mod_base = OTHER; note = Cytosine phosphorothiorate
  modified_base 74: mod_base = OTHER; note = 2'-Omethylcytosine

SEQ ID NO: 7451 - RNA, 85 nt, synthetic construct; identical to SEQ ID NO: 3317
  source 1..85: mol_type = other RNA
  modified_base 1: mod_base = OTHER; note = 2'-Omethylguanosine phosphorothiorate
  modified_base 2: mod_base = OTHER; note = Cytosine phosphorothiorate
  modified_base 4: mod_base = OTHER; note = Guanosine phosphorothiorate
  modified_base 10: mod_base = OTHER; note = 2'-fluoroguanosine
  modified_base 17: mod_base = OTHER; note = 2'-fluoroguanosine
  modified_base 24: mod_base = OTHER; note = 2'-Omethylguanosine
  modified_base 25: mod_base = OTHER; note = 2'-fluorocytosine phosphorothiorate
  modified_base 34: mod_base = OTHER; note = 2'-fluorocytosine
  modified_base 35: mod_base = OTHER; note = 2'-fluorouridine
  modified_base 44: mod_base = OTHER; note = 2'-Omethyluridine phosphorothiorate
  modified_base 47: mod_base = OTHER; note = 2'-Omethylguanosine phosphorothiorate
  modified_base 53: mod_base = OTHER; note = 2'-fluorocytosine
  modified_base 54: mod_base = OTHER; note = 2'-fluorocytosine
  modified_base 57: mod_base = OTHER; note = 2'-Omethylcytosine
  modified_base 58: mod_base = OTHER; note = Guanosine phosphorothiorate
  modified_base 80: mod_base = OTHER; note = 2'-fluoroguanosine

SEQ ID NO: 7452 - RNA, 76 nt, synthetic construct; identical to SEQ ID NO: 625
  source 1..76: mol_type = other RNA
  modified_base 40: mod_base = OTHER; note = 2'-fluorouridine
  modified_base 41: mod_base = OTHER; note = 2'-Omethylcytosine
  modified_base 42: mod_base = OTHER; note = 2'-Omethyladenosine
  modified_base 43: mod_base = OTHER; note = 2'-Omethyladenosine

SEQ ID NO: 7453 - RNA, 76 nt, synthetic construct
  source 1..76: mol_type = other RNA
ggcttgctggcgcaatggatagcgcattggacttcaaattcaaaggttgcgggttcgagtcccgcgcaagtcgcca

SEQ ID NO: 7454 - RNA, 76 nt, synthetic construct; identical to SEQ ID NO: 625
  source 1..76: mol_type = other RNA
  modified_base 1: mod_base = OTHER; note = 2'-Omethylguanosine
  modified_base 3: mod_base = OTHER; note = 2'-fluorocytosine
  modified_base 6: mod_base = OTHER; note = Cytosine phosphorothiorate
  modified_base 10: mod_base = OTHER; note = 2'-fluoroguanosine
  modified_base 12: mod_base = OTHER; note = 2'-Omethylguanosine
  modified_base 13: mod_base = OTHER; note = 2'-fluorocytosine
  modified_base 14: mod_base = OTHER; note = Adenosine phosphorothiorate
  modified_base 15: mod_base = OTHER; note = 2'-fluoroadenosine
  modified_base 16: mod_base = OTHER; note = Uridine phosphorothiorate
  modified_base 20: mod_base = OTHER; note = Uridine phosphorothiorate
  modified_base 23: mod_base = OTHER; note = 2'-Omethylcytosine
  modified_base 28: mod_base = OTHER; note = 2'-fluorouridine
  modified_base 30: mod_base = OTHER; note = 2'-Omethylguanosine
  modified_base 34: mod_base = OTHER; note = 2'-Omethyluridine
  modified_base 39: mod_base = OTHER; note = 2'-Omethyluridine
  modified_base 40: mod_base = OTHER; note = 2'-Omethyluridine
  modified_base 45: mod_base = OTHER; note = Guanosine phosphorothiorate
  modified_base 46: mod_base = OTHER; note = 2'-Omethylguanosine
  modified_base 48: mod_base = OTHER; note = 2'-Omethyluridine
  modified_base 50: mod_base = OTHER; note = 2'-fluorocytosine
  modified_base 51: mod_base = OTHER; note = 2'-Omethylguanosine
  modified_base 52: mod_base = OTHER; note = 2'-Omethylguanosine
  modified_base 54: mod_base = OTHER; note = 2'-fluorouridine
  modified_base 56: mod_base = OTHER; note = 2'-Omethylcytosine
  modified_base 60: mod_base = OTHER; note = Uridine phosphorothiorate
  modified_base 61: mod_base = OTHER; note = 2'-Omethylcytosine phosphorothiorate
  modified_base 63: mod_base = OTHER; note = 2'-fluorocytosine
  modified_base 64: mod_base = OTHER; note = 2'-fluoroguanosine
  modified_base 66: mod_base = OTHER; note = 2'-Omethylcytosine
  modified_base 67: mod_base = OTHER; note = 2'-fluoroguanosine
  modified_base 68: mod_base = OTHER; note = Guanosine phosphorothiorate
  modified_base 69: mod_base = OTHER; note = 2'-Omethyladenosine
  modified_base 70: mod_base = OTHER; note = 2'-Omethylguanosine
  modified_base 71: mod_base = OTHER; note = 2'-Omethyluridine
  modified_base 72: mod_base = OTHER; note = 2'-Omethylcytosine
  modified_base 75: mod_base = OTHER; note = 2'-Omethylcytosine
  modified_base 76: mod_base = OTHER; note = 2'-Omethyladenosine

SEQ ID NO: 7455 - RNA, 85 nt, synthetic construct; identical to SEQ ID NO: 3317
  source 1..85: mol_type = other RNA
  modified_base 1: mod_base = OTHER; note = 2'-Omethylguanosine phosphorothiorate
  modified_base 17: mod_base = OTHER; note = 2'-Omethylguanosine phosphorothiorate
  modified_base 28: mod_base = OTHER; note = 2'-fluorouridine
  modified_base 45: mod_base = OTHER; note = 2'-fluoroguanosine phosphorothiorate
  modified_base 60: mod_base = OTHER; note = Adenosine phosphorothiorate
  modified_base 62: mod_base = OTHER; note = Guanosine phosphorothiorate
  modified_base 80: mod_base = OTHER; note = 2'-Omethylguanosine
  modified_base 82: mod_base = OTHER; note = 2'-Omethylguanosine

SEQ ID NO: 7456 - RNA, 85 nt, synthetic construct; identical to SEQ ID NO: 3297
  source 1..85: mol_type = other RNA
  modified_base 1: mod_base = OTHER; note = 2'-Omethylguanosine
  modified_base 2: mod_base = OTHER; note = 2'-Omethylcytosine
  modified_base 3: mod_base = OTHER; note = 2'-Omethyluridine
  modified_base 4: mod_base = OTHER; note = 2'-Omethylguanosine
  modified_base 5: mod_base = OTHER; note = 2'-Omethyluridine
  modified_base 6: mod_base = OTHER; note = 2'-Omethylguanosine
  modified_base 14: mod_base = OTHER; note = 2'-Omethyladenosine
  modified_base 15: mod_base = OTHER; note = 2'-Omethylguanosine
  modified_base 16: mod_base = OTHER; note = 2'-Omethyluridine
  modified_base 17: mod_base = OTHER; note = 2'-Omethylguanosine
  modified_base 18: mod_base = OTHER; note = 2'-Omethylguanosine
  modified_base 20: mod_base = OTHER; note = 2'-Omethyluridine
  modified_base 22: mod_base = OTHER; note = 2'-Omethyladenosine
  modified_base 23: mod_base = OTHER; note = 2'-Omethylguanosine
  modified_base 24: mod_base = OTHER; note = 2'-Omethylguanosine
  modified_base 25: mod_base = OTHER; note = 2'-Omethylcytosine
  modified_base 41: mod_base = OTHER; note = 2'-fluorocytosine
  modified_base 42: mod_base = OTHER; note = 2'-Omethyladenosine
  modified_base 43: mod_base = OTHER; note = 2'-Omethyladenosine
  modified_base 44: mod_base = OTHER; note = 2'-fluorouridine
  modified_base 58: mod_base = OTHER; note = 2'-Omethylguanosine
  modified_base 59: mod_base = OTHER; note = 2'-Omethylcytosine
  modified_base 61: mod_base = OTHER; note = 2'-Omethylguanosine
  modified_base 63: mod_base = OTHER; note = 2'-Omethyluridine
  modified_base 64: mod_base = OTHER; note = Uridine phosphorothiorate
  modified_base 65: mod_base = OTHER; note = 2'-Omethylcytosine
  modified_base 66: mod_base = OTHER; note = 2'-fluoroguanosine
  modified_base 68: mod_base = OTHER; note = 2'-Omethyladenosine
  modified_base 70: mod_base = OTHER; note = 2'-Omethylcytosine
  modified_base 74: mod_base = OTHER; note = 2'-Omethylcytosine
  modified_base 82: mod_base = OTHER; note = 2'-Omethylguanosine

SEQ ID NO: 7457 - RNA, 76 nt, synthetic construct; identical to SEQ ID NO: 625
  source 1..76: mol_type = other RNA
  modified_base 1: mod_base = OTHER; note = 2'-Omethylguanosine phosphorothiorate
  modified_base 2: mod_base = OTHER; note = 2'-fluoroguanosine
  modified_base 3: mod_base = OTHER; note = Cytosine phosphorothiorate
  modified_base 4: mod_base = OTHER; note = 2'-fluorouridine
  modified_base 10: mod_base = OTHER; note = 2'-fluoroguanosine
  modified_base 11: mod_base = OTHER; note = Cytosine phosphorothiorate
  modified_base 12: mod_base = OTHER; note = 2'-Omethylguanosine
  modified_base 14: mod_base = OTHER; note = 2'-Omethyladenosine
  modified_base 15: mod_base = OTHER; note = 2'-fluoroadenosine
  modified_base 16: mod_base = OTHER; note = Uridine phosphorothiorate
  modified_base 17: mod_base = OTHER; note = 2'-Omethylguanosine
  modified_base 18: mod_base = OTHER; note = 2'-fluoroguanosine
  modified_base 19: mod_base = OTHER; note = Adenosine phosphorothiorate
  modified_base 22: mod_base = OTHER; note = Guanosine phosphorothiorate
  modified_base 23: mod_base = OTHER; note = 2'-Omethylcytosine phosphorothiorate
  modified_base 24: mod_base = OTHER; note = 2'-Omethylguanosine
  modified_base 29: mod_base = OTHER; note = 2'-fluoroguanosine
  modified_base 32: mod_base = OTHER; note = 2'-fluorocytosine
  modified_base 33: mod_base = OTHER; note = Uridine phosphorothiorate
  modified_base 34: mod_base = OTHER; note = 2'-fluorouridine
  modified_base 38: mod_base = OTHER; note = 2'-Omethyladenosine
  modified_base 39: mod_base = OTHER; note = 2'-Omethyluridine
  modified_base 40: mod_base = OTHER; note = 2'-fluorouridine
  modified_base 43: mod_base = OTHER; note = 2'-Omethyladenosine
  modified_base 44: mod_base = OTHER; note = Adenosine phosphorothiorate
  modified_base 45: mod_base = OTHER; note = Guanosine phosphorothiorate
  modified_base 49: mod_base = OTHER; note = Cytosine phosphorothiorate
  modified_base 52: mod_base = OTHER; note = Guanosine phosphorothiorate
  modified_base 62: mod_base = OTHER; note = Cytosine phosphorothiorate
  modified_base 63: mod_base = OTHER; note = 2'-Omethylcytosine
  modified_base 64: mod_base = OTHER; note = 2'-fluoroguanosine phosphorothiorate
  modified_base 67: mod_base = OTHER; note = 2'-Omethylguanosine
  modified_base 71: mod_base = OTHER; note = 2'-Omethyluridine
  modified_base 72: mod_base = OTHER; note = 2'-fluorocytosine
  modified_base 73: mod_base = OTHER; note = 2'-Omethylguanosine
  modified_base 75: mod_base = OTHER; note = 2'-fluorocytosine

SEQ ID NO: 7458 - RNA, 76 nt, synthetic construct; identical to SEQ ID NO: 625
  source 1..76: mol_type = other RNA
  modified_base 61: mod_base = OTHER; note = 2'-Omethylcytosine
  modified_base 62: mod_base = OTHER; note = 2'-Omethylcytosine
  modified_base 63: mod_base = OTHER; note = 2'-fluorocytosine
  modified_base 64: mod_base = OTHER; note = 2'-Omethylguanosine
  modified_base 65: mod_base = OTHER; note = 2'-Omethylguanosine
  modified_base 66: mod_base = OTHER; note = 2'-Omethylcytosine
  modified_base 67: mod_base = OTHER; note = 2'-Omethylguanosine
  modified_base 68: mod_base = OTHER; note = 2'-Omethylguanosine
  modified_base 69: mod_base = OTHER; note = 2'-Omethyladenosine
  modified_base 70: mod_base = OTHER; note = 2'-fluoroguanosine

SEQ ID NO: 7459 - RNA, 85 nt, synthetic construct; identical to SEQ ID NO: 3317
  source 1..85: mol_type = other RNA
  modified_base 1: mod_base = OTHER; note = 2'-Omethylguanosine phosphorothiorate
  modified_base 2: mod_base = OTHER; note = Cytosine phosphorothiorate
  modified_base 11: mod_base = OTHER; note = 2'-fluorocytosine phosphorothiorate
  modified_base 16: mod_base = OTHER; note = 2'-Omethyluridine
  modified_base 18: mod_base = OTHER; note = 2'-Omethylguanosine
  modified_base 29: mod_base = OTHER; note = Guanosine phosphorothiorate
  modified_base 35: mod_base = OTHER; note = 2'-fluorouridine
  modified_base 36: mod_base = OTHER; note = 2'-fluoroadenosine
  modified_base 45: mod_base = OTHER; note = 2'-Omethylguanosine phosphorothiorate
  modified_base 47: mod_base = OTHER; note = 2'-Omethylguanosine
  modified_base 48: mod_base = OTHER; note = 2'-Omethylguanosine
  modified_base 50: mod_base = OTHER; note = 2'-Omethylcytosine
  modified_base 51: mod_base = OTHER; note = Uridine phosphorothiorate
  modified_base 53: mod_base = OTHER; note = 2'-fluorocytosine
  modified_base 57: mod_base = OTHER; note = 2'-Omethylcytosine
  modified_base 59: mod_base = OTHER; note = 2'-fluorocytosine
  modified_base 64: mod_base = OTHER; note = Uridine phosphorothiorate
  modified_base 74: mod_base = OTHER; note = 2'-fluorocytosine
  modified_base 82: mod_base = OTHER; note = 2'-Omethylguanosine

SEQ ID NO: 7460 - RNA, 76 nt, synthetic construct; identical to SEQ ID NO: 625
  source 1..76: mol_type = other RNA
  modified_base 1: mod_base = OTHER; note = Guanosine phosphorothiorate
  modified_base 5: mod_base = OTHER; note = 2'-fluorocytosine
  modified_base 6: mod_base = OTHER; note = 2'-Omethylcytosine phosphorothiorate
  modified_base 8: mod_base = OTHER; note = Uridine phosphorothiorate
  modified_base 9: mod_base = OTHER; note = Guanosine phosphorothiorate
  modified_base 10: mod_base = OTHER; note = 2'-Omethylguanosine phosphorothiorate
  modified_base 11: mod_base = OTHER; note = 2'-Omethylcytosine
  modified_base 14: mod_base = OTHER; note = 2'-Omethyladenosine
  modified_base 16: mod_base = OTHER; note = 2'-Omethyluridine
  modified_base 18: mod_base = OTHER; note = 2'-fluoroguanosine
  modified_base 20: mod_base = OTHER; note = 2'-fluorouridine
  modified_base 21: mod_base = OTHER; note = Adenosine phosphorothiorate
  modified_base 22: mod_base = OTHER; note = 2'-Omethylguanosine
  modified_base 24: mod_base = OTHER; note = 2'-fluoroguanosine
  modified_base 25: mod_base = OTHER; note = 2'-fluorocytosine
  modified_base 27: mod_base = OTHER; note = Uridine phosphorothiorate
  modified_base 30: mod_base = OTHER; note = 2'-Omethylguanosine
  modified_base 33: mod_base = OTHER; note = Uridine phosphorothiorate
  modified_base 40: mod_base = OTHER; note = 2'-Omethyluridine phosphorothiorate
  modified_base 41: mod_base = OTHER; note = 2'-Omethylcytosine
  modified_base 43: mod_base = OTHER; note = Adenosine phosphorothiorate
  modified_base 44: mod_base = OTHER; note = 2'-Omethyladenosine phosphorothiorate
  modified_base 45: mod_base = OTHER; note = 2'-fluoroguanosine
  modified_base 48: mod_base = OTHER; note = 2'-fluorouridine
  modified_base 50: mod_base = OTHER; note = 2'-fluorocytosine
  modified_base 54: mod_base = OTHER; note = 2'-fluorouridine
  modified_base 57: mod_base = OTHER; note = Guanosine phosphorothiorate
  modified_base 58: mod_base = OTHER; note = 2'-fluoroadenosine
  modified_base 61: mod_base = OTHER; note = Cytosine phosphorothiorate
  modified_base 62: mod_base = OTHER; note = 2'-Omethylcytosine
  modified_base 63: mod_base = OTHER; note = Cytosine phosphorothiorate
  modified_base 65: mod_base = OTHER; note = Guanosine phosphorothiorate
  modified_base 66: mod_base = OTHER; note = 2'-Omethylcytosine
  modified_base 67: mod_base = OTHER; note = 2'-Omethylguanosine
  modified_base 70: mod_base = OTHER; note = 2'-fluoroguanosine
  modified_base 74: mod_base = OTHER; note = 2'-Omethylcytosine

SEQ ID NO: 7461 - RNA, 76 nt, synthetic construct; identical to SEQ ID NO: 3295
  source 1..76: mol_type = other RNA
  modified_base 1: mod_base = OTHER; note = 2'-Omethylcytosine phosphorothiorate
  modified_base 2: mod_base = OTHER; note = 2'-Omethylcytosine
  modified_base 4: mod_base = OTHER; note = 2'-fluorouridine phosphorothiorate
  modified_base 5: mod_base = OTHER; note = 2'-fluorocytosine phosphorothiorate
  modified_base 8: mod_base = OTHER; note = 2'-fluorouridine
  modified_base 9: mod_base = OTHER; note = 2'-Omethyladenosine phosphorothiorate
  modified_base 10: mod_base = OTHER; note = Guanosine phosphorothiorate
  modified_base 13: mod_base = OTHER; note = 2'-Omethylcytosine phosphorothiorate
  modified_base 17: mod_base = OTHER; note = 2'-Omethyluridine
  modified_base 27: mod_base = OTHER; note = 2'-fluoroguanosine
  modified_base 30: mod_base = OTHER; note = 2'-fluoroguanosine phosphorothiorate
  modified_base 39: mod_base = OTHER; note = 2'-fluorouridine
  modified_base 43: mod_base = OTHER; note = 2'-fluorouridine phosphorothiorate
  modified_base 48: mod_base = OTHER; note = 2'-Omethylcytosine
  modified_base 52: mod_base = OTHER; note = Guanosine phosphorothiorate
  modified_base 53: mod_base = OTHER; note = 2'-fluoroguanosine phosphorothiorate
  modified_base 70: mod_base = OTHER; note = 2'-fluoroadenosine
  modified_base 74: mod_base = OTHER; note = Cytosine phosphorothiorate
  modified_base 76: mod_base = OTHER; note = 2'-Omethyladenosine

SEQ ID NO: 7462 - RNA, 76 nt, synthetic construct; identical to SEQ ID NO: 625
  source 1..76: mol_type = other RNA
  modified_base 1: mod_base = OTHER; note = 2'-Omethylguanosine phosphorothiorate
  modified_base 2: mod_base = OTHER; note = 2'-Omethylguanosine
  modified_base 13: mod_base = OTHER; note = 2'-Omethylcytosine
  modified_base 33: mod_base = OTHER; note = 2'-fluorouridine
  modified_base 35: mod_base = OTHER; note = Cytosine phosphorothiorate
  modified_base 38: mod_base = OTHER; note = Adenosine phosphorothiorate
  modified_base 52: mod_base = OTHER; note = 2'-Omethylguanosine
  modified_base 57: mod_base = OTHER; note = 2'-Omethylguanosine
  modified_base 62: mod_base = OTHER; note = 2'-Omethylcytosine
  modified_base 73: mod_base = OTHER; note = 2'-Omethylguanosine

SEQ ID NO: 7463 - RNA, 75 nt, synthetic construct; identical to SEQ ID NO: 3336
  source 1..75: mol_type = other RNA
  modified_base 11: mod_base = OTHER; note = Uridine phosphorothiorate
  modified_base 16: mod_base = OTHER; note = 2'-fluorocytosine
  modified_base 20: mod_base = OTHER; note = 2'-fluoroadenosine
  modified_base 21: mod_base = OTHER; note = 2'-fluoroguanosine
  modified_base 28: mod_base = OTHER; note = 2'-Omethyladenosine phosphorothiorate
  modified_base 40: mod_base = OTHER; note = 2'-fluorouridine phosphorothiorate
  modified_base 46: mod_base = OTHER; note = 2'-fluorouridine
  modified_base 49: mod_base = OTHER; note = 2'-fluoroadenosine phosphorothiorate
  modified_base 60: mod_base = OTHER; note = 2'-fluorocytosine
  modified_base 73: mod_base = OTHER; note = Cytosine phosphorothiorate

SEQ ID NO: 7464 - RNA, 76 nt, synthetic construct; identical to SEQ ID NO: 3289
  source 1..76: mol_type = other RNA
  modified_base 52: mod_base = OTHER; note = 2'-Omethylguanosine
  modified_base 73: mod_base = OTHER; note = 2'-Omethylguanosine

SEQ ID NO: 7465 - RNA, 76 nt, synthetic construct; identical to SEQ ID NO: 625
  source 1..76: mol_type = other RNA
  modified_base 1: mod_base = OTHER; note = 2'-Omethylguanosine
  modified_base 2: mod_base = OTHER; note = 2'-Omethylguanosine
  modified_base 18: mod_base = OTHER; note = 2'-Omethylguanosine
  modified_base 33: mod_base = OTHER; note = 2'-fluorouridine
  modified_base 35: mod_base = OTHER; note = Cytosine phosphorothiorate
  modified_base 37: mod_base = OTHER; note = Adenosine phosphorothiorate
  modified_base 38: mod_base = OTHER; note = Adenosine phosphorothiorate
  modified_base 52: mod_base = OTHER; note = 2'-fluoroguanosine
  modified_base 57: mod_base = OTHER; note = 2'-Omethylguanosine
  modified_base 62: mod_base = OTHER; note = 2'-Omethylcytosine
  modified_base 73: mod_base = OTHER; note = 2'-Omethylguanosine
  modified_base 75: mod_base = OTHER; note = 2'-fluorocytosine phosphorothiorate

SEQ ID NO: 7466 - RNA, 75 nt, synthetic construct; identical to SEQ ID NO: 3306
  source 1..75: mol_type = other RNA
  modified_base 1: mod_base = OTHER; note = 2'-Omethylguanosine
  modified_base 13: mod_base = OTHER; note = 2'-Omethylcytosine
  modified_base 14: mod_base = OTHER; note = 2'-Omethyladenosine
  modified_base 15: mod_base = OTHER; note = 2'-Omethyladenosine
  modified_base 16: mod_base = OTHER; note = 2'-Omethylcytosine
  modified_base 17: mod_base = OTHER; note = 2'-Omethylguanosine
  modified_base 18: mod_base = OTHER; note = 2'-Omethylguanosine
  modified_base 19: mod_base = OTHER; note = Uridine phosphorothiorate
  modified_base 20: mod_base = OTHER; note = Adenosine phosphorothiorate
  modified_base 24: mod_base = OTHER; note = 2'-Omethylcytosine
  modified_base 40: mod_base = OTHER; note = 2'-fluoroadenosine
  modified_base 41: mod_base = OTHER; note = 2'-Omethylguanosine
  modified_base 42: mod_base = OTHER; note = 2'-Omethyladenosine
  modified_base 43: mod_base = OTHER; note = 2'-fluoroadenosine
  modified_base 48: mod_base = OTHER; note = 2'-Omethylguanosine
  modified_base 49: mod_base = OTHER; note = 2'-Omethylcytosine
  modified_base 51: mod_base = OTHER; note = 2'-Omethyluridine
  modified_base 53: mod_base = OTHER; note = Uridine phosphorothiorate
  modified_base 54: mod_base = OTHER; note = Uridine phosphorothiorate
  modified_base 60: mod_base = OTHER; note = 2'-Omethylcytosine
  modified_base 64: mod_base = OTHER; note = 2'-Omethyluridine
  modified_base 72: mod_base = OTHER; note = 2'-Omethyladenosine

SEQ ID NO: 7467 - RNA, 86 nt, synthetic construct; identical to SEQ ID NO: 3290
  source 1..86: mol_type = other RNA
  modified_base 1: mod_base = OTHER; note = 2'-Omethyladenosine
  modified_base 83: mod_base = OTHER; note = 2'-Omethyladenosine

SEQ ID NO: 7468 - RNA, 85 nt, synthetic construct; identical to SEQ ID NO: 3286
  source 1..85: mol_type = other RNA
  modified_base 2: mod_base = OTHER; note = 2'-Omethylcytosine
  modified_base 26: mod_base = OTHER; note = 2'-fluorouridine phosphorothiorate
  modified_base 35: mod_base = OTHER; note = 2'-fluoroadenosine
  modified_base 39: mod_base = OTHER; note = Cytosine phosphorothiorate
  modified_base 43: mod_base = OTHER; note = 2'-Omethyluridine
  modified_base 45: mod_base = OTHER; note = 2'-fluoroguanosine
  modified_base 51: mod_base = OTHER; note = 2'-Omethyluridine
  modified_base 56: mod_base = OTHER; note = 2'-fluoroguanosine
  modified_base 57: mod_base = OTHER; note = 2'-Omethylcytosine
  modified_base 67: mod_base = OTHER; note = Adenosine phosphorothiorate
  modified_base 77: mod_base = OTHER; note = 2'-fluorocytosine phosphorothiorate
  modified_base 83: mod_base = OTHER; note = Cytosine phosphorothiorate

SEQ ID NO: 7469 - RNA, 76 nt, synthetic construct; identical to SEQ ID NO: 3325
  source 1..76: mol_type = other RNA
  modified_base 1: mod_base = OTHER; note = 2'-Omethyluridine phosphorothiorate
  modified_base 2: mod_base = OTHER; note = 2'-Omethyladenosine phosphorothiorate
  modified_base 52: mod_base = OTHER; note = Guanosine phosphorothiorate
  modified_base 74: mod_base = OTHER; note = Cytosine phosphorothiorate
  modified_base 75: mod_base = OTHER; note = 2'-Omethylcytosine

SEQ ID NO: 7470 - RNA, 86 nt, synthetic construct; identical to SEQ ID NO: 3290
  source 1..86: mol_type = other RNA
  modified_base 38: mod_base = OTHER; note = 2'-Omethyladenosine

SEQ ID NO: 7471 - RNA, 86 nt, synthetic construct; identical to SEQ ID NO: 3290
  source 1..86: mol_type = other RNA
  modified_base 62: mod_base = OTHER; note = Guanosine phosphorothiorate

SEQ ID NO: 7472 - RNA, 85 nt, synthetic construct; identical to SEQ ID NO: 3286
  source 1..85: mol_type = other RNA
  modified_base 1: mod_base = OTHER; note = 2'-fluorocytosine
  modified_base 16: mod_base = OTHER; note = Guanosine phosphorothiorate
  modified_base 23: mod_base = OTHER; note = 2'-fluoroguanosine
  modified_base 34: mod_base = OTHER; note = 2'-fluorouridine phosphorothiorate
  modified_base 45: mod_base = OTHER; note = 2'-fluoroguanosine phosphorothiorate
  modified_base 53: mod_base = OTHER; note = 2'-fluorouridine
  modified_base 55: mod_base = OTHER; note = Cytosine phosphorothiorate
  modified_base 56: mod_base = OTHER; note = 2'-Omethylguanosine
  modified_base 57: mod_base = OTHER; note = 2'-fluorocytosine
  modified_base 58: mod_base = OTHER; note = 2'-Omethylguanosine
  modified_base 61: mod_base = OTHER; note = 2'-fluoroguanosine phosphorothiorate
  modified_base 65: mod_base = OTHER; note = Cytosine phosphorothiorate
  modified_base 73: mod_base = OTHER; note = 2'-fluoroadenosine
  modified_base 76: mod_base = OTHER; note = 2'-fluorocytosine phosphorothiorate
  modified_base 83: mod_base = OTHER; note = 2'-fluorocytosine phosphorothiorate
  modified_base 84: mod_base = OTHER; note = 2'-fluorocytosine

SEQ ID NO: 7473 - RNA, 85 nt, synthetic construct; identical to SEQ ID NO: 3297
  source 1..85: mol_type = other RNA
  modified_base 1: mod_base = OTHER; note = 2'-Omethylguanosine phosphorothiorate
  modified_base 4: mod_base = OTHER; note = Guanosine phosphorothiorate
  modified_base 35: mod_base = OTHER; note = 2'-fluorocytosine
  modified_base 37: mod_base = OTHER; note = 2'-Omethyladenosine
  modified_base 46: mod_base = OTHER; note = 2'-Omethylguanosine
  modified_base 59: mod_base = OTHER; note = 2'-Omethylcytosine phosphorothiorate
  modified_base 61: mod_base = OTHER; note = 2'-fluoroguanosine phosphorothiorate
  modified_base 82: mod_base = OTHER; note = 2'-Omethylguanosine

SEQ ID NO: 7474 - RNA, 76 nt, synthetic construct; identical to SEQ ID NO: 625
  source 1..76: mol_type = other RNA
  modified_base 22: mod_base = OTHER; note = 2'-Omethylguanosine
  modified_base 23: mod_base = OTHER; note = 2'-Omethylcytosine
  modified_base 24: mod_base = OTHER; note = 2'-Omethylguanosine
  modified_base 25: mod_base = OTHER; note = 2'-Omethylcytosine
  modified_base 40: mod_base = OTHER; note = 2'-fluorouridine
  modified_base 41: mod_base = OTHER; note = 2'-fluorocytosine
  modified_base 42: mod_base = OTHER; note = 2'-fluoroadenosine
  modified_base 43: mod_base = OTHER; note = 2'-fluoroadenosine
  modified_base 54: mod_base = OTHER; note = Uridine phosphorothiorate
  modified_base 55: mod_base = OTHER; note = Uridine phosphorothiorate
  modified_base 56: mod_base = OTHER; note = Cytosine phosphorothiorate
  modified_base 57: mod_base = OTHER; note = Guanosine phosphorothiorate

SEQ ID NO: 7475 - RNA, 75 nt, synthetic construct; identical to SEQ ID NO: 3299
  source 1..75: mol_type = other RNA
  modified_base 1: mod_base = OTHER; note = 2'-Omethylcytosine
  modified_base 2: mod_base = OTHER; note = 2'-Omethylcytosine phosphorothiorate
  modified_base 16: mod_base = OTHER; note = 2'-fluorocytosine phosphorothiorate
  modified_base 26: mod_base = OTHER; note = 2'-Omethyluridine phosphorothiorate
  modified_base 45: mod_base = OTHER; note = 2'-fluoroguanosine
  modified_base 50: mod_base = OTHER; note = 2'-fluoroguanosine phosphorothiorate
  modified_base 72: mod_base = OTHER; note = 2'-Omethylguanosine
  modified_base 74: mod_base = OTHER; note = 2'-fluorocytosine phosphorothiorate

SEQ ID NO: 7476 - DNA, 76 bp, synthetic construct; identical to SEQ ID NO: 1924
  source 1..76: mol_type = other DNA
  modified_base 1: mod_base = OTHER; note = 2'-Omethylguanosine phosphorothiorate
  modified_base 2: mod_base = OTHER; note = 2'-Omethylguanosine
  modified_base 4: mod_base = OTHER; note = Uridine phosphorothiorate
  modified_base 5: mod_base = OTHER; note = 2'-fluorocytosine
  modified_base 10: mod_base = OTHER; note = 2'-Omethylguanosine
  modified_base 11: mod_base = OTHER; note = Cytosine phosphorothiorate
  modified_base 12: mod_base = OTHER; note = 2'-O-(2-Methoxyethyl) guanosine phosphorothiorate
  modified_base 13: mod_base = OTHER; note = 2'-fluorocytosine phosphorothiorate
  modified_base 17: mod_base = OTHER; note = Guanosine phosphorothiorate
  modified_base 18: mod_base = OTHER; note = Guanosine phosphorothiorate
  modified_base 19: mod_base = OTHER; note = deoxyadenosine phosphorothiorate
  modified_base 20: mod_base = OTHER; note = 2'-O-(2-Methoxyethyl) thymine
  modified_base 21: mod_base = OTHER; note = Adenosine phosphorothiorate
  modified_base 22: mod_base = OTHER; note = 2'-O-(2-Methoxyethyl) guanosine
  modified_base 25: mod_base = OTHER; note = Cytosine phosphorothiorate
  modified_base 26: mod_base = OTHER; note = 2'-fluoroadenosine
  modified_base 28: mod_base = OTHER; note = Uridine phosphorothiorate
  modified_base 30: mod_base = OTHER; note = 2'-Omethylguanosine phosphorothiorate
  modified_base 35: mod_base = OTHER; note = Cytosine phosphorothiorate
  modified_base 36: mod_base = OTHER; note = 2'-Omethyladenosine
  modified_base 39: mod_base = OTHER; note = Uridine phosphorothiorate
  modified_base 40: mod_base = OTHER; note = 2'-O-(2-Methoxyethyl) thymine
  modified_base 43: mod_base = OTHER; note = Adenosine phosphorothiorate
  modified_base 45: mod_base = OTHER; note = 2'-O-(2-Methoxyethyl) guanosine
  modified_base 46: mod_base = OTHER; note = Guanosine phosphorothiorate
  modified_base 51: mod_base = OTHER; note = 2'-Omethylguanosine phosphorothiorate
  modified_base 52: mod_base = OTHER; note = 2'-O-(2-Methoxyethyl) guanosine
  modified_base 60: mod_base = OTHER; note = 2'-O-(2-Methoxyethyl) thymine
  modified_base 62: mod_base = OTHER; note = Cytosine phosphorothiorate
  modified_base 63: mod_base = OTHER; note = 2'-fluorocytosine
  modified_base 66: mod_base = OTHER; note = 2'-fluorocytosine
  modified_base 67: mod_base = OTHER; note = 2'-Omethylguanosine
  modified_base 73: mod_base = OTHER; note = 2'-O-(2-Methoxyethyl) guanosine phosphorothiorate
  modified_base 74: mod_base = OTHER; note = Cytosine phosphorothiorate
  modified_base 75: mod_base = OTHER; note = deoxycytosine phosphorothiorate
  modified_base 76: mod_base = OTHER; note = 2'-Omethyladenosine
  misc_feature 1..18: note = RNA
  misc_feature 19: note = DNA
  misc_feature 20..30: note = RNA
  misc_feature 31: note = DNA
  misc_feature 32..67: note = RNA
  misc_feature 68: note = DNA
  misc_feature 69..74: note = RNA
  misc_feature 75: note = DNA
  misc_feature 76: note = RNA

SEQ ID NO: 7477 - RNA, 85 nt, synthetic construct; identical to SEQ ID NO: 3297
  source 1..85: mol_type = other RNA
  modified_base 1: mod_base = OTHER; note = 2'-Omethylguanosine phosphorothiorate
  modified_base 4: mod_base = OTHER; note = Guanosine phosphorothiorate
  modified_base 17: mod_base = OTHER; note = 2'-fluoroguanosine phosphorothiorate
  modified_base 22: mod_base = OTHER; note = 2'-fluoroadenosine
  modified_base 37: mod_base = OTHER; note = 2'-Omethyladenosine
  modified_base 46: mod_base = OTHER; note = 2'-Omethylguanosine phosphorothiorate
  modified_base 48: mod_base = OTHER; note = 2'-Omethylguanosine
  modified_base 56: mod_base = OTHER; note = 2'-Omethylguanosine phosphorothiorate

SEQ ID NO: 7478 - RNA, 76 nt, synthetic construct; identical to SEQ ID NO: 625
  source 1..76: mol_type = other RNA
  modified_base 1: mod_base = OTHER; note = 2'-Omethylguanosine
  modified_base 12: mod_base = OTHER; note = 2'-fluoroguanosine
  modified_base 13: mod_base = OTHER; note = Cytosine phosphorothiorate
  modified_base 22: mod_base = OTHER; note = Guanosine phosphorothiorate
  modified_base 23: mod_base = OTHER; note = 2'-Omethylcytosine phosphorothiorate
  modified_base 24: mod_base = OTHER; note = 2'-fluoroguanosine
  modified_base 25: mod_base = OTHER; note = 2'-fluorocytosine
  modified_base 26: mod_base = OTHER; note = 2'-fluoroadenosine
  modified_base 28: mod_base = OTHER; note = 2'-fluorouridine
  modified_base 29: mod_base = OTHER; note = 2'-Omethylguanosine
  modified_base 30: mod_base = OTHER; note = 2'-Omethylguanosine
  modified_base 33: mod_base = OTHER; note = Uridine phosphorothiorate
  modified_base 34: mod_base = OTHER; note = Uridine phosphorothiorate
  modified_base 38: mod_base = OTHER; note = Adenosine phosphorothiorate
  modified_base 41: mod_base = OTHER; note = 2'-Omethylcytosine phosphorothiorate
  modified_base 42: mod_base = OTHER; note = 2'-Omethyladenosine
  modified_base 43: mod_base = OTHER; note = 2'-fluoroadenosine
  modified_base 44: mod_base = OTHER; note = 2'-fluoroadenosine
  modified_base 45: mod_base = OTHER; note = 2'-Omethylguanosine phosphorothiorate
  modified_base 46: mod_base = OTHER; note = Guanosine phosphorothiorate
  modified_base 47: mod_base = OTHER; note = 2'-fluorouridine phosphorothiorate
  modified_base 49: mod_base = OTHER; note = 2'-fluorocytosine phosphorothiorate
  modified_base 50: mod_base = OTHER; note = 2'-Omethylcytosine
  modified_base 52: mod_base = OTHER; note = 2'-Omethylguanosine
  modified_base 53: mod_base = OTHER; note = 2'-Omethylguanosine
  modified_base 54: mod_base = OTHER; note = 2'-fluorouridine
  modified_base 55: mod_base = OTHER; note = Uridine phosphorothiorate
  modified_base 57: mod_base = OTHER; note = 2'-fluoroguanosine
  modified_base 58: mod_base = OTHER; note = 2'-fluoroadenosine
  modified_base 60: mod_base = OTHER; note = Uridine phosphorothiorate
  modified_base 61: mod_base = OTHER; note = 2'-Omethylcytosine phosphorothiorate
  modified_base 62: mod_base = OTHER; note = 2'-fluorocytosine
  modified_base 70: mod_base = OTHER; note = 2'-fluoroguanosine
  modified_base 71: mod_base = OTHER; note = Uridine phosphorothiorate
  modified_base 72: mod_base = OTHER; note = 2'-Omethylcytosine
  modified_base 73: mod_base = OTHER; note = 2'-fluoroguanosine

SEQ ID NO: 7479 - RNA, 76 nt, synthetic construct; identical to SEQ ID NO: 3316
  source 1..76: mol_type = other RNA
  modified_base 1: mod_base = OTHER; note = 2'-Omethyladenosine
  modified_base 2: mod_base = OTHER; note = 2'-Omethylcytosine
  modified_base 3: mod_base = OTHER; note = 2'-Omethylcytosine
  modified_base 4: mod_base = OTHER; note = 2'-Omethyladenosine
  modified_base 5: mod_base = OTHER; note = 2'-Omethyladenosine
  modified_base 6: mod_base = OTHER; note = 2'-Omethylcytosine
  modified_base 16: mod_base = OTHER; note = 2'-Omethyluridine
  modified_base 17: mod_base = OTHER; note = 2'-Omethylguanosine
  modified_base 18: mod_base = OTHER; note = 2'-Omethylguanosine
  modified_base 20: mod_base = OTHER; note = 2'-Omethyluridine
  modified_base 25: mod_base = OTHER; note = 2'-Omethylcytosine
  modified_base 33: mod_base = OTHER; note = 2'-fluorouridine
  modified_base 35: mod_base = OTHER; note = Cytosine phosphorothiorate
  modified_base 37: mod_base = OTHER; note = Adenosine phosphorothiorate
  modified_base 38: mod_base = OTHER; note = Adenosine phosphorothiorate
  modified_base 41: mod_base = OTHER; note = 2'-fluorocytosine
  modified_base 42: mod_base = OTHER; note = 2'-Omethyladenosine
  modified_base 43: mod_base = OTHER; note = 2'-Omethyladenosine
  modified_base 44: mod_base = OTHER; note = 2'-fluoroadenosine
  modified_base 49: mod_base = OTHER; note = 2'-Omethylcytosine
  modified_base 50: mod_base = OTHER; note = 2'-Omethylcytosine
  modified_base 52: mod_base = OTHER; note = 2'-Omethylguanosine
  modified_base 54: mod_base = OTHER; note = 2'-Omethyluridine
  modified_base 55: mod_base = OTHER; note = Uridine phosphorothiorate
  modified_base 56: mod_base = OTHER; note = 2'-Omethylcytosine
  modified_base 57: mod_base = OTHER; note = 2'-fluoroguanosine
  modified_base 59: mod_base = OTHER; note = 2'-Omethylguanosine
  modified_base 61: mod_base = OTHER; note = 2'-Omethylcytosine
  modified_base 62: mod_base = OTHER; note = 2'-Omethylcytosine
  modified_base 63: mod_base = OTHER; note = 2'-fluorocytosine
  modified_base 64: mod_base = OTHER; note = 2'-Omethylguanosine
  modified_base 65: mod_base = OTHER; note = 2'-Omethylguanosine
  modified_base 73: mod_base = OTHER; note = 2'-Omethylguanosine

SEQ ID NO: 7480 - RNA, 76 nt, synthetic construct; identical to SEQ ID NO: 625
  source 1..76: mol_type = other RNA
  modified_base 1: mod_base = OTHER; note = 2'-Omethylguanosine
  modified_base 2: mod_base = OTHER; note = 2'-Omethylguanosine
  modified_base 3: mod_base = OTHER; note = 2'-Omethylcytosine
  modified_base 4: mod_base = OTHER; note = 2'-Omethyluridine
  modified_base 5: mod_base = OTHER; note = 2'-Omethylcytosine
  modified_base 6: mod_base = OTHER; note = 2'-Omethylcytosine
  modified_base 10: mod_base = OTHER; note = 2'-Omethylguanosine
  modified_base 11: mod_base = OTHER; note = 2'-Omethylcytosine
  modified_base 12: mod_base = OTHER; note = 2'-Omethylguanosine
  modified_base 13: mod_base = OTHER; note = 2'-Omethylcytosine
  modified_base 14: mod_base = OTHER; note = 2'-Omethyladenosine
  modified_base 15: mod_base = OTHER; note = 2'-fluoroadenosine
  modified_base 16: mod_base = OTHER; note = 2'-Omethyluridine
  modified_base 17: mod_base = OTHER; note = 2'-Omethylguanosine
  modified_base 18: mod_base = OTHER; note = 2'-Omethylguanosine
  modified_base 19: mod_base = OTHER; note = 2'-fluoroadenosine
  modified_base 20: mod_base = OTHER; note = 2'-Omethyluridine
  modified_base 22: mod_base = OTHER; note = 2'-Omethylguanosine
  modified_base 23: mod_base = OTHER; note = 2'-Omethylcytosine
  modified_base 24: mod_base = OTHER; note = 2'-Omethylguanosine
  modified_base 25: mod_base = OTHER; note = 2'-Omethylcytosine
  modified_base 38: mod_base = OTHER; note = Adenosine phosphorothiorate
  modified_base 39: mod_base = OTHER; note = Uridine phosphorothiorate
  modified_base 40: mod_base = OTHER; note = 2'-fluorouridine
  modified_base 43: mod_base = OTHER; note = 2'-Omethyladenosine
  modified_base 44: mod_base = OTHER; note = 2'-Omethyladenosine
  modified_base 45: mod_base = OTHER; note = 2'-Omethylguanosine
  modified_base 46: mod_base = OTHER; note = 2'-fluoroguanosine
  modified_base 48: mod_base = OTHER; note = 2'-fluorouridine
  modified_base 49: mod_base = OTHER; note = 2'-Omethylcytosine
  modified_base 50: mod_base = OTHER; note = 2'-Omethylcytosine
  modified_base 51: mod_base = OTHER; note = 2'-Omethylguanosine
  modified_base 52: mod_base = OTHER; note = 2'-Omethylguanosine
  modified_base 53: mod_base = OTHER; note = 2'-Omethylguanosine
  modified_base 54: mod_base = OTHER; note = 2'-Omethyluridine
  modified_base 61: mod_base = OTHER; note = 2'-Omethylcytosine
  modified_base 62: mod_base = OTHER; note = 2'-Omethylcytosine
  modified_base 63: mod_base = OTHER; note = 2'-fluorocytosine
  modified_base 64: mod_base = OTHER; note = 2'-Omethylguanosine
  modified_base 65: mod_base = OTHER; note = 2'-Omethylguanosine
  modified_base 66: mod_base = OTHER; note = 2'-Omethylcytosine
  modified_base 67: mod_base = OTHER; note = 2'-Omethylguanosine
  modified_base 68: mod_base = OTHER; note = 2'-Omethylguanosine
  modified_base 69: mod_base = OTHER; note = 2'-fluoroadenosine
  modified_base 70: mod_base = OTHER; note = 2'-fluoroguanosine

SEQ ID NO: 7481 - RNA, 86 nt, synthetic construct; identical to SEQ ID NO: 3290
  source 1..86: mol_type = other RNA
  modified_base 48: mod_base = OTHER; note = 2'-Omethylcytosine

SEQ ID NO: 7482 - RNA, 76 nt, synthetic construct; identical to SEQ ID NO: 625
  source 1..76: mol_type = other RNA
  modified_base 2: mod_base = OTHER; note = Guanosine phosphorothiorate
  modified_base 3: mod_base = OTHER; note = 2'-Omethylcytosine
  modified_base 4: mod_base = OTHER; note = 2'-fluorouridine
  modified_base 5: mod_base = OTHER; note = 2'-Omethylcytosine
  modified_base 6: mod_base = OTHER; note = Cytosine phosphorothiorate
  modified_base 9: mod_base = OTHER; note = Guanosine phosphorothiorate
  modified_base 14: mod_base = OTHER; note = Adenosine phosphorothiorate
  modified_base 15: mod_base = OTHER; note = 2'-Omethyladenosine phosphorothiorate
  modified_base 18: mod_base = OTHER; note = Guanosine phosphorothiorate
  modified_base 20: mod_base = OTHER; note = 2'-fluorouridine phosphorothiorate
  modified_base 23: mod_base = OTHER; note = 2'-Omethylcytosine
  modified_base 27: mod_base = OTHER; note = 2'-Omethyluridine
  modified_base 29: mod_base = OTHER; note = Guanosine phosphorothiorate
  modified_base 30: mod_base = OTHER; note = 2'-fluoroguanosine
  modified_base 38: mod_base = OTHER; note = 2'-fluoroadenosine
  modified_base 39: mod_base = OTHER; note = 2'-Omethyluridine
  modified_base 45: mod_base = OTHER; note = 2'-Omethylguanosine phosphorothiorate
  modified_base 48: mod_base = OTHER; note = 2'-Omethyluridine phosphorothiorate
  modified_base 50: mod_base = OTHER; note = 2'-fluorocytosine phosphorothiorate
  modified_base 54: mod_base = OTHER; note = 2'-Omethyluridine
  modified_base 56: mod_base = OTHER; note = 2'-fluorocytosine phosphorothiorate
  modified_base 57: mod_base = OTHER; note = 2'-Omethylguanosine
  modified_base 59: mod_base = OTHER; note = 2'-fluoroguanosine
  modified_base 61: mod_base = OTHER; note = 2'-Omethylcytosine
  modified_base 66: mod_base = OTHER; note = Cytosine phosphorothiorate
  modified_base 67: mod_base = OTHER; note = 2'-fluoroguanosine
  modified_base 69: mod_base = OTHER; note = Adenosine phosphorothiorate
  modified_base 70: mod_base = OTHER; note = 2'-Omethylguanosine
  modified_base 74: mod_base = OTHER; note = 2'-Omethylcytosine
  modified_base 76: mod_base = OTHER; note = 2'-Omethyladenosine

SEQ ID NO: 7483 - RNA, 76 nt, synthetic construct; identical to SEQ ID NO: 625
  source 1..76: mol_type = other RNA
  modified_base 1: mod_base = OTHER; note = 2'-Omethylguanosine
  modified_base 10: mod_base = OTHER; note = 2'-Omethylguanosine
  modified_base 13: mod_base = OTHER; note = 2'-Omethylcytosine
  modified_base 17: mod_base = OTHER; note = Guanosine phosphorothiorate
  modified_base 18: mod_base = OTHER; note = 2'-Omethylguanosine
  modified_base 19: mod_base = OTHER; note = Adenosine phosphorothiorate
  modified_base 20: mod_base = OTHER; note = 2'-Omethyluridine
  modified_base 25: mod_base = OTHER; note = 2'-Omethylcytosine
  modified_base 29: mod_base = OTHER; note = 2'-Omethylguanosine
  modified_base 33: mod_base = OTHER; note = 2'-fluorouridine
  modified_base 35: mod_base = OTHER; note = Cytosine phosphorothiorate
  modified_base 37: mod_base = OTHER; note = Adenosine phosphorothiorate
  modified_base 38: mod_base = OTHER; note = Adenosine phosphorothiorate
  modified_base 43: mod_base = OTHER; note = 2'-Omethyladenosine
  modified_base 44: mod_base = OTHER; note = 2'-fluoroadenosine
  modified_base 46: mod_base = OTHER; note = Guanosine phosphorothiorate
  modified_base 50: mod_base = OTHER; note = 2'-Omethylcytosine
  modified_base 52: mod_base = OTHER; note = 2'-Omethylguanosine
  modified_base 54: mod_base = OTHER; note = Uridine phosphorothiorate
  modified_base 55: mod_base = OTHER; note = Uridine phosphorothiorate
  modified_base 56: mod_base = OTHER; note = 2'-Omethylcytosine
  modified_base 57: mod_base = OTHER; note = Guanosine phosphorothiorate
  modified_base 62: mod_base = OTHER; note = 2'-Omethylcytosine
  modified_base 63: mod_base = OTHER; note = 2'-fluorocytosine
  modified_base 65: mod_base = OTHER; note = 2'-Omethylguanosine phosphorothiorate
  modified_base 71: mod_base = OTHER; note = 2'-Omethyluridine
  modified_base 73: mod_base = OTHER; note = 2'-Omethylguanosine

SEQ ID NO: 7484 - RNA, 74 nt, synthetic construct; identical to SEQ ID NO: 766
  source 1..74: mol_type = other RNA
  modified_base 1: mod_base = OTHER; note = 2'-Omethylguanosine phosphorothiorate
  modified_base 2: mod_base = OTHER; note = 2'-Omethylguanosine phosphorothiorate
  modified_base 3: mod_base = OTHER; note = 2'-Omethylcytosine
  modified_base 4: mod_base = OTHER; note = 2'-Omethyluridine
  modified_base 5: mod_base = OTHER; note = 2'-Omethylcytosine
  modified_base 6: mod_base = OTHER; note = 2'-Omethylcytosine
  modified_base 16: mod_base = OTHER; note = 2'-Omethyluridine
  modified_base 17: mod_base = OTHER; note = 2'-Omethylguanosine
  modified_base 18: mod_base = OTHER; note = 2'-Omethylguanosine
  modified_base 20: mod_base = OTHER; note = 2'-Omethyluridine
  modified_base 22: mod_base = OTHER; note = 2'-Omethylguanosine
  modified_base 23: mod_base = OTHER; note = 2'-Omethylcytosine
  modified_base 24: mod_base = OTHER; note = 2'-Omethylguanosine
  modified_base 25: mod_base = OTHER; note = 2'-Omethylcytosine
  modified_base 33: mod_base = OTHER; note = 2'-fluorouridine
  modified_base 35: mod_base = OTHER; note = Cytosine phosphorothiorate
  modified_base 37: mod_base = OTHER; note = Adenosine phosphorothiorate
  modified_base 38: mod_base = OTHER; note = Adenosine phosphorothiorate
  modified_base 41: mod_base = OTHER; note = 2'-Omethylcytosine
  modified_base 42: mod_base = OTHER; note = 2'-Omethyladenosine
  modified_base 43: mod_base = OTHER; note = 2'-Omethyladenosine
  modified_base 44: mod_base = OTHER; note = 2'-Omethyladenosine
  modified_base 49: mod_base = OTHER; note = 2'-Omethylcytosine
  modified_base 50: mod_base = OTHER; note = 2'-Omethylcytosine
  modified_base 52: mod_base = OTHER; note = 2'-Omethylguanosine
  modified_base 54: mod_base = OTHER; note = 2'-Omethyluridine
  modified_base 55: mod_base = OTHER; note = Uridine phosphorothiorate
  modified_base 56: mod_base = OTHER; note = 2'-Omethylcytosine
  modified_base 57: mod_base = OTHER; note = 2'-fluoroguanosine
  modified_base 59: mod_base = OTHER; note = 2'-Omethylguanosine
  modified_base 61: mod_base = OTHER; note = 2'-Omethylcytosine
  modified_base 62: mod_base = OTHER; note = 2'-Omethylcytosine
  modified_base 63: mod_base = OTHER; note = 2'-fluorocytosine
  modified_base 64: mod_base = OTHER; note = 2'-Omethylguanosine
  modified_base 65: mod_base = OTHER; note = 2'-Omethylguanosine
  modified_base 73: mod_base = OTHER; note = 2'-Omethylguanosine

SEQ ID NO: 7485 - RNA, 76 nt, synthetic construct; identical to SEQ ID NO: 625
  source 1..76: mol_type = other RNA
  modified_base 1: mod_base = OTHER; note = Guanosine phosphorothiorate
  modified_base 3: mod_base = OTHER; note = Cytosine phosphorothiorate
  modified_base 4: mod_base = OTHER; note = 2'-Omethyluridine
  modified_base 5: mod_base = OTHER; note = 2'-Omethylcytosine
  modified_base 8: mod_base = OTHER; note = Uridine phosphorothiorate
  modified_base 11: mod_base = OTHER; note = 2'-Omethylcytosine phosphorothiorate
  modified_base 12: mod_base = OTHER; note = 2'-fluoroguanosine
  modified_base 14: mod_base = OTHER; note = 2'-fluoroadenosine
  modified_base 15: mod_base = OTHER; note = 2'-Omethyladenosine
  modified_base 16: mod_base = OTHER; note = 2'-fluorouridine
  modified_base 18: mod_base = OTHER; note = 2'-fluoroguanosine
  modified_base 20: mod_base = OTHER; note = Uridine phosphorothiorate
  modified_base 24: mod_base = OTHER; note = 2'-fluoroguanosine
  modified_base 25: mod_base = OTHER; note = Cytosine phosphorothiorate
  modified_base 26: mod_base = OTHER; note = 2'-Omethyladenosine
  modified_base 27: mod_base = OTHER; note = Uridine phosphorothiorate
  modified_base 32: mod_base = OTHER; note = 2'-fluorocytosine
  modified_base 34: mod_base = OTHER; note = 2'-Omethyluridine
  modified_base 38: mod_base = OTHER; note = 2'-Omethyladenosine
  modified_base 41: mod_base = OTHER; note = 2'-Omethylcytosine phosphorothiorate
  modified_base 42: mod_base = OTHER; note = 2'-fluoroadenosine
  modified_base 46: mod_base = OTHER; note = 2'-Omethylguanosine
  modified_base 50: mod_base = OTHER; note = 2'-Omethylcytosine
  modified_base 52: mod_base = OTHER; note = Guanosine phosphorothiorate
  modified_base 53: mod_base = OTHER; note = 2'-fluoroguanosine
  modified_base 54: mod_base = OTHER; note = Uridine phosphorothiorate
  modified_base 55: mod_base = OTHER; note = Uridine phosphorothiorate
  modified_base 56: mod_base = OTHER; note = 2'-Omethylcytosine phosphorothiorate
  modified_base 57: mod_base = OTHER; note = 2'-Omethylguanosine
  modified_base 63: mod_base = OTHER; note = Cytosine phosphorothiorate
  modified_base 65: mod_base = OTHER; note = 2'-fluoroguanosine
  modified_base 67: mod_base = OTHER; note = 2'-Omethylguanosine
  modified_base 72: mod_base = OTHER; note = Cytosine phosphorothiorate
  modified_base 73: mod_base = OTHER; note = 2'-fluoroguanosine
  modified_base 75: mod_base = OTHER; note = Cytosine phosphorothiorate
  modified_base 76: mod_base = OTHER; note = 2'-Omethyladenosine

SEQ ID NO: 7486 - RNA, 73 nt, synthetic construct; identical to SEQ ID NO: 935
  source 1..73: mol_type = other RNA
  modified_base 1: mod_base = OTHER; note = 2'-Omethylguanosine phosphorothiorate
  modified_base 2: mod_base = OTHER; note = 2'-Omethylguanosine
  modified_base 3: mod_base = OTHER; note = 2'-Omethylcytosine
  modified_base 4: mod_base = OTHER; note = 2'-Omethyluridine
  modified_base 5: mod_base = OTHER; note = 2'-Omethylcytosine
  modified_base 6: mod_base = OTHER; note = 2'-Omethylcytosine
  modified_base 49: mod_base = OTHER; note = 2'-Omethylcytosine
  modified_base 50: mod_base = OTHER; note = 2'-Omethylcytosine
  modified_base 51: mod_base = OTHER; note = 2'-Omethylguanosine
  modified_base 52: mod_base = OTHER; note = 2'-Omethylguanosine
  modified_base 53: mod_base = OTHER; note = 2'-Omethylguanosine
  modified_base 61: mod_base = OTHER; note = 2'-Omethylcytosine
  modified_base 62: mod_base = OTHER; note = 2'-Omethylcytosine
  modified_base 63: mod_base = OTHER; note = 2'-fluorocytosine
  modified_base 64: mod_base = OTHER; note = 2'-Omethylguanosine
  modified_base 65: mod_base = OTHER; note = 2'-Omethylguanosine
  modified_base 66: mod_base = OTHER; note = 2'-Omethylcytosine
  modified_base 67: mod_base = OTHER; note = 2'-Omethylguanosine
  modified_base 68: mod_base = OTHER; note = 2'-Omethylguanosine
  modified_base 69: mod_base = OTHER; note = 2'-Omethyladenosine

SEQ ID NO: 7487 - RNA, 76 nt, synthetic construct; identical to SEQ ID NO: 625
  source 1..76: mol_type = other RNA
  modified_base 5: mod_base = OTHER; note = 2'-fluorocytosine
  modified_base 6: mod_base = OTHER; note = 2'-Omethylcytosine
  modified_base 8: mod_base = OTHER; note = Uridine phosphorothiorate
  modified_base 10: mod_base = OTHER; note = 2'-Omethylguanosine
  modified_base 11: mod_base = OTHER; note = 2'-Omethylcytosine
  modified_base 13: mod_base = OTHER; note = Cytosine phosphorothiorate
  modified_base 14: mod_base = OTHER; note = 2'-Omethyladenosine
  modified_base 17: mod_base = OTHER; note = Guanosine phosphorothiorate
  modified_base 18: mod_base = OTHER; note = 2'-fluoroguanosine phosphorothiorate
  modified_base 23: mod_base = OTHER; note = 2'-Omethylcytosine
  modified_base 26: mod_base = OTHER; note = 2'-fluoroadenosine phosphorothiorate
  modified_base 27: mod_base = OTHER; note = Uridine phosphorothiorate
  modified_base 28: mod_base = OTHER; note = 2'-fluorouridine
  modified_base 29: mod_base = OTHER; note = Guanosine phosphorothiorate
  modified_base 30: mod_base = OTHER; note = 2'-fluoroguanosine
  modified_base 32: mod_base = OTHER; note = 2'-fluorocytosine
  modified_base 33: mod_base = OTHER; note = Uridine phosphorothiorate
  modified_base 34: mod_base = OTHER; note = 2'-fluorouridine
  modified_base 43: mod_base = OTHER; note = 2'-Omethyladenosine
  modified_base 44: mod_base = OTHER; note = 2'-fluoroadenosine
  modified_base 47: mod_base = OTHER; note = 2'-fluorouridine
  modified_base 49: mod_base = OTHER; note = 2'-fluorocytosine
  modified_base 50: mod_base = OTHER; note = Cytosine phosphorothiorate
  modified_base 56: mod_base = OTHER; note = 2'-fluorocytosine phosphorothiorate
  modified_base 57: mod_base = OTHER; note = 2'-Omethylguanosine phosphorothiorate
  modified_base 59: mod_base = OTHER; note = 2'-Omethylguanosine phosphorothiorate
  modified_base 60: mod_base = OTHER; note = 2'-fluorouridine
  modified_base 69: mod_base = OTHER; note = Adenosine phosphorothiorate
  modified_base 70: mod_base = OTHER; note = Guanosine phosphorothiorate
  modified_base 71: mod_base = OTHER; note = 2'-Omethyluridine

SEQ ID NO: 7488 - RNA, 75 nt, synthetic construct; identical to SEQ ID NO: 1045
  source 1..75: mol_type = other RNA
  modified_base 1: mod_base = OTHER; note = 2'-Omethylguanosine phosphorothiorate
  modified_base 2: mod_base = OTHER; note = 2'-Omethylguanosine phosphorothiorate
  modified_base 3: mod_base = OTHER; note = 2'-Omethyluridine
  modified_base 4: mod_base = OTHER; note = 2'-Omethyluridine
  modified_base 5: mod_base = OTHER; note = 2'-Omethylcytosine
  modified_base 6: mod_base = OTHER; note = 2'-Omethylcytosine
  modified_base 16: mod_base = OTHER; note = 2'-Omethyluridine
  modified_base 17: mod_base = OTHER; note = 2'-Omethylguanosine
  modified_base 18: mod_base = OTHER; note = 2'-Omethylguanosine
  modified_base 20: mod_base = OTHER; note = 2'-Omethyladenosine
  modified_base 25: mod_base = OTHER; note = 2'-Omethylcytosine
  modified_base 33: mod_base = OTHER; note = 2'-fluorouridine
  modified_base 35: mod_base = OTHER; note = Uridine phosphorothiorate
  modified_base 37: mod_base = OTHER; note = Adenosine phosphorothiorate
  modified_base 38: mod_base = OTHER; note = Adenosine phosphorothiorate
  modified_base 41: mod_base = OTHER; note = 2'-Omethylcytosine
  modified_base 44: mod_base = OTHER; note = 2'-Omethylcytosine
  modified_base 45: mod_base = OTHER; note = 2'-Omethylguanosine
  modified_base 46: mod_base = OTHER; note = 2'-fluoroadenosine
  modified_base 47: mod_base = OTHER; note = 2'-fluorouridine
  modified_base 55: mod_base = OTHER; note = 2'-Omethylcytosine
  modified_base 58: mod_base = OTHER; note = 2'-Omethylguanosine
  modified_base 72: mod_base = OTHER; note = 2'-Omethyluridine

SEQ ID NO: 7489 - RNA, 76 nt, synthetic construct; identical to SEQ ID NO: 3318
  source 1..76: mol_type = other RNA
  modified_base 1: mod_base = OTHER; note = 2'-Omethylcytosine phosphorothiorate
  modified_base 2: mod_base = OTHER; note = 2'-Omethylcytosine phosphorothiorate
  modified_base 38: mod_base = OTHER; note = Adenosine phosphorothiorate
  modified_base 39: mod_base = OTHER; note = Uridine phosphorothiorate
  modified_base 40: mod_base = OTHER; note = 2'-fluorocytosine
  modified_base 52: mod_base = OTHER; note = 2'-fluoroguanosine
  modified_base 74: mod_base = OTHER; note = Cytosine phosphorothiorate
  modified_base 75: mod_base = OTHER; note = 2'-Omethylcytosine phosphorothiorate
  modified_base 76: mod_base = OTHER; note = 2'-Omethyladenosine

SEQ ID NO: 7490 - RNA, 86 nt, synthetic construct; identical to SEQ ID NO: 3290
  source 1..86: mol_type = other RNA
  modified_base 1: mod_base = OTHER; note = 2'-Omethyladenosine
  modified_base 2: mod_base = OTHER; note = 2'-Omethylcytosine
  modified_base 3: mod_base = OTHER; note = 2'-Omethylcytosine
  modified_base 4: mod_base = OTHER; note = 2'-Omethyladenosine
  modified_base 5: mod_base = OTHER; note = 2'-Omethylguanosine
  modified_base 6: mod_base = OTHER; note = 2'-Omethylguanosine
  modified_base 13: mod_base = OTHER; note = 2'-Omethylguanosine
  modified_base 14: mod_base = OTHER; note = 2'-Omethyladenosine
  modified_base 15: mod_base = OTHER; note = 2'-Omethylguanosine
  modified_base 16: mod_base = OTHER; note = 2'-Omethyluridine
  modified_base 17: mod_base = OTHER; note = 2'-Omethylguanosine
  modified_base 18: mod_base = OTHER; note = 2'-Omethylguanosine
  modified_base 19: mod_base = OTHER; note = Uridine phosphorothiorate
  modified_base 20: mod_base = OTHER; note = 2'-Omethyluridine
  modified_base 21: mod_base = OTHER; note = Adenosine phosphorothiorate
  modified_base 25: mod_base = OTHER; note = 2'-Omethylcytosine
  modified_base 33: mod_base = OTHER; note = Uridine phosphorothiorate
  modified_base 34: mod_base = OTHER; note = 2'-Omethyluridine
  modified_base 35: mod_base = OTHER; note = Cytosine phosphorothiorate
  modified_base 37: mod_base = OTHER; note = Guanosine phosphorothiorate
  modified_base 38: mod_base = OTHER; note = Adenosine phosphorothiorate
  modified_base 41: mod_base = OTHER; note = 2'-fluorocytosine
  modified_base 42: mod_base = OTHER; note = 2'-Omethyladenosine
  modified_base 43: mod_base = OTHER; note = 2'-Omethyladenosine
  modified_base 44: mod_base = OTHER; note = 2'-fluorouridine
  modified_base 59: mod_base = OTHER; note = 2'-Omethylguanosine
  modified_base 60: mod_base = OTHER; note = 2'-Omethyluridine
  modified_base 62: mod_base = OTHER; note = 2'-Omethylguanosine
  modified_base 64: mod_base = OTHER; note = Uridine phosphorothiorate
  modified_base 65: mod_base = OTHER; note = Uridine phosphorothiorate
  modified_base 71: mod_base = OTHER; note = 2'-Omethylcytosine
  modified_base 75: mod_base = OTHER; note = 2'-Omethylcytosine
  modified_base 83: mod_base = OTHER; note = 2'-Omethyladenosine

SEQ ID NO: 7491 - RNA, 76 nt, synthetic construct; identical to SEQ ID NO: 625
  source 1..76: mol_type = other RNA
  modified_base 1: mod_base = OTHER; note = 2'-Omethylguanosine
  modified_base 17: mod_base = OTHER; note = 2'-Omethylguanosine
  modified_base 18: mod_base = OTHER; note = 2'-Omethylguanosine
  modified_base 33: mod_base = OTHER; note = 2'-fluorouridine
  modified_base 50: mod_base = OTHER; note = 2'-Omethylcytosine
  modified_base 52: mod_base = OTHER; note = 2'-Omethylguanosine
  modified_base 55: mod_base = OTHER; note = Uridine phosphorothiorate
  modified_base 71: mod_base = OTHER; note = Thymine
  modified_base 73: mod_base = OTHER; note = 2'-Omethylguanosine

SEQ ID NO: 7492 - RNA, 85 nt, synthetic construct; identical to SEQ ID NO: 3288
  source 1..85: mol_type = other RNA
  modified_base 1: mod_base = OTHER; note = Cytosine phosphorothiorate
  modified_base 2: mod_base = OTHER; note = 2'-fluorocytosine phosphorothiorate
  modified_base 3: mod_base = OTHER; note = 2'-fluoroadenosine
  modified_base 22: mod_base = OTHER; note = 2'-fluoroguanosine
  modified_base 25: mod_base = OTHER; note = 2'-fluoroguanosine
  modified_base 27: mod_base = OTHER; note = 2'-fluorouridine
  modified_base 30: mod_base = OTHER; note = 2'-fluoroadenosine
  modified_base 33: mod_base = OTHER; note = 2'-fluorouridine phosphorothiorate
  modified_base 34: mod_base = OTHER; note = 2'-fluorocytosine
  modified_base 39: mod_base = OTHER; note = Cytosine phosphorothiorate
  modified_base 43: mod_base = OTHER; note = 2'-Omethyluridine
  modified_base 45: mod_base = OTHER; note = Guanosine phosphorothiorate
  modified_base 49: mod_base = OTHER; note = Uridine phosphorothiorate
  modified_base 50: mod_base = OTHER; note = 2'-fluoroadenosine
  modified_base 54: mod_base = OTHER; note = 2'-Omethylcytosine
  modified_base 57: mod_base = OTHER; note = 2'-Omethylcytosine
  modified_base 58: mod_base = OTHER; note = 2'-Omethylguanosine
  modified_base 62: mod_base = OTHER; note = 2'-fluoroguanosine phosphorothiorate
  modified_base 71: mod_base = OTHER; note = 2'-fluorocytosine
  modified_base 76: mod_base = OTHER; note = Cytosine phosphorothiorate
  modified_base 84: mod_base = OTHER; note = 2'-fluorocytosine phosphorothiorate
  modified_base 85: mod_base = OTHER; note = 2'-Omethyladenosine

SEQ ID NO: 7493 - RNA, 76 nt, synthetic construct; identical to SEQ ID NO: 3342
  source 1..76: mol_type = other RNA
  modified_base 1: mod_base = OTHER; note = 2'-Omethylguanosine phosphorothiorate
  modified_base 2: mod_base = OTHER; note = 2'-Omethylguanosine phosphorothiorate
  modified_base 52: mod_base = OTHER; note = Guanosine phosphorothiorate
  modified_base 74: mod_base = OTHER; note = Cytosine phosphorothiorate
  modified_base 75: mod_base = OTHER; note = 2'-Omethylcytosine

SEQ ID NO: 7494 - RNA, 76 nt, synthetic construct; identical to SEQ ID NO: 3295
  source 1..76: mol_type = other RNA
  modified_base 1: mod_base = OTHER; note = 2'-Omethylcytosine phosphorothiorate
  modified_base 9: mod_base = OTHER; note = 2'-fluoroadenosine
  modified_base 11: mod_base = OTHER; note = Cytosine phosphorothiorate
  modified_base 17: mod_base = OTHER; note = 2'-Omethyluridine
  modified_base 26: mod_base = OTHER; note = 2'-fluoroguanosine phosphorothiorate
  modified_base 28: mod_base = OTHER; note = 2'-fluoroadenosine phosphorothiorate
  modified_base 35: mod_base = OTHER; note = Uridine phosphorothiorate
  modified_base 39: mod_base = OTHER; note = 2'-fluorouridine
  modified_base 52: mod_base = OTHER; note = 2'-Omethylguanosine
  modified_base 56: mod_base = OTHER; note = 2'-fluorocytosine phosphorothiorate
  modified_base 70: mod_base = OTHER; note = 2'-fluoroadenosine
  modified_base 75: mod_base = OTHER; note = 2'-Omethylcytosine phosphorothiorate
  modified_base 76: mod_base = OTHER; note = 2'-Omethyladenosine

SEQ ID NO: 7495 - RNA, 86 nt, synthetic construct; identical to SEQ ID NO: 3290
  source 1..86: mol_type = other RNA
  modified_base 1: mod_base = OTHER; note = 2'-Omethyladenosine phosphorothiorate
  modified_base 2: mod_base = OTHER; note = 2'-Omethylcytosine phosphorothiorate
  modified_base 3: mod_base = OTHER; note = 2'-Omethylcytosine
  modified_base 4: mod_base = OTHER; note = 2'-Omethyladenosine
  modified_base 5: mod_base = OTHER; note = 2'-Omethylguanosine
  modified_base 6: mod_base = OTHER; note = 2'-Omethylguanosine
  modified_base 10: mod_base = OTHER; note = 2'-Omethylguanosine
  modified_base 11: mod_base = OTHER; note = 2'-Omethylcytosine
  modified_base 12: mod_base = OTHER; note = 2'-Omethylcytosine
  modified_base 13: mod_base = OTHER; note = 2'-Omethylguanosine
  modified_base 14: mod_base = OTHER; note = 2'-Omethyladenosine
  modified_base 15: mod_base = OTHER; note = 2'-fluoroguanosine
  modified_base 16: mod_base = OTHER; note = 2'-Omethyluridine
  modified_base 17: mod_base = OTHER; note = 2'-Omethylguanosine
  modified_base 18: mod_base = OTHER; note = 2'-Omethylguanosine
  modified_base 19: mod_base = OTHER; note = 2'-fluorouridine
  modified_base 20: mod_base = OTHER; note = 2'-Omethyluridine
  modified_base 33: mod_base = OTHER; note = 2'-fluorouridine
  modified_base 35: mod_base = OTHER; note = Cytosine phosphorothiorate
  modified_base 37: mod_base = OTHER; note = Guanosine phosphorothiorate
  modified_base 38: mod_base = OTHER; note = Adenosine phosphorothiorate
  modified_base 44: mod_base = OTHER; note = 2'-Omethyluridine
  modified_base 57: mod_base = OTHER; note = 2'-fluoroguanosine
  modified_base 58: mod_base = OTHER; note = 2'-fluorocytosine
  modified_base 66: mod_base = OTHER; note = 2'-Omethylcytosine
  modified_base 69: mod_base = OTHER; note = 2'-Omethyladenosine
  modified_base 71: mod_base = OTHER; note = 2'-Omethylcytosine
  modified_base 72: mod_base = OTHER; note = 2'-Omethylcytosine
  modified_base 73: mod_base = OTHER; note = 2'-fluorocytosine
  modified_base 74: mod_base = OTHER; note = 2'-Omethyladenosine
  modified_base 75: mod_base = OTHER; note = 2'-Omethylcytosine
  modified_base 76: mod_base = OTHER; note = 2'-Omethyluridine
  modified_base 77: mod_base = OTHER; note = 2'-Omethylcytosine
  modified_base 78: mod_base = OTHER; note = 2'-Omethylcytosine
  modified_base 83: mod_base = OTHER; note = 2'-Omethyladenosine

SEQ ID NO: 7496 - DNA, 76 bp, synthetic construct; identical to SEQ ID NO: 1924
  source 1..76: mol_type = other DNA
  modified_base 1: mod_base = OTHER; note = 2'-Omethylguanosine phosphorothiorate
  modified_base 2: mod_base = OTHER; note = 2'-Omethylguanosine
  modified_base 3: mod_base = OTHER; note = 2'-Omethylcytosine
  modified_base 4: mod_base = OTHER; note = 2'-Omethyluridine
  modified_base 5: mod_base = OTHER; note = 2'-Omethylcytosine
  modified_base 6: mod_base = OTHER; note = 2'-Omethylcytosine
  modified_base 44: mod_base = OTHER; note = 2'-Omethyladenosine
  modified_base 45: mod_base = OTHER; note = 2'-Omethylguanosine
  modified_base 46: mod_base = OTHER; note = 2'-fluoroguanosine
  modified_base 48: mod_base = OTHER; note = 2'-fluorouridine
  modified_base 49: mod_base = OTHER; note = 2'-Omethylcytosine
  modified_base 73: mod_base = OTHER; note = 2'-Omethylguanosine
  misc_feature 1..46: note = RNA
  misc_feature 47: note = DNA
  misc_feature 48..76: note = RNA

SEQ ID NO: 7497 - RNA, 76 nt, synthetic construct; identical to SEQ ID NO: 625
  source 1..76: mol_type = other RNA
  modified_base 1: mod_base = OTHER; note = 2'-Omethylguanosine phosphorothiorate
  modified_base 2: mod_base = OTHER; note = 2'-Omethylguanosine
  modified_base 17: mod_base = OTHER; note = 2'-Omethylguanosine
  modified_base 33: mod_base = OTHER; note = 2'-fluorouridine
  modified_base 35: mod_base = OTHER; note = Cytosine phosphorothiorate
  modified_base 37: mod_base = OTHER; note = Adenosine phosphorothiorate
  modified_base 38: mod_base = OTHER; note = Adenosine phosphorothiorate
  modified_base 52: mod_base = OTHER; note = 2'-Omethylguanosine
  modified_base 56: mod_base = OTHER; note = 2'-Omethylcytosine
  modified_base 62: mod_base = OTHER; note = 2'-Omethylcytosine
  modified_base 63: mod_base = OTHER; note = 2'-fluorocytosine
  modified_base 65: mod_base = OTHER; note = 2'-Omethylguanosine
  modified_base 73: mod_base = OTHER; note = 2'-Omethylguanosine
  modified_base 75: mod_base = OTHER; note = 2'-fluorocytosine phosphorothiorate

SEQ ID NO: 7498 - RNA, 76 nt, synthetic construct; identical to SEQ ID NO: 3318
  source 1..76: mol_type = other RNA
  modified_base 1: mod_base = OTHER; note = 2'-Omethylcytosine
  modified_base 13: mod_base = OTHER; note = 2'-Omethylcytosine
  modified_base 18: mod_base = OTHER; note = 2'-Omethylguanosine
  modified_base 19: mod_base = OTHER; note = 2'-Omethylguanosine
  modified_base 25: mod_base = OTHER; note = 2'-Omethylcytosine
  modified_base 33: mod_base = OTHER; note = 2'-fluorouridine
  modified_base 34: mod_base = OTHER; note = 2'-Omethylcytosine
  modified_base 35: mod_base = OTHER; note = Uridine phosphorothiorate
  modified_base 37: mod_base = OTHER; note = Guanosine phosphorothiorate
  modified_base 38: mod_base = OTHER; note = Adenosine phosphorothiorate
  modified_base 41: mod_base = OTHER; note = 2'-fluorocytosine
  modified_base 42: mod_base = OTHER; note = 2'-Omethyluridine
  modified_base 43: mod_base = OTHER; note = 2'-Omethyluridine
  modified_base 44: mod_base = OTHER; note = 2'-fluoroadenosine
  modified_base 49: mod_base = OTHER; note = 2'-Omethylguanosine
  modified_base 50: mod_base = OTHER; note = 2'-Omethylcytosine
  modified_base 51: mod_base = OTHER; note = 2'-Omethyluridine
  modified_base 52: mod_base = OTHER; note = 2'-Omethylguanosine
  modified_base 53: mod_base = OTHER; note = 2'-Omethylguanosine
  modified_base 54: mod_base = OTHER; note = Uridine phosphorothiorate
  modified_base 55: mod_base = OTHER; note = Uridine phosphorothiorate
  modified_base 61: mod_base = OTHER; note = 2'-Omethylcytosine
  modified_base 65: mod_base = OTHER; note = 2'-Omethylcytosine
  modified_base 73: mod_base = OTHER; note = 2'-Omethyladenosine

SEQ ID NO: 7499 - RNA, 76 nt, synthetic construct; identical to SEQ ID NO: 625
  source 1..76: mol_type = other RNA
  modified_base 2: mod_base = OTHER; note = 2'-Omethylguanosine
  modified_base 5: mod_base = OTHER; note = 2'-fluorocytosine phosphorothiorate
  modified_base 6: mod_base = OTHER; note = 2'-Omethylcytosine phosphorothiorate
  modified_base 10: mod_base = OTHER; note = 2'-fluoroguanosine
  modified_base 13: mod_base = OTHER; note = 2'-fluorocytosine phosphorothiorate
  modified_base 14: mod_base = OTHER; note = 2'-Omethyladenosine
  modified_base 16: mod_base = OTHER; note = Uridine phosphorothiorate
  modified_base 17: mod_base = OTHER; note = 2'-Omethylguanosine
  modified_base 20: mod_base = OTHER; note = 2'-Omethyluridine
  modified_base 22: mod_base = OTHER; note = 2'-Omethylguanosine
  modified_base 23: mod_base = OTHER; note = 2'-fluorocytosine
  modified_base 24: mod_base = OTHER; note = Guanosine phosphorothiorate
  modified_base 25: mod_base = OTHER; note = 2'-fluorocytosine
  modified_base 27: mod_base = OTHER; note = Uridine phosphorothiorate
  modified_base 30: mod_base = OTHER; note = 2'-fluoroguanosine
  modified_base 34: mod_base = OTHER; note = 2'-Omethyluridine phosphorothiorate
  modified_base 38: mod_base = OTHER; note = 2'-fluoroadenosine
  modified_base 39: mod_base = OTHER; note = 2'-fluorouridine
  modified_base 40: mod_base = OTHER; note = 2'-fluorouridine
  modified_base 43: mod_base = OTHER; note = 2'-Omethyladenosine
  modified_base 44: mod_base = OTHER; note = 2'-Omethyladenosine
  modified_base 50: mod_base = OTHER; note = 2'-Omethylcytosine
  modified_base 52: mod_base = OTHER; note = 2'-Omethylguanosine
  modified_base 54: mod_base = OTHER; note = 2'-fluorouridine
  modified_base 55: mod_base = OTHER; note = Uridine phosphorothiorate
  modified_base 57: mod_base = OTHER; note = 2'-Omethylguanosine
  modified_base 58: mod_base = OTHER; note = Adenosine phosphorothiorate
  modified_base 59: mod_base = OTHER; note = 2'-Omethylguanosine
  modified_base 64: mod_base = OTHER; note = 2'-Omethylguanosine
  modified_base 65: mod_base = OTHER; note = 2'-fluoroguanosine
  modified_base 66: mod_base = OTHER; note = 2'-Omethylcytosine
  modified_base 68: mod_base = OTHER; note = 2'-fluoroguanosine phosphorothiorate

SEQ ID NO: 7500 - RNA, 76 nt, synthetic construct
  source 1..76: mol_type = other RNA
cctcgcgtggcgcaatggatagcgcattggacttcaaattcaaaggttccgggttcgagtcccggcgcgagggcca

SEQ ID NO: 7501 - RNA, 76 nt, synthetic construct; identical to SEQ ID NO: 3295
  source 1..76: mol_type = other RNA
  modified_base 1: mod_base = OTHER; note = 2'-fluorocytosine phosphorothiorate
  modified_base 2: mod_base = OTHER; note = 2'-fluorocytosine phosphorothiorate
  modified_base 3: mod_base = OTHER; note = 2'-Omethyluridine
  modified_base 4: mod_base = OTHER; note = 2'-fluorouridine phosphorothiorate
  modified_base 11: mod_base = OTHER; note = 2'-fluorocytosine
  modified_base 14: mod_base = OTHER; note = 2'-fluoroadenosine phosphorothiorate
  modified_base 15: mod_base = OTHER; note = Guanosine phosphorothiorate
  modified_base 17: mod_base = OTHER; note = 2'-Omethyluridine
  modified_base 25: mod_base = OTHER; note = 2'-Omethylcytosine phosphorothiorate
  modified_base 26: mod_base = OTHER; note = 2'-Omethylguanosine phosphorothiorate
  modified_base 27: mod_base = OTHER; note = 2'-fluoroguanosine phosphorothiorate
  modified_base 28: mod_base = OTHER; note = 2'-fluoroadenosine phosphorothiorate
  modified_base 41: mod_base = OTHER; note = 2'-Omethylcytosine
  modified_base 47: mod_base = OTHER; note = 2'-fluorouridine phosphorothiorate
  modified_base 49: mod_base = OTHER; note = 2'-fluoroguanosine phosphorothiorate
  modified_base 52: mod_base = OTHER; note = 2'-fluoroguanosine phosphorothiorate
  modified_base 57: mod_base = OTHER; note = Guanosine phosphorothiorate
  modified_base 66: mod_base = OTHER; note = 2'-fluorouridine
  modified_base 74: mod_base = OTHER; note = 2'-Omethylcytosine phosphorothiorate
  modified_base 75: mod_base = OTHER; note = Cytosine phosphorothiorate
  modified_base 76: mod_base = OTHER; note = 2'-Omethyladenosine

SEQ ID NO: 7502 - RNA, 85 nt, synthetic construct; identical to SEQ ID NO: 3297
  source 1..85: mol_type = other RNA
  modified_base 1: mod_base = OTHER; note = 2'-Omethylguanosine phosphorothiorate
  modified_base 2: mod_base = OTHER; note = 2'-Omethylcytosine phosphorothiorate
  modified_base 14: mod_base = OTHER; note = 2'-Omethyladenosine
  modified_base 17: mod_base = OTHER; note = 2'-Omethylguanosine
  modified_base 18: mod_base = OTHER; note = 2'-Omethylguanosine
  modified_base 20: mod_base = OTHER; note = 2'-Omethyluridine phosphorothiorate
  modified_base 22: mod_base = OTHER; note = 2'-Omethyladenosine
  modified_base 25: mod_base = OTHER; note = 2'-Omethylcytosine
  modified_base 27: mod_base = OTHER; note = 2'-Omethyluridine
  modified_base 33: mod_base = OTHER; note = 2'-fluorouridine
  modified_base 41: mod_base = OTHER; note = 2'-Omethylcytosine phosphorothiorate
  modified_base 44: mod_base = OTHER; note = 2'-Omethyluridine phosphorothiorate
  modified_base 56: mod_base = OTHER; note = 2'-fluoroguanosine
  modified_base 57: mod_base = OTHER; note = 2'-fluorocytosine
  modified_base 61: mod_base = OTHER; note = 2'-Omethylguanosine
  modified_base 64: mod_base = OTHER; note = Uridine phosphorothiorate
  modified_base 80: mod_base = OTHER; note = 2'-Omethylguanosine
  modified_base 82: mod_base = OTHER; note = 2'-Omethylguanosine

SEQ ID NO: 7503 - RNA, 76 nt, synthetic construct
  source 1..76: mol_type = other RNA
ggctacctggcgcaatggatagcgcattggacttcaaattcaaaggttcggggttcgagtccccgggtagtcgcca

SEQ ID NO: 7504 - RNA, 75 nt, synthetic construct; identical to SEQ ID NO: 3306
  source 1..75: mol_type = other RNA
  modified_base 1: mod_base = OTHER; note = 2'-Omethylguanosine
  modified_base 2: mod_base = OTHER; note = 2'-Omethyladenosine
  modified_base 3: mod_base = OTHER; note = 2'-Omethylcytosine
  modified_base 4: mod_base = OTHER; note = 2'-Omethylcytosine
  modified_base 5: mod_base = OTHER; note = 2'-Omethyluridine
  modified_base 6: mod_base = OTHER; note = 2'-Omethylcytosine
  modified_base 72: mod_base = OTHER; note = 2'-Omethyladenosine

SEQ ID NO: 7505 - RNA, 76 nt, synthetic construct; identical to SEQ ID NO: 625
  source 1..76: mol_type = other RNA
  modified_base 1: mod_base = OTHER; note = 2'-Omethylguanosine
  modified_base 10: mod_base = OTHER; note = 2'-Omethylguanosine
  modified_base 13: mod_base = OTHER; note = 2'-Omethylcytosine
  modified_base 17: mod_base = OTHER; note = Guanosine phosphorothiorate
  modified_base 18: mod_base = OTHER; note = 2'-Omethylguanosine
  modified_base 19: mod_base = OTHER; note = Adenosine phosphorothiorate
  modified_base 20: mod_base = OTHER; note = 2'-Omethyluridine
  modified_base 25: mod_base = OTHER; note = 2'-Omethylcytosine
  modified_base 29: mod_base = OTHER; note = 2'-Omethylguanosine
  modified_base 33: mod_base = OTHER; note = 2'-fluorouridine
  modified_base 35: mod_base = OTHER; note = Cytosine phosphorothiorate
  modified_base 37: mod_base = OTHER; note = Adenosine phosphorothiorate
  modified_base 38: mod_base = OTHER; note = Adenosine phosphorothiorate
  modified_base 41: mod_base = OTHER; note = 2'-fluorocytosine phosphorothiorate
  modified_base 43: mod_base = OTHER; note = 2'-Omethyladenosine
  modified_base 44: mod_base = OTHER; note = 2'-Omethyladenosine
  modified_base 50: mod_base = OTHER; note = 2'-Omethylcytosine
  modified_base 52: mod_base = OTHER; note = 2'-Omethylguanosine
  modified_base 54: mod_base = OTHER; note = Uridine phosphorothiorate
  modified_base 55: mod_base = OTHER; note = Uridine phosphorothiorate
  modified_base 56: mod_base = OTHER; note = 2'-Omethylcytosine
  modified_base 57: mod_base = OTHER; note = Guanosine phosphorothiorate
  modified_base 62: mod_base = OTHER; note = 2'-Omethylcytosine
  modified_base 63: mod_base = OTHER; note = 2'-fluorocytosine
  modified_base 65: mod_base = OTHER; note = 2'-Omethylguanosine
  modified_base 71: mod_base = OTHER; note = 2'-Omethyluridine
  modified_base 73: mod_base = OTHER; note = 2'-Omethylguanosine

SEQ ID NO: 7506 - RNA, 76 nt, synthetic construct
  source 1..76: mol_type = other RNA
ggcgccgtggcgcaatggatagcgcattcgacttcaaattgaaaggttccgggttcgagtcccggcggcgtcgcca

SEQ ID NO: 7507 - RNA, 76 nt, synthetic construct; identical to SEQ ID NO: 625
  source 1..76: mol_type = other RNA
  modified_base 1: mod_base = OTHER; note = 2'-Omethylguanosine
  modified_base 10: mod_base = OTHER; note = 2'-Omethylguanosine
  modified_base 13: mod_base = OTHER; note = 2'-Omethylcytosine
  modified_base 17: mod_base = OTHER; note = 2'-Omethylguanosine
  modified_base 18: mod_base = OTHER; note = 2'-Omethylguanosine
  modified_base 19: mod_base = OTHER; note = Adenosine phosphorothiorate
  modified_base 20: mod_base = OTHER; note = 2'-Omethyluridine
  modified_base 25: mod_base = OTHER; note = 2'-Omethylcytosine
  modified_base 29: mod_base = OTHER; note = 2'-Omethylguanosine
  modified_base 33: mod_base = OTHER; note = 2'-fluorouridine
  modified_base 35: mod_base = OTHER; note = Cytosine phosphorothiorate
  modified_base 37: mod_base = OTHER; note = Adenosine phosphorothiorate
  modified_base 38: mod_base = OTHER; note = Adenosine phosphorothiorate
  modified_base 43: mod_base = OTHER; note = 2'-Omethyladenosine
  modified_base 44: mod_base = OTHER; note = 2'-fluoroadenosine
  modified_base 46: mod_base = OTHER; note = Guanosine phosphorothiorate
  modified_base 50: mod_base = OTHER; note = 2'-Omethylcytosine
  modified_base 52: mod_base = OTHER; note = 2'-Omethylguanosine
  modified_base 54: mod_base = OTHER; note = Uridine phosphorothiorate
  modified_base 55: mod_base = OTHER; note = Uridine phosphorothiorate
  modified_base 56: mod_base = OTHER; note = 2'-Omethylcytosine
  modified_base 57: mod_base = OTHER; note = Guanosine phosphorothiorate
  modified_base 62: mod_base = OTHER; note = 2'-Omethylcytosine
  modified_base 63: mod_base = OTHER; note = 2'-fluorocytosine
  modified_base 65: mod_base = OTHER; note = 2'-Omethylguanosine
  modified_base 71: mod_base = OTHER; note = 2'-Omethyluridine
  modified_base 73: mod_base = OTHER; note = 2'-Omethylguanosine

SEQ ID NO: 7508 - RNA, 73 nt, synthetic construct; identical to SEQ ID NO: 935
  source 1..73: mol_type = other RNA
  modified_base 33: mod_base = OTHER; note = 2'-O-(2-Methoxyethyl) thymine
  modified_base 73: mod_base = OTHER; note = 2'-Omethylguanosine

SEQ ID NO: 7509 - RNA, 85 nt, synthetic construct; identical to SEQ ID NO: 3286
  source 1..85: mol_type = other RNA
  modified_base 1: mod_base = OTHER; note = 2'-Omethylcytosine phosphorothiorate
  modified_base 40: mod_base = OTHER; note = Cytosine phosphorothiorate
  modified_base 49: mod_base = OTHER; note = 2'-fluorouridine
  modified_base 70: mod_base = OTHER; note = 2'-fluorocytosine
  modified_base 85: mod_base = OTHER; note = 2'-fluoroadenosine

SEQ ID NO: 7510 - RNA, 75 nt, synthetic construct; identical to SEQ ID NO: 3299
  source 1..75: mol_type = other RNA
  modified_base 18: mod_base = OTHER; note = 2'-fluoroguanosine
  modified_base 45: mod_base = OTHER; note = Guanosine phosphorothiorate
  modified_base 48: mod_base = OTHER; note = 2'-fluorocytosine phosphorothiorate
  modified_base 51: mod_base = OTHER; note = Guanosine phosphorothiorate
  modified_base 63: mod_base = OTHER; note = 2'-fluorouridine phosphorothiorate
  modified_base 71: mod_base = OTHER; note = Cytosine phosphorothiorate
  modified_base 74: mod_base = OTHER; note = Cytosine phosphorothiorate

SEQ ID NO: 7511 - RNA, 86 nt, synthetic construct; identical to SEQ ID NO: 3290
  source 1..86: mol_type = other RNA
  modified_base 1: mod_base = OTHER; note = 2'-Omethyladenosine
  modified_base 18: mod_base = OTHER; note = 2'-Omethylguanosine
  modified_base 60: mod_base = OTHER; note = 2'-Omethyluridine
  modified_base 62: mod_base = OTHER; note = 2'-Omethylguanosine
  modified_base 83: mod_base = OTHER; note = 2'-Omethyladenosine

SEQ ID NO: 7512 - RNA, 86 nt, synthetic construct; identical to SEQ ID NO: 3290
  source 1..86: mol_type = other RNA
  modified_base 33: mod_base = OTHER; note = 2'-fluorouridine

SEQ ID NO: 7513 - RNA, 73 nt, synthetic construct; identical to SEQ ID NO: 935
  source 1..73: mol_type = other RNA
  modified_base 1: mod_base = OTHER; note = 2'-Omethylguanosine phosphorothiorate
  modified_base 2: mod_base = OTHER; note = 2'-Omethylguanosine
  modified_base 25: mod_base = OTHER; note = 2'-fluorocytosine
  modified_base 72: mod_base = OTHER; note = 2'-Omethylcytosine

SEQ ID NO: 7514 - RNA, 86 nt, synthetic construct; identical to SEQ ID NO: 3290
  source 1..86: mol_type = other RNA
  modified_base 37: mod_base = OTHER; note = 2'-fluoroguanosine

SEQ ID NO: 7515 - RNA, 87 nt, synthetic construct
  source 1..87: mol_type = other RNA
gctggtttgcccgagtggttaagggggaagacttcagatcttctgcagttgaactgcgcgtgggttcgaaccccacagccagcacca

SEQ ID NO: 7516 - RNA, 76 nt, synthetic construct; identical to SEQ ID NO: 3342
  source 1..76: mol_type = other RNA
  modified_base 1: mod_base = OTHER; note = 2'-Omethylguanosine
  modified_base 2: mod_base = OTHER; note = 2'-Omethylguanosine
  modified_base 3: mod_base = OTHER; note = 2'-Omethylcytosine
  modified_base 4: mod_base = OTHER; note = 2'-Omethyluridine
  modified_base 5: mod_base = OTHER; note = 2'-Omethylcytosine
  modified_base 6: mod_base = OTHER; note = 2'-Omethylcytosine
  modified_base 16: mod_base = OTHER; note = 2'-Omethyluridine
  modified_base 17: mod_base = OTHER; note = 2'-Omethylguanosine
  modified_base 18: mod_base = OTHER; note = 2'-Omethylguanosine
  modified_base 20: mod_base = OTHER; note = 2'-Omethyluridine
  modified_base 22: mod_base = OTHER; note = 2'-Omethylguanosine
  modified_base 23: mod_base = OTHER; note = 2'-Omethylcytosine
  modified_base 24: mod_base = OTHER; note = 2'-Omethylguanosine
  modified_base 25: mod_base = OTHER; note = 2'-Omethylcytosine
  modified_base 33: mod_base = OTHER; note = 2'-fluorouridine
  modified_base 35: mod_base = OTHER; note = Cytosine phosphorothiorate
  modified_base 37: mod_base = OTHER; note = Adenosine phosphorothiorate
  modified_base 38: mod_base = OTHER; note = Adenosine phosphorothiorate
  modified_base 41: mod_base = OTHER; note = 2'-Omethylcytosine
  modified_base 42: mod_base = OTHER; note = 2'-Omethylguanosine
  modified_base 43: mod_base = OTHER; note = 2'-Omethyladenosine
  modified_base 44: mod_base = OTHER; note = 2'-Omethyladenosine
  modified_base 45: mod_base = OTHER; note = 2'-Omethylguanosine
  modified_base 46: mod_base = OTHER; note = 2'-fluoroguanosine
  modified_base 48: mod_base = OTHER; note = 2'-fluorouridine
  modified_base 49: mod_base = OTHER; note = 2'-Omethylcytosine
  modified_base 50: mod_base = OTHER; note = 2'-Omethylcytosine
  modified_base 52: mod_base = OTHER; note = 2'-Omethylguanosine
  modified_base 54: mod_base = OTHER; note = 2'-Omethyluridine
  modified_base 55: mod_base = OTHER; note = Uridine phosphorothiorate
  modified_base 56: mod_base = OTHER; note = 2'-Omethylcytosine
  modified_base 57: mod_base = OTHER; note = 2'-fluoroguanosine
  modified_base 59: mod_base = OTHER; note = 2'-Omethylguanosine
  modified_base 61: mod_base = OTHER; note = 2'-Omethylcytosine
  modified_base 65: mod_base = OTHER; note = 2'-Omethylguanosine
  modified_base 73: mod_base = OTHER; note = 2'-Omethylguanosine

SEQ ID NO: 7517 - RNA, 76 nt, synthetic construct; identical to SEQ ID NO: 625
  source 1..76: mol_type = other RNA
  modified_base 1: mod_base = OTHER; note = Guanosine phosphorothiorate
  modified_base 2: mod_base = OTHER; note = 2'-Omethylguanosine
  modified_base 3: mod_base = OTHER; note = 2'-fluorocytosine
  modified_base 5: mod_base = OTHER; note = 2'-fluorocytosine
  modified_base 9: mod_base = OTHER; note = Guanosine phosphorothiorate
  modified_base 10: mod_base = OTHER; note = 2'-Omethylguanosine
  modified_base 11: mod_base = OTHER; note = 2'-fluorocytosine
  modified_base 12: mod_base = OTHER; note = 2'-fluoroguanosine
  modified_base 15: mod_base = OTHER; note = 2'-Omethyladenosine phosphorothiorate
  modified_base 16: mod_base = OTHER; note = 2'-fluorouridine
  modified_base 20: mod_base = OTHER; note = 2'-fluorouridine
  modified_base 21: mod_base = OTHER; note = Adenosine phosphorothiorate
  modified_base 22: mod_base = OTHER; note = 2'-fluoroguanosine
  modified_base 23: mod_base = OTHER; note = 2'-Omethylcytosine
  modified_base 25: mod_base = OTHER; note = 2'-Omethylcytosine
  modified_base 26: mod_base = OTHER; note = 2'-Omethyladenosine
  modified_base 28: mod_base = OTHER; note = Uridine phosphorothiorate
  modified_base 29: mod_base = OTHER; note = 2'-Omethylguanosine
  modified_base 30: mod_base = OTHER; note = 2'-fluoroguanosine
  modified_base 36: mod_base = OTHER; note = Adenosine phosphorothiorate
  modified_base 40: mod_base = OTHER; note = 2'-Omethyluridine
  modified_base 42: mod_base = OTHER; note = Adenosine phosphorothiorate
  modified_base 43: mod_base = OTHER; note = 2'-Omethyladenosine
  modified_base 45: mod_base = OTHER; note = 2'-fluoroguanosine phosphorothiorate
  modified_base 46: mod_base = OTHER; note = 2'-fluoroguanosine
  modified_base 49: mod_base = OTHER; note = 2'-fluorocytosine
  modified_base 50: mod_base = OTHER; note = 2'-fluorocytosine
  modified_base 54: mod_base = OTHER; note = 2'-fluorouridine
  modified_base 56: mod_base = OTHER; note = 2'-fluorocytosine
  modified_base 58: mod_base = OTHER; note = 2'-fluoroadenosine
  modified_base 61: mod_base = OTHER; note = 2'-fluorocytosine
  modified_base 65: mod_base = OTHER; note = 2'-Omethylguanosine
  modified_base 67: mod_base = OTHER; note = 2'-Omethylguanosine
  modified_base 68: mod_base = OTHER; note = Guanosine phosphorothiorate
  modified_base 69: mod_base = OTHER; note = 2'-Omethyladenosine
  modified_base 70: mod_base = OTHER; note = 2'-fluoroguanosine
  modified_base 72: mod_base = OTHER; note = 2'-fluorocytosine
  modified_base 74: mod_base = OTHER; note = 2'-fluorocytosine
  modified_base 75: mod_base = OTHER; note = Cytosine phosphorothiorate
  modified_base 76: mod_base = OTHER; note = 2'-Omethyladenosine

SEQ ID NO: 7518 - RNA, 76 nt, synthetic construct; identical to SEQ ID NO: 625
  source 1..76: mol_type = other RNA
  modified_base 1: mod_base = OTHER; note = 2'-Omethylguanosine phosphorothiorate
  modified_base 2: mod_base = OTHER; note = 2'-Omethylguanosine
  modified_base 3: mod_base = OTHER; note = 2'-Omethylcytosine
  modified_base 4: mod_base = OTHER; note = 2'-Omethyluridine phosphorothiorate
  modified_base 5: mod_base = OTHER; note = 2'-Omethylcytosine
  modified_base 13: mod_base = OTHER; note = 2'-Omethylcytosine
  modified_base 14: mod_base = OTHER; note = 2'-Omethyladenosine
  modified_base 16: mod_base = OTHER; note = 2'-fluorouridine phosphorothiorate
  modified_base 18: mod_base = OTHER; note = 2'-Omethylguanosine
  modified_base 21: mod_base = OTHER; note = 2'-fluoroadenosine phosphorothiorate
  modified_base 22: mod_base = OTHER; note = 2'-fluoroguanosine phosphorothiorate
  modified_base 25: mod_base = OTHER; note = 2'-Omethylcytosine
  modified_base 26: mod_base = OTHER; note = 2'-Omethyladenosine phosphorothiorate
  modified_base 28: mod_base = OTHER; note = 2'-Omethyluridine phosphorothiorate
  modified_base 29: mod_base = OTHER; note = 2'-Omethylguanosine
  modified_base 30: mod_base = OTHER; note = 2'-Omethylguanosine phosphorothiorate
  modified_base 31: mod_base = OTHER; note = 2'-Omethyladenosine phosphorothiorate
  modified_base 33: mod_base = OTHER; note = 2'-fluorouridine
  modified_base 35: mod_base = OTHER; note = Cytosine phosphorothiorate
  modified_base 38: mod_base = OTHER; note = 2'-Omethyladenosine phosphorothiorate
  modified_base 39: mod_base = OTHER; note = 2'-Omethyluridine phosphorothiorate
  modified_base 40: mod_base = OTHER; note = 2'-Omethyluridine
  modified_base 41: mod_base = OTHER; note = 2'-fluorocytosine
  modified_base 45: mod_base = OTHER; note = 2'-Omethylguanosine
  modified_base 49: mod_base = OTHER; note = 2'-Omethylcytosine
  modified_base 50: mod_base = OTHER; note = 2'-Omethylcytosine
  modified_base 52: mod_base = OTHER; note = 2'-Omethylguanosine
  modified_base 53: mod_base = OTHER; note = 2'-fluoroguanosine
  modified_base 54: mod_base = OTHER; note = Uridine phosphorothiorate
  modified_base 55: mod_base = OTHER; note = Uridine phosphorothiorate
  modified_base 56: mod_base = OTHER; note = 2'-Omethylcytosine phosphorothiorate
  modified_base 59: mod_base = OTHER; note = 2'-Omethylguanosine
  modified_base 62: mod_base = OTHER; note = 2'-Omethylcytosine
  modified_base 63: mod_base = OTHER; note = Cytosine phosphorothiorate
  modified_base 65: mod_base = OTHER; note = 2'-Omethylguanosine phosphorothiorate
  modified_base 66: mod_base = OTHER; note = 2'-Omethylcytosine phosphorothiorate
  modified_base 67: mod_base = OTHER; note = 2'-fluoroguanosine
  modified_base 68: mod_base = OTHER; note = 2'-Omethylguanosine
  modified_base 69: mod_base = OTHER; note = 2'-Omethyladenosine phosphorothiorate
  modified_base 72: mod_base = OTHER; note = 2'-fluorocytosine phosphorothiorate
  modified_base 73: mod_base = OTHER; note = 2'-Omethylguanosine
  modified_base 74: mod_base = OTHER; note = 2'-fluorocytosine phosphorothiorate
  modified_base 75: mod_base = OTHER; note = 2'-fluorocytosine
  modified_base 76: mod_base = OTHER; note = 2'-Omethyladenosine

SEQ ID NO: 7519 - RNA, 75 nt, synthetic construct; identical to SEQ ID NO: 1045
  source 1..75: mol_type = other RNA
  modified_base 1: mod_base = OTHER; note = 2'-Omethylguanosine phosphorothiorate
  modified_base 7: mod_base = OTHER; note = 2'-fluoroadenosine phosphorothiorate
  modified_base 12: mod_base = OTHER; note = Guanosine phosphorothiorate
  modified_base 13: mod_base = OTHER; note = 2'-fluorouridine
  modified_base 18: mod_base = OTHER; note = 2'-Omethylguanosine phosphorothiorate
  modified_base 19: mod_base = OTHER; note = 2'-fluorouridine
  modified_base 20: mod_base = OTHER; note = Adenosine phosphorothiorate
  modified_base 21: mod_base = OTHER; note = 2'-fluoroadenosine
  modified_base 22: mod_base = OTHER; note = 2'-fluoroguanosine
  modified_base 28: mod_base = OTHER; note = 2'-fluorouridine
  modified_base 38: mod_base = OTHER; note = 2'-fluoroadenosine
  modified_base 39: mod_base = OTHER; note = 2'-fluorouridine phosphorothiorate
  modified_base 50: mod_base = OTHER; note = Guanosine phosphorothiorate
  modified_base 51: mod_base = OTHER; note = 2'-fluoroadenosine
  modified_base 62: mod_base = OTHER; note = 2'-Omethylcytosine
  modified_base 66: mod_base = OTHER; note = Guanosine phosphorothiorate
  modified_base 72: mod_base = OTHER; note = 2'-fluorouridine phosphorothiorate

SEQ ID NO: 7520 - RNA, 76 nt, synthetic construct; identical to SEQ ID NO: 3289
  source 1..76: mol_type = other RNA
  modified_base 1: mod_base = OTHER; note = 2'-Omethylguanosine
  modified_base 2: mod_base = OTHER; note = 2'-Omethylcytosine
  modified_base 3: mod_base = OTHER; note = 2'-Omethylcytosine
  modified_base 4: mod_base = OTHER; note = 2'-Omethyluridine
  modified_base 5: mod_base = OTHER; note = 2'-Omethylguanosine
  modified_base 6: mod_base = OTHER; note = 2'-Omethylguanosine
  modified_base 22: mod_base = OTHER; note = 2'-Omethylguanosine
  modified_base 23: mod_base = OTHER; note = 2'-Omethyladenosine
  modified_base 24: mod_base = OTHER; note = 2'-Omethylguanosine
  modified_base 25: mod_base = OTHER; note = 2'-Omethylcytosine

SEQ ID NO: 7521 - RNA, 75 nt, synthetic construct; identical to SEQ ID NO: 1045
  source 1..75: mol_type = other RNA
  modified_base 1: mod_base = OTHER; note = 2'-Omethylguanosine phosphorothiorate
  modified_base 2: mod_base = OTHER; note = 2'-Omethylguanosine phosphorothiorate
  modified_base 22: mod_base = OTHER; note = 2'-fluoroguanosine
  modified_base 23: mod_base = OTHER; note = 2'-fluorocytosine phosphorothiorate
  modified_base 35: mod_base = OTHER; note = 2'-fluorouridine
  modified_base 44: mod_base = OTHER; note = 2'-fluorocytosine
  modified_base 63: mod_base = OTHER; note = Guanosine phosphorothiorate
  modified_base 64: mod_base = OTHER; note = Guanosine phosphorothiorate
  modified_base 67: mod_base = OTHER; note = 2'-fluoroguanosine
  modified_base 68: mod_base = OTHER; note = Adenosine phosphorothiorate

SEQ ID NO: 7522 - RNA, 76 nt, synthetic construct; identical to SEQ ID NO: 625
  source 1..76: mol_type = other RNA
  modified_base 1: mod_base = OTHER; note = 2'-Omethylguanosine
  modified_base 2: mod_base = OTHER; note = 2'-Omethylguanosine
  modified_base 3: mod_base = OTHER; note = 2'-Omethylcytosine
  modified_base 4: mod_base = OTHER; note = 2'-Omethyluridine
  modified_base 5: mod_base = OTHER; note = 2'-Omethylcytosine
  modified_base 6: mod_base = OTHER; note = 2'-Omethylcytosine
  modified_base 7: mod_base = OTHER; note = 2'-Omethylguanosine phosphorothiorate
  modified_base 10: mod_base = OTHER; note = 2'-Omethylguanosine
  modified_base 11: mod_base = OTHER; note = 2'-Omethylcytosine
  modified_base 12: mod_base = OTHER; note = 2'-Omethylguanosine
  modified_base 13: mod_base = OTHER; note = 2'-Omethylcytosine
  modified_base 15: mod_base = OTHER; note = Adenosine phosphorothiorate
  modified_base 16: mod_base = OTHER; note = 2'-Omethyluridine
  modified_base 17: mod_base = OTHER; note = 2'-Omethylguanosine
  modified_base 18: mod_base = OTHER; note = 2'-Omethylguanosine
  modified_base 21: mod_base = OTHER; note = 2'-fluoroadenosine phosphorothiorate
  modified_base 22: mod_base = OTHER; note = 2'-Omethylguanosine
  modified_base 23: mod_base = OTHER; note = 2'-Omethylcytosine
  modified_base 24: mod_base = OTHER; note = 2'-Omethylguanosine
  modified_base 25: mod_base = OTHER; note = 2'-Omethylcytosine phosphorothiorate
  modified_base 26: mod_base = OTHER; note = Adenosine phosphorothiorate
  modified_base 28: mod_base = OTHER; note = 2'-Omethyluridine
  modified_base 29: mod_base = OTHER; note = 2'-Omethylguanosine
  modified_base 30: mod_base = OTHER; note = 2'-Omethylguanosine phosphorothiorate
  modified_base 33: mod_base = OTHER; note = 2'-fluorouridine
  modified_base 34: mod_base = OTHER; note = 2'-Omethyluridine phosphorothiorate
  modified_base 35: mod_base = OTHER; note = 2'-Omethylcytosine phosphorothiorate
  modified_base 37: mod_base = OTHER; note = Adenosine phosphorothiorate
  modified_base 38: mod_base = OTHER; note = Adenosine phosphorothiorate
  modified_base 40: mod_base = OTHER; note = 2'-Omethyluridine
  modified_base 41: mod_base = OTHER; note = Cytosine phosphorothiorate
  modified_base 44: mod_base = OTHER; note = 2'-Omethyladenosine
  modified_base 48: mod_base = OTHER; note = 2'-fluorouridine
  modified_base 49: mod_base = OTHER; note = 2'-Omethylcytosine phosphorothiorate
  modified_base 50: mod_base = OTHER; note = 2'-Omethylcytosine
  modified_base 53: mod_base = OTHER; note = Guanosine phosphorothiorate
  modified_base 54: mod_base = OTHER; note = 2'-Omethyluridine
  modified_base 55: mod_base = OTHER; note = Uridine phosphorothiorate
  modified_base 56: mod_base = OTHER; note = 2'-Omethylcytosine
  modified_base 57: mod_base = OTHER; note = 2'-fluoroguanosine phosphorothiorate
  modified_base 59: mod_base = OTHER; note = 2'-Omethylguanosine
  modified_base 61: mod_base = OTHER; note = 2'-Omethylcytosine phosphorothiorate
  modified_base 62: mod_base = OTHER; note = 2'-Omethylcytosine
  modified_base 63: mod_base = OTHER; note = 2'-fluorocytosine
  modified_base 64: mod_base = OTHER; note = 2'-Omethylguanosine
  modified_base 65: mod_base = OTHER; note = 2'-Omethylguanosine
  modified_base 66: mod_base = OTHER; note = 2'-Omethylcytosine
  modified_base 67: mod_base = OTHER; note = 2'-Omethylguanosine phosphorothiorate
  modified_base 68: mod_base = OTHER; note = 2'-Omethylguanosine phosphorothiorate
  modified_base 69: mod_base = OTHER; note = 2'-Omethyladenosine
  modified_base 72: mod_base = OTHER; note = 2'-Omethylcytosine
  modified_base 73: mod_base = OTHER; note = 2'-Omethylguanosine phosphorothiorate
  modified_base 74: mod_base = OTHER; note = 2'-fluorocytosine phosphorothiorate
  modified_base 75: mod_base = OTHER; note = 2'-fluorocytosine phosphorothiorate
  modified_base 76: mod_base = OTHER; note = 2'-Omethyladenosine

SEQ ID NO: 7523 - RNA, 76 nt, synthetic construct; identical to SEQ ID NO: 625
  source 1..76: mol_type = other RNA
  modified_base 1: mod_base = OTHER; note = 2'-fluoroguanosine
  modified_base 2: mod_base = OTHER; note = 2'-fluoroguanosine
  modified_base 3: mod_base = OTHER; note = 2'-Omethylcytosine
  modified_base 4: mod_base = OTHER; note = Uridine phosphorothiorate
  modified_base 5: mod_base = OTHER; note = 2'-Omethylcytosine
  modified_base 17: mod_base = OTHER; note = Guanosine phosphorothiorate
  modified_base 18: mod_base = OTHER; note = 2'-Omethylguanosine
  modified_base 20: mod_base = OTHER; note = 2'-Omethyluridine
  modified_base 24: mod_base = OTHER; note = Guanosine phosphorothiorate
  modified_base 25: mod_base = OTHER; note = 2'-fluorocytosine
  modified_base 27: mod_base = OTHER; note = 2'-fluorouridine
  modified_base 30: mod_base = OTHER; note = 2'-Omethylguanosine phosphorothiorate
  modified_base 31: mod_base = OTHER; note = 2'-Omethyladenosine
  modified_base 34: mod_base = OTHER; note = 2'-fluorouridine
  modified_base 37: mod_base = OTHER; note = Adenosine phosphorothiorate
  modified_base 40: mod_base = OTHER; note = 2'-Omethyluridine
  modified_base 42: mod_base = OTHER; note = 2'-Omethyladenosine
  modified_base 44: mod_base = OTHER; note = 2'-Omethyladenosine
  modified_base 46: mod_base = OTHER; note = 2'-Omethylguanosine
  modified_base 48: mod_base = OTHER; note = 2'-fluorouridine
  modified_base 49: mod_base = OTHER; note = 2'-fluorocytosine
  modified_base 50: mod_base = OTHER; note = 2'-fluorocytosine
  modified_base 51: mod_base = OTHER; note = Guanosine phosphorothiorate
  modified_base 52: mod_base = OTHER; note = 2'-fluoroguanosine
  modified_base 53: mod_base = OTHER; note = 2'-Omethylguanosine
  modified_base 54: mod_base = OTHER; note = 2'-Omethyluridine
  modified_base 56: mod_base = OTHER; note = Cytosine phosphorothiorate
  modified_base 58: mod_base = OTHER; note = Adenosine phosphorothiorate
  modified_base 59: mod_base = OTHER; note = Guanosine phosphorothiorate
  modified_base 60: mod_base = OTHER; note = 2'-Omethyluridine
  modified_base 61: mod_base = OTHER; note = 2'-Omethylcytosine phosphorothiorate
  modified_base 62: mod_base = OTHER; note = 2'-fluorocytosine
  modified_base 69: mod_base = OTHER; note = 2'-fluoroadenosine
  modified_base 70: mod_base = OTHER; note = 2'-fluoroguanosine
  modified_base 71: mod_base = OTHER; note = 2'-Omethyluridine
  modified_base 72: mod_base = OTHER; note = 2'-fluorocytosine
  modified_base 76: mod_base = OTHER; note = 2'-fluoroadenosine

SEQ ID NO: 7524 - RNA, 75 nt, synthetic construct; identical to SEQ ID NO: 3311
  source 1..75: mol_type = other RNA
  modified_base 2: mod_base = OTHER; note = 2'-Omethylguanosine phosphorothiorate
  modified_base 14: mod_base = OTHER; note = 2'-Omethyladenosine
  modified_base 36: mod_base = OTHER; note = 2'-fluoroadenosine
  modified_base 48: mod_base = OTHER; note = 2'-fluorocytosine
  modified_base 59: mod_base = OTHER; note = Uridine phosphorothiorate
  modified_base 60: mod_base = OTHER; note = 2'-fluorocytosine
  modified_base 66: mod_base = OTHER; note = 2'-fluoroguanosine
  modified_base 71: mod_base = OTHER; note = 2'-fluorocytosine

SEQ ID NO: 7525 - RNA, 85 nt, synthetic construct; identical to SEQ ID NO: 3301
  source 1..85: mol_type = other RNA
  modified_base 1: mod_base = OTHER; note = 2'-Omethylguanosine phosphorothiorate
  modified_base 3: mod_base = OTHER; note = Uridine phosphorothiorate
  modified_base 4: mod_base = OTHER; note = 2'-Omethylguanosine phosphorothiorate
  modified_base 10: mod_base = OTHER; note = 2'-fluoroguanosine
  modified_base 12: mod_base = OTHER; note = 2'-fluorocytosine
  modified_base 14: mod_base = OTHER; note = 2'-fluoroadenosine phosphorothiorate
  modified_base 20: mod_base = OTHER; note = Uridine phosphorothiorate
  modified_base 22: mod_base = OTHER; note = Adenosine phosphorothiorate
  modified_base 35: mod_base = OTHER; note = 2'-fluorouridine
  modified_base 39: mod_base = OTHER; note = 2'-fluorouridine phosphorothiorate
  modified_base 41: mod_base = OTHER; note = Cytosine phosphorothiorate
  modified_base 42: mod_base = OTHER; note = 2'-fluoroadenosine
  modified_base 48: mod_base = OTHER; note = 2'-Omethylguanosine
  modified_base 50: mod_base = OTHER; note = 2'-Omethylcytosine
  modified_base 61: mod_base = OTHER; note = Guanosine phosphorothiorate
  modified_base 71: mod_base = OTHER; note = Cytosine phosphorothiorate
  modified_base 72: mod_base = OTHER; note = 2'-fluorouridine
  modified_base 78: mod_base = OTHER; note = 2'-fluorocytosine
  modified_base 81: mod_base = OTHER; note = 2'-fluorocytosine phosphorothiorate

SEQ ID NO: 7526 - RNA, 75 nt, synthetic construct; identical to SEQ ID NO: 3311
  source 1..75: mol_type = other RNA
  modified_base 1: mod_base = OTHER; note = 2'-Omethylguanosine phosphorothiorate
  modified_base 2: mod_base = OTHER; note = 2'-Omethylguanosine phosphorothiorate
  modified_base 12: mod_base = OTHER; note = Guanosine phosphorothiorate
  modified_base 14: mod_base = OTHER; note = 2'-Omethyladenosine
  modified_base 18: mod_base = OTHER; note = Guanosine phosphorothiorate
  modified_base 20: mod_base = OTHER; note = Adenosine phosphorothiorate
  modified_base 23: mod_base = OTHER; note = 2'-fluorocytosine
  modified_base 27: mod_base = OTHER; note = Cytosine phosphorothiorate
  modified_base 28: mod_base = OTHER; note = 2'-fluorouridine
  modified_base 38: mod_base = OTHER; note = 2'-fluoroadenosine
  modified_base 58: mod_base = OTHER; note = 2'-fluoroguanosine
  modified_base 59: mod_base = OTHER; note = 2'-Omethyluridine
  modified_base 60: mod_base = OTHER; note = 2'-fluorocytosine
  modified_base 68: mod_base = OTHER; note = 2'-fluoroadenosine
  modified_base 73: mod_base = OTHER; note = Cytosine phosphorothiorate
  modified_base 74: mod_base = OTHER; note = 2'-fluorocytosine phosphorothiorate

SEQ ID NO: 7527 - RNA, 75 nt, synthetic construct; identical to SEQ ID NO: 1045
  source 1..75: mol_type = other RNA
  modified_base 1: mod_base = OTHER; note = Guanosine phosphorothiorate
  modified_base 2: mod_base = OTHER; note = 2'-Omethylguanosine phosphorothiorate
  modified_base 5: mod_base = OTHER; note = 2'-Omethylcytosine
  modified_base 12: mod_base = OTHER; note = 2'-fluoroguanosine
  modified_base 19: mod_base = OTHER; note = 2'-Omethyluridine
  modified_base 20: mod_base = OTHER; note = 2'-fluoroadenosine
  modified_base 21: mod_base = OTHER; note = 2'-fluoroadenosine
  modified_base 27: mod_base = OTHER; note = 2'-Omethylcytosine
  modified_base 28: mod_base = OTHER; note = 2'-fluorouridine
  modified_base 29: mod_base = OTHER; note = 2'-Omethylguanosine
  modified_base 37: mod_base = OTHER; note = 2'-fluoroadenosine phosphorothiorate
  modified_base 40: mod_base = OTHER; note = 2'-fluorocytosine
  modified_base 50: mod_base = OTHER; note = 2'-fluoroguanosine phosphorothiorate
  modified_base 59: mod_base = OTHER; note = 2'-fluorouridine
  modified_base 60: mod_base = OTHER; note = 2'-fluorocytosine
  modified_base 65: mod_base = OTHER; note = 2'-fluorouridine
  modified_base 66: mod_base = OTHER; note = Guanosine phosphorothiorate
  modified_base 68: mod_base = OTHER; note = Adenosine phosphorothiorate
  modified_base 72: mod_base = OTHER; note = Uridine phosphorothiorate
  modified_base 73: mod_base = OTHER; note = Cytosine phosphorothiorate

SEQ ID NO: 7528 - RNA, 76 nt, synthetic construct; identical to SEQ ID NO: 3318
  source 1..76: mol_type = other RNA
  modified_base 1: mod_base = OTHER; note = 2'-Omethylcytosine
  modified_base 10: mod_base = OTHER; note = 2'-Omethylguanosine
  modified_base 11: mod_base = OTHER; note = 2'-Omethylcytosine
  modified_base 12: mod_base = OTHER; note = 2'-Omethyluridine
  modified_base 13: mod_base = OTHER; note = 2'-Omethylcytosine
  modified_base 14: mod_base = OTHER; note = 2'-Omethyladenosine
  modified_base 15: mod_base = OTHER; note = 2'-Omethylguanosine
  modified_base 16: mod_base = OTHER; note = 2'-Omethyluridine
  modified_base 18: mod_base = OTHER; note = 2'-Omethylguanosine
  modified_base 19: mod_base = OTHER; note = 2'-Omethylguanosine
  modified_base 20: mod_base = OTHER; note = Uridine phosphorothiorate
  modified_base 21: mod_base = OTHER; note = Adenosine phosphorothiorate
  modified_base 22: mod_base = OTHER; note = 2'-Omethylguanosine
  modified_base 23: mod_base = OTHER; note = 2'-Omethyladenosine
  modified_base 24: mod_base = OTHER; note = 2'-Omethylguanosine
  modified_base 25: mod_base = OTHER; note = 2'-Omethylcytosine
  modified_base 33: mod_base = OTHER; note = Uridine phosphorothiorate
  modified_base 34: mod_base = OTHER; note = 2'-Omethylcytosine
  modified_base 35: mod_base = OTHER; note = Uridine phosphorothiorate
  modified_base 37: mod_base = OTHER; note = Guanosine phosphorothiorate
  modified_base 38: mod_base = OTHER; note = Adenosine phosphorothiorate
  modified_base 49: mod_base = OTHER; note = 2'-Omethylguanosine
  modified_base 50: mod_base = OTHER; note = 2'-Omethylcytosine
  modified_base 52: mod_base = OTHER; note = 2'-Omethylguanosine
  modified_base 54: mod_base = OTHER; note = Uridine phosphorothiorate
  modified_base 55: mod_base = OTHER; note = Uridine phosphorothiorate
  modified_base 61: mod_base = OTHER; note = 2'-Omethylcytosine
  modified_base 65: mod_base = OTHER; note = 2'-Omethylcytosine
  modified_base 73: mod_base = OTHER; note = 2'-Omethyladenosine

SEQ ID NO: 7529 - RNA, 76 nt, synthetic construct; identical to SEQ ID NO: 625
  source 1..76: mol_type = other RNA
  modified_base 1: mod_base = OTHER; note = 2'-Omethylguanosine phosphorothiorate
  modified_base 2: mod_base = OTHER; note = 2'-Omethylguanosine
  modified_base 3: mod_base = OTHER; note = 2'-Omethylcytosine
  modified_base 4: mod_base = OTHER; note = 2'-Omethyluridine
  modified_base 5: mod_base = OTHER; note = 2'-Omethylcytosine
  modified_base 6: mod_base = OTHER; note = 2'-Omethylcytosine
  modified_base 10: mod_base = OTHER; note = 2'-Omethylguanosine
  modified_base 11: mod_base = OTHER; note = 2'-Omethylcytosine
  modified_base 12: mod_base = OTHER; note = 2'-Omethylguanosine
  modified_base 13: mod_base = OTHER; note = 2'-Omethylcytosine
  modified_base 14: mod_base = OTHER; note = 2'-Omethyladenosine
  modified_base 15: mod_base = OTHER; note = 2'-fluoroadenosine
  modified_base 16: mod_base = OTHER; note = 2'-Omethyluridine
  modified_base 17: mod_base = OTHER; note = 2'-Omethylguanosine
  modified_base 18: mod_base = OTHER; note = 2'-Omethylguanosine
  modified_base 19: mod_base = OTHER; note = 2'-fluoroadenosine
  modified_base 20: mod_base = OTHER; note = 2'-Omethyluridine
  modified_base 22: mod_base = OTHER; note = 2'-Omethylguanosine
  modified_base 23: mod_base = OTHER; note = 2'-Omethylcytosine
  modified_base 24: mod_base = OTHER; note = 2'-Omethylguanosine
  modified_base 25: mod_base = OTHER; note = 2'-Omethylcytosine
  modified_base 38: mod_base = OTHER; note = Adenosine phosphorothiorate
  modified_base 39: mod_base = OTHER; note = Uridine phosphorothiorate
  modified_base 40: mod_base = OTHER; note = 2'-fluorouridine
  modified_base 43: mod_base = OTHER; note = 2'-Omethyladenosine
  modified_base 44: mod_base = OTHER; note = 2'-Omethyladenosine
  modified_base 45: mod_base = OTHER; note = 2'-Omethylguanosine
  modified_base 46: mod_base = OTHER; note = 2'-fluoroguanosine
  modified_base 48: mod_base = OTHER; note = 2'-fluorouridine
  modified_base 49: mod_base = OTHER; note = 2'-Omethylcytosine
  modified_base 50: mod_base = OTHER; note = 2'-Omethylcytosine
  modified_base 54: mod_base = OTHER; note = 2'-Omethyluridine phosphorothiorate
  modified_base 55: mod_base = OTHER; note = Uridine phosphorothiorate
  modified_base 56: mod_base = OTHER; note = 2'-Omethylcytosine
  modified_base 57: mod_base = OTHER; note = 2'-fluoroguanosine
  modified_base 61: mod_base = OTHER; note = 2'-Omethylcytosine
  modified_base 62: mod_base = OTHER; note = 2'-Omethylcytosine
  modified_base 63: mod_base = OTHER; note = 2'-fluorocytosine
  modified_base 64: mod_base = OTHER; note = 2'-Omethylguanosine
  modified_base 65: mod_base = OTHER; note = 2'-Omethylguanosine
  modified_base 66: mod_base = OTHER; note = 2'-Omethylcytosine
  modified_base 67: mod_base = OTHER; note = 2'-Omethylguanosine
  modified_base 68: mod_base = OTHER; note = 2'-Omethylguanosine
  modified_base 69: mod_base = OTHER; note = 2'-Omethyladenosine

SEQ ID NO: 7530 - RNA, 75 nt, synthetic construct; identical to SEQ ID NO: 3311
  source 1..75: mol_type = other RNA
  modified_base 1: mod_base = OTHER; note = 2'-Omethylguanosine phosphorothiorate
  modified_base 7: mod_base = OTHER; note = 2'-fluoroadenosine phosphorothiorate
  modified_base 12: mod_base = OTHER; note = Guanosine phosphorothiorate
  modified_base 13: mod_base = OTHER; note = 2'-fluorouridine
  modified_base 18: mod_base = OTHER; note = 2'-Omethylguanosine phosphorothiorate
  modified_base 19: mod_base = OTHER; note = 2'-fluorouridine
  modified_base 20: mod_base = OTHER; note = Adenosine phosphorothiorate
  modified_base 21: mod_base = OTHER; note = 2'-fluoroadenosine
  modified_base 22: mod_base = OTHER; note = 2'-fluoroguanosine
  modified_base 28: mod_base = OTHER; note = 2'-fluorouridine
  modified_base 38: mod_base = OTHER; note = 2'-fluoroadenosine
  modified_base 39: mod_base = OTHER; note = 2'-fluorouridine phosphorothiorate
  modified_base 50: mod_base = OTHER; note = Guanosine phosphorothiorate
  modified_base 51: mod_base = OTHER; note = 2'-fluoroadenosine
  modified_base 62: mod_base = OTHER; note = 2'-Omethylcytosine
  modified_base 66: mod_base = OTHER; note = Guanosine phosphorothiorate
  modified_base 72: mod_base = OTHER; note = 2'-fluorouridine phosphorothiorate

SEQ ID NO: 7531 - RNA, 86 nt, synthetic construct; identical to SEQ ID NO: 3290
  source 1..86: mol_type = other RNA
  modified_base 17: mod_base = OTHER; note = 2'-Omethylguanosine
  modified_base 62: mod_base = OTHER; note = 2'-Omethylguanosine

SEQ ID NO: 7532 - RNA, 76 nt, synthetic construct; identical to SEQ ID NO: 625
  source 1..76: mol_type = other RNA
  modified_base 1: mod_base = OTHER; note = 2'-Omethylguanosine phosphorothiorate
  modified_base 2: mod_base = OTHER; note = 2'-Omethylguanosine
  modified_base 18: mod_base = OTHER; note = 2'-fluoroguanosine
  modified_base 33: mod_base = OTHER; note = 2'-fluorouridine
  modified_base 35: mod_base = OTHER; note = Cytosine phosphorothiorate
  modified_base 37: mod_base = OTHER; note = Adenosine phosphorothiorate
  modified_base 38: mod_base = OTHER; note = Adenosine phosphorothiorate
  modified_base 52: mod_base = OTHER; note = 2'-Omethylguanosine
  modified_base 57: mod_base = OTHER; note = 2'-Omethylguanosine
  modified_base 62: mod_base = OTHER; note = 2'-Omethylcytosine
  modified_base 73: mod_base = OTHER; note = 2'-Omethylguanosine
  modified_base 75: mod_base = OTHER; note = 2'-fluorocytosine phosphorothiorate

SEQ ID NO: 7533 - RNA, 76 nt, synthetic construct; identical to SEQ ID NO: 625
  source 1..76: mol_type = other RNA
  modified_base 4: mod_base = OTHER; note = 2'-fluorouridine
  modified_base 5: mod_base = OTHER; note = 2'-fluorocytosine
  modified_base 10: mod_base = OTHER; note = 2'-fluoroguanosine
  modified_base 12: mod_base = OTHER; note = Guanosine phosphorothiorate
  modified_base 15: mod_base = OTHER; note = 2'-fluoroadenosine
  modified_base 22: mod_base = OTHER; note = 2'-fluoroguanosine
  modified_base 23: mod_base = OTHER; note = 2'-fluorocytosine
  modified_base 24: mod_base = OTHER; note = 2'-Omethylguanosine
  modified_base 26: mod_base = OTHER; note = 2'-Omethyladenosine
  modified_base 34: mod_base = OTHER; note = Uridine phosphorothiorate
  modified_base 37: mod_base = OTHER; note = Adenosine phosphorothiorate
  modified_base 38: mod_base = OTHER; note = 2'-fluoroadenosine
  modified_base 39: mod_base = OTHER; note = 2'-fluorouridine
  modified_base 41: mod_base = OTHER; note = 2'-Omethylcytosine
  modified_base 42: mod_base = OTHER; note = Adenosine phosphorothiorate
  modified_base 43: mod_base = OTHER; note = Adenosine phosphorothiorate
  modified_base 44: mod_base = OTHER; note = 2'-Omethyladenosine
  modified_base 45: mod_base = OTHER; note = 2'-Omethylguanosine
  modified_base 52: mod_base = OTHER; note = 2'-fluoroguanosine phosphorothiorate
  modified_base 53: mod_base = OTHER; note = 2'-Omethylguanosine phosphorothiorate
  modified_base 54: mod_base = OTHER; note = 2'-Omethyluridine phosphorothiorate
  modified_base 59: mod_base = OTHER; note = 2'-Omethylguanosine
  modified_base 60: mod_base = OTHER; note = 2'-Omethyluridine phosphorothiorate
  modified_base 61: mod_base = OTHER; note = 2'-fluorocytosine phosphorothiorate
  modified_base 62: mod_base = OTHER; note = 2'-fluorocytosine
  modified_base 64: mod_base = OTHER; note = 2'-Omethylguanosine phosphorothiorate
  modified_base 65: mod_base = OTHER; note = 2'-Omethylguanosine
  modified_base 66: mod_base = OTHER; note = 2'-Omethylcytosine
  modified_base 69: mod_base = OTHER; note = 2'-Omethyladenosine
  modified_base 70: mod_base = OTHER; note = 2'-fluoroguanosine
  modified_base 73: mod_base = OTHER; note = 2'-Omethylguanosine
  modified_base 74: mod_base = OTHER; note = Cytosine phosphorothiorate
  modified_base 75: mod_base = OTHER; note = 2'-fluorocytosine

SEQ ID NO: 7534 - RNA, 76 nt, synthetic construct; identical to SEQ ID NO: 625
  source 1..76: mol_type = other RNA
  modified_base 1: mod_base = OTHER; note = 2'-Omethylguanosine phosphorothiorate
  modified_base 2: mod_base = OTHER; note = 2'-Omethylguanosine phosphorothiorate
  modified_base 3: mod_base = OTHER; note = 2'-Omethylcytosine
  modified_base 4: mod_base = OTHER; note = 2'-Omethyluridine
  modified_base 5: mod_base = OTHER; note = 2'-Omethylcytosine
  modified_base 6: mod_base = OTHER; note = 2'-Omethylcytosine phosphorothiorate
  modified_base 13: mod_base = OTHER; note = 2'-Omethylcytosine
  modified_base 14: mod_base = OTHER; note = 2'-Omethyladenosine
  modified_base 16: mod_base = OTHER; note = 2'-Omethyluridine
  modified_base 18: mod_base = OTHER; note = 2'-Omethylguanosine
  modified_base 21: mod_base = OTHER; note = 2'-Omethyladenosine phosphorothiorate
  modified_base 22: mod_base = OTHER; note = Guanosine phosphorothiorate
  modified_base 23: mod_base = OTHER; note = 2'-Omethylcytosine
  modified_base 24: mod_base = OTHER; note = 2'-Omethylguanosine
  modified_base 25: mod_base = OTHER; note = Cytosine phosphorothiorate
  modified_base 26: mod_base = OTHER; note = 2'-Omethyladenosine phosphorothiorate
  modified_base 29: mod_base = OTHER; note = 2'-fluoroguanosine phosphorothiorate
  modified_base 30: mod_base = OTHER; note = 2'-Omethylguanosine phosphorothiorate
  modified_base 32: mod_base = OTHER; note = 2'-Omethylcytosine phosphorothiorate
  modified_base 37: mod_base = OTHER; note = Adenosine phosphorothiorate
  modified_base 40: mod_base = OTHER; note = 2'-Omethyluridine
  modified_base 45: mod_base = OTHER; note = 2'-Omethylguanosine phosphorothiorate
  modified_base 49: mod_base = OTHER; note = 2'-Omethylcytosine
  modified_base 50: mod_base = OTHER; note = 2'-Omethylcytosine
  modified_base 52: mod_base = OTHER; note = 2'-Omethylguanosine
  modified_base 53: mod_base = OTHER; note = 2'-Omethylguanosine phosphorothiorate
  modified_base 55: mod_base = OTHER; note = Uridine phosphorothiorate
  modified_base 59: mod_base = OTHER; note = 2'-Omethylguanosine phosphorothiorate
  modified_base 62: mod_base = OTHER; note = 2'-Omethylcytosine phosphorothiorate
  modified_base 63: mod_base = OTHER; note = 2'-Omethylcytosine phosphorothiorate
  modified_base 65: mod_base = OTHER; note = 2'-Omethylguanosine phosphorothiorate
  modified_base 66: mod_base = OTHER; note = 2'-Omethylcytosine
  modified_base 67: mod_base = OTHER; note = 2'-Omethylguanosine phosphorothiorate
  modified_base 68: mod_base = OTHER; note = 2'-Omethylguanosine
  modified_base 69: mod_base = OTHER; note = 2'-fluoroadenosine
  modified_base 71: mod_base = OTHER; note = 2'-Omethyluridine phosphorothiorate
  modified_base 72: mod_base = OTHER; note = 2'-fluorocytosine phosphorothiorate
  modified_base 73: mod_base = OTHER; note = 2'-fluoroguanosine phosphorothiorate
  modified_base 74: mod_base = OTHER; note = 2'-fluorocytosine phosphorothiorate
  modified_base 75: mod_base = OTHER; note = Cytosine phosphorothiorate
  modified_base 76: mod_base = OTHER; note = 2'-fluoroadenosine

SEQ ID NO: 7535 - RNA, 76 nt, synthetic construct; identical to SEQ ID NO: 625
  source 1..76: mol_type = other RNA
  modified_base 1: mod_base = OTHER; note = 2'-Omethylguanosine
  modified_base 10: mod_base = OTHER; note = 2'-Omethylguanosine
  modified_base 13: mod_base = OTHER; note = 2'-Omethylcytosine
  modified_base 17: mod_base = OTHER; note = Guanosine phosphorothiorate
  modified_base 18: mod_base = OTHER; note = 2'-Omethylguanosine
  modified_base 19: mod_base = OTHER; note = Adenosine phosphorothiorate
  modified_base 20: mod_base = OTHER; note = 2'-Omethyluridine
  modified_base 25: mod_base = OTHER; note = 2'-Omethylcytosine
  modified_base 29: mod_base = OTHER; note = 2'-Omethylguanosine
  modified_base 33: mod_base = OTHER; note = 2'-fluorouridine
  modified_base 35: mod_base = OTHER; note = Cytosine phosphorothiorate
  modified_base 37: mod_base = OTHER; note = Adenosine phosphorothiorate
  modified_base 38: mod_base = OTHER; note = Adenosine phosphorothiorate
  modified_base 43: mod_base = OTHER; note = 2'-Omethyladenosine
  modified_base 44: mod_base = OTHER; note = 2'-fluoroadenosine
  modified_base 46: mod_base = OTHER; note = Guanosine phosphorothiorate
  modified_base 50: mod_base = OTHER; note = 2'-Omethylcytosine
  modified_base 52: mod_base = OTHER; note = 2'-Omethylguanosine
  modified_base 54: mod_base = OTHER; note = Uridine phosphorothiorate
  modified_base 55: mod_base = OTHER; note = Uridine phosphorothiorate
  modified_base 56: mod_base = OTHER; note = 2'-Omethylcytosine
  modified_base 57: mod_base = OTHER; note = Guanosine phosphorothiorate
  modified_base 62: mod_base = OTHER; note = 2'-Omethylcytosine
  modified_base 63: mod_base = OTHER; note = 2'-fluorocytosine
  modified_base 65: mod_base = OTHER; note = 2'-Omethylguanosine
  modified_base 68: mod_base = OTHER; note = 2'-Omethylguanosine phosphorothiorate
  modified_base 71: mod_base = OTHER; note = 2'-Omethyluridine
  modified_base 73: mod_base = OTHER; note = 2'-Omethylguanosine

SEQ ID NO: 7536 - RNA, 76 nt, synthetic construct; identical to SEQ ID NO: 3318
  source 1..76: mol_type = other RNA
  modified_base 1: mod_base = OTHER; note = 2'-Omethylcytosine phosphorothiorate
  modified_base 2: mod_base = OTHER; note = 2'-Omethylcytosine phosphorothiorate
  modified_base 9: mod_base = OTHER; note = Adenosine phosphorothiorate
  modified_base 10: mod_base = OTHER; note = 2'-fluoroguanosine
  modified_base 29: mod_base = OTHER; note = Guanosine phosphorothiorate
  modified_base 30: mod_base = OTHER; note = 2'-Omethylguanosine
  modified_base 64: mod_base = OTHER; note = Guanosine phosphorothiorate
  modified_base 74: mod_base = OTHER; note = Cytosine phosphorothiorate
  modified_base 75: mod_base = OTHER; note = 2'-Omethylcytosine

SEQ ID NO: 7537 - RNA, 76 nt, synthetic construct; identical to SEQ ID NO: 625
  source 1..76: mol_type = other RNA
  modified_base 14: mod_base = OTHER; note = 2'-Omethyladenosine
  modified_base 15: mod_base = OTHER; note = 2'-Omethyladenosine
  modified_base 16: mod_base = OTHER; note = 2'-Omethyluridine
  modified_base 17: mod_base = OTHER; note = 2'-Omethylguanosine
  modified_base 18: mod_base = OTHER; note = 2'-Omethylguanosine
  modified_base 19: mod_base = OTHER; note = 2'-Omethyladenosine
  modified_base 20: mod_base = OTHER; note = 2'-Omethyluridine
  modified_base 22: mod_base = OTHER; note = 2'-Omethylguanosine
  modified_base 23: mod_base = OTHER; note = 2'-Omethylcytosine
  modified_base 24: mod_base = OTHER; note = 2'-Omethylguanosine
  modified_base 25: mod_base = OTHER; note = 2'-Omethylcytosine
  modified_base 49: mod_base = OTHER; note = 2'-Omethylcytosine
  modified_base 50: mod_base = OTHER; note = 2'-Omethylcytosine
  modified_base 51: mod_base = OTHER; note = 2'-Omethylguanosine
  modified_base 52: mod_base = OTHER; note = 2'-Omethylguanosine
  modified_base 53: mod_base = OTHER; note = 2'-Omethylguanosine
  modified_base 54: mod_base = OTHER; note = Uridine phosphorothiorate
  modified_base 55: mod_base = OTHER; note = Uridine phosphorothiorate
  modified_base 56: mod_base = OTHER; note = Cytosine phosphorothiorate
  modified_base 57: mod_base = OTHER; note = Guanosine phosphorothiorate
  modified_base 61: mod_base = OTHER; note = 2'-Omethylcytosine
  modified_base 62: mod_base = OTHER; note = 2'-Omethylcytosine
  modified_base 63: mod_base = OTHER; note = 2'-Omethylcytosine
  modified_base 64: mod_base = OTHER; note = 2'-Omethylguanosine
  modified_base 65: mod_base = OTHER; note = 2'-Omethylguanosine
  modified_base 66: mod_base = OTHER; note = 2'-Omethylcytosine
  modified_base 67: mod_base = OTHER; note = 2'-Omethylguanosine
  modified_base 68: mod_base = OTHER; note = 2'-Omethylguanosine
  modified_base 69: mod_base = OTHER; note = 2'-Omethyladenosine

SEQ ID NO: 7538 - RNA, 76 nt, synthetic construct; identical to SEQ ID NO: 625
  source 1..76: mol_type = other RNA
  modified_base 1: mod_base = OTHER; note = 2'-Omethylguanosine
  modified_base 40: mod_base = OTHER; note = 2'-fluorouridine phosphorothiorate
  modified_base 41: mod_base = OTHER; note = 2'-O-(2-Methoxyethyl) 5-methylcytosine
  modified_base 42: mod_base = OTHER; note = 2'-Omethyladenosine phosphorothiorate
  modified_base 43: mod_base = OTHER; note = 2'-Omethyladenosine phosphorothiorate
  modified_base 73: mod_base = OTHER; note = 2'-Omethylguanosine

SEQ ID NO: 7539 - RNA, 76 nt, synthetic construct; identical to SEQ ID NO: 625
  source 1..76: mol_type = other RNA
  modified_base 1: mod_base = OTHER; note = 2'-Omethylguanosine
  modified_base 2: mod_base = OTHER; note = 2'-Omethylguanosine
  modified_base 3: mod_base = OTHER; note = 2'-Omethylcytosine
  modified_base 4: mod_base = OTHER; note = 2'-Omethyluridine
  modified_base 5: mod_base = OTHER; note = 2'-Omethylcytosine
  modified_base 6: mod_base = OTHER; note = 2'-Omethylcytosine
  modified_base 10: mod_base = OTHER; note = 2'-Omethylguanosine
  modified_base 11: mod_base = OTHER; note = 2'-Omethylcytosine
  modified_base 12: mod_base = OTHER; note = 2'-Omethylguanosine
  modified_base 13: mod_base = OTHER; note = 2'-Omethylcytosine
  modified_base 14: mod_base = OTHER; note = 2'-Omethyladenosine
  modified_base 15: mod_base = OTHER; note = 2'-fluoroadenosine
  modified_base 16: mod_base = OTHER; note = 2'-Omethyluridine
  modified_base 17: mod_base = OTHER; note = 2'-Omethylguanosine
  modified_base 18: mod_base = OTHER; note = 2'-Omethylguanosine
  modified_base 19: mod_base = OTHER; note = 2'-Omethyladenosine
  modified_base 22: mod_base = OTHER; note = 2'-Omethylguanosine
  modified_base 23: mod_base = OTHER; note = 2'-Omethylcytosine
  modified_base 24: mod_base = OTHER; note = 2'-Omethylguanosine
  modified_base 25: mod_base = OTHER; note = 2'-Omethylcytosine
  modified_base 30: mod_base = OTHER; note = 2'-Omethylguanosine
  modified_base 33: mod_base = OTHER; note = 2'-fluorouridine
  modified_base 35: mod_base = OTHER; note = Cytosine phosphorothiorate
  modified_base 37: mod_base = OTHER; note = Adenosine phosphorothiorate
  modified_base 38: mod_base = OTHER; note = Adenosine phosphorothiorate
  modified_base 41: mod_base = OTHER; note = 2'-fluorocytosine
  modified_base 42: mod_base = OTHER; note = 2'-Omethyladenosine
  modified_base 43: mod_base = OTHER; note = 2'-Omethyladenosine
  modified_base 44: mod_base = OTHER; note = 2'-Omethyladenosine
  modified_base 49: mod_base = OTHER; note = 2'-fluorocytosine
  modified_base 50: mod_base = OTHER; note = 2'-Omethylcytosine
  modified_base 51: mod_base = OTHER; note = 2'-Omethylguanosine
  modified_base 52: mod_base = OTHER; note = 2'-Omethylguanosine
  modified_base 53: mod_base = OTHER; note = 2'-Omethylguanosine
  modified_base 54: mod_base = OTHER; note = 2'-Omethyluridine
  modified_base 55: mod_base = OTHER; note = Uridine phosphorothiorate
  modified_base 56: mod_base = OTHER; note = 2'-Omethylcytosine
  modified_base 57: mod_base = OTHER; note = 2'-Omethylguanosine
  modified_base 59: mod_base = OTHER; note = 2'-Omethylguanosine
  modified_base 61: mod_base = OTHER; note = 2'-Omethylcytosine
  modified_base 62: mod_base = OTHER; note = 2'-Omethylcytosine
  modified_base 63: mod_base = OTHER; note = 2'-fluorocytosine
  modified_base 64: mod_base = OTHER; note = 2'-Omethylguanosine
  modified_base 65: mod_base = OTHER; note = 2'-Omethylguanosine
  modified_base 66: mod_base = OTHER; note = 2'-Omethylcytosine
  modified_base 67: mod_base = OTHER; note = 2'-Omethylguanosine
  modified_base 68: mod_base = OTHER; note = 2'-Omethylguanosine
  modified_base 73: mod_base = OTHER; note = 2'-Omethylguanosine
  modified_base 74: mod_base = OTHER; note = 2'-fluorocytosine phosphorothiorate
  modified_base 75: mod_base = OTHER; note = 2'-fluorocytosine phosphorothiorate

SEQ ID NO: 7540 - RNA, 75 nt, synthetic construct; identical to SEQ ID NO: 1045
  source 1..75: mol_type = other RNA
  modified_base 2: mod_base = OTHER; note = 2'-Omethylguanosine phosphorothiorate
  modified_base 5: mod_base = OTHER; note = 2'-fluorocytosine phosphorothiorate
  modified_base 18: mod_base = OTHER; note = 2'-fluoroguanosine phosphorothiorate
  modified_base 25: mod_base = OTHER; note = 2'-fluorocytosine
  modified_base 31: mod_base = OTHER; note = 2'-Omethyladenosine phosphorothiorate
  modified_base 32: mod_base = OTHER; note = 2'-Omethylcytosine phosphorothiorate
  modified_base 33: mod_base = OTHER; note = 2'-Omethyluridine phosphorothiorate
  modified_base 34: mod_base = OTHER; note = 2'-Omethyluridine
  modified_base 48: mod_base = OTHER; note = 2'-fluorocytosine
  modified_base 49: mod_base = OTHER; note = 2'-fluorocytosine
  modified_base 51: mod_base = OTHER; note = 2'-Omethyladenosine
  modified_base 53: mod_base = OTHER; note = 2'-Omethyluridine phosphorothiorate
  modified_base 60: mod_base = OTHER; note = 2'-Omethylcytosine
  modified_base 66: mod_base = OTHER; note = 2'-Omethylguanosine
  modified_base 72: mod_base = OTHER; note = 2'-Omethyluridine
  modified_base 73: mod_base = OTHER; note = 2'-Omethylcytosine phosphorothiorate
  modified_base 74: mod_base = OTHER; note = 2'-Omethylcytosine phosphorothiorate
  modified_base 75: mod_base = OTHER; note = 2'-Omethyladenosine

SEQ ID NO: 7541 - RNA, 85 nt, synthetic construct; identical to SEQ ID NO: 3310
  source 1..85: mol_type = other RNA
  modified_base 1: mod_base = OTHER; note = 2'-Omethylcytosine phosphorothiorate
  modified_base 2: mod_base = OTHER; note = Cytosine phosphorothiorate
  modified_base 11: mod_base = OTHER; note = Cytosine phosphorothiorate
  modified_base 27: mod_base = OTHER; note = 2'-fluorouridine
  modified_base 34: mod_base = OTHER; note = 2'-fluorouridine
  modified_base 54: mod_base = OTHER; note = 2'-fluorocytosine
  modified_base 64: mod_base = OTHER; note = Uridine phosphorothiorate
  modified_base 76: mod_base = OTHER; note = 2'-fluorocytosine
  modified_base 84: mod_base = OTHER; note = 2'-fluorocytosine

SEQ ID NO: 7542 - RNA, 76 nt, synthetic construct; identical to SEQ ID NO: 3318
  source 1..76: mol_type = other RNA
  modified_base 1: mod_base = OTHER; note = 2'-Omethylcytosine phosphorothiorate
  modified_base 2: mod_base = OTHER; note = 2'-Omethylcytosine phosphorothiorate
  modified_base 13: mod_base = OTHER; note = 2'-fluorocytosine
  modified_base 14: mod_base = OTHER; note = 2'-fluoroadenosine
  modified_base 54: mod_base = OTHER; note = 2'-fluorouridine
  modified_base 59: mod_base = OTHER; note = 2'-Omethyladenosine
  modified_base 75: mod_base = OTHER; note = Cytosine phosphorothiorate
  modified_base 76: mod_base = OTHER; note = 2'-Omethyladenosine

SEQ ID NO: 7543 - RNA, 85 nt, synthetic construct; identical to SEQ ID NO: 3297
  source 1..85: mol_type = other RNA
  modified_base 1: mod_base = OTHER; note = 2'-Omethylguanosine phosphorothiorate
  modified_base 2: mod_base = OTHER; note = 2'-Omethylcytosine phosphorothiorate
  modified_base 15: mod_base = OTHER; note = Guanosine phosphorothiorate
  modified_base 33: mod_base = OTHER; note = Uridine phosphorothiorate
  modified_base 34: mod_base = OTHER; note = 2'-fluorouridine
  modified_base 83: mod_base = OTHER; note = 2'-fluorocytosine phosphorothiorate
  modified_base 84: mod_base = OTHER; note = 2'-Omethylcytosine phosphorothiorate
  modified_base 85: mod_base = OTHER; note = 2'-Omethyladenosine

SEQ ID NO: 7544 - RNA, 76 nt, synthetic construct; identical to SEQ ID NO: 625
  source 1..76: mol_type = other RNA
  modified_base 16: mod_base = OTHER; note = Thymine
  modified_base 20: mod_base = OTHER; note = Thymine

SEQ ID NO: 7545 - RNA, 76 nt, synthetic construct; identical to SEQ ID NO: 3289
  source 1..76: mol_type = other RNA
  modified_base 1: mod_base = OTHER; note = 2'-Omethylguanosine
  modified_base 10: mod_base = OTHER; note = 2'-Omethylguanosine
  modified_base 11: mod_base = OTHER; note = 2'-Omethylcytosine
  modified_base 12: mod_base = OTHER; note = 2'-Omethyluridine
  modified_base 13: mod_base = OTHER; note = 2'-Omethylcytosine
  modified_base 18: mod_base = OTHER; note = 2'-Omethylguanosine
  modified_base 19: mod_base = OTHER; note = 2'-Omethylguanosine
  modified_base 25: mod_base = OTHER; note = 2'-Omethylcytosine
  modified_base 33: mod_base = OTHER; note = 2'-fluorouridine
  modified_base 34: mod_base = OTHER; note = 2'-Omethyluridine
  modified_base 35: mod_base = OTHER; note = Uridine phosphorothiorate
  modified_base 37: mod_base = OTHER; note = Adenosine phosphorothiorate
  modified_base 38: mod_base = OTHER; note = Adenosine phosphorothiorate
  modified_base 41: mod_base = OTHER; note = 2'-Omethyluridine
  modified_base 42: mod_base = OTHER; note = 2'-Omethylguanosine
  modified_base 43: mod_base = OTHER; note = 2'-Omethyladenosine
  modified_base 44: mod_base = OTHER; note = 2'-Omethylguanosine
  modified_base 49: mod_base = OTHER; note = 2'-Omethylcytosine
  modified_base 50: mod_base = OTHER; note = 2'-Omethyladenosine
  modified_base 52: mod_base = OTHER; note = 2'-Omethylguanosine
  modified_base 54: mod_base = OTHER; note = Uridine phosphorothiorate
  modified_base 55: mod_base = OTHER; note = Uridine phosphorothiorate
  modified_base 61: mod_base = OTHER; note = 2'-Omethylcytosine
  modified_base 65: mod_base = OTHER; note = 2'-Omethylguanosine
  modified_base 73: mod_base = OTHER; note = 2'-Omethylguanosine

SEQ ID NO: 7546 - RNA, 75 nt, synthetic construct; identical to SEQ ID NO: 3311
  source 1..75: mol_type = other RNA
  modified_base 1: mod_base = OTHER; note = 2'-Omethylguanosine phosphorothiorate
  modified_base 2: mod_base = OTHER; note = 2'-Omethylguanosine phosphorothiorate
  modified_base 12: mod_base = OTHER; note = Guanosine phosphorothiorate
  modified_base 14: mod_base = OTHER; note = 2'-Omethyladenosine
  modified_base 18: mod_base = OTHER; note = Guanosine phosphorothiorate
  modified_base 20: mod_base = OTHER; note = Adenosine phosphorothiorate
  modified_base 21: mod_base = OTHER; note = 2'-fluoroadenosine
  modified_base 31: mod_base = OTHER; note = 2'-fluoroadenosine
  modified_base 46: mod_base = OTHER; note = 2'-fluoroadenosine
  modified_base 55: mod_base = OTHER; note = 2'-Omethylcytosine
  modified_base 64: mod_base = OTHER; note = Guanosine phosphorothiorate
  modified_base 67: mod_base = OTHER; note = 2'-fluoroguanosine
  modified_base 73: mod_base = OTHER; note = Cytosine phosphorothiorate
  modified_base 74: mod_base = OTHER; note = 2'-Omethylcytosine

SEQ ID NO: 7547 - RNA, 75 nt, synthetic construct; identical to SEQ ID NO: 3336
  source 1..75: mol_type = other RNA
  modified_base 2: mod_base = OTHER; note = 2'-fluorocytosine
  modified_base 8: mod_base = OTHER; note = 2'-Omethyladenosine phosphorothiorate
  modified_base 10: mod_base = OTHER; note = 2'-Omethylcytosine phosphorothiorate
  modified_base 15: mod_base = OTHER; note = 2'-fluorouridine
  modified_base 18: mod_base = OTHER; note = 2'-fluoroguanosine
  modified_base 23: mod_base = OTHER; note = 2'-Omethylguanosine phosphorothiorate
  modified_base 27: mod_base = OTHER; note = 2'-fluorocytosine
  modified_base 28: mod_base = OTHER; note = 2'-fluoroadenosine
  modified_base 35: mod_base = OTHER; note = 2'-fluoroadenosine
  modified_base 39: mod_base = OTHER; note = 2'-Omethylcytosine
  modified_base 40: mod_base = OTHER; note = 2'-fluorouridine
  modified_base 48: mod_base = OTHER; note = 2'-fluorocytosine phosphorothiorate
  modified_base 50: mod_base = OTHER; note = Guanosine phosphorothiorate
  modified_base 59: mod_base = OTHER; note = 2'-Omethyluridine
  modified_base 72: mod_base = OTHER; note = 2'-Omethylguanosine
  modified_base 74: mod_base = OTHER; note = Cytosine phosphorothiorate

SEQ ID NO: 7548 - RNA, 76 nt, synthetic construct; identical to SEQ ID NO: 3295
  source 1..76: mol_type = other RNA
  modified_base 1: mod_base = OTHER; note = 2'-Omethylcytosine
  modified_base 2: mod_base = OTHER; note = 2'-Omethylcytosine phosphorothiorate
  modified_base 3: mod_base = OTHER; note = 2'-fluorouridine phosphorothiorate
  modified_base 4: mod_base = OTHER; note = 2'-Omethyluridine
  modified_base 6: mod_base = OTHER; note = 2'-Omethylguanosine phosphorothiorate
  modified_base 9: mod_base = OTHER; note = 2'-Omethyladenosine
  modified_base 10: mod_base = OTHER; note = 2'-fluoroguanosine
  modified_base 11: mod_base = OTHER; note = Cytosine phosphorothiorate
  modified_base 17: mod_base = OTHER; note = Uridine phosphorothiorate
  modified_base 28: mod_base = OTHER; note = 2'-fluoroadenosine phosphorothiorate
  modified_base 38: mod_base = OTHER; note = 2'-Omethyladenosine
  modified_base 40: mod_base = OTHER; note = 2'-fluorocytosine
  modified_base 43: mod_base = OTHER; note = 2'-fluorouridine phosphorothiorate
  modified_base 52: mod_base = OTHER; note = 2'-Omethylguanosine
  modified_base 60: mod_base = OTHER; note = Uridine phosphorothiorate
  modified_base 67: mod_base = OTHER; note = 2'-fluorocytosine
  modified_base 75: mod_base = OTHER; note = Cytosine phosphorothiorate
  modified_base 76: mod_base = OTHER; note = 2'-fluoroadenosine

SEQ ID NO: 7549 - RNA, 76 nt, synthetic construct; identical to SEQ ID NO: 625
  source 1..76: mol_type = other RNA
  modified_base 4: mod_base = OTHER; note = 2'-fluorouridine phosphorothiorate
  modified_base 5: mod_base = OTHER; note = 2'-Omethylcytosine phosphorothiorate
  modified_base 6: mod_base = OTHER; note = 2'-fluorocytosine
  modified_base 12: mod_base = OTHER; note = 2'-Omethylguanosine
  modified_base 14: mod_base = OTHER; note = 2'-Omethyladenosine
  modified_base 17: mod_base = OTHER; note = Guanosine phosphorothiorate
  modified_base 18: mod_base = OTHER; note = 2'-Omethylguanosine
  modified_base 20: mod_base = OTHER; note = 2'-Omethyluridine
  modified_base 24: mod_base = OTHER; note = 2'-Omethylguanosine phosphorothiorate
  modified_base 25: mod_base = OTHER; note = 2'-Omethylcytosine
  modified_base 28: mod_base = OTHER; note = 2'-fluorouridine
  modified_base 29: mod_base = OTHER; note = 2'-fluoroguanosine
  modified_base 30: mod_base = OTHER; note = 2'-fluoroguanosine phosphorothiorate
  modified_base 32: mod_base = OTHER; note = 2'-fluorocytosine
  modified_base 33: mod_base = OTHER; note = 2'-fluorouridine
  modified_base 34: mod_base = OTHER; note = 2'-fluorouridine
  modified_base 37: mod_base = OTHER; note = Adenosine phosphorothiorate
  modified_base 38: mod_base = OTHER; note = 2'-Omethyladenosine phosphorothiorate
  modified_base 39: mod_base = OTHER; note = 2'-Omethyluridine
  modified_base 41: mod_base = OTHER; note = Cytosine phosphorothiorate
  modified_base 42: mod_base = OTHER; note = 2'-fluoroadenosine
  modified_base 47: mod_base = OTHER; note = Uridine phosphorothiorate
  modified_base 48: mod_base = OTHER; note = 2'-Omethyluridine phosphorothiorate
  modified_base 49: mod_base = OTHER; note = 2'-Omethylcytosine
  modified_base 50: mod_base = OTHER; note = Cytosine phosphorothiorate
  modified_base 51: mod_base = OTHER; note = Guanosine phosphorothiorate
  modified_base 52: mod_base = OTHER; note = 2'-fluoroguanosine
  modified_base 53: mod_base = OTHER; note = 2'-Omethylguanosine
  modified_base 54: mod_base = OTHER; note = Uridine phosphorothiorate
  modified_base 56: mod_base = OTHER; note = Cytosine phosphorothiorate
  modified_base 57: mod_base = OTHER; note = 2'-fluoroguanosine
  modified_base 59: mod_base = OTHER; note = Guanosine phosphorothiorate
  modified_base 62: mod_base = OTHER; note = 2'-fluorocytosine
  modified_base 63: mod_base = OTHER; note = 2'-fluorocytosine
  modified_base 64: mod_base = OTHER; note = Guanosine phosphorothiorate
  modified_base 65: mod_base = OTHER; note = 2'-fluoroguanosine
  modified_base 68: mod_base = OTHER; note = 2'-fluoroguanosine
  modified_base 70: mod_base = OTHER; note = Guanosine phosphorothiorate
  modified_base 71: mod_base = OTHER; note = 2'-fluorouridine phosphorothiorate
  modified_base 72: mod_base = OTHER; note = 2'-Omethylcytosine

SEQ ID NO: 7550 - RNA, 76 nt, synthetic construct; identical to SEQ ID NO: 625
  source 1..76: mol_type = other RNA
  modified_base 2: mod_base = OTHER; note = 2'-fluoroguanosine
  modified_base 5: mod_base = OTHER; note = 2'-Omethylcytosine
  modified_base 6: mod_base = OTHER; note = 2'-Omethylcytosine
  modified_base 10: mod_base = OTHER; note = 2'-Omethylguanosine
  modified_base 11: mod_base = OTHER; note = 2'-fluorocytosine
  modified_base 12: mod_base = OTHER; note = 2'-fluoroguanosine phosphorothiorate
  modified_base 13: mod_base = OTHER; note = 2'-fluorocytosine
  modified_base 14: mod_base = OTHER; note = Adenosine phosphorothiorate
  modified_base 15: mod_base = OTHER; note = 2'-fluoroadenosine
  modified_base 16: mod_base = OTHER; note = 2'-Omethyluridine
  modified_base 17: mod_base = OTHER; note = 2'-Omethylguanosine
  modified_base 20: mod_base = OTHER; note = 2'-fluorouridine
  modified_base 22: mod_base = OTHER; note = Guanosine phosphorothiorate
  modified_base 23: mod_base = OTHER; note = 2'-Omethylcytosine
  modified_base 24: mod_base = OTHER; note = 2'-fluoroguanosine
  modified_base 25: mod_base = OTHER; note = 2'-fluorocytosine phosphorothiorate
  modified_base 26: mod_base = OTHER; note = 2'-fluoroadenosine
  modified_base 27: mod_base = OTHER; note = 2'-Omethyluridine
  modified_base 28: mod_base = OTHER; note = 2'-Omethyluridine
  modified_base 30: mod_base = OTHER; note = 2'-Omethylguanosine
  modified_base 37: mod_base = OTHER; note = Adenosine phosphorothiorate
  modified_base 38: mod_base = OTHER; note = 2'-fluoroadenosine
  modified_base 39: mod_base = OTHER; note = 2'-fluorouridine
  modified_base 40: mod_base = OTHER; note = Uridine phosphorothiorate
  modified_base 42: mod_base = OTHER; note = Adenosine phosphorothiorate
  modified_base 43: mod_base = OTHER; note = 2'-Omethyladenosine
  modified_base 45: mod_base = OTHER; note = 2'-fluoroguanosine
  modified_base 46: mod_base = OTHER; note = 2'-fluoroguanosine
  modified_base 47: mod_base = OTHER; note = 2'-fluorouridine
  modified_base 48: mod_base = OTHER; note = 2'-fluorouridine
  modified_base 49: mod_base = OTHER; note = 2'-Omethylcytosine
  modified_base 50: mod_base = OTHER; note = 2'-fluorocytosine
  modified_base 52: mod_base = OTHER; note = Guanosine phosphorothiorate
  modified_base 53: mod_base = OTHER; note = 2'-fluoroguanosine
  modified_base 60: mod_base = OTHER; note = 2'-Omethyluridine
  modified_base 63: mod_base = OTHER; note = 2'-Omethylcytosine
  modified_base 65: mod_base = OTHER; note = 2'-Omethylguanosine
  modified_base 66: mod_base = OTHER; note = 2'-fluorocytosine
  modified_base 68: mod_base = OTHER; note = 2'-fluoroguanosine

SEQ ID NO: 7551 - RNA, 76 nt, synthetic construct; identical to SEQ ID NO: 625
  source 1..76: mol_type = other RNA
  modified_base 1: mod_base = OTHER; note = 2'-Omethylguanosine phosphorothiorate
  modified_base 2: mod_base = OTHER; note = 2'-Omethylguanosine
  modified_base 3: mod_base = OTHER; note = 2'-Omethylcytosine
  modified_base 4: mod_base = OTHER; note = 2'-Omethyluridine
  modified_base 5: mod_base = OTHER; note = 2'-Omethylcytosine
  modified_base 6: mod_base = OTHER; note = 2'-Omethylcytosine
  modified_base 10: mod_base = OTHER; note = 2'-Omethylguanosine
  modified_base 11: mod_base = OTHER; note = 2'-Omethylcytosine
  modified_base 12: mod_base = OTHER; note = 2'-Omethylguanosine
  modified_base 13: mod_base = OTHER; note = 2'-Omethylcytosine
  modified_base 14: mod_base = OTHER; note = 2'-Omethyladenosine
  modified_base 15: mod_base = OTHER; note = 2'-Omethyladenosine
  modified_base 16: mod_base = OTHER; note = 2'-Omethyluridine
  modified_base 17: mod_base = OTHER; note = 2'-Omethylguanosine
  modified_base 18: mod_base = OTHER; note = 2'-Omethylguanosine
  modified_base 19: mod_base = OTHER; note = 2'-Omethyladenosine
  modified_base 20: mod_base = OTHER; note = 2'-Omethyluridine
  modified_base 40: mod_base = OTHER; note = 2'-fluorouridine
  modified_base 41: mod_base = OTHER; note = 2'-fluorocytosine
  modified_base 42: mod_base = OTHER; note = 2'-fluoroadenosine
  modified_base 43: mod_base = OTHER; note = 2'-fluoroadenosine
  modified_base 49: mod_base = OTHER; note = 2'-Omethylcytosine
  modified_base 50: mod_base = OTHER; note = 2'-Omethylcytosine
  modified_base 51: mod_base = OTHER; note = 2'-Omethylguanosine
  modified_base 52: mod_base = OTHER; note = 2'-Omethylguanosine
  modified_base 53: mod_base = OTHER; note = 2'-Omethylguanosine
  modified_base 54: mod_base = OTHER; note = Uridine phosphorothiorate
  modified_base 55: mod_base = OTHER; note = Uridine phosphorothiorate
  modified_base 56: mod_base = OTHER; note = Cytosine phosphorothiorate
  modified_base 57: mod_base = OTHER; note = Guanosine phosphorothiorate
  modified_base 61: mod_base = OTHER; note = 2'-Omethylcytosine
  modified_base 62: mod_base = OTHER; note = 2'-Omethylcytosine
  modified_base 63: mod_base = OTHER; note = 2'-fluorocytosine
  modified_base 64: mod_base = OTHER; note = 2'-Omethylguanosine
  modified_base 65: mod_base = OTHER; note = 2'-Omethylguanosine
  modified_base 66: mod_base = OTHER; note = 2'-Omethylcytosine
  modified_base 67: mod_base = OTHER; note = 2'-Omethylguanosine
  modified_base 68: mod_base = OTHER; note = 2'-Omethylguanosine
  modified_base 69: mod_base = OTHER; note = 2'-fluoroadenosine
  modified_base 71: mod_base = OTHER; note = 2'-Omethyluridine

SEQ ID NO: 7552 - RNA, 85 nt, synthetic construct; identical to SEQ ID NO: 3286
  source 1..85: mol_type = other RNA
  modified_base 1: mod_base = OTHER; note = 2'-fluorocytosine phosphorothiorate
  modified_base 23: mod_base = OTHER; note = 2'-fluoroguanosine
  modified_base 33: mod_base = OTHER; note = Uridine phosphorothiorate
  modified_base 41: mod_base = OTHER; note = Adenosine phosphorothiorate
  modified_base 47: mod_base = OTHER; note = Cytosine phosphorothiorate
  modified_base 64: mod_base = OTHER; note = Uridine phosphorothiorate

SEQ ID NO: 7553 - RNA, 76 nt, synthetic construct; identical to SEQ ID NO: 3419
  source 1..76: mol_type = other RNA
  modified_base 1: mod_base = OTHER; note = 2'-Omethylguanosine
  modified_base 2: mod_base = OTHER; note = 2'-Omethylguanosine
  modified_base 3: mod_base = OTHER; note = 2'-Omethylcytosine
  modified_base 4: mod_base = OTHER; note = 2'-Omethyluridine
  modified_base 5: mod_base = OTHER; note = 2'-Omethylcytosine
  modified_base 6: mod_base = OTHER; note = 2'-Omethylcytosine
  modified_base 14: mod_base = OTHER; note = 2'-Omethyladenosine
  modified_base 15: mod_base = OTHER; note = 2'-Omethyladenosine
  modified_base 16: mod_base = OTHER; note = 2'-Omethyluridine
  modified_base 17: mod_base = OTHER; note = 2'-Omethylguanosine
  modified_base 18: mod_base = OTHER; note = 2'-Omethylguanosine
  modified_base 20: mod_base = OTHER; note = 2'-Omethyluridine
  modified_base 25: mod_base = OTHER; note = 2'-Omethylcytosine
  modified_base 41: mod_base = OTHER; note = 2'-Omethylguanosine
  modified_base 42: mod_base = OTHER; note = 2'-Omethylguanosine
  modified_base 43: mod_base = OTHER; note = 2'-Omethyluridine
  modified_base 44: mod_base = OTHER; note = 2'-Omethyladenosine
  modified_base 49: mod_base = OTHER; note = 2'-Omethylcytosine
  modified_base 50: mod_base = OTHER; note = 2'-Omethylcytosine
  modified_base 52: mod_base = OTHER; note = 2'-Omethylguanosine
  modified_base 54: mod_base = OTHER; note = 2'-Omethyluridine
  modified_base 55: mod_base = OTHER; note = Uridine phosphorothiorate
  modified_base 56: mod_base = OTHER; note = 2'-Omethylcytosine
  modified_base 57: mod_base = OTHER; note = 2'-fluoroguanosine
  modified_base 59: mod_base = OTHER; note = 2'-Omethylguanosine
  modified_base 61: mod_base = OTHER; note = 2'-Omethylcytosine
  modified_base 65: mod_base = OTHER; note = 2'-Omethylguanosine
  modified_base 73: mod_base = OTHER; note = 2'-Omethylguanosine

SEQ ID NO: 7554 - RNA, 76 nt, synthetic construct; identical to SEQ ID NO: 3675
  source 1..76: mol_type = other RNA
  modified_base 1: mod_base = OTHER; note = 2'-Omethylguanosine
  modified_base 2: mod_base = OTHER; note = 2'-Omethylcytosine
  modified_base 3: mod_base = OTHER; note = 2'-Omethylcytosine
  modified_base 4: mod_base = OTHER; note = 2'-Omethyluridine
  modified_base 5: mod_base = OTHER; note = 2'-Omethylcytosine
  modified_base 6: mod_base = OTHER; note = 2'-Omethylcytosine
  modified_base 16: mod_base = OTHER; note = 2'-Omethyluridine
  modified_base 17: mod_base = OTHER; note = 2'-Omethylguanosine
  modified_base 18: mod_base = OTHER; note = 2'-Omethylguanosine
  modified_base 20: mod_base = OTHER; note = 2'-Omethyluridine
  modified_base 25: mod_base = OTHER; note = 2'-Omethylcytosine
  modified_base 33: mod_base = OTHER; note = 2'-fluorouridine
  modified_base 35: mod_base = OTHER; note = Cytosine phosphorothiorate
  modified_base 37: mod_base = OTHER; note = Adenosine phosphorothiorate
  modified_base 38: mod_base = OTHER; note = Adenosine phosphorothiorate
  modified_base 41: mod_base = OTHER; note = 2'-Omethylcytosine
  modified_base 42: mod_base = OTHER; note = 2'-Omethyladenosine
  modified_base 43: mod_base = OTHER; note = 2'-Omethylcytosine
  modified_base 44: mod_base = OTHER; note = 2'-Omethyladenosine
  modified_base 49: mod_base = OTHER; note = 2'-Omethylcytosine
  modified_base 50: mod_base = OTHER; note = 2'-Omethylcytosine
  modified_base 52: mod_base = OTHER; note = 2'-Omethylguanosine
  modified_base 54: mod_base = OTHER; note = Uridine phosphorothiorate
  modified_base 55: mod_base = OTHER; note = Uridine phosphorothiorate
  modified_base 61: mod_base = OTHER; note = 2'-Omethylcytosine
  modified_base 65: mod_base = OTHER; note = 2'-Omethylguanosine
  modified_base 73: mod_base = OTHER; note = 2'-Omethylguanosine

SEQ ID NO: 7555 - RNA, 76 nt, synthetic construct; identical to SEQ ID NO: 625
  source 1..76: mol_type = other RNA
  modified_base 2: mod_base = OTHER; note = 2'-fluoroguanosine
  modified_base 5: mod_base = OTHER; note = 2'-fluorocytosine
  modified_base 6: mod_base = OTHER; note = 2'-Omethylcytosine
  modified_base 8: mod_base = OTHER; note = Uridine phosphorothiorate
  modified_base 12: mod_base = OTHER; note = Guanosine phosphorothiorate
  modified_base 15: mod_base = OTHER; note = 2'-fluoroadenosine phosphorothiorate
  modified_base 16: mod_base = OTHER; note = 2'-fluorouridine
  modified_base 17: mod_base = OTHER; note = Guanosine phosphorothiorate
  modified_base 18: mod_base = OTHER; note = 2'-Omethylguanosine
  modified_base 23: mod_base = OTHER; note = 2'-fluorocytosine
  modified_base 26: mod_base = OTHER; note = 2'-fluoroadenosine phosphorothiorate
  modified_base 36: mod_base = OTHER; note = Adenosine phosphorothiorate
  modified_base 38: mod_base = OTHER; note = 2'-fluoroadenosine
  modified_base 39: mod_base = OTHER; note = 2'-Omethyluridine
  modified_base 40: mod_base = OTHER; note = 2'-Omethyluridine
  modified_base 41: mod_base = OTHER; note = 2'-fluorocytosine
  modified_base 42: mod_base = OTHER; note = 2'-fluoroadenosine
  modified_base 44: mod_base = OTHER; note = 2'-fluoroadenosine
  modified_base 49: mod_base = OTHER; note = 2'-fluorocytosine phosphorothiorate
  modified_base 50: mod_base = OTHER; note = 2'-Omethylcytosine
  modified_base 52: mod_base = OTHER; note = Guanosine phosphorothiorate
  modified_base 53: mod_base = OTHER; note = 2'-Omethylguanosine
  modified_base 55: mod_base = OTHER; note = Uridine phosphorothiorate
  modified_base 57: mod_base = OTHER; note = 2'-fluoroguanosine
  modified_base 59: mod_base = OTHER; note = 2'-fluoroguanosine
  modified_base 64: mod_base = OTHER; note = 2'-fluoroguanosine
  modified_base 65: mod_base = OTHER; note = 2'-fluoroguanosine phosphorothiorate
  modified_base 66: mod_base = OTHER; note = 2'-Omethylcytosine
  modified_base 68: mod_base = OTHER; note = 2'-Omethylguanosine phosphorothiorate
  modified_base 69: mod_base = OTHER; note = 2'-fluoroadenosine
  modified_base 70: mod_base = OTHER; note = Guanosine phosphorothiorate
  modified_base 71: mod_base = OTHER; note = 2'-Omethyluridine phosphorothiorate
  modified_base 73: mod_base = OTHER; note = Guanosine phosphorothiorate

SEQ ID NO: 7556 - RNA, 76 nt, synthetic construct
  source 1..76: mol_type = other RNA
ggctccgtggcgcaatggatagcgcgatgcacttcaaatgcataggttccgggttcgagtcccggcggagtcgcca

SEQ ID NO: 7557 - RNA, 76 nt, synthetic construct; identical to SEQ ID NO: 3289
  source 1..76: mol_type = other RNA
  modified_base 1: mod_base = OTHER; note = 2'-Omethylguanosine
  modified_base 46: mod_base = OTHER; note = 2'-fluoroguanosine
  modified_base 48: mod_base = OTHER; note = 2'-fluorocytosine
  modified_base 73: mod_base = OTHER; note = 2'-Omethylguanosine

SEQ ID NO: 7558 - RNA, 75 nt, synthetic construct; identical to SEQ ID NO: 3299
  source 1..75: mol_type = other RNA
  modified_base 8: mod_base = OTHER; note = 2'-Omethyladenosine phosphorothiorate
  modified_base 19: mod_base = OTHER; note = 2'-fluorouridine
  modified_base 25: mod_base = OTHER; note = Adenosine phosphorothiorate
  modified_base 40: mod_base = OTHER; note = 2'-fluorouridine
  modified_base 45: mod_base = OTHER; note = 2'-fluoroguanosine
  modified_base 47: mod_base = OTHER; note = 2'-fluorocytosine
  modified_base 49: mod_base = OTHER; note = 2'-fluoroadenosine phosphorothiorate
  modified_base 54: mod_base = OTHER; note = 2'-Omethyluridine phosphorothiorate
  modified_base 73: mod_base = OTHER; note = Cytosine phosphorothiorate
  modified_base 74: mod_base = OTHER; note = Cytosine phosphorothiorate

SEQ ID NO: 7559 - RNA, 76 nt, synthetic construct; identical to SEQ ID NO: 625
  source 1..76: mol_type = other RNA
  modified_base 1: mod_base = OTHER; note = 2'-Omethylguanosine
  modified_base 2: mod_base = OTHER; note = 2'-Omethylguanosine
  modified_base 3: mod_base = OTHER; note = 2'-Omethylcytosine
  modified_base 4: mod_base = OTHER; note = 2'-Omethyluridine
  modified_base 5: mod_base = OTHER; note = 2'-Omethylcytosine phosphorothiorate
  modified_base 6: mod_base = OTHER; note = 2'-Omethylcytosine
  modified_base 7: mod_base = OTHER; note = 2'-Omethylguanosine phosphorothiorate
  modified_base 10: mod_base = OTHER; note = 2'-Omethylguanosine
  modified_base 11: mod_base = OTHER; note = 2'-Omethylcytosine
  modified_base 12: mod_base = OTHER; note = 2'-Omethylguanosine phosphorothiorate
  modified_base 13: mod_base = OTHER; note = 2'-Omethylcytosine
  modified_base 14: mod_base = OTHER; note = 2'-Omethyladenosine
  modified_base 15: mod_base = OTHER; note = 2'-Omethyladenosine
  modified_base 16: mod_base = OTHER; note = 2'-Omethyluridine
  modified_base 17: mod_base = OTHER; note = 2'-Omethylguanosine
  modified_base 18: mod_base = OTHER; note = 2'-fluoroguanosine phosphorothiorate
  modified_base 21: mod_base = OTHER; note = 2'-fluoroadenosine phosphorothiorate
  modified_base 22: mod_base = OTHER; note = 2'-Omethylguanosine
  modified_base 23: mod_base = OTHER; note = 2'-Omethylcytosine
  modified_base 24: mod_base = OTHER; note = 2'-Omethylguanosine
  modified_base 25: mod_base = OTHER; note = 2'-Omethylcytosine
  modified_base 26: mod_base = OTHER; note = Adenosine phosphorothiorate
  modified_base 28: mod_base = OTHER; note = 2'-Omethyluridine phosphorothiorate
  modified_base 29: mod_base = OTHER; note = Guanosine phosphorothiorate
  modified_base 31: mod_base = OTHER; note = 2'-Omethyladenosine phosphorothiorate
  modified_base 32: mod_base = OTHER; note = 2'-Omethylcytosine phosphorothiorate
  modified_base 33: mod_base = OTHER; note = 2'-fluorouridine
  modified_base 34: mod_base = OTHER; note = 2'-Omethyluridine
  modified_base 35: mod_base = OTHER; note = Cytosine phosphorothiorate
  modified_base 36: mod_base = OTHER; note = 2'-Omethyladenosine phosphorothiorate
  modified_base 37: mod_base = OTHER; note = Adenosine phosphorothiorate
  modified_base 38: mod_base = OTHER; note = Adenosine phosphorothiorate
  modified_base 39: mod_base = OTHER; note = 2'-Omethyluridine phosphorothiorate
  modified_base 40: mod_base = OTHER; note = 2'-Omethyluridine
  modified_base 41: mod_base = OTHER; note = 2'-fluorocytosine
  modified_base 42: mod_base = OTHER; note = Adenosine phosphorothiorate
  modified_base 44: mod_base = OTHER; note = 2'-Omethyladenosine
  modified_base 48: mod_base = OTHER; note = 2'-fluorouridine
  modified_base 49: mod_base = OTHER; note = 2'-Omethylcytosine
  modified_base 50: mod_base = OTHER; note = 2'-Omethylcytosine
  modified_base 51: mod_base = OTHER; note = Guanosine phosphorothiorate
  modified_base 52: mod_base = OTHER; note = 2'-Omethylguanosine
  modified_base 54: mod_base = OTHER; note = 2'-fluorouridine
  modified_base 55: mod_base = OTHER; note = Uridine phosphorothiorate
  modified_base 56: mod_base = OTHER; note = Cytosine phosphorothiorate
  modified_base 57: mod_base = OTHER; note = 2'-Omethylguanosine
  modified_base 59: mod_base = OTHER; note = 2'-Omethylguanosine
  modified_base 60: mod_base = OTHER; note = 2'-Omethyluridine phosphorothiorate
  modified_base 61: mod_base = OTHER; note = 2'-Omethylcytosine
  modified_base 62: mod_base = OTHER; note = 2'-Omethylcytosine
  modified_base 63: mod_base = OTHER; note = 2'-Omethylcytosine phosphorothiorate
  modified_base 64: mod_base = OTHER; note = 2'-Omethylguanosine
  modified_base 65: mod_base = OTHER; note = 2'-Omethylguanosine
  modified_base 66: mod_base = OTHER; note = 2'-Omethylcytosine
  modified_base 67: mod_base = OTHER; note = 2'-Omethylguanosine phosphorothiorate
  modified_base 68: mod_base = OTHER; note = 2'-Omethylguanosine
  modified_base 69: mod_base = OTHER; note = 2'-fluoroadenosine
  modified_base 70: mod_base = OTHER; note = 2'-fluoroguanosine phosphorothiorate
  modified_base 71: mod_base = OTHER; note = 2'-Omethyluridine phosphorothiorate
  modified_base 72: mod_base = OTHER; note = 2'-Omethylcytosine
  modified_base 73: mod_base = OTHER; note = 2'-Omethylguanosine
  modified_base 74: mod_base = OTHER; note = 2'-fluorocytosine phosphorothiorate
  modified_base 75: mod_base = OTHER; note = 2'-fluorocytosine phosphorothiorate
  modified_base 76: mod_base = OTHER; note = 2'-fluoroadenosine

SEQ ID NO: 7560 - RNA, 76 nt, synthetic construct; identical to SEQ ID NO: 625
  source 1..76: mol_type = other RNA
  modified_base 1: mod_base = OTHER; note = 2'-fluoroguanosine phosphorothiorate
  modified_base 2: mod_base = OTHER; note = Guanosine phosphorothiorate
  modified_base 3: mod_base = OTHER; note = 2'-Omethylcytosine
  modified_base 7: mod_base = OTHER; note = Guanosine phosphorothiorate
  modified_base 10: mod_base = OTHER; note = Guanosine phosphorothiorate
  modified_base 11: mod_base = OTHER; note = 2'-fluorocytosine
  modified_base 12: mod_base = OTHER; note = 2'-Omethylguanosine phosphorothiorate
  modified_base 13: mod_base = OTHER; note = 2'-fluorocytosine
  modified_base 21: mod_base = OTHER; note = Adenosine phosphorothiorate
  modified_base 22: mod_base = OTHER; note = 2'-fluoroguanosine
  modified_base 25: mod_base = OTHER; note = 2'-Omethylcytosine
  modified_base 28: mod_base = OTHER; note = 2'-fluorouridine
  modified_base 30: mod_base = OTHER; note = 2'-Omethylguanosine
  modified_base 32: mod_base = OTHER; note = 2'-fluorocytosine
  modified_base 36: mod_base = OTHER; note = Adenosine phosphorothiorate
  modified_base 38: mod_base = OTHER; note = 2'-fluoroadenosine
  modified_base 39: mod_base = OTHER; note = 2'-Omethyluridine
  modified_base 42: mod_base = OTHER; note = 2'-Omethyladenosine
  modified_base 44: mod_base = OTHER; note = Adenosine phosphorothiorate
  modified_base 45: mod_base = OTHER; note = 2'-fluoroguanosine
  modified_base 46: mod_base = OTHER; note = Guanosine phosphorothiorate
  modified_base 47: mod_base = OTHER; note = 2'-fluorouridine phosphorothiorate
  modified_base 48: mod_base = OTHER; note = 2'-Omethyluridine
  modified_base 49: mod_base = OTHER; note = Cytosine phosphorothiorate
  modified_base 50: mod_base = OTHER; note = 2'-fluorocytosine
  modified_base 51: mod_base = OTHER; note = Guanosine phosphorothiorate
  modified_base 52: mod_base = OTHER; note = 2'-Omethylguanosine
  modified_base 53: mod_base = OTHER; note = 2'-Omethylguanosine
  modified_base 54: mod_base = OTHER; note = 2'-fluorouridine
  modified_base 60: mod_base = OTHER; note = 2'-fluorouridine
  modified_base 63: mod_base = OTHER; note = 2'-fluorocytosine
  modified_base 64: mod_base = OTHER; note = 2'-fluoroguanosine
  modified_base 65: mod_base = OTHER; note = 2'-fluoroguanosine
  modified_base 68: mod_base = OTHER; note = Guanosine phosphorothiorate
  modified_base 69: mod_base = OTHER; note = 2'-Omethyladenosine
  modified_base 70: mod_base = OTHER; note = Guanosine phosphorothiorate
  modified_base 72: mod_base = OTHER; note = 2'-Omethylcytosine
  modified_base 73: mod_base = OTHER; note = 2'-fluoroguanosine
  modified_base 75: mod_base = OTHER; note = 2'-Omethylcytosine
  modified_base 76: mod_base = OTHER; note = 2'-Omethyladenosine

SEQ ID NO: 7561 - RNA, 76 nt, synthetic construct; identical to SEQ ID NO: 3325
  source 1..76: mol_type = other RNA
  modified_base 1: mod_base = OTHER; note = 2'-Omethyluridine phosphorothiorate
  modified_base 2: mod_base = OTHER; note = 2'-Omethyladenosine phosphorothiorate
  modified_base 3: mod_base = OTHER; note = 2'-Omethylcytosine
  modified_base 4: mod_base = OTHER; note = 2'-Omethyladenosine
  modified_base 5: mod_base = OTHER; note = 2'-Omethylcytosine
  modified_base 6: mod_base = OTHER; note = 2'-Omethylcytosine
  modified_base 16: mod_base = OTHER; note = 2'-Omethyluridine
  modified_base 17: mod_base = OTHER; note = 2'-Omethylguanosine
  modified_base 18: mod_base = OTHER; note = 2'-Omethylguanosine
  modified_base 20: mod_base = OTHER; note = 2'-Omethyluridine
  modified_base 25: mod_base = OTHER; note = 2'-Omethylcytosine
  modified_base 33: mod_base = OTHER; note = 2'-fluorouridine
  modified_base 35: mod_base = OTHER; note = Cytosine phosphorothiorate
  modified_base 37: mod_base = OTHER; note = Adenosine phosphorothiorate
  modified_base 38: mod_base = OTHER; note = Adenosine phosphorothiorate
  modified_base 41: mod_base = OTHER; note = 2'-Omethylcytosine
  modified_base 44: mod_base = OTHER; note = 2'-Omethyladenosine
  modified_base 45: mod_base = OTHER; note = 2'-Omethylguanosine
  modified_base 46: mod_base = OTHER; note = 2'-fluoroguanosine
  modified_base 47: mod_base = OTHER; note = 2'-fluorouridine
  modified_base 48: mod_base = OTHER; note = 2'-fluorouridine
  modified_base 56: mod_base = OTHER; note = 2'-Omethylcytosine
  modified_base 59: mod_base = OTHER; note = 2'-Omethylguanosine
  modified_base 73: mod_base = OTHER; note = 2'-Omethylguanosine

SEQ ID NO: 7562 - RNA, 76 nt, synthetic construct; identical to SEQ ID NO: 3289
  source 1..76: mol_type = other RNA
  modified_base 49: mod_base = OTHER; note = 2'-Omethylcytosine
  modified_base 73: mod_base = OTHER; note = 2'-Omethylguanosine

SEQ ID NO: 7563 - RNA, 74 nt, synthetic construct; identical to SEQ ID NO: 3293
  source 1..74: mol_type = other RNA
  modified_base 1: mod_base = OTHER; note = 2'-Omethyladenosine
  modified_base 2: mod_base = OTHER; note = Cytosine phosphorothiorate
  modified_base 4: mod_base = OTHER; note = Uridine phosphorothiorate
  modified_base 6: mod_base = OTHER; note = Guanosine phosphorothiorate
  modified_base 8: mod_base = OTHER; note = Guanosine phosphorothiorate
  modified_base 9: mod_base = OTHER; note = 2'-fluoroguanosine
  modified_base 12: mod_base = OTHER; note = 2'-fluorocytosine
  modified_base 24: mod_base = OTHER; note = 2'-fluoroguanosine
  modified_base 27: mod_base = OTHER; note = 2'-Omethyluridine
  modified_base 29: mod_base = OTHER; note = 2'-fluoroadenosine
  modified_base 37: mod_base = OTHER; note = 2'-fluorouridine
  modified_base 42: mod_base = OTHER; note = Adenosine phosphorothiorate
  modified_base 43: mod_base = OTHER; note = 2'-fluoroguanosine
  modified_base 48: mod_base = OTHER; note = 2'-fluorocytosine
  modified_base 50: mod_base = OTHER; note = Uridine phosphorothiorate
  modified_base 51: mod_base = OTHER; note = 2'-fluoroguanosine
  modified_base 62: mod_base = OTHER; note = 2'-fluoroguanosine
  modified_base 73: mod_base = OTHER; note = 2'-Omethylcytosine phosphorothiorate

SEQ ID NO: 7564 - RNA, 76 nt, synthetic construct; identical to SEQ ID NO: 625
  source 1..76: mol_type = other RNA
  modified_base 1: mod_base = OTHER; note = 2'-Omethylguanosine phosphorothiorate
  modified_base 2: mod_base = OTHER; note = 2'-Omethylguanosine
  modified_base 3: mod_base = OTHER; note = 2'-Omethylcytosine
  modified_base 4: mod_base = OTHER; note = 2'-Omethyluridine
  modified_base 5: mod_base = OTHER; note = 2'-Omethylcytosine
  modified_base 6: mod_base = OTHER; note = 2'-Omethylcytosine
  modified_base 22: mod_base = OTHER; note = 2'-Omethylguanosine
  modified_base 23: mod_base = OTHER; note = 2'-Omethylcytosine
  modified_base 24: mod_base = OTHER; note = 2'-Omethylguanosine
  modified_base 25: mod_base = OTHER; note = 2'-Omethylcytosine
  modified_base 49: mod_base = OTHER; note = 2'-Omethylcytosine
  modified_base 50: mod_base = OTHER; note = 2'-Omethylcytosine
  modified_base 51: mod_base = OTHER; note = 2'-Omethylguanosine
  modified_base 52: mod_base = OTHER; note = 2'-Omethylguanosine
  modified_base 53: mod_base = OTHER; note = 2'-Omethylguanosine
  modified_base 61: mod_base = OTHER; note = 2'-Omethylcytosine
  modified_base 62: mod_base = OTHER; note = 2'-Omethylcytosine
  modified_base 63: mod_base = OTHER; note = 2'-fluorocytosine
  modified_base 64: mod_base = OTHER; note = 2'-Omethylguanosine
  modified_base 65: mod_base = OTHER; note = 2'-Omethylguanosine
  modified_base 66: mod_base = OTHER; note = 2'-Omethylcytosine
  modified_base 67: mod_base = OTHER; note = 2'-Omethylguanosine
  modified_base 68: mod_base = OTHER; note = 2'-Omethylguanosine
  modified_base 69: mod_base = OTHER; note = 2'-fluoroadenosine
  modified_base 70: mod_base = OTHER; note = 2'-fluoroguanosine

SEQ ID NO: 7565 - RNA, 76 nt, synthetic construct; identical to SEQ ID NO: 625
  source 1..76: mol_type = other RNA
  modified_base 1: mod_base = OTHER; note = 2'-Omethylguanosine
  modified_base 13: mod_base = OTHER; note = 2'-Omethylcytosine
  modified_base 17: mod_base = OTHER; note = Guanosine phosphorothiorate
  modified_base 18: mod_base = OTHER; note = 2'-Omethylguanosine
  modified_base 19: mod_base = OTHER; note = Adenosine phosphorothiorate
  modified_base 20: mod_base = OTHER; note = 2'-Omethyluridine
  modified_base 25: mod_base = OTHER; note = 2'-Omethylcytosine
  modified_base 29: mod_base = OTHER; note = 2'-Omethylguanosine
  modified_base 33: mod_base = OTHER; note = 2'-fluorouridine
  modified_base 35: mod_base = OTHER; note = Cytosine phosphorothiorate
  modified_base 37: mod_base = OTHER; note = Adenosine phosphorothiorate
  modified_base 38: mod_base = OTHER; note = Adenosine phosphorothiorate
  modified_base 41: mod_base = OTHER; note = 2'-fluorocytosine phosphorothiorate
  modified_base 43: mod_base = OTHER; note = 2'-Omethyladenosine
  modified_base 44: mod_base = OTHER; note = 2'-fluoroadenosine
  modified_base 50: mod_base = OTHER; note = 2'-Omethylcytosine
  modified_base 52: mod_base = OTHER; note = 2'-Omethylguanosine
  modified_base 54: mod_base = OTHER; note = Uridine phosphorothiorate
  modified_base 55: mod_base = OTHER; note = Uridine phosphorothiorate
  modified_base 56: mod_base = OTHER; note = 2'-Omethylcytosine
  modified_base 57: mod_base = OTHER; note = Guanosine phosphorothiorate
  modified_base 62: mod_base = OTHER; note = 2'-Omethylcytosine
  modified_base 63: mod_base = OTHER; note = 2'-fluorocytosine
  modified_base 65: mod_base = OTHER; note = 2'-Omethylguanosine
  modified_base 71: mod_base = OTHER; note = 2'-Omethyluridine
  modified_base 73: mod_base = OTHER; note = 2'-Omethylguanosine

SEQ ID NO: 7566 - RNA, 74 nt, synthetic construct; identical to SEQ ID NO: 3293
  source 1..74: mol_type = other RNA
  modified_base 1: mod_base = OTHER; note = 2'-fluoroadenosine
  modified_base 2: mod_base = OTHER; note = Cytosine phosphorothiorate
  modified_base 3: mod_base = OTHER; note = Cytosine phosphorothiorate
  modified_base 4: mod_base = OTHER; note = 2'-fluorouridine
  modified_base 6: mod_base = OTHER; note = Guanosine phosphorothiorate
  modified_base 8: mod_base = OTHER; note = Guanosine phosphorothiorate
  modified_base 9: mod_base = OTHER; note = 2'-fluoroguanosine
  modified_base 12: mod_base = OTHER; note = 2'-Omethylcytosine
  modified_base 24: mod_base = OTHER; note = Guanosine phosphorothiorate
  modified_base 27: mod_base = OTHER; note = 2'-fluorouridine
  modified_base 34: mod_base = OTHER; note = 2'-fluoroadenosine phosphorothiorate
  modified_base 41: mod_base = OTHER; note = 2'-fluoroadenosine
  modified_base 43: mod_base = OTHER; note = Guanosine phosphorothiorate
  modified_base 44: mod_base = OTHER; note = Guanosine phosphorothiorate
  modified_base 48: mod_base = OTHER; note = 2'-fluorocytosine
  modified_base 50: mod_base = OTHER; note = Uridine phosphorothiorate
  modified_base 62: mod_base = OTHER; note = Guanosine phosphorothiorate
  modified_base 73: mod_base = OTHER; note = 2'-Omethylcytosine phosphorothiorate
  modified_base 74: mod_base = OTHER; note = 2'-Omethyladenosine

SEQ ID NO: 7567 - RNA, 76 nt, synthetic construct; identical to SEQ ID NO: 625
  source 1..76: mol_type = other RNA
  modified_base 44: mod_base = OTHER; note = Adenosine phosphorothiorate
  modified_base 45: mod_base = OTHER; note = Guanosine phosphorothiorate
  modified_base 46: mod_base = OTHER; note = Guanosine phosphorothiorate
  modified_base 47: mod_base = OTHER; note = Uridine phosphorothiorate
  modified_base 48: mod_base = OTHER; note = Uridine phosphorothiorate

SEQ ID NO: 7568 - RNA, 76 nt, synthetic construct; identical to SEQ ID NO: 625
  source 1..76: mol_type = other RNA
  modified_base 1: mod_base = OTHER; note = 2'-Omethylguanosine phosphorothiorate
  modified_base 2: mod_base = OTHER; note = 2'-Omethylguanosine phosphorothiorate
  modified_base 3: mod_base = OTHER; note = 2'-Omethylcytosine
  modified_base 4: mod_base = OTHER; note = 2'-Omethyluridine
  modified_base 5: mod_base = OTHER; note = 2'-Omethylcytosine
  modified_base 6: mod_base = OTHER; note = 2'-Omethylcytosine
  modified_base 10: mod_base = OTHER; note = 2'-Omethylguanosine
  modified_base 11: mod_base = OTHER; note = 2'-Omethylcytosine
  modified_base 12: mod_base = OTHER; note = 2'-Omethylguanosine
  modified_base 13: mod_base = OTHER; note = 2'-Omethylcytosine
  modified_base 14: mod_base = OTHER; note = 2'-Omethyladenosine
  modified_base 15: mod_base = OTHER; note = 2'-Omethyladenosine
  modified_base 16: mod_base = OTHER; note = 2'-Omethyluridine
  modified_base 17: mod_base = OTHER; note = 2'-Omethylguanosine
  modified_base 18: mod_base = OTHER; note = 2'-Omethylguanosine
  modified_base 20: mod_base = OTHER; note = 2'-Omethyluridine
  modified_base 22: mod_base = OTHER; note = 2'-Omethylguanosine
  modified_base 23: mod_base = OTHER; note = 2'-Omethylcytosine
  modified_base 24: mod_base = OTHER; note = 2'-Omethylguanosine
  modified_base 25: mod_base = OTHER; note = 2'-Omethylcytosine
  modified_base 33: mod_base = OTHER; note = 2'-fluorouridine
  modified_base 35: mod_base = OTHER; note = Cytosine phosphorothiorate
  modified_base 37: mod_base = OTHER; note = Adenosine phosphorothiorate
  modified_base 38: mod_base = OTHER; note = Adenosine phosphorothiorate
  modified_base 41: mod_base = OTHER; note = 2'-fluorocytosine
  modified_base 42: mod_base = OTHER; note = 2'-Omethyladenosine
  modified_base 43: mod_base = OTHER; note = 2'-Omethyladenosine
  modified_base 44: mod_base = OTHER; note = 2'-fluoroadenosine
  modified_base 49: mod_base = OTHER; note = 2'-Omethylcytosine
  modified_base 50: mod_base = OTHER; note = 2'-Omethylcytosine
  modified_base 52: mod_base = OTHER; note = 2'-Omethylguanosine
  modified_base 54: mod_base = OTHER; note = 2'-Omethyluridine
  modified_base 55: mod_base = OTHER; note = Uridine phosphorothiorate
  modified_base 56: mod_base = OTHER; note = 2'-Omethylcytosine
  modified_base 57: mod_base = OTHER; note = 2'-fluoroguanosine
  modified_base 59: mod_base = OTHER; note = 2'-Omethylguanosine
  modified_base 61: mod_base = OTHER; note = 2'-Omethylcytosine
  modified_base 65: mod_base = OTHER; note = 2'-Omethylguanosine
  modified_base 75: mod_base = OTHER; note = Cytosine phosphorothiorate
  modified_base 76: mod_base = OTHER; note = 2'-Omethyladenosine

SEQ ID NO: 7569 - RNA, 76 nt, synthetic construct; identical to SEQ ID NO: 625
  source 1..76: mol_type = other RNA
  modified_base 1: mod_base = OTHER; note = 2'-Omethylguanosine phosphorothiorate
  modified_base 2: mod_base = OTHER; note = 2'-Omethylguanosine
  modified_base 3: mod_base = OTHER; note = 2'-Omethylcytosine
  modified_base 4: mod_base = OTHER; note = 2'-Omethyluridine
  modified_base 5: mod_base = OTHER; note = 2'-Omethylcytosine
  modified_base 6: mod_base = OTHER; note = 2'-Omethylcytosine
  modified_base 14: mod_base = OTHER; note = 2'-Omethyladenosine
  modified_base 15: mod_base = OTHER; note = 2'-Omethyladenosine
  modified_base 16: mod_base = OTHER; note = 2'-Omethyluridine
  modified_base 17: mod_base = OTHER; note = 2'-Omethylguanosine
  modified_base 18: mod_base = OTHER; note = 2'-Omethylguanosine
  modified_base 19: mod_base = OTHER; note = 2'-Omethyladenosine
  modified_base 20: mod_base = OTHER; note = 2'-Omethyluridine
  modified_base 44: mod_base = OTHER; note = 2'-Omethyladenosine
  modified_base 45: mod_base = OTHER; note = 2'-Omethylguanosine
  modified_base 46: mod_base = OTHER; note = 2'-Omethylguanosine
  modified_base 49: mod_base = OTHER; note = 2'-Omethylcytosine
  modified_base 50: mod_base = OTHER; note = 2'-Omethylcytosine
  modified_base 51: mod_base = OTHER; note = 2'-Omethylguanosine
  modified_base 52: mod_base = OTHER; note = 2'-Omethylguanosine
  modified_base 53: mod_base = OTHER; note = 2'-Omethylguanosine
  modified_base 61: mod_base = OTHER; note = 2'-Omethylcytosine
  modified_base 62: mod_base = OTHER; note = 2'-Omethylcytosine
  modified_base 63: mod_base = OTHER; note = 2'-fluorocytosine
  modified_base 64: mod_base = OTHER; note = 2'-Omethylguanosine
  modified_base 65: mod_base = OTHER; note = 2'-Omethylguanosine
  modified_base 66: mod_base = OTHER; note = 2'-Omethylcytosine
  modified_base 67: mod_base = OTHER; note = 2'-Omethylguanosine
  modified_base 68: mod_base = OTHER; note = 2'-Omethylguanosine
  modified_base 69: mod_base = OTHER; note = 2'-Omethyladenosine

SEQ ID NO: 7570 - RNA, 75 nt, synthetic construct; identical to SEQ ID NO: 3299
  source 1..75: mol_type = other RNA
  modified_base 11: mod_base = OTHER; note = 2'-fluorouridine phosphorothiorate
  modified_base 20: mod_base = OTHER; note = 2'-fluoroadenosine
  modified_base 21: mod_base = OTHER; note = 2'-fluoroguanosine
  modified_base 22: mod_base = OTHER; note = 2'-Omethyladenosine phosphorothiorate
  modified_base 27: mod_base = OTHER; note = Cytosine phosphorothiorate
  modified_base 35: mod_base = OTHER; note = 2'-fluoroadenosine phosphorothiorate
  modified_base 46: mod_base = OTHER; note = 2'-fluorouridine
  modified_base 47: mod_base = OTHER; note = 2'-fluorocytosine
  modified_base 49: mod_base = OTHER; note = 2'-fluoroadenosine
  modified_base 72: mod_base = OTHER; note = Guanosine phosphorothiorate
  modified_base 74: mod_base = OTHER; note = 2'-Omethylcytosine

SEQ ID NO: 7571 - RNA, 76 nt, synthetic construct; identical to SEQ ID NO: 3289
  source 1..76: mol_type = other RNA
  modified_base 1: mod_base = OTHER; note = 2'-Omethylguanosine phosphorothiorate
  modified_base 2: mod_base = OTHER; note = 2'-Omethylcytosine phosphorothiorate
  modified_base 75: mod_base = OTHER; note = 2'-Omethylcytosine phosphorothiorate
  modified_base 76: mod_base = OTHER; note = 2'-Omethyladenosine

SEQ ID NO: 7572 - RNA, 75 nt, synthetic construct; identical to SEQ ID NO: 1045
  source 1..75: mol_type = other RNA
  modified_base 1: mod_base = OTHER; note = 2'-Omethylguanosine
  modified_base 60: mod_base = OTHER; note = 2'-Omethylcytosine
  modified_base 61: mod_base = OTHER; note = 2'-Omethyluridine
  modified_base 63: mod_base = OTHER; note = 2'-Omethylguanosine
  modified_base 64: mod_base = OTHER; note = 2'-Omethylguanosine
  modified_base 65: mod_base = OTHER; note = 2'-Omethyluridine
  modified_base 66: mod_base = OTHER; note = 2'-Omethylguanosine
  modified_base 67: mod_base = OTHER; note = 2'-Omethylguanosine
  modified_base 68: mod_base = OTHER; note = 2'-Omethyladenosine
  modified_base 69: mod_base = OTHER; note = 2'-fluoroadenosine
  modified_base 70: mod_base = OTHER; note = 2'-Omethylcytosine
  modified_base 71: mod_base = OTHER; note = 2'-Omethylcytosine
  modified_base 72: mod_base = OTHER; note = 2'-Omethyluridine

SEQ ID NO: 7573 - RNA, 76 nt, synthetic construct; identical to SEQ ID NO: 625
  source 1..76: mol_type = other RNA
  modified_base 1: mod_base = OTHER; note = 2'-Omethylguanosine
  modified_base 17: mod_base = OTHER; note = 2'-Omethylguanosine
  modified_base 18: mod_base = OTHER; note = 2'-Omethylguanosine
  modified_base 28: mod_base = OTHER; note = Thymine
  modified_base 33: mod_base = OTHER; note = 2'-fluorouridine
  modified_base 50: mod_base = OTHER; note = 2'-Omethylcytosine
  modified_base 52: mod_base = OTHER; note = 2'-Omethylguanosine
  modified_base 55: mod_base = OTHER; note = Uridine phosphorothiorate
  modified_base 73: mod_base = OTHER; note = 2'-Omethylguanosine

SEQ ID NO: 7574 - RNA, 86 nt, synthetic construct; identical to SEQ ID NO: 3290
  source 1..86: mol_type = other RNA
  modified_base 3: mod_base = OTHER; note = 2'-fluorocytosine

SEQ ID NO: 7575 - RNA, 76 nt, synthetic construct; identical to SEQ ID NO: 625
  source 1..76: mol_type = other RNA
  modified_base 1: mod_base = OTHER; note = 2'-Omethylguanosine phosphorothiorate
  modified_base 2: mod_base = OTHER; note = 2'-Omethylguanosine
  modified_base 3: mod_base = OTHER; note = 2'-Omethylcytosine
  modified_base 10: mod_base = OTHER; note = 2'-Omethylguanosine
  modified_base 11: mod_base = OTHER; note = 2'-Omethylcytosine
  modified_base 12: mod_base = OTHER; note = 2'-Omethylguanosine
  modified_base 13: mod_base = OTHER; note = 2'-Omethylcytosine
  modified_base 14: mod_base = OTHER; note = 2'-Omethyladenosine
  modified_base 15: mod_base = OTHER; note = 2'-fluoroadenosine
  modified_base 16: mod_base = OTHER; note = 2'-Omethyluridine
  modified_base 17: mod_base = OTHER; note = 2'-Omethylguanosine
  modified_base 18: mod_base = OTHER; note = 2'-Omethylguanosine
  modified_base 19: mod_base = OTHER; note = 2'-fluoroadenosine
  modified_base 20: mod_base = OTHER; note = 2'-Omethyluridine
  modified_base 22: mod_base = OTHER; note = 2'-Omethylguanosine
  modified_base 23: mod_base = OTHER; note = 2'-Omethylcytosine
  modified_base 24: mod_base = OTHER; note = 2'-Omethylguanosine
  modified_base 25: mod_base = OTHER; note = 2'-Omethylcytosine
  modified_base 38: mod_base = OTHER; note = Adenosine phosphorothiorate
  modified_base 39: mod_base = OTHER; note = Uridine phosphorothiorate
  modified_base 40: mod_base = OTHER; note = 2'-fluorouridine
  modified_base 43: mod_base = OTHER; note = 2'-Omethyladenosine
  modified_base 44: mod_base = OTHER; note = 2'-Omethyladenosine
  modified_base 45: mod_base = OTHER; note = 2'-Omethylguanosine
  modified_base 46: mod_base = OTHER; note = 2'-fluoroguanosine
  modified_base 48: mod_base = OTHER; note = 2'-fluorouridine
  modified_base 49: mod_base = OTHER; note = 2'-Omethylcytosine
  modified_base 50: mod_base = OTHER; note = 2'-Omethylcytosine
  modified_base 54: mod_base = OTHER; note = Uridine phosphorothiorate
  modified_base 55: mod_base = OTHER; note = Uridine phosphorothiorate
  modified_base 56: mod_base = OTHER; note = 2'-Omethylcytosine
  modified_base 57: mod_base = OTHER; note = Guanosine phosphorothiorate
  modified_base 61: mod_base = OTHER; note = 2'-Omethylcytosine
  modified_base 62: mod_base = OTHER; note = 2'-Omethylcytosine
  modified_base 63: mod_base = OTHER; note = 2'-fluorocytosine
  modified_base 64: mod_base = OTHER; note = 2'-Omethylguanosine
  modified_base 65: mod_base = OTHER; note = 2'-Omethylguanosine
  modified_base 66: mod_base = OTHER; note = 2'-Omethylcytosine
  modified_base 67: mod_base = OTHER; note = 2'-Omethylguanosine
  modified_base 68: mod_base = OTHER; note = 2'-Omethylguanosine
  modified_base 69: mod_base = OTHER; note = 2'-Omethyladenosine
  modified_base 70: mod_base = OTHER; note = 2'-fluoroguanosine

SEQ ID NO: 7576 - RNA, 76 nt, synthetic construct; identical to SEQ ID NO: 625
  source 1..76: mol_type = other RNA
  modified_base 1: mod_base = OTHER; note = 2'-Omethylguanosine
  modified_base 2: mod_base = OTHER; note = 2'-Omethylguanosine
  modified_base 3: mod_base = OTHER; note = 2'-Omethylcytosine
  modified_base 4: mod_base = OTHER; note = 2'-Omethyluridine
  modified_base 5: mod_base = OTHER; note = 2'-Omethylcytosine
  modified_base 6: mod_base = OTHER; note = 2'-Omethylcytosine
  modified_base 10: mod_base = OTHER; note = 2'-Omethylguanosine
  modified_base 11: mod_base = OTHER; note = 2'-Omethylcytosine
  modified_base 12: mod_base = OTHER; note = 2'-Omethylguanosine
  modified_base 13: mod_base = OTHER; note = 2'-Omethylcytosine
  modified_base 14: mod_base = OTHER; note = 2'-Omethyladenosine
  modified_base 15: mod_base = OTHER; note = 2'-fluoroadenosine
  modified_base 16: mod_base = OTHER; note = 2'-Omethyluridine
  modified_base 17: mod_base = OTHER; note = 2'-Omethylguanosine
  modified_base 18: mod_base = OTHER; note = 2'-Omethylguanosine
  modified_base 19: mod_base = OTHER; note = 2'-fluoroadenosine
  modified_base 20: mod_base = OTHER; note = 2'-Omethyluridine
  modified_base 22: mod_base = OTHER; note = 2'-Omethylguanosine
  modified_base 23: mod_base = OTHER; note = 2'-Omethylcytosine
  modified_base 24: mod_base = OTHER; note = 2'-Omethylguanosine
  modified_base 25: mod_base = OTHER; note = 2'-Omethylcytosine
  modified_base 38: mod_base = OTHER; note = Adenosine phosphorothiorate
  modified_base 39: mod_base = OTHER; note = Uridine phosphorothiorate
  modified_base 40: mod_base = OTHER; note = 2'-fluorouridine
  modified_base 43: mod_base = OTHER; note = 2'-Omethyladenosine
  modified_base 44: mod_base = OTHER; note = 2'-Omethyladenosine
  modified_base 45: mod_base = OTHER; note = 2'-Omethylguanosine
  modified_base 46: mod_base = OTHER; note = 2'-fluoroguanosine
  modified_base 48: mod_base = OTHER; note = 2'-fluorouridine
  modified_base 49: mod_base = OTHER; note = 2'-Omethylcytosine
  modified_base 50: mod_base = OTHER; note = 2'-Omethylcytosine
  modified_base 54: mod_base = OTHER; note = Uridine phosphorothiorate
  modified_base 55: mod_base = OTHER; note = Uridine phosphorothiorate
  modified_base 56: mod_base = OTHER; note = 2'-Omethylcytosine
  modified_base 57: mod_base = OTHER; note = Guanosine phosphorothiorate
  modified_base 61: mod_base = OTHER; note = 2'-Omethylcytosine
  modified_base 62: mod_base = OTHER; note = 2'-Omethylcytosine
  modified_base 63: mod_base = OTHER; note = 2'-fluorocytosine
  modified_base 64: mod_base = OTHER; note = 2'-Omethylguanosine
  modified_base 65: mod_base = OTHER; note = 2'-Omethylguanosine
  modified_base 66: mod_base = OTHER; note = 2'-Omethylcytosine
  modified_base 67: mod_base = OTHER; note = 2'-Omethylguanosine
  modified_base 68: mod_base = OTHER; note = 2'-Omethylguanosine
  modified_base 69: mod_base = OTHER; note = 2'-Omethyladenosine

SEQ ID NO: 7577 - RNA, 75 nt, synthetic construct; identical to SEQ ID NO: 1045
  source 1..75: mol_type = other RNA
  modified_base 48: mod_base = OTHER; note = 2'-Omethylcytosine
  modified_base 49: mod_base = OTHER; note = 2'-Omethylcytosine
  modified_base 50: mod_base = OTHER; note = 2'-Omethylguanosine
  modified_base 51: mod_base = OTHER; note = 2'-Omethyladenosine
  modified_base 52: mod_base = OTHER; note = 2'-Omethylguanosine
  modified_base 60: mod_base = OTHER; note = 2'-Omethylcytosine
  modified_base 61: mod_base = OTHER; note = 2'-Omethyluridine
  modified_base 62: mod_base = OTHER; note = 2'-Omethylcytosine
  modified_base 63: mod_base = OTHER; note = 2'-Omethylguanosine
  modified_base 64: mod_base = OTHER; note = 2'-Omethylguanosine

SEQ ID NO: 7578 - RNA, 82 nt, synthetic construct; identical to SEQ ID NO: 4354
  source 1..82: mol_type = other RNA
  modified_base 1: mod_base = OTHER; note = 2'-Omethylguanosine
  modified_base 17: mod_base = OTHER; note = 2'-Omethylguanosine
  modified_base 18: mod_base = OTHER; note = 2'-Omethylguanosine
  modified_base 59: mod_base = OTHER; note = 2'-Omethylcytosine
  modified_base 61: mod_base = OTHER; note = 2'-Omethylguanosine

SEQ ID NO: 7579 - RNA, 76 nt, synthetic construct; identical to SEQ ID NO: 3295
  source 1..76: mol_type = other RNA
  modified_base 1: mod_base = OTHER; note = 2'-Omethylcytosine
  modified_base 2: mod_base = OTHER; note = Cytosine phosphorothiorate
  modified_base 6: mod_base = OTHER; note = 2'-fluoroguanosine
  modified_base 27: mod_base = OTHER; note = 2'-Omethylguanosine
  modified_base 38: mod_base = OTHER; note = 2'-Omethyladenosine phosphorothiorate
  modified_base 47: mod_base = OTHER; note = 2'-Omethyluridine
  modified_base 49: mod_base = OTHER; note = 2'-fluoroguanosine
  modified_base 74: mod_base = OTHER; note = Cytosine phosphorothiorate
  modified_base 75: mod_base = OTHER; note = 2'-fluorocytosine

SEQ ID NO: 7580 - RNA, 75 nt, synthetic construct; identical to SEQ ID NO: 1045
  source 1..75: mol_type = other RNA
  modified_base 1: mod_base = OTHER; note = 2'-Omethylguanosine
  modified_base 47: mod_base = OTHER; note = 2'-fluorouridine
  modified_base 72: mod_base = OTHER; note = 2'-Omethyluridine

SEQ ID NO: 7581 - RNA, 76 nt, synthetic construct; identical to SEQ ID NO: 3795
  source 1..76: mol_type = other RNA
  modified_base 1: mod_base = OTHER; note = 2'-Omethylguanosine
  modified_base 17: mod_base = OTHER; note = 2'-Omethylguanosine
  modified_base 18: mod_base = OTHER; note = 2'-Omethylguanosine
  modified_base 50: mod_base = OTHER; note = 2'-Omethylcytosine
  modified_base 52: mod_base = OTHER; note = 2'-Omethylguanosine
  modified_base 73: mod_base = OTHER; note = 2'-Omethylguanosine

SEQ ID NO: 7582 - RNA, 86 nt, synthetic construct; identical to SEQ ID NO: 3290
  source 1..86: mol_type = other RNA
  modified_base 69: mod_base = OTHER; note = 2'-fluoroadenosine

SEQ ID NO: 7583 - RNA, 76 nt, synthetic construct; identical to SEQ ID NO: 3332
  source 1..76: mol_type = other RNA
  modified_base 1: mod_base = OTHER; note = 2'-Omethylguanosine phosphorothiorate
  modified_base 2: mod_base = OTHER; note = 2'-Omethylguanosine
  modified_base 3: mod_base = OTHER; note = 2'-Omethylcytosine
  modified_base 4: mod_base = OTHER; note = 2'-Omethylcytosine
  modified_base 5: mod_base = OTHER; note = 2'-Omethylcytosine
  modified_base 6: mod_base = OTHER; note = 2'-Omethylcytosine
  modified_base 44: mod_base = OTHER; note = 2'-Omethyladenosine
  modified_base 45: mod_base = OTHER; note = 2'-Omethylguanosine
  modified_base 46: mod_base = OTHER; note = 2'-fluoroguanosine
  modified_base 47: mod_base = OTHER; note = 2'-fluorouridine
  modified_base 48: mod_base = OTHER; note = 2'-Omethyluridine
  modified_base 49: mod_base = OTHER; note = 2'-Omethylguanosine
  modified_base 73: mod_base = OTHER; note = 2'-Omethylguanosine

SEQ ID NO: 7584 - RNA, 76 nt, synthetic construct; identical to SEQ ID NO: 3295
  source 1..76: mol_type = other RNA
  modified_base 1: mod_base = OTHER; note = 2'-fluorocytosine
  modified_base 2: mod_base = OTHER; note = 2'-fluorocytosine phosphorothiorate
  modified_base 5: mod_base = OTHER; note = 2'-Omethylcytosine phosphorothiorate
  modified_base 14: mod_base = OTHER; note = 2'-fluoroadenosine phosphorothiorate
  modified_base 24: mod_base = OTHER; note = 2'-fluoroguanosine phosphorothiorate
  modified_base 25: mod_base = OTHER; note = 2'-fluorocytosine phosphorothiorate
  modified_base 48: mod_base = OTHER; note = 2'-Omethylcytosine
  modified_base 52: mod_base = OTHER; note = 2'-Omethylguanosine phosphorothiorate
  modified_base 67: mod_base = OTHER; note = 2'-fluorocytosine
  modified_base 74: mod_base = OTHER; note = 2'-Omethylcytosine phosphorothiorate

SEQ ID NO: 7585 - RNA, 76 nt, synthetic construct
  source 1..76: mol_type = other RNA
gcctcggtggcctaatggataaggcattggccttcaaagccaaggattgtgggttcgagtcccatccggggtgcca

SEQ ID NO: 7586 - RNA, 76 nt, synthetic construct
  source 1..76: mol_type = other RNA
ggctctgtggcgcaatggatagcgcattggacttcaaattcaaaggttgcgggttcgagtcccgccagagtcgcca

SEQ ID NO: 7587 - RNA, 76 nt, synthetic construct; identical to SEQ ID NO: 3615
  source 1..76: mol_type = other RNA
  modified_base 1: mod_base = OTHER; note = 2'-Omethylguanosine
  modified_base 2: mod_base = OTHER; note = 2'-Omethylguanosine
  modified_base 3: mod_base = OTHER; note = 2'-Omethylcytosine
  modified_base 4: mod_base = OTHER; note = 2'-Omethyluridine
  modified_base 5: mod_base = OTHER; note = 2'-Omethylcytosine
  modified_base 6: mod_base = OTHER; note = 2'-Omethylcytosine
  modified_base 13: mod_base = OTHER; note = 2'-Omethylcytosine
  modified_base 14: mod_base = OTHER; note = 2'-Omethyladenosine
  modified_base 15: mod_base = OTHER; note = 2'-Omethyladenosine
  modified_base 16: mod_base = OTHER; note = 2'-Omethyluridine
  modified_base 17: mod_base = OTHER; note = 2'-Omethylguanosine
  modified_base 18: mod_base = OTHER; note = 2'-Omethylguanosine
  modified_base 19: mod_base = OTHER; note = Adenosine phosphorothiorate
  modified_base 20: mod_base = OTHER; note = 2'-Omethyluridine
  modified_base 21: mod_base = OTHER; note = Adenosine phosphorothiorate
  modified_base 25: mod_base = OTHER; note = 2'-Omethylcytosine
  modified_base 33: mod_base = OTHER; note = Uridine phosphorothiorate
  modified_base 34: mod_base = OTHER; note = 2'-Omethyluridine
  modified_base 35: mod_base = OTHER; note = Cytosine phosphorothiorate
  modified_base 37: mod_base = OTHER; note = Adenosine phosphorothiorate
  modified_base 38: mod_base = OTHER; note = Adenosine phosphorothiorate
  modified_base 49: mod_base = OTHER; note = 2'-Omethylcytosine
  modified_base 50: mod_base = OTHER; note = 2'-Omethylcytosine
  modified_base 51: mod_base = OTHER; note = 2'-Omethylguanosine
  modified_base 52: mod_base = OTHER; note = 2'-Omethylguanosine
  modified_base 53: mod_base = OTHER; note = 2'-Omethylguanosine
  modified_base 54: mod_base = OTHER; note = Uridine phosphorothiorate
  modified_base 55: mod_base = OTHER; note = Uridine phosphorothiorate
  modified_base 61: mod_base = OTHER; note = 2'-Omethylcytosine
  modified_base 65: mod_base = OTHER; note = 2'-Omethylguanosine
  modified_base 73: mod_base = OTHER; note = 2'-Omethylguanosine

SEQ ID NO: 7588 - RNA, 75 nt, synthetic construct; identical to SEQ ID NO: 1045
  source 1..75: mol_type = other RNA
  modified_base 2: mod_base = OTHER; note = 2'-Omethylguanosine phosphorothiorate
  modified_base 17: mod_base = OTHER; note = 2'-Omethylguanosine
  modified_base 19: mod_base = OTHER; note = 2'-fluorouridine
  modified_base 21: mod_base = OTHER; note = 2'-fluoroadenosine
  modified_base 44: mod_base = OTHER; note = 2'-fluorocytosine
  modified_base 53: mod_base = OTHER; note = 2'-fluorouridine
  modified_base 56: mod_base = OTHER; note = 2'-fluoroguanosine
  modified_base 59: mod_base = OTHER; note = 2'-Omethyluridine
  modified_base 73: mod_base = OTHER; note = Cytosine phosphorothiorate
  modified_base 74: mod_base = OTHER; note = 2'-Omethylcytosine

SEQ ID NO: 7589 - RNA, 76 nt, synthetic construct; identical to SEQ ID NO: 3318
  source 1..76: mol_type = other RNA
  modified_base 1: mod_base = OTHER; note = 2'-Omethylcytosine
  modified_base 13: mod_base = OTHER; note = 2'-Omethylcytosine

SEQ ID NO: 7590 - RNA, 75 nt, synthetic construct; identical to SEQ ID NO: 1045
  source 1..75: mol_type = other RNA
  modified_base 1: mod_base = OTHER; note = 2'-Omethylguanosine
  modified_base 2: mod_base = OTHER; note = 2'-Omethylguanosine
  modified_base 3: mod_base = OTHER; note = 2'-Omethyluridine
  modified_base 4: mod_base = OTHER; note = 2'-Omethyluridine
  modified_base 5: mod_base = OTHER; note = 2'-Omethylcytosine
  modified_base 6: mod_base = OTHER; note = 2'-Omethylcytosine
  modified_base 13: mod_base = OTHER; note = 2'-Omethyluridine
  modified_base 14: mod_base = OTHER; note = 2'-Omethyladenosine
  modified_base 15: mod_base = OTHER; note = 2'-Omethyladenosine
  modified_base 16: mod_base = OTHER; note = 2'-Omethyluridine
  modified_base 17: mod_base = OTHER; note = 2'-Omethylguanosine
  modified_base 18: mod_base = OTHER; note = 2'-Omethylguanosine
  modified_base 19: mod_base = OTHER; note = Uridine phosphorothiorate
  modified_base 20: mod_base = OTHER; note = 2'-Omethyladenosine
  modified_base 21: mod_base = OTHER; note = Adenosine phosphorothiorate
  modified_base 25: mod_base = OTHER; note = 2'-Omethylcytosine
  modified_base 33: mod_base = OTHER; note = Uridine phosphorothiorate
  modified_base 34: mod_base = OTHER; note = 2'-Omethyluridine
  modified_base 35: mod_base = OTHER; note = Uridine phosphorothiorate
  modified_base 37: mod_base = OTHER; note = Adenosine phosphorothiorate
  modified_base 38: mod_base = OTHER; note = Adenosine phosphorothiorate
  modified_base 41: mod_base = OTHER; note = 2'-fluorocytosine
  modified_base 42: mod_base = OTHER; note = 2'-Omethyladenosine
  modified_base 43: mod_base = OTHER; note = 2'-Omethylguanosine
  modified_base 44: mod_base = OTHER; note = 2'-fluorocytosine
  modified_base 48: mod_base = OTHER; note = 2'-Omethylcytosine
  modified_base 49: mod_base = OTHER; note = 2'-Omethylcytosine
  modified_base 51: mod_base = OTHER; note = 2'-Omethyladenosine
  modified_base 53: mod_base = OTHER; note = Uridine phosphorothiorate
  modified_base 54: mod_base = OTHER; note = Uridine phosphorothiorate
  modified_base 60: mod_base = OTHER; note = 2'-Omethylcytosine
  modified_base 64: mod_base = OTHER; note = 2'-Omethylguanosine
  modified_base 72: mod_base = OTHER; note = 2'-Omethyluridine

SEQ ID NO: 7591 - RNA, 85 nt, synthetic construct; identical to SEQ ID NO: 3301
  source 1..85: mol_type = other RNA
  modified_base 1: mod_base = OTHER; note = 2'-Omethylguanosine phosphorothiorate
  modified_base 3: mod_base = OTHER; note = 2'-fluorouridine phosphorothiorate
  modified_base 6: mod_base = OTHER; note = 2'-fluoroguanosine
  modified_base 15: mod_base = OTHER; note = 2'-Omethylguanosine
  modified_base 18: mod_base = OTHER; note = 2'-Omethylguanosine phosphorothiorate
  modified_base 20: mod_base = OTHER; note = 2'-Omethyluridine phosphorothiorate
  modified_base 23: mod_base = OTHER; note = 2'-fluoroguanosine
  modified_base 24: mod_base = OTHER; note = 2'-fluoroguanosine
  modified_base 39: mod_base = OTHER; note = Uridine phosphorothiorate
  modified_base 56: mod_base = OTHER; note = 2'-Omethylguanosine phosphorothiorate
  modified_base 57: mod_base = OTHER; note = Cytosine phosphorothiorate
  modified_base 58: mod_base = OTHER; note = 2'-fluoroguanosine
  modified_base 59: mod_base = OTHER; note = Cytosine phosphorothiorate
  modified_base 64: mod_base = OTHER; note = 2'-fluorouridine
  modified_base 79: mod_base = OTHER; note = 2'-fluoroadenosine
  modified_base 80: mod_base = OTHER; note = Guanosine phosphorothiorate
  modified_base 82: mod_base = OTHER; note = 2'-Omethylguanosine

SEQ ID NO: 7592 - RNA, 76 nt, synthetic construct; identical to SEQ ID NO: 3289
  source 1..76: mol_type = other RNA
  modified_base 1: mod_base = OTHER; note = 2'-Omethylguanosine phosphorothiorate
  modified_base 2: mod_base = OTHER; note = 2'-Omethylcytosine
  modified_base 3: mod_base = OTHER; note = 2'-Omethylcytosine
  modified_base 4: mod_base = OTHER; note = 2'-Omethyluridine
  modified_base 5: mod_base = OTHER; note = 2'-Omethylguanosine
  modified_base 6: mod_base = OTHER; note = 2'-Omethylguanosine
  modified_base 43: mod_base = OTHER; note = 2'-Omethyladenosine
  modified_base 44: mod_base = OTHER; note = 2'-Omethylguanosine
  modified_base 45: mod_base = OTHER; note = 2'-Omethylguanosine
  modified_base 46: mod_base = OTHER; note = 2'-fluoroguanosine
  modified_base 48: mod_base = OTHER; note = 2'-fluorocytosine
  modified_base 73: mod_base = OTHER; note = 2'-Omethylguanosine

SEQ ID NO: 7593 - RNA, 86 nt, synthetic construct; identical to SEQ ID NO: 3290
  source 1..86: mol_type = other RNA
  modified_base 70: mod_base = OTHER; note = 2'-fluorocytosine

SEQ ID NO: 7594 - RNA, 85 nt, synthetic construct; identical to SEQ ID NO: 3297
  source 1..85: mol_type = other RNA
  modified_base 1: mod_base = OTHER; note = 2'-Omethylguanosine
  modified_base 2: mod_base = OTHER; note = 2'-Omethylcytosine
  modified_base 3: mod_base = OTHER; note = 2'-Omethyluridine
  modified_base 4: mod_base = OTHER; note = 2'-Omethylguanosine
  modified_base 5: mod_base = OTHER; note = 2'-Omethyluridine
  modified_base 6: mod_base = OTHER; note = 2'-Omethylguanosine
  modified_base 13: mod_base = OTHER; note = 2'-Omethylguanosine
  modified_base 14: mod_base = OTHER; note = 2'-Omethyladenosine
  modified_base 15: mod_base = OTHER; note = 2'-Omethylguanosine
  modified_base 16: mod_base = OTHER; note = 2'-Omethyluridine
  modified_base 17: mod_base = OTHER; note = 2'-Omethylguanosine
  modified_base 18: mod_base = OTHER; note = 2'-Omethylguanosine
  modified_base 19: mod_base = OTHER; note = Uridine phosphorothiorate
  modified_base 20: mod_base = OTHER; note = 2'-Omethyluridine
  modified_base 21: mod_base = OTHER; note = Adenosine phosphorothiorate
  modified_base 25: mod_base = OTHER; note = 2'-Omethylcytosine
  modified_base 33: mod_base = OTHER; note = 2'-fluorouridine
  modified_base 34: mod_base = OTHER; note = 2'-Omethyluridine
  modified_base 35: mod_base = OTHER; note = Cytosine phosphorothiorate
  modified_base 37: mod_base = OTHER; note = Adenosine phosphorothiorate
  modified_base 38: mod_base = OTHER; note = Adenosine phosphorothiorate
  modified_base 41: mod_base = OTHER; note = 2'-Omethylcytosine
  modified_base 42: mod_base = OTHER; note = 2'-Omethyladenosine
  modified_base 43: mod_base = OTHER; note = 2'-Omethyladenosine
  modified_base 44: mod_base = OTHER; note = 2'-Omethyluridine
  modified_base 58: mod_base = OTHER; note = 2'-Omethylguanosine
  modified_base 59: mod_base = OTHER; note = 2'-Omethylcytosine
  modified_base 61: mod_base = OTHER; note = 2'-Omethylguanosine
  modified_base 63: mod_base = OTHER; note = Uridine phosphorothiorate
  modified_base 64: mod_base = OTHER; note = Uridine phosphorothiorate
  modified_base 70: mod_base = OTHER; note = 2'-Omethylcytosine
  modified_base 74: mod_base = OTHER; note = 2'-Omethylcytosine
  modified_base 82: mod_base = OTHER; note = 2'-Omethylguanosine

SEQ ID NO: 7595 - RNA, 76 nt, synthetic construct; identical to SEQ ID NO: 625
  source 1..76: mol_type = other RNA
  modified_base 1: mod_base = OTHER; note = 2'-Omethylguanosine
  modified_base 17: mod_base = OTHER; note = 2'-Omethylguanosine
  modified_base 18: mod_base = OTHER; note = 2'-Omethylguanosine
  modified_base 20: mod_base = OTHER; note = Thymine
  modified_base 50: mod_base = OTHER; note = 2'-Omethylcytosine
  modified_base 52: mod_base = OTHER; note = 2'-Omethylguanosine
  modified_base 73: mod_base = OTHER; note = 2'-Omethylguanosine

SEQ ID NO: 7596 - RNA, 75 nt, synthetic construct; identical to SEQ ID NO: 1045
  source 1..75: mol_type = other RNA
  modified_base 1: mod_base = OTHER; note = 2'-Omethylguanosine phosphorothiorate
  modified_base 2: mod_base = OTHER; note = 2'-Omethylguanosine phosphorothiorate
  modified_base 3: mod_base = OTHER; note = 2'-Omethyluridine
  modified_base 4: mod_base = OTHER; note = 2'-Omethyluridine
  modified_base 5: mod_base = OTHER; note = 2'-Omethylcytosine
  modified_base 6: mod_base = OTHER; note = 2'-Omethylcytosine
  modified_base 10: mod_base = OTHER; note = 2'-Omethylguanosine
  modified_base 11: mod_base = OTHER; note = 2'-Omethyluridine
  modified_base 12: mod_base = OTHER; note = 2'-Omethylguanosine
  modified_base 13: mod_base = OTHER; note = 2'-Omethyluridine
  modified_base 16: mod_base = OTHER; note = 2'-Omethyluridine
  modified_base 17: mod_base = OTHER; note = 2'-Omethylguanosine
  modified_base 18: mod_base = OTHER; note = 2'-Omethylguanosine
  modified_base 33: mod_base = OTHER; note = 2'-fluorouridine
  modified_base 35: mod_base = OTHER; note = Uridine phosphorothiorate
  modified_base 37: mod_base = OTHER; note = Adenosine phosphorothiorate
  modified_base 38: mod_base = OTHER; note = Adenosine phosphorothiorate
  modified_base 44: mod_base = OTHER; note = 2'-Omethylcytosine
  modified_base 45: mod_base = OTHER; note = 2'-Omethylguanosine
  modified_base 46: mod_base = OTHER; note = 2'-fluoroadenosine
  modified_base 47: mod_base = OTHER; note = 2'-fluorouridine
  modified_base 48: mod_base = OTHER; note = 2'-Omethylcytosine
  modified_base 49: mod_base = OTHER; note = 2'-Omethylcytosine
  modified_base 50: mod_base = OTHER; note = 2'-Omethylguanosine
  modified_base 51: mod_base = OTHER; note = 2'-Omethyladenosine
  modified_base 52: mod_base = OTHER; note = 2'-Omethylguanosine
  modified_base 53: mod_base = OTHER; note = 2'-Omethyluridine
  modified_base 55: mod_base = OTHER; note = 2'-Omethylcytosine
  modified_base 58: mod_base = OTHER; note = 2'-Omethylguanosine
  modified_base 60: mod_base = OTHER; note = 2'-Omethylcytosine
  modified_base 61: mod_base = OTHER; note = 2'-Omethyluridine
  modified_base 62: mod_base = OTHER; note = 2'-fluorocytosine
  modified_base 63: mod_base = OTHER; note = 2'-Omethylguanosine
  modified_base 64: mod_base = OTHER; note = 2'-Omethylguanosine
  modified_base 65: mod_base = OTHER; note = 2'-Omethyluridine
  modified_base 66: mod_base = OTHER; note = 2'-Omethylguanosine
  modified_base 67: mod_base = OTHER; note = 2'-Omethylguanosine
  modified_base 72: mod_base = OTHER; note = 2'-Omethyluridine

SEQ ID NO: 7597 - RNA, 75 nt, synthetic construct; identical to SEQ ID NO: 3306
  source 1..75: mol_type = other RNA
  modified_base 1: mod_base = OTHER; note = 2'-Omethylguanosine
  modified_base 14: mod_base = OTHER; note = 2'-Omethyladenosine
  modified_base 15: mod_base = OTHER; note = 2'-Omethyladenosine
  modified_base 16: mod_base = OTHER; note = 2'-Omethylcytosine
  modified_base 17: mod_base = OTHER; note = 2'-Omethylguanosine
  modified_base 18: mod_base = OTHER; note = 2'-Omethylguanosine
  modified_base 49: mod_base = OTHER; note = 2'-Omethylcytosine
  modified_base 51: mod_base = OTHER; note = 2'-Omethyluridine
  modified_base 72: mod_base = OTHER; note = 2'-Omethyladenosine

SEQ ID NO: 7598 - RNA, 76 nt, synthetic construct; identical to SEQ ID NO: 3295
  source 1..76: mol_type = other RNA
  modified_base 1: mod_base = OTHER; note = 2'-fluorocytosine
  modified_base 2: mod_base = OTHER; note = 2'-Omethylcytosine
  modified_base 3: mod_base = OTHER; note = 2'-Omethyluridine
  modified_base 4: mod_base = OTHER; note = 2'-Omethyluridine phosphorothiorate
  modified_base 5: mod_base = OTHER; note = Cytosine phosphorothiorate
  modified_base 7: mod_base = OTHER; note = 2'-Omethyladenosine
  modified_base 9: mod_base = OTHER; note = 2'-Omethyladenosine
  modified_base 17: mod_base = OTHER; note = 2'-Omethyluridine
  modified_base 20: mod_base = OTHER; note = 2'-fluorouridine
  modified_base 26: mod_base = OTHER; note = 2'-fluoroguanosine
  modified_base 29: mod_base = OTHER; note = 2'-fluoroguanosine phosphorothiorate
  modified_base 30: mod_base = OTHER; note = 2'-fluoroguanosine phosphorothiorate
  modified_base 31: mod_base = OTHER; note = 2'-fluoroadenosine
  modified_base 38: mod_base = OTHER; note = 2'-fluoroadenosine phosphorothiorate
  modified_base 39: mod_base = OTHER; note = 2'-Omethyluridine phosphorothiorate
  modified_base 43: mod_base = OTHER; note = 2'-fluorouridine phosphorothiorate
  modified_base 47: mod_base = OTHER; note = 2'-fluorouridine phosphorothiorate
  modified_base 49: mod_base = OTHER; note = 2'-Omethylguanosine
  modified_base 52: mod_base = OTHER; note = 2'-Omethylguanosine phosphorothiorate
  modified_base 53: mod_base = OTHER; note = Guanosine phosphorothiorate
  modified_base 54: mod_base = OTHER; note = 2'-fluorouridine phosphorothiorate
  modified_base 66: mod_base = OTHER; note = 2'-fluorouridine
  modified_base 74: mod_base = OTHER; note = 2'-Omethylcytosine phosphorothiorate
  modified_base 75: mod_base = OTHER; note = 2'-Omethylcytosine phosphorothiorate

SEQ ID NO: 7599 - RNA, 75 nt, synthetic construct; identical to SEQ ID NO: 3306
  source 1..75: mol_type = other RNA
  modified_base 1: mod_base = OTHER; note = 2'-Omethylguanosine
  modified_base 17: mod_base = OTHER; note = 2'-Omethylguanosine
  modified_base 18: mod_base = OTHER; note = 2'-Omethylguanosine
  modified_base 32: mod_base = OTHER; note = Uridine phosphorothiorate
  modified_base 33: mod_base = OTHER; note = 2'-Omethylcytosine
  modified_base 34: mod_base = OTHER; note = Uridine phosphorothiorate
  modified_base 36: mod_base = OTHER; note = Guanosine phosphorothiorate
  modified_base 37: mod_base = OTHER; note = Adenosine phosphorothiorate
  modified_base 40: mod_base = OTHER; note = 2'-fluoroadenosine
  modified_base 41: mod_base = OTHER; note = 2'-Omethylguanosine
  modified_base 42: mod_base = OTHER; note = 2'-Omethyladenosine
  modified_base 43: mod_base = OTHER; note = 2'-fluoroadenosine
  modified_base 49: mod_base = OTHER; note = 2'-Omethylcytosine
  modified_base 51: mod_base = OTHER; note = 2'-Omethyluridine
  modified_base 72: mod_base = OTHER; note = 2'-Omethyladenosine

SEQ ID NO: 7600 - RNA, 76 nt, synthetic construct; identical to SEQ ID NO: 625
  source 1..76: mol_type = other RNA
  modified_base 1: mod_base = OTHER; note = 2'-fluoroguanosine
  modified_base 3: mod_base = OTHER; note = 2'-fluorocytosine
  modified_base 6: mod_base = OTHER; note = 2'-fluorocytosine
  modified_base 12: mod_base = OTHER; note = 2'-Omethylguanosine
  modified_base 13: mod_base = OTHER; note = Cytosine phosphorothiorate
  modified_base 21: mod_base = OTHER; note = Adenosine phosphorothiorate
  modified_base 22: mod_base = OTHER; note = 2'-Omethylguanosine
  modified_base 23: mod_base = OTHER; note = 2'-Omethylcytosine
  modified_base 24: mod_base = OTHER; note = 2'-fluoroguanosine
  modified_base 26: mod_base = OTHER; note = 2'-fluoroadenosine
  modified_base 27: mod_base = OTHER; note = Uridine phosphorothiorate
  modified_base 33: mod_base = OTHER; note = Uridine phosphorothiorate
  modified_base 40: mod_base = OTHER; note = Uridine phosphorothiorate
  modified_base 43: mod_base = OTHER; note = 2'-Omethyladenosine phosphorothiorate
  modified_base 44: mod_base = OTHER; note = 2'-fluoroadenosine
  modified_base 45: mod_base = OTHER; note = 2'-Omethylguanosine
  modified_base 46: mod_base = OTHER; note = 2'-fluoroguanosine
  modified_base 48: mod_base = OTHER; note = 2'-fluorouridine
  modified_base 50: mod_base = OTHER; note = 2'-Omethylcytosine
  modified_base 52: mod_base = OTHER; note = 2'-fluoroguanosine phosphorothiorate
  modified_base 53: mod_base = OTHER; note = 2'-Omethylguanosine
  modified_base 54: mod_base = OTHER; note = 2'-Omethyluridine
  modified_base 57: mod_base = OTHER; note = 2'-Omethylguanosine
  modified_base 61: mod_base = OTHER; note = Cytosine phosphorothiorate
  modified_base 62: mod_base = OTHER; note = 2'-Omethylcytosine phosphorothiorate
  modified_base 63: mod_base = OTHER; note = 2'-fluorocytosine
  modified_base 64: mod_base = OTHER; note = 2'-Omethylguanosine phosphorothiorate
  modified_base 67: mod_base = OTHER; note = 2'-fluoroguanosine
  modified_base 68: mod_base = OTHER; note = 2'-fluoroguanosine
  modified_base 69: mod_base = OTHER; note = 2'-fluoroadenosine phosphorothiorate
  modified_base 70: mod_base = OTHER; note = 2'-fluoroguanosine
  modified_base 73: mod_base = OTHER; note = 2'-fluoroguanosine
  modified_base 76: mod_base = OTHER; note = 2'-Omethyladenosine

SEQ ID NO: 7601 - RNA, 75 nt, synthetic construct; identical to SEQ ID NO: 1045
  source 1..75: mol_type = other RNA
  modified_base 1: mod_base = OTHER; note = 2'-Omethylguanosine phosphorothiorate
  modified_base 2: mod_base = OTHER; note = 2'-Omethylguanosine phosphorothiorate
  modified_base 3: mod_base = OTHER; note = 2'-Omethyluridine
  modified_base 4: mod_base = OTHER; note = 2'-Omethyluridine
  modified_base 5: mod_base = OTHER; note = 2'-Omethylcytosine
  modified_base 6: mod_base = OTHER; note = 2'-Omethylcytosine
  modified_base 16: mod_base = OTHER; note = 2'-Omethyluridine
  modified_base 17: mod_base = OTHER; note = 2'-Omethylguanosine
  modified_base 18: mod_base = OTHER; note = 2'-Omethylguanosine
  modified_base 33: mod_base = OTHER; note = 2'-fluorouridine
  modified_base 35: mod_base = OTHER; note = Uridine phosphorothiorate
  modified_base 37: mod_base = OTHER; note = Adenosine phosphorothiorate
  modified_base 38: mod_base = OTHER; note = Adenosine phosphorothiorate
  modified_base 44: mod_base = OTHER; note = 2'-Omethylcytosine
  modified_base 45: mod_base = OTHER; note = 2'-Omethylguanosine
  modified_base 46: mod_base = OTHER; note = 2'-fluoroadenosine
  modified_base 48: mod_base = OTHER; note = 2'-Omethylcytosine
  modified_base 49: mod_base = OTHER; note = 2'-Omethylcytosine
  modified_base 50: mod_base = OTHER; note = 2'-Omethylguanosine
  modified_base 51: mod_base = OTHER; note = 2'-Omethyladenosine
  modified_base 52: mod_base = OTHER; note = 2'-Omethylguanosine
  modified_base 53: mod_base = OTHER; note = 2'-Omethyluridine
  modified_base 55: mod_base = OTHER; note = 2'-Omethylcytosine
  modified_base 58: mod_base = OTHER; note = 2'-Omethylguanosine
  modified_base 60: mod_base = OTHER; note = 2'-Omethylcytosine
  modified_base 61: mod_base = OTHER; note = 2'-Omethyluridine
  modified_base 62: mod_base = OTHER; note = 2'-fluorocytosine
  modified_base 63: mod_base = OTHER; note = 2'-Omethylguanosine
  modified_base 64: mod_base = OTHER; note = 2'-Omethylguanosine
  modified_base 65: mod_base = OTHER; note = 2'-Omethyluridine
  modified_base 66: mod_base = OTHER; note = 2'-Omethylguanosine
  modified_base 67: mod_base = OTHER; note = 2'-Omethylguanosine
  modified_base 72: mod_base = OTHER; note = 2'-Omethyluridine

SEQ ID NO: 7602 - RNA, 76 nt, synthetic construct; identical to SEQ ID NO: 3289
  source 1..76: mol_type = other RNA
  modified_base 1: mod_base = OTHER; note = 2'-Omethylguanosine phosphorothiorate
  modified_base 2: mod_base = OTHER; note = 2'-Omethylcytosine phosphorothiorate
  modified_base 3: mod_base = OTHER; note = 2'-Omethylcytosine
  modified_base 4: mod_base = OTHER; note = 2'-Omethyluridine
  modified_base 5: mod_base = OTHER; note = 2'-Omethylguanosine
  modified_base 6: mod_base = OTHER; note = 2'-Omethylguanosine
  modified_base 10: mod_base = OTHER; note = 2'-Omethylguanosine
  modified_base 11: mod_base = OTHER; note = 2'-Omethylcytosine
  modified_base 12: mod_base = OTHER; note = 2'-Omethyluridine
  modified_base 13: mod_base = OTHER; note = 2'-Omethylcytosine
  modified_base 14: mod_base = OTHER; note = 2'-Omethyladenosine
  modified_base 15: mod_base = OTHER; note = 2'-fluoroguanosine
  modified_base 16: mod_base = OTHER; note = 2'-Omethyluridine
  modified_base 18: mod_base = OTHER; note = 2'-Omethylguanosine
  modified_base 19: mod_base = OTHER; note = 2'-Omethylguanosine
  modified_base 20: mod_base = OTHER; note = 2'-fluorouridine
  modified_base 33: mod_base = OTHER; note = 2'-fluorouridine
  modified_base 35: mod_base = OTHER; note = Uridine phosphorothiorate
  modified_base 37: mod_base = OTHER; note = Adenosine phosphorothiorate
  modified_base 38: mod_base = OTHER; note = Adenosine phosphorothiorate
  modified_base 44: mod_base = OTHER; note = 2'-Omethylguanosine
  modified_base 45: mod_base = OTHER; note = 2'-Omethylguanosine
  modified_base 46: mod_base = OTHER; note = 2'-fluoroguanosine
  modified_base 47: mod_base = OTHER; note = 2'-fluorouridine
  modified_base 48: mod_base = OTHER; note = 2'-fluorocytosine
  modified_base 56: mod_base = OTHER; note = 2'-Omethylcytosine
  modified_base 59: mod_base = OTHER; note = 2'-Omethylguanosine
  modified_base 61: mod_base = OTHER; note = 2'-Omethylcytosine
  modified_base 62: mod_base = OTHER; note = 2'-Omethylcytosine
  modified_base 63: mod_base = OTHER; note = 2'-fluorocytosine
  modified_base 64: mod_base = OTHER; note = 2'-Omethyluridine
  modified_base 65: mod_base = OTHER; note = 2'-Omethylguanosine
  modified_base 66: mod_base = OTHER; note = 2'-Omethyluridine
  modified_base 67: mod_base = OTHER; note = 2'-Omethylcytosine
  modified_base 68: mod_base = OTHER; note = 2'-Omethylcytosine
  modified_base 73: mod_base = OTHER; note = 2'-Omethylguanosine

SEQ ID NO: 7603 - RNA, 76 nt, synthetic construct; identical to SEQ ID NO: 3289
  source 1..76: mol_type = other RNA
  modified_base 1: mod_base = OTHER; note = 2'-Omethylguanosine phosphorothiorate
  modified_base 2: mod_base = OTHER; note = 2'-Omethylcytosine phosphorothiorate
  modified_base 3: mod_base = OTHER; note = 2'-Omethylcytosine
  modified_base 4: mod_base = OTHER; note = 2'-Omethyluridine
  modified_base 5: mod_base = OTHER; note = 2'-Omethylguanosine
  modified_base 6: mod_base = OTHER; note = 2'-Omethylguanosine
  modified_base 8: mod_base = OTHER; note = Uridine phosphorothiorate
  modified_base 16: mod_base = OTHER; note = 2'-Omethyluridine
  modified_base 18: mod_base = OTHER; note = 2'-Omethylguanosine
  modified_base 19: mod_base = OTHER; note = 2'-Omethylguanosine
  modified_base 33: mod_base = OTHER; note = 2'-fluorouridine
  modified_base 35: mod_base = OTHER; note = Uridine phosphorothiorate
  modified_base 37: mod_base = OTHER; note = Adenosine phosphorothiorate
  modified_base 38: mod_base = OTHER; note = Adenosine phosphorothiorate
  modified_base 44: mod_base = OTHER; note = 2'-Omethylguanosine
  modified_base 45: mod_base = OTHER; note = 2'-Omethylguanosine
  modified_base 46: mod_base = OTHER; note = 2'-fluoroguanosine
  modified_base 47: mod_base = OTHER; note = 2'-fluorouridine
  modified_base 48: mod_base = OTHER; note = 2'-fluorocytosine
  modified_base 49: mod_base = OTHER; note = 2'-Omethylcytosine
  modified_base 50: mod_base = OTHER; note = 2'-Omethyladenosine
  modified_base 51: mod_base = OTHER; note = 2'-Omethylguanosine
  modified_base 52: mod_base = OTHER; note = 2'-Omethylguanosine
  modified_base 53: mod_base = OTHER; note = 2'-Omethylguanosine
  modified_base 54: mod_base = OTHER; note = 2'-Omethyluridine
  modified_base 56: mod_base = OTHER; note = 2'-Omethylcytosine
  modified_base 59: mod_base = OTHER; note = 2'-Omethylguanosine
  modified_base 61: mod_base = OTHER; note = 2'-Omethylcytosine
  modified_base 62: mod_base = OTHER; note = 2'-Omethylcytosine
  modified_base 63: mod_base = OTHER; note = 2'-fluorocytosine
  modified_base 64: mod_base = OTHER; note = 2'-Omethyluridine
  modified_base 65: mod_base = OTHER; note = 2'-Omethylguanosine
  modified_base 66: mod_base = OTHER; note = 2'-Omethyluridine
  modified_base 67: mod_base = OTHER; note = 2'-Omethylcytosine
  modified_base 68: mod_base = OTHER; note = 2'-Omethylcytosine
  modified_base 73: mod_base = OTHER; note = 2'-Omethylguanosine

SEQ ID NO: 7604 - RNA, 85 nt, synthetic construct; identical to SEQ ID NO: 3301
  source 1..85: mol_type = other RNA
  modified_base 1: mod_base = OTHER; note = 2'-Omethylguanosine phosphorothiorate
  modified_base 2: mod_base = OTHER; note = 2'-Omethylcytosine
  modified_base 9: mod_base = OTHER; note = 2'-fluoroguanosine
  modified_base 10: mod_base = OTHER; note = 2'-fluoroguanosine
  modified_base 17: mod_base = OTHER; note = Guanosine phosphorothiorate
  modified_base 22: mod_base = OTHER; note = Adenosine phosphorothiorate
  modified_base 24: mod_base = OTHER; note = 2'-fluoroguanosine
  modified_base 34: mod_base = OTHER; note = 2'-fluorouridine
  modified_base 38: mod_base = OTHER; note = 2'-Omethyladenosine phosphorothiorate
  modified_base 41: mod_base = OTHER; note = 2'-Omethylcytosine phosphorothiorate
  modified_base 44: mod_base = OTHER; note = 2'-Omethyluridine
  modified_base 45: mod_base = OTHER; note = 2'-fluoroguanosine phosphorothiorate
  modified_base 46: mod_base = OTHER; note = 2'-Omethylguanosine
  modified_base 47: mod_base = OTHER; note = 2'-Omethylguanosine
  modified_base 56: mod_base = OTHER; note = 2'-Omethylguanosine
  modified_base 60: mod_base = OTHER; note = 2'-Omethyladenosine
  modified_base 61: mod_base = OTHER; note = 2'-Omethylguanosine
  modified_base 74: mod_base = OTHER; note = 2'-fluorocytosine
  modified_base 83: mod_base = OTHER; note = Cytosine phosphorothiorate
  modified_base 84: mod_base = OTHER; note = 2'-Omethylcytosine

SEQ ID NO: 7605 - RNA, 76 nt, synthetic construct; identical to SEQ ID NO: 625
  source 1..76: mol_type = other RNA
  modified_base 1: mod_base = OTHER; note = 2'-Omethylguanosine phosphorothiorate
  modified_base 2: mod_base = OTHER; note = 2'-Omethylguanosine
  modified_base 14: mod_base = OTHER; note = 2'-fluoroadenosine
  modified_base 20: mod_base = OTHER; note = 2'-fluorouridine
  modified_base 26: mod_base = OTHER; note = Adenosine phosphorothiorate
  modified_base 27: mod_base = OTHER; note = 2'-O-(2-Methoxyethyl) thymine
  modified_base 33: mod_base = OTHER; note = 2'-O-(2-Methoxyethyl) thymine
  modified_base 62: mod_base = OTHER; note = 2'-fluorocytosine
  modified_base 74: mod_base = OTHER; note = Cytosine phosphorothiorate
  modified_base 75: mod_base = OTHER; note = 2'-Omethylcytosine

SEQ ID NO: 7606 - RNA, 85 nt, synthetic construct; identical to SEQ ID NO: 3301
  source 1..85: mol_type = other RNA
  modified_base 1: mod_base = OTHER; note = 2'-Omethylguanosine phosphorothiorate
  modified_base 2: mod_base = OTHER; note = Cytosine phosphorothiorate
  modified_base 3: mod_base = OTHER; note = 2'-fluorouridine phosphorothiorate
  modified_base 14: mod_base = OTHER; note = 2'-Omethyladenosine phosphorothiorate
  modified_base 18: mod_base = OTHER; note = Guanosine phosphorothiorate
  modified_base 21: mod_base = OTHER; note = Adenosine phosphorothiorate
  modified_base 31: mod_base = OTHER; note = 2'-fluoroadenosine
  modified_base 35: mod_base = OTHER; note = 2'-fluorouridine
  modified_base 36: mod_base = OTHER; note = 2'-fluoroadenosine
  modified_base 37: mod_base = OTHER; note = 2'-Omethyladenosine
  modified_base 44: mod_base = OTHER; note = 2'-Omethyluridine
  modified_base 46: mod_base = OTHER; note = 2'-Omethylguanosine phosphorothiorate
  modified_base 56: mod_base = OTHER; note = 2'-Omethylguanosine
  modified_base 58: mod_base = OTHER; note = 2'-Omethylguanosine
  modified_base 60: mod_base = OTHER; note = 2'-Omethyladenosine
  modified_base 66: mod_base = OTHER; note = 2'-fluoroguanosine
  modified_base 73: mod_base = OTHER; note = Guanosine phosphorothiorate
  modified_base 77: mod_base = OTHER; note = Adenosine phosphorothiorate
  modified_base 82: mod_base = OTHER; note = 2'-Omethylguanosine

SEQ ID NO: 7607 - RNA, 86 nt, synthetic construct; identical to SEQ ID NO: 3290
  source 1..86: mol_type = other RNA
  modified_base 65: mod_base = OTHER; note = 2'-Omethyluridine

SEQ ID NO: 7608 - RNA, 85 nt, synthetic construct; identical to SEQ ID NO: 3288
  source 1..85: mol_type = other RNA
  modified_base 1: mod_base = OTHER; note = 2'-Omethylcytosine phosphorothiorate
  modified_base 9: mod_base = OTHER; note = Guanosine phosphorothiorate
  modified_base 14: mod_base = OTHER; note = Guanosine phosphorothiorate
  modified_base 25: mod_base = OTHER; note = Guanosine phosphorothiorate
  modified_base 49: mod_base = OTHER; note = 2'-Omethyluridine
  modified_base 52: mod_base = OTHER; note = Guanosine phosphorothiorate
  modified_base 65: mod_base = OTHER; note = Cytosine phosphorothiorate
  modified_base 83: mod_base = OTHER; note = 2'-fluorocytosine
  modified_base 84: mod_base = OTHER; note = Cytosine phosphorothiorate

SEQ ID NO: 7609 - RNA, 75 nt, synthetic construct; identical to SEQ ID NO: 1045
  source 1..75: mol_type = other RNA
  modified_base 1: mod_base = OTHER; note = Guanosine phosphorothiorate
  modified_base 2: mod_base = OTHER; note = 2'-Omethylguanosine phosphorothiorate
  modified_base 14: mod_base = OTHER; note = 2'-Omethyladenosine
  modified_base 17: mod_base = OTHER; note = 2'-Omethylguanosine
  modified_base 18: mod_base = OTHER; note = Guanosine phosphorothiorate
  modified_base 27: mod_base = OTHER; note = 2'-fluorocytosine
  modified_base 30: mod_base = OTHER; note = Guanosine phosphorothiorate
  modified_base 35: mod_base = OTHER; note = 2'-fluorouridine
  modified_base 36: mod_base = OTHER; note = 2'-fluoroadenosine phosphorothiorate
  modified_base 41: mod_base = OTHER; note = 2'-fluorocytosine
  modified_base 59: mod_base = OTHER; note = 2'-fluorouridine
  modified_base 68: mod_base = OTHER; note = 2'-fluoroadenosine
  modified_base 74: mod_base = OTHER; note = Cytosine phosphorothiorate
  modified_base 75: mod_base = OTHER; note = 2'-fluoroadenosine

SEQ ID NO: 7610 - RNA, 76 nt, synthetic construct; identical to SEQ ID NO: 625
  source 1..76: mol_type = other RNA
  modified_base 49: mod_base = OTHER; note = 2'-O-(2-Methoxyethyl) cytosine
  modified_base 50: mod_base = OTHER; note = 2'-O-(2-Methoxyethyl) cytosine
  modified_base 51: mod_base = OTHER; note = 2'-O-(2-Methoxyethyl) guanosine
  modified_base 52: mod_base = OTHER; note = 2'-O-(2-Methoxyethyl) guanosine
  modified_base 53: mod_base = OTHER; note = 2'-O-(2-Methoxyethyl) guanosine

SEQ ID NO: 7611 - RNA, 75 nt, synthetic construct; identical to SEQ ID NO: 3306
  source 1..75: mol_type = other RNA
  modified_base 1: mod_base = OTHER; note = 2'-Omethylguanosine phosphorothiorate
  modified_base 2: mod_base = OTHER; note = 2'-Omethyladenosine phosphorothiorate
  modified_base 14: mod_base = OTHER; note = 2'-Omethyladenosine
  modified_base 17: mod_base = OTHER; note = 2'-Omethylguanosine
  modified_base 18: mod_base = OTHER; note = 2'-Omethylguanosine
  modified_base 21: mod_base = OTHER; note = 2'-Omethylguanosine
  modified_base 24: mod_base = OTHER; note = 2'-Omethylcytosine
  modified_base 26: mod_base = OTHER; note = 2'-Omethyluridine
  modified_base 32: mod_base = OTHER; note = 2'-fluorouridine
  modified_base 40: mod_base = OTHER; note = 2'-Omethyladenosine
  modified_base 43: mod_base = OTHER; note = 2'-Omethyladenosine
  modified_base 44: mod_base = OTHER; note = 2'-Omethylguanosine
  modified_base 45: mod_base = OTHER; note = 2'-fluoroguanosine
  modified_base 46: mod_base = OTHER; note = 2'-fluorouridine
  modified_base 47: mod_base = OTHER; note = 2'-fluorouridine
  modified_base 51: mod_base = OTHER; note = 2'-Omethyluridine
  modified_base 54: mod_base = OTHER; note = Uridine phosphorothiorate
  modified_base 70: mod_base = OTHER; note = 2'-Omethyluridine
  modified_base 72: mod_base = OTHER; note = 2'-Omethyladenosine

SEQ ID NO: 7612 - RNA, 76 nt, synthetic construct; identical to SEQ ID NO: 625
  source 1..76: mol_type = other RNA
  modified_base 1: mod_base = OTHER; note = Guanosine phosphorothiorate
  modified_base 2: mod_base = OTHER; note = 2'-fluoroguanosine
  modified_base 4: mod_base = OTHER; note = 2'-Omethyluridine
  modified_base 5: mod_base = OTHER; note = 2'-fluorocytosine
  modified_base 6: mod_base = OTHER; note = 2'-fluorocytosine phosphorothiorate
  modified_base 8: mod_base = OTHER; note = Uridine phosphorothiorate
  modified_base 10: mod_base = OTHER; note = 2'-fluoroguanosine
  modified_base 11: mod_base = OTHER; note = Cytosine phosphorothiorate
  modified_base 12: mod_base = OTHER; note = 2'-fluoroguanosine
  modified_base 17: mod_base = OTHER; note = 2'-Omethylguanosine
  modified_base 18: mod_base = OTHER; note = 2'-fluoroguanosine
  modified_base 20: mod_base = OTHER; note = 2'-fluorouridine
  modified_base 22: mod_base = OTHER; note = 2'-fluoroguanosine
  modified_base 24: mod_base = OTHER; note = 2'-fluoroguanosine
  modified_base 25: mod_base = OTHER; note = 2'-Omethylcytosine
  modified_base 29: mod_base = OTHER; note = 2'-Omethylguanosine
  modified_base 31: mod_base = OTHER; note = 2'-fluoroadenosine
  modified_base 34: mod_base = OTHER; note = Uridine phosphorothiorate
  modified_base 37: mod_base = OTHER; note = Adenosine phosphorothiorate
  modified_base 42: mod_base = OTHER; note = Adenosine phosphorothiorate
  modified_base 43: mod_base = OTHER; note = 2'-fluoroadenosine
  modified_base 45: mod_base = OTHER; note = 2'-fluoroguanosine
  modified_base 52: mod_base = OTHER; note = 2'-fluoroguanosine phosphorothiorate
  modified_base 53: mod_base = OTHER; note = 2'-Omethylguanosine
  modified_base 54: mod_base = OTHER; note = 2'-fluorouridine phosphorothiorate
  modified_base 56: mod_base = OTHER; note = 2'-Omethylcytosine phosphorothiorate
  modified_base 57: mod_base = OTHER; note = 2'-Omethylguanosine
  modified_base 59: mod_base = OTHER; note = 2'-Omethylguanosine
  modified_base 61: mod_base = OTHER; note = 2'-fluorocytosine
  modified_base 64: mod_base = OTHER; note = 2'-fluoroguanosine
  modified_base 65: mod_base = OTHER; note = 2'-fluoroguanosine
  modified_base 68: mod_base = OTHER; note = 2'-fluoroguanosine phosphorothiorate
  modified_base 69: mod_base = OTHER; note = 2'-Omethyladenosine
  modified_base 71: mod_base = OTHER; note = Uridine phosphorothiorate
  modified_base 76: mod_base = OTHER; note = 2'-fluoroadenosine

SEQ ID NO: 7613 - RNA, 86 nt, synthetic construct; identical to SEQ ID NO: 3290
  source 1..86: mol_type = other RNA
  modified_base 1: mod_base = OTHER; note = 2'-Omethyladenosine phosphorothiorate
  modified_base 2: mod_base = OTHER; note = 2'-Omethylcytosine phosphorothiorate
  modified_base 12: mod_base = OTHER; note = Cytosine phosphorothiorate
  modified_base 22: mod_base = OTHER; note = 2'-fluoroadenosine
  modified_base 26: mod_base = OTHER; note = Guanosine phosphorothiorate
  modified_base 27: mod_base = OTHER; note = Uridine phosphorothiorate
  modified_base 73: mod_base = OTHER; note = 2'-fluorocytosine
  modified_base 84: mod_base = OTHER; note = Cytosine phosphorothiorate
  modified_base 85: mod_base = OTHER; note = 2'-Omethylcytosine phosphorothiorate
  modified_base 86: mod_base = OTHER; note = 2'-Omethyladenosine

SEQ ID NO: 7614 - RNA, 73 nt, synthetic construct; identical to SEQ ID NO: 4612
  source 1..73: mol_type = other RNA
  modified_base 55: mod_base = OTHER; note = Uridine phosphorothiorate

SEQ ID NO: 7615 - RNA, 85 nt, synthetic construct; identical to SEQ ID NO: 3288
  source 1..85: mol_type = other RNA
  modified_base 1: mod_base = OTHER; note = 2'-Omethylcytosine
  modified_base 3: mod_base = OTHER; note = 2'-fluoroadenosine
  modified_base 8: mod_base = OTHER; note = Guanosine phosphorothiorate
  modified_base 20: mod_base = OTHER; note = 2'-fluoroadenosine
  modified_base 27: mod_base = OTHER; note = 2'-fluorouridine
  modified_base 29: mod_base = OTHER; note = 2'-fluoroguanosine
  modified_base 32: mod_base = OTHER; note = 2'-fluorouridine
  modified_base 35: mod_base = OTHER; note = 2'-Omethyladenosine phosphorothiorate
  modified_base 38: mod_base = OTHER; note = Uridine phosphorothiorate
  modified_base 39: mod_base = OTHER; note = Cytosine phosphorothiorate
  modified_base 43: mod_base = OTHER; note = 2'-Omethyluridine
  modified_base 46: mod_base = OTHER; note = 2'-Omethyladenosine
  modified_base 50: mod_base = OTHER; note = Adenosine phosphorothiorate
  modified_base 54: mod_base = OTHER; note = 2'-Omethylcytosine
  modified_base 58: mod_base = OTHER; note = Guanosine phosphorothiorate
  modified_base 60: mod_base = OTHER; note = 2'-fluoroguanosine
  modified_base 73: mod_base = OTHER; note = 2'-fluoroadenosine
  modified_base 84: mod_base = OTHER; note = 2'-fluorocytosine

SEQ ID NO: 7616 - RNA, 85 nt, synthetic construct; identical to SEQ ID NO: 3297
  source 1..85: mol_type = other RNA
  modified_base 1: mod_base = OTHER; note = 2'-Omethylguanosine
  modified_base 14: mod_base = OTHER; note = 2'-Omethyladenosine
  modified_base 15: mod_base = OTHER; note = 2'-Omethylguanosine
  modified_base 16: mod_base = OTHER; note = 2'-Omethyluridine
  modified_base 17: mod_base = OTHER; note = 2'-Omethylguanosine
  modified_base 18: mod_base = OTHER; note = 2'-Omethylguanosine
  modified_base 19: mod_base = OTHER; note = Uridine phosphorothiorate
  modified_base 20: mod_base = OTHER; note = 2'-Omethyluridine
  modified_base 21: mod_base = OTHER; note = Adenosine phosphorothiorate
  modified_base 33: mod_base = OTHER; note = 2'-fluorouridine
  modified_base 34: mod_base = OTHER; note = 2'-Omethyluridine
  modified_base 35: mod_base = OTHER; note = Cytosine phosphorothiorate
  modified_base 37: mod_base = OTHER; note = Adenosine phosphorothiorate
  modified_base 38: mod_base = OTHER; note = Adenosine phosphorothiorate
  modified_base 41: mod_base = OTHER; note = 2'-Omethylcytosine
  modified_base 42: mod_base = OTHER; note = 2'-Omethyladenosine
  modified_base 43: mod_base = OTHER; note = 2'-Omethyladenosine
  modified_base 44: mod_base = OTHER; note = 2'-Omethyluridine
  modified_base 59: mod_base = OTHER; note = 2'-Omethylcytosine
  modified_base 61: mod_base = OTHER; note = 2'-Omethylguanosine
  modified_base 82: mod_base = OTHER; note = 2'-Omethylguanosine

SEQ ID NO: 7617 - RNA, 75 nt, synthetic construct; identical to SEQ ID NO: 3306
  source 1..75: mol_type = other RNA
  modified_base 1: mod_base = OTHER; note = 2'-Omethylguanosine
  modified_base 16: mod_base = OTHER; note = 2'-Omethylcytosine
  modified_base 17: mod_base = OTHER; note = 2'-Omethylguanosine
  modified_base 18: mod_base = OTHER; note = 2'-Omethylguanosine
  modified_base 72: mod_base = OTHER; note = 2'-Omethyladenosine

SEQ ID NO: 7618 - RNA, 76 nt, synthetic construct; identical to SEQ ID NO: 3318
  source 1..76: mol_type = other RNA
  modified_base 1: mod_base = OTHER; note = 2'-Omethylcytosine
  modified_base 2: mod_base = OTHER; note = 2'-Omethylcytosine
  modified_base 3: mod_base = OTHER; note = 2'-Omethyluridine
  modified_base 4: mod_base = OTHER; note = 2'-Omethyluridine
  modified_base 5: mod_base = OTHER; note = 2'-Omethylcytosine
  modified_base 6: mod_base = OTHER; note = 2'-Omethylguanosine
  modified_base 16: mod_base = OTHER; note = 2'-Omethyluridine
  modified_base 18: mod_base = OTHER; note = 2'-Omethylguanosine
  modified_base 19: mod_base = OTHER; note = 2'-Omethylguanosine
  modified_base 33: mod_base = OTHER; note = 2'-fluorouridine
  modified_base 35: mod_base = OTHER; note = Uridine phosphorothiorate
  modified_base 37: mod_base = OTHER; note = Guanosine phosphorothiorate
  modified_base 38: mod_base = OTHER; note = Adenosine phosphorothiorate
  modified_base 44: mod_base = OTHER; note = 2'-Omethyladenosine
  modified_base 45: mod_base = OTHER; note = 2'-Omethylguanosine
  modified_base 46: mod_base = OTHER; note = 2'-fluoroguanosine
  modified_base 47: mod_base = OTHER; note = 2'-fluorouridine
  modified_base 48: mod_base = OTHER; note = 2'-fluorocytosine
  modified_base 56: mod_base = OTHER; note = 2'-Omethylcytosine
  modified_base 59: mod_base = OTHER; note = 2'-Omethyladenosine
  modified_base 61: mod_base = OTHER; note = 2'-Omethylcytosine
  modified_base 62: mod_base = OTHER; note = 2'-Omethylcytosine
  modified_base 63: mod_base = OTHER; note = 2'-fluoroguanosine
  modified_base 64: mod_base = OTHER; note = 2'-Omethylguanosine
  modified_base 65: mod_base = OTHER; note = 2'-Omethylcytosine
  modified_base 66: mod_base = OTHER; note = 2'-Omethyluridine
  modified_base 67: mod_base = OTHER; note = 2'-Omethylcytosine
  modified_base 68: mod_base = OTHER; note = 2'-Omethylguanosine
  modified_base 73: mod_base = OTHER; note = 2'-Omethyladenosine

SEQ ID NO: 7619 - RNA, 75 nt, synthetic construct; identical to SEQ ID NO: 3336
  source 1..75: mol_type = other RNA
  modified_base 7: mod_base = OTHER; note = Uridine phosphorothiorate
  modified_base 14: mod_base = OTHER; note = 2'-Omethylguanosine phosphorothiorate
  modified_base 27: mod_base = OTHER; note = Cytosine phosphorothiorate
  modified_base 36: mod_base = OTHER; note = 2'-fluoroadenosine phosphorothiorate
  modified_base 39: mod_base = OTHER; note = 2'-Omethylcytosine phosphorothiorate
  modified_base 46: mod_base = OTHER; note = 2'-fluorouridine
  modified_base 53: mod_base = OTHER; note = 2'-fluorouridine
  modified_base 59: mod_base = OTHER; note = 2'-fluorouridine phosphorothiorate
  modified_base 72: mod_base = OTHER; note = Guanosine phosphorothiorate
  modified_base 73: mod_base = OTHER; note = Cytosine phosphorothiorate
  modified_base 75: mod_base = OTHER; note = 2'-fluoroadenosine

SEQ ID NO: 7620 - RNA, 76 nt, synthetic construct; identical to SEQ ID NO: 625
  source 1..76: mol_type = other RNA
  modified_base 2: mod_base = OTHER; note = 2'-Omethylguanosine
  modified_base 4: mod_base = OTHER; note = 2'-Omethyluridine
  modified_base 6: mod_base = OTHER; note = 2'-fluorocytosine phosphorothiorate
  modified_base 13: mod_base = OTHER; note = 2'-Omethylcytosine
  modified_base 14: mod_base = OTHER; note = Adenosine phosphorothiorate
  modified_base 15: mod_base = OTHER; note = Adenosine phosphorothiorate
  modified_base 16: mod_base = OTHER; note = 2'-fluorouridine
  modified_base 17: mod_base = OTHER; note = 2'-Omethylguanosine
  modified_base 20: mod_base = OTHER; note = Uridine phosphorothiorate
  modified_base 22: mod_base = OTHER; note = 2'-Omethylguanosine phosphorothiorate
  modified_base 23: mod_base = OTHER; note = 2'-Omethylcytosine
  modified_base 25: mod_base = OTHER; note = 2'-fluorocytosine
  modified_base 34: mod_base = OTHER; note = 2'-fluorouridine
  modified_base 37: mod_base = OTHER; note = Adenosine phosphorothiorate
  modified_base 41: mod_base = OTHER; note = 2'-fluorocytosine
  modified_base 43: mod_base = OTHER; note = 2'-Omethyladenosine
  modified_base 46: mod_base = OTHER; note = Guanosine phosphorothiorate
  modified_base 49: mod_base = OTHER; note = 2'-fluorocytosine
  modified_base 51: mod_base = OTHER; note = 2'-Omethylguanosine
  modified_base 52: mod_base = OTHER; note = 2'-fluoroguanosine
  modified_base 56: mod_base = OTHER; note = 2'-fluorocytosine
  modified_base 57: mod_base = OTHER; note = Guanosine phosphorothiorate
  modified_base 58: mod_base = OTHER; note = 2'-fluoroadenosine
  modified_base 60: mod_base = OTHER; note = Uridine phosphorothiorate
  modified_base 61: mod_base = OTHER; note = 2'-Omethylcytosine
  modified_base 63: mod_base = OTHER; note = 2'-Omethylcytosine phosphorothiorate
  modified_base 64: mod_base = OTHER; note = 2'-fluoroguanosine
  modified_base 65: mod_base = OTHER; note = 2'-Omethylguanosine
  modified_base 66: mod_base = OTHER; note = 2'-fluorocytosine
  modified_base 67: mod_base = OTHER; note = 2'-Omethylguanosine
  modified_base 68: mod_base = OTHER; note = Guanosine phosphorothiorate
  modified_base 69: mod_base = OTHER; note = 2'-Omethyladenosine phosphorothiorate
  modified_base 70: mod_base = OTHER; note = 2'-fluoroguanosine
  modified_base 73: mod_base = OTHER; note = 2'-Omethylguanosine
  modified_base 74: mod_base = OTHER; note = Cytosine phosphorothiorate
  modified_base 76: mod_base = OTHER; note = 2'-fluoroadenosine

SEQ ID NO: 7621 - RNA, 85 nt, synthetic construct; identical to SEQ ID NO: 3288
  source 1..85: mol_type = other RNA
  modified_base 1: mod_base = OTHER; note = 2'-Omethylcytosine
  modified_base 5: mod_base = OTHER; note = 2'-fluoroguanosine
  modified_base 33: mod_base = OTHER; note = 2'-fluorouridine
  modified_base 43: mod_base = OTHER; note = 2'-Omethyluridine
  modified_base 46: mod_base = OTHER; note = Adenosine phosphorothiorate
  modified_base 65: mod_base = OTHER; note = Cytosine phosphorothiorate
  modified_base 72: mod_base = OTHER; note = 2'-fluorocytosine
  modified_base 85: mod_base = OTHER; note = 2'-fluoroadenosine

SEQ ID NO: 7622 - RNA, 76 nt, synthetic construct
  source 1..76: mol_type = other RNA
ggctccgtggcgcaatggatagcgcattggtcttcaaaatcaacggttccgggttcgagtcccggcggagtcgcca

SEQ ID NO: 7623 - RNA, 85 nt, synthetic construct; identical to SEQ ID NO: 3286
  source 1..85: mol_type = other RNA
  modified_base 1: mod_base = OTHER; note = 2'-Omethylcytosine
  modified_base 6: mod_base = OTHER; note = 2'-fluoroadenosine
  modified_base 27: mod_base = OTHER; note = 2'-fluorouridine
  modified_base 30: mod_base = OTHER; note = 2'-fluoroadenosine phosphorothiorate
  modified_base 34: mod_base = OTHER; note = Uridine phosphorothiorate
  modified_base 42: mod_base = OTHER; note = 2'-Omethyladenosine
  modified_base 50: mod_base = OTHER; note = 2'-Omethyladenosine
  modified_base 59: mod_base = OTHER; note = Uridine phosphorothiorate
  modified_base 62: mod_base = OTHER; note = 2'-fluoroguanosine phosphorothiorate
  modified_base 69: mod_base = OTHER; note = 2'-fluorocytosine phosphorothiorate
  modified_base 75: mod_base = OTHER; note = 2'-fluorouridine
  modified_base 81: mod_base = OTHER; note = 2'-fluorouridine
  modified_base 83: mod_base = OTHER; note = Cytosine phosphorothiorate
  modified_base 84: mod_base = OTHER; note = 2'-fluorocytosine

SEQ ID NO: 7624 - RNA, 75 nt, synthetic construct; identical to SEQ ID NO: 1045
  source 1..75: mol_type = other RNA
  modified_base 1: mod_base = OTHER; note = Guanosine phosphorothiorate
  modified_base 2: mod_base = OTHER; note = 2'-Omethylguanosine phosphorothiorate
  modified_base 15: mod_base = OTHER; note = 2'-fluoroadenosine
  modified_base 16: mod_base = OTHER; note = 2'-fluorouridine phosphorothiorate
  modified_base 19: mod_base = OTHER; note = Uridine phosphorothiorate
  modified_base 21: mod_base = OTHER; note = Adenosine phosphorothiorate
  modified_base 22: mod_base = OTHER; note = 2'-fluoroguanosine
  modified_base 23: mod_base = OTHER; note = Cytosine phosphorothiorate
  modified_base 24: mod_base = OTHER; note = 2'-fluoroadenosine
  modified_base 33: mod_base = OTHER; note = 2'-fluorouridine
  modified_base 38: mod_base = OTHER; note = 2'-fluoroadenosine
  modified_base 39: mod_base = OTHER; note = Uridine phosphorothiorate
  modified_base 42: mod_base = OTHER; note = 2'-fluoroadenosine
  modified_base 50: mod_base = OTHER; note = 2'-fluoroguanosine
  modified_base 57: mod_base = OTHER; note = 2'-fluoroadenosine
  modified_base 58: mod_base = OTHER; note = 2'-fluoroguanosine
  modified_base 61: mod_base = OTHER; note = 2'-Omethyluridine
  modified_base 62: mod_base = OTHER; note = 2'-fluorocytosine
  modified_base 67: mod_base = OTHER; note = Guanosine phosphorothiorate
  modified_base 68: mod_base = OTHER; note = Adenosine phosphorothiorate
  modified_base 73: mod_base = OTHER; note = Cytosine phosphorothiorate
  modified_base 74: mod_base = OTHER; note = 2'-fluorocytosine phosphorothiorate

SEQ ID NO: 7625 - RNA, 76 nt, synthetic construct; identical to SEQ ID NO: 625
  source 1..76: mol_type = other RNA
  modified_base 3: mod_base = OTHER; note = Cytosine phosphorothiorate
  modified_base 4: mod_base = OTHER; note = 2'-Omethyluridine
  modified_base 6: mod_base = OTHER; note = Cytosine phosphorothiorate
  modified_base 9: mod_base = OTHER; note = Guanosine phosphorothiorate
  modified_base 10: mod_base = OTHER; note = 2'-Omethylguanosine
  modified_base 12: mod_base = OTHER; note = 2'-fluoroguanosine phosphorothiorate
  modified_base 13: mod_base = OTHER; note = 2'-fluorocytosine phosphorothiorate
  modified_base 16: mod_base = OTHER; note = 2'-fluorouridine
  modified_base 20: mod_base = OTHER; note = 2'-fluorouridine
  modified_base 24: mod_base = OTHER; note = 2'-Omethylguanosine phosphorothiorate
  modified_base 25: mod_base = OTHER; note = 2'-fluorocytosine phosphorothiorate
  modified_base 26: mod_base = OTHER; note = 2'-Omethyladenosine
  modified_base 33: mod_base = OTHER; note = 2'-fluorouridine
  modified_base 34: mod_base = OTHER; note = 2'-Omethyluridine
  modified_base 43: mod_base = OTHER; note = 2'-fluoroadenosine
  modified_base 44: mod_base = OTHER; note = Adenosine phosphorothiorate
  modified_base 48: mod_base = OTHER; note = 2'-fluorouridine
  modified_base 50: mod_base = OTHER; note = Cytosine phosphorothiorate
  modified_base 53: mod_base = OTHER; note = 2'-Omethylguanosine
  modified_base 60: mod_base = OTHER; note = 2'-fluorouridine
  modified_base 62: mod_base = OTHER; note = Cytosine phosphorothiorate
  modified_base 63: mod_base = OTHER; note = 2'-Omethylcytosine
  modified_base 65: mod_base = OTHER; note = 2'-Omethylguanosine
  modified_base 66: mod_base = OTHER; note = 2'-Omethylcytosine
  modified_base 67: mod_base = OTHER; note = Guanosine phosphorothiorate
  modified_base 68: mod_base = OTHER; note = 2'-fluoroguanosine
  modified_base 69: mod_base = OTHER; note = Adenosine phosphorothiorate
  modified_base 70: mod_base = OTHER; note = 2'-Omethylguanosine phosphorothiorate
  modified_base 71: mod_base = OTHER; note = 2'-fluorouridine
  modified_base 72: mod_base = OTHER; note = Cytosine phosphorothiorate
  modified_base 73: mod_base = OTHER; note = 2'-Omethylguanosine phosphorothiorate
  modified_base 74: mod_base = OTHER; note = 2'-fluorocytosine
  modified_base 75: mod_base = OTHER; note = 2'-fluorocytosine

SEQ ID NO: 7626 - RNA, 76 nt, synthetic construct; identical to SEQ ID NO: 625
  source 1..76: mol_type = other RNA
  modified_base 1: mod_base = OTHER; note = 2'-Omethylguanosine
  modified_base 33: mod_base = OTHER; note = 2'-O-(2-Methoxyethyl) thymine
  modified_base 49: mod_base = OTHER; note = 2'-Omethylcytosine

SEQ ID NO: 7627 - RNA, 76 nt, synthetic construct; identical to SEQ ID NO: 625
  source 1..76: mol_type = other RNA
  modified_base 6: mod_base = OTHER; note = 2'-Omethylcytosine
  modified_base 10: mod_base = OTHER; note = 2'-fluoroguanosine phosphorothiorate
  modified_base 12: mod_base = OTHER; note = 2'-Omethylguanosine
  modified_base 13: mod_base = OTHER; note = Cytosine phosphorothiorate
  modified_base 14: mod_base = OTHER; note = 2'-fluoroadenosine phosphorothiorate
  modified_base 17: mod_base = OTHER; note = 2'-Omethylguanosine
  modified_base 18: mod_base = OTHER; note = Guanosine phosphorothiorate
  modified_base 20: mod_base = OTHER; note = 2'-Omethyluridine phosphorothiorate
  modified_base 25: mod_base = OTHER; note = 2'-fluorocytosine
  modified_base 26: mod_base = OTHER; note = Adenosine phosphorothiorate
  modified_base 28: mod_base = OTHER; note = 2'-fluorouridine
  modified_base 30: mod_base = OTHER; note = 2'-fluoroguanosine
  modified_base 32: mod_base = OTHER; note = 2'-fluorocytosine
  modified_base 33: mod_base = OTHER; note = 2'-fluorouridine
  modified_base 36: mod_base = OTHER; note = Adenosine phosphorothiorate
  modified_base 37: mod_base = OTHER; note = Adenosine phosphorothiorate
  modified_base 38: mod_base = OTHER; note = 2'-fluoroadenosine
  modified_base 39: mod_base = OTHER; note = 2'-Omethyluridine
  modified_base 41: mod_base = OTHER; note = 2'-Omethylcytosine
  modified_base 46: mod_base = OTHER; note = Guanosine phosphorothiorate
  modified_base 47: mod_base = OTHER; note = 2'-Omethyluridine
  modified_base 49: mod_base = OTHER; note = Cytosine phosphorothiorate
  modified_base 50: mod_base = OTHER; note = 2'-Omethylcytosine
  modified_base 53: mod_base = OTHER; note = 2'-fluoroguanosine
  modified_base 54: mod_base = OTHER; note = 2'-Omethyluridine
  modified_base 56: mod_base = OTHER; note = Cytosine phosphorothiorate
  modified_base 57: mod_base = OTHER; note = 2'-fluoroguanosine
  modified_base 67: mod_base = OTHER; note = 2'-Omethylguanosine
  modified_base 68: mod_base = OTHER; note = 2'-Omethylguanosine
  modified_base 69: mod_base = OTHER; note = 2'-fluoroadenosine
  modified_base 71: mod_base = OTHER; note = 2'-fluorouridine
  modified_base 72: mod_base = OTHER; note = 2'-fluorocytosine
  modified_base 73: mod_base = OTHER; note = 2'-Omethylguanosine
  modified_base 74: mod_base = OTHER; note = Cytosine phosphorothiorate

SEQ ID NO: 7628 - RNA, 73 nt, synthetic construct; identical to SEQ ID NO: 935
  source 1..73: mol_type = other RNA
  modified_base 1: mod_base = OTHER; note = 2'-Omethylguanosine phosphorothiorate
  modified_base 2: mod_base = OTHER; note = 2'-Omethylguanosine phosphorothiorate
  modified_base 13: mod_base = OTHER; note = 2'-fluorocytosine
  modified_base 14: mod_base = OTHER; note = 2'-fluoroadenosine
  modified_base 54: mod_base = OTHER; note = 2'-fluorouridine
  modified_base 59: mod_base = OTHER; note = 2'-Omethylguanosine
  modified_base 72: mod_base = OTHER; note = 2'-Omethylcytosine phosphorothiorate

SEQ ID NO: 7629 - RNA, 75 nt, synthetic construct; identical to SEQ ID NO: 3311
  source 1..75: mol_type = other RNA
  modified_base 14: mod_base = OTHER; note = 2'-Omethyladenosine
  modified_base 20: mod_base = OTHER; note = Adenosine phosphorothiorate
  modified_base 21: mod_base = OTHER; note = 2'-fluoroadenosine
  modified_base 29: mod_base = OTHER; note = 2'-fluoroguanosine
  modified_base 58: mod_base = OTHER; note = 2'-Omethylguanosine
  modified_base 72: mod_base = OTHER; note = Uridine phosphorothiorate

SEQ ID NO: 7630 - RNA, 76 nt, synthetic construct; identical to SEQ ID NO: 625
  source 1..76: mol_type = other RNA
  modified_base 1: mod_base = OTHER; note = 2'-Omethylguanosine phosphorothiorate
  modified_base 2: mod_base = OTHER; note = 2'-Omethylguanosine phosphorothiorate
  modified_base 3: mod_base = OTHER; note = 2'-Omethylcytosine phosphorothiorate
  modified_base 4: mod_base = OTHER; note = 2'-Omethyluridine phosphorothiorate
  modified_base 5: mod_base = OTHER; note = 2'-Omethylcytosine phosphorothiorate
  modified_base 6: mod_base = OTHER; note = 2'-Omethylcytosine phosphorothiorate
  modified_base 10: mod_base = OTHER; note = 2'-Omethylguanosine
  modified_base 11: mod_base = OTHER; note = 2'-Omethylcytosine
  modified_base 12: mod_base = OTHER; note = 2'-Omethylguanosine
  modified_base 13: mod_base = OTHER; note = 2'-Omethylcytosine
  modified_base 22: mod_base = OTHER; note = 2'-Omethylguanosine
  modified_base 23: mod_base = OTHER; note = 2'-Omethylcytosine
  modified_base 24: mod_base = OTHER; note = 2'-Omethylguanosine
  modified_base 25: mod_base = OTHER; note = 2'-Omethylcytosine
  modified_base 40: mod_base = OTHER; note = 2'-fluorouridine
  modified_base 41: mod_base = OTHER; note = 2'-fluorocytosine
  modified_base 42: mod_base = OTHER; note = 2'-fluoroadenosine
  modified_base 43: mod_base = OTHER; note = 2'-fluoroadenosine
  modified_base 49: mod_base = OTHER; note = 2'-Omethylcytosine
  modified_base 50: mod_base = OTHER; note = 2'-Omethylcytosine
  modified_base 51: mod_base = OTHER; note = 2'-Omethylguanosine
  modified_base 52: mod_base = OTHER; note = 2'-Omethylguanosine
  modified_base 53: mod_base = OTHER; note = 2'-Omethylguanosine

SEQ ID NO: 7631 - RNA, 85 nt, synthetic construct; identical to SEQ ID NO: 3317
  source 1..85: mol_type = other RNA
  modified_base 1: mod_base = OTHER; note = 2'-Omethylguanosine phosphorothiorate
  modified_base 2: mod_base = OTHER; note = 2'-Omethylcytosine
  modified_base 4: mod_base = OTHER; note = Guanosine phosphorothiorate
  modified_base 5: mod_base = OTHER; note = 2'-Omethyluridine
  modified_base 12: mod_base = OTHER; note = 2'-fluorocytosine
  modified_base 13: mod_base = OTHER; note = 2'-fluoroguanosine phosphorothiorate
  modified_base 15: mod_base = OTHER; note = 2'-Omethylguanosine
  modified_base 18: mod_base = OTHER; note = 2'-fluoroguanosine
  modified_base 29: mod_base = OTHER; note = 2'-Omethylguanosine phosphorothiorate
  modified_base 31: mod_base = OTHER; note = 2'-fluoroadenosine
  modified_base 35: mod_base = OTHER; note = 2'-Omethyluridine
  modified_base 42: mod_base = OTHER; note = 2'-fluoroadenosine
  modified_base 46: mod_base = OTHER; note = 2'-Omethylguanosine phosphorothiorate
  modified_base 48: mod_base = OTHER; note = 2'-fluoroguanosine phosphorothiorate
  modified_base 55: mod_base = OTHER; note = 2'-Omethylcytosine phosphorothiorate
  modified_base 57: mod_base = OTHER; note = 2'-Omethylcytosine
  modified_base 59: mod_base = OTHER; note = 2'-Omethylcytosine
  modified_base 71: mod_base = OTHER; note = 2'-fluorocytosine
  modified_base 83: mod_base = OTHER; note = Cytosine phosphorothiorate

SEQ ID NO: 7632 - RNA, 86 nt, synthetic construct; identical to SEQ ID NO: 3290
  source 1..86: mol_type = other RNA
  modified_base 66: mod_base = OTHER; note = 2'-Omethylcytosine

SEQ ID NO: 7633 - RNA, 76 nt, synthetic construct; identical to SEQ ID NO: 625
  source 1..76: mol_type = other RNA
  modified_base 1: mod_base = OTHER; note = 2'-Omethylguanosine
  modified_base 2: mod_base = OTHER; note = 2'-Omethylguanosine
  modified_base 3: mod_base = OTHER; note = 2'-Omethylcytosine
  modified_base 4: mod_base = OTHER; note = 2'-Omethyluridine
  modified_base 5: mod_base = OTHER; note = 2'-Omethylcytosine
  modified_base 6: mod_base = OTHER; note = 2'-Omethylcytosine
  modified_base 7: mod_base = OTHER; note = Guanosine phosphorothiorate
  modified_base 9: mod_base = OTHER; note = 2'-Omethylguanosine phosphorothiorate
  modified_base 10: mod_base = OTHER; note = 2'-Omethylguanosine
  modified_base 11: mod_base = OTHER; note = 2'-Omethylcytosine
  modified_base 12: mod_base = OTHER; note = 2'-Omethylguanosine
  modified_base 13: mod_base = OTHER; note = 2'-Omethylcytosine
  modified_base 14: mod_base = OTHER; note = 2'-Omethyladenosine
  modified_base 15: mod_base = OTHER; note = 2'-Omethyladenosine
  modified_base 16: mod_base = OTHER; note = 2'-Omethyluridine
  modified_base 17: mod_base = OTHER; note = 2'-Omethylguanosine
  modified_base 18: mod_base = OTHER; note = 2'-fluoroguanosine phosphorothiorate
  modified_base 19: mod_base = OTHER; note = Adenosine phosphorothiorate
  modified_base 21: mod_base = OTHER; note = 2'-fluoroadenosine phosphorothiorate
  modified_base 22: mod_base = OTHER; note = 2'-Omethylguanosine
  modified_base 23: mod_base = OTHER; note = 2'-Omethylcytosine
  modified_base 24: mod_base = OTHER; note = 2'-Omethylguanosine
  modified_base 25: mod_base = OTHER; note = 2'-Omethylcytosine
  modified_base 26: mod_base = OTHER; note = Adenosine phosphorothiorate
  modified_base 28: mod_base = OTHER; note = 2'-Omethyluridine phosphorothiorate
  modified_base 29: mod_base = OTHER; note = 2'-Omethylguanosine
  modified_base 30: mod_base = OTHER; note = 2'-Omethylguanosine phosphorothiorate
  modified_base 31: mod_base = OTHER; note = 2'-Omethyladenosine phosphorothiorate
  modified_base 33: mod_base = OTHER; note = 2'-fluorouridine
  modified_base 34: mod_base = OTHER; note = 2'-Omethyluridine phosphorothiorate
  modified_base 35: mod_base = OTHER; note = Cytosine phosphorothiorate
  modified_base 36: mod_base = OTHER; note = 2'-Omethyladenosine phosphorothiorate
  modified_base 37: mod_base = OTHER; note = Adenosine phosphorothiorate
  modified_base 38: mod_base = OTHER; note = Adenosine phosphorothiorate
  modified_base 40: mod_base = OTHER; note = 2'-fluorouridine
  modified_base 41: mod_base = OTHER; note = 2'-fluorocytosine
  modified_base 42: mod_base = OTHER; note = Adenosine phosphorothiorate
  modified_base 43: mod_base = OTHER; note = Adenosine phosphorothiorate
  modified_base 44: mod_base = OTHER; note = 2'-Omethyladenosine
  modified_base 45: mod_base = OTHER; note = 2'-fluoroguanosine
  modified_base 47: mod_base = OTHER; note = 2'-Omethyluridine phosphorothiorate
  modified_base 48: mod_base = OTHER; note = 2'-fluorouridine
  modified_base 49: mod_base = OTHER; note = 2'-Omethylcytosine
  modified_base 50: mod_base = OTHER; note = 2'-Omethylcytosine
  modified_base 52: mod_base = OTHER; note = 2'-Omethylguanosine
  modified_base 53: mod_base = OTHER; note = Guanosine phosphorothiorate
  modified_base 54: mod_base = OTHER; note = Uridine phosphorothiorate
  modified_base 55: mod_base = OTHER; note = Uridine phosphorothiorate
  modified_base 56: mod_base = OTHER; note = 2'-Omethylcytosine
  modified_base 59: mod_base = OTHER; note = 2'-Omethylguanosine
  modified_base 61: mod_base = OTHER; note = 2'-Omethylcytosine
  modified_base 62: mod_base = OTHER; note = 2'-Omethylcytosine
  modified_base 63: mod_base = OTHER; note = 2'-fluorocytosine
  modified_base 64: mod_base = OTHER; note = 2'-Omethylguanosine
  modified_base 65: mod_base = OTHER; note = 2'-Omethylguanosine phosphorothiorate
  modified_base 66: mod_base = OTHER; note = 2'-Omethylcytosine phosphorothiorate
  modified_base 67: mod_base = OTHER; note = 2'-Omethylguanosine phosphorothiorate
  modified_base 68: mod_base = OTHER; note = 2'-Omethylguanosine
  modified_base 69: mod_base = OTHER; note = 2'-fluoroadenosine
  modified_base 70: mod_base = OTHER; note = Guanosine phosphorothiorate
  modified_base 72: mod_base = OTHER; note = 2'-Omethylcytosine phosphorothiorate
  modified_base 73: mod_base = OTHER; note = 2'-Omethylguanosine
  modified_base 74: mod_base = OTHER; note = 2'-fluorocytosine
  modified_base 75: mod_base = OTHER; note = 2'-fluorocytosine phosphorothiorate
  modified_base 76: mod_base = OTHER; note = 2'-Omethyladenosine

SEQ ID NO: 7634 - RNA, 84 nt, synthetic construct
  source 1..84: mol_type = other RNA
gctgtgatggccgagtggttaaggcgttggacttcaaatccaatggggtctccccgcgcagttcgaatcctgctcacagcgcca

SEQ ID NO: 7635 - RNA, 76 nt, synthetic construct; identical to SEQ ID NO: 625
  source 1..76: mol_type = other RNA
  modified_base 4: mod_base = OTHER; note = 2'-fluorouridine
  modified_base 6: mod_base = OTHER; note = 2'-Omethylcytosine
  modified_base 12: mod_base = OTHER; note = 2'-Omethylguanosine phosphorothiorate
  modified_base 13: mod_base = OTHER; note = 2'-Omethylcytosine
  modified_base 15: mod_base = OTHER; note = 2'-Omethyladenosine
  modified_base 16: mod_base = OTHER; note = 2'-fluorouridine phosphorothiorate
  modified_base 17: mod_base = OTHER; note = 2'-Omethylguanosine
  modified_base 18: mod_base = OTHER; note = 2'-Omethylguanosine phosphorothiorate
  modified_base 20: mod_base = OTHER; note = Uridine phosphorothiorate
  modified_base 22: mod_base = OTHER; note = 2'-fluoroguanosine
  modified_base 23: mod_base = OTHER; note = 2'-fluorocytosine phosphorothiorate
  modified_base 24: mod_base = OTHER; note = 2'-fluoroguanosine
  modified_base 25: mod_base = OTHER; note = 2'-fluorocytosine
  modified_base 26: mod_base = OTHER; note = 2'-fluoroadenosine phosphorothiorate
  modified_base 27: mod_base = OTHER; note = 2'-fluorouridine
  modified_base 33: mod_base = OTHER; note = Uridine phosphorothiorate
  modified_base 34: mod_base = OTHER; note = 2'-Omethyluridine phosphorothiorate
  modified_base 38: mod_base = OTHER; note = 2'-Omethyladenosine
  modified_base 41: mod_base = OTHER; note = 2'-Omethylcytosine
  modified_base 43: mod_base = OTHER; note = Adenosine phosphorothiorate
  modified_base 44: mod_base = OTHER; note = 2'-Omethyladenosine
  modified_base 45: mod_base = OTHER; note = 2'-Omethylguanosine
  modified_base 48: mod_base = OTHER; note = Uridine phosphorothiorate
  modified_base 49: mod_base = OTHER; note = 2'-Omethylcytosine
  modified_base 52: mod_base = OTHER; note = 2'-fluoroguanosine
  modified_base 56: mod_base = OTHER; note = 2'-Omethylcytosine
  modified_base 59: mod_base = OTHER; note = 2'-Omethylguanosine
  modified_base 68: mod_base = OTHER; note = 2'-fluoroguanosine
  modified_base 70: mod_base = OTHER; note = Guanosine phosphorothiorate
  modified_base 71: mod_base = OTHER; note = 2'-Omethyluridine
  modified_base 74: mod_base = OTHER; note = 2'-Omethylcytosine
  modified_base 76: mod_base = OTHER; note = 2'-Omethyladenosine

SEQ ID NO: 7636 - RNA, 76 nt, synthetic construct
  source 1..76: mol_type = other RNA
ggctccgtgacgcaatggatagcgtctctgacttcaaattagaaggttccgggttcgagtcccggcggagtcgcca

SEQ ID NO: 7637 - RNA, 76 nt, synthetic construct; identical to SEQ ID NO: 625
  source 1..76: mol_type = other RNA
  modified_base 1: mod_base = OTHER; note = Guanosine phosphorothiorate
  modified_base 2: mod_base = OTHER; note = 2'-Omethylguanosine
  modified_base 3: mod_base = OTHER; note = 2'-Omethylcytosine phosphorothiorate
  modified_base 4: mod_base = OTHER; note = 2'-Omethyluridine
  modified_base 6: mod_base = OTHER; note = 2'-Omethylcytosine
  modified_base 12: mod_base = OTHER; note = 2'-fluoroguanosine
  modified_base 13: mod_base = OTHER; note = 2'-fluorocytosine
  modified_base 16: mod_base = OTHER; note = 2'-fluorouridine
  modified_base 18: mod_base = OTHER; note = 2'-fluoroguanosine
  modified_base 22: mod_base = OTHER; note = 2'-fluoroguanosine
  modified_base 23: mod_base = OTHER; note = 2'-Omethylcytosine
  modified_base 26: mod_base = OTHER; note = 2'-fluoroadenosine phosphorothiorate
  modified_base 27: mod_base = OTHER; note = 2'-Omethyluridine
  modified_base 28: mod_base = OTHER; note = 2'-Omethyluridine
  modified_base 32: mod_base = OTHER; note = 2'-fluorocytosine
  modified_base 33: mod_base = OTHER; note = 2'-fluorouridine
  modified_base 38: mod_base = OTHER; note = Adenosine phosphorothiorate
  modified_base 40: mod_base = OTHER; note = 2'-fluorouridine
  modified_base 41: mod_base = OTHER; note = 2'-fluorocytosine phosphorothiorate
  modified_base 46: mod_base = OTHER; note = 2'-fluoroguanosine
  modified_base 47: mod_base = OTHER; note = Uridine phosphorothiorate
  modified_base 52: mod_base = OTHER; note = 2'-fluoroguanosine
  modified_base 53: mod_base = OTHER; note = 2'-Omethylguanosine
  modified_base 54: mod_base = OTHER; note = 2'-Omethyluridine phosphorothiorate
  modified_base 59: mod_base = OTHER; note = 2'-Omethylguanosine phosphorothiorate
  modified_base 60: mod_base = OTHER; note = 2'-Omethyluridine
  modified_base 61: mod_base = OTHER; note = 2'-Omethylcytosine
  modified_base 62: mod_base = OTHER; note = 2'-Omethylcytosine
  modified_base 67: mod_base = OTHER; note = 2'-Omethylguanosine
  modified_base 69: mod_base = OTHER; note = 2'-Omethyladenosine
  modified_base 70: mod_base = OTHER; note = Guanosine phosphorothiorate
  modified_base 71: mod_base = OTHER; note = 2'-fluorouridine
  modified_base 72: mod_base = OTHER; note = 2'-fluorocytosine
  modified_base 73: mod_base = OTHER; note = 2'-fluoroguanosine
  modified_base 75: mod_base = OTHER; note = 2'-fluorocytosine

SEQ ID NO: 7638 - RNA, 76 nt, synthetic construct; identical to SEQ ID NO: 3615
  source 1..76: mol_type = other RNA
  modified_base 1: mod_base = OTHER; note = 2'-Omethylguanosine
  modified_base 13: mod_base = OTHER; note = 2'-Omethylcytosine
  modified_base 17: mod_base = OTHER; note = 2'-Omethylguanosine
  modified_base 18: mod_base = OTHER; note = 2'-Omethylguanosine
  modified_base 25: mod_base = OTHER; note = 2'-Omethylcytosine
  modified_base 33: mod_base = OTHER; note = Uridine phosphorothiorate
  modified_base 34: mod_base = OTHER; note = 2'-Omethyluridine
  modified_base 35: mod_base = OTHER; note = Cytosine phosphorothiorate
  modified_base 37: mod_base = OTHER; note = Adenosine phosphorothiorate
  modified_base 38: mod_base = OTHER; note = Adenosine phosphorothiorate
  modified_base 41: mod_base = OTHER; note = 2'-fluorocytosine
  modified_base 42: mod_base = OTHER; note = 2'-Omethyladenosine
  modified_base 43: mod_base = OTHER; note = 2'-Omethyladenosine
  modified_base 44: mod_base = OTHER; note = 2'-fluoroguanosine
  modified_base 49: mod_base = OTHER; note = 2'-Omethylcytosine
  modified_base 50: mod_base = OTHER; note = 2'-Omethylcytosine
  modified_base 52: mod_base = OTHER; note = 2'-Omethylguanosine
  modified_base 54: mod_base = OTHER; note = Uridine phosphorothiorate
  modified_base 55: mod_base = OTHER; note = Uridine phosphorothiorate
  modified_base 56: mod_base = OTHER; note = 2'-Omethylcytosine
  modified_base 57: mod_base = OTHER; note = Guanosine phosphorothiorate
  modified_base 58: mod_base = OTHER; note = Adenosine phosphorothiorate
  modified_base 59: mod_base = OTHER; note = 2'-Omethylguanosine
  modified_base 61: mod_base = OTHER; note = 2'-Omethylcytosine
  modified_base 65: mod_base = OTHER; note = 2'-Omethylguanosine
  modified_base 73: mod_base = OTHER; note = 2'-Omethylguanosine

SEQ ID NO: 7639 - RNA, 75 nt, synthetic construct; identical to SEQ ID NO: 1045
  source 1..75: mol_type = other RNA
  modified_base 1: mod_base = OTHER; note = 2'-Omethylguanosine
  modified_base 2: mod_base = OTHER; note = 2'-Omethylguanosine
  modified_base 3: mod_base = OTHER; note = 2'-Omethyluridine
  modified_base 4: mod_base = OTHER; note = 2'-Omethyluridine
  modified_base 5: mod_base = OTHER; note = 2'-Omethylcytosine
  modified_base 6: mod_base = OTHER; note = 2'-Omethylcytosine
  modified_base 10: mod_base = OTHER; note = 2'-Omethylguanosine
  modified_base 11: mod_base = OTHER; note = 2'-Omethyluridine
  modified_base 12: mod_base = OTHER; note = 2'-Omethylguanosine
  modified_base 13: mod_base = OTHER; note = 2'-Omethyluridine
  modified_base 14: mod_base = OTHER; note = 2'-Omethyladenosine
  modified_base 15: mod_base = OTHER; note = 2'-fluoroadenosine
  modified_base 16: mod_base = OTHER; note = 2'-Omethyluridine
  modified_base 17: mod_base = OTHER; note = 2'-Omethylguanosine
  modified_base 18: mod_base = OTHER; note = 2'-Omethylguanosine
  modified_base 19: mod_base = OTHER; note = 2'-fluorouridine
  modified_base 20: mod_base = OTHER; note = 2'-Omethyladenosine
  modified_base 22: mod_base = OTHER; note = 2'-Omethylguanosine
  modified_base 23: mod_base = OTHER; note = 2'-Omethylcytosine
  modified_base 24: mod_base = OTHER; note = 2'-Omethyladenosine
  modified_base 25: mod_base = OTHER; note = 2'-Omethylcytosine
  modified_base 33: mod_base = OTHER; note = 2'-fluorouridine
  modified_base 35: mod_base = OTHER; note = Uridine phosphorothiorate
  modified_base 37: mod_base = OTHER; note = Adenosine phosphorothiorate
  modified_base 38: mod_base = OTHER; note = Adenosine phosphorothiorate
  modified_base 41: mod_base = OTHER; note = 2'-Omethylcytosine
  modified_base 42: mod_base = OTHER; note = 2'-Omethyladenosine
  modified_base 43: mod_base = OTHER; note = 2'-Omethylguanosine
  modified_base 44: mod_base = OTHER; note = 2'-Omethylcytosine
  modified_base 48: mod_base = OTHER; note = 2'-Omethylcytosine
  modified_base 49: mod_base = OTHER; note = 2'-Omethylcytosine
  modified_base 51: mod_base = OTHER; note = 2'-Omethyladenosine
  modified_base 53: mod_base = OTHER; note = 2'-Omethyluridine
  modified_base 54: mod_base = OTHER; note = Uridine phosphorothiorate
  modified_base 55: mod_base = OTHER; note = 2'-Omethylcytosine
  modified_base 56: mod_base = OTHER; note = 2'-fluoroguanosine
  modified_base 58: mod_base = OTHER; note = 2'-Omethylguanosine
  modified_base 60: mod_base = OTHER; note = 2'-Omethylcytosine
  modified_base 64: mod_base = OTHER; note = 2'-Omethylguanosine
  modified_base 72: mod_base = OTHER; note = 2'-Omethyluridine

SEQ ID NO: 7640 - RNA, 86 nt, synthetic construct; identical to SEQ ID NO: 3290
  source 1..86: mol_type = other RNA
  modified_base 1: mod_base = OTHER; note = 2'-Omethyladenosine
  modified_base 14: mod_base = OTHER; note = 2'-Omethyladenosine
  modified_base 15: mod_base = OTHER; note = 2'-Omethylguanosine
  modified_base 16: mod_base = OTHER; note = 2'-Omethyluridine
  modified_base 17: mod_base = OTHER; note = 2'-Omethylguanosine
  modified_base 18: mod_base = OTHER; note = 2'-Omethylguanosine
  modified_base 20: mod_base = OTHER; note = 2'-Omethyluridine
  modified_base 60: mod_base = OTHER; note = 2'-Omethyluridine
  modified_base 62: mod_base = OTHER; note = 2'-Omethylguanosine
  modified_base 83: mod_base = OTHER; note = 2'-Omethyladenosine

SEQ ID NO: 7641 - RNA, 86 nt, synthetic construct; identical to SEQ ID NO: 3290
  source 1..86: mol_type = other RNA
  modified_base 32: mod_base = OTHER; note = 2'-Omethylcytosine

SEQ ID NO: 7642 - RNA, 76 nt, synthetic construct
  source 1..76: mol_type = other RNA
ggctccgtggcgcaatggatagcgcattggacttcaaattcaaaggctccgggttcgagtcccggcggagtcgcca

SEQ ID NO: 7643 - RNA, 76 nt, synthetic construct; identical to SEQ ID NO: 3318
  source 1..76: mol_type = other RNA
  modified_base 1: mod_base = OTHER; note = 2'-Omethylcytosine phosphorothiorate
  modified_base 2: mod_base = OTHER; note = Cytosine phosphorothiorate
  modified_base 75: mod_base = OTHER; note = 2'-Omethylcytosine phosphorothiorate
  modified_base 76: mod_base = OTHER; note = 2'-Omethyladenosine

SEQ ID NO: 7644 - RNA, 76 nt, synthetic construct; identical to SEQ ID NO: 3318
  source 1..76: mol_type = other RNA
  modified_base 1: mod_base = OTHER; note = 2'-Omethylcytosine phosphorothiorate
  modified_base 2: mod_base = OTHER; note = 2'-Omethylcytosine phosphorothiorate
  modified_base 75: mod_base = OTHER; note = 2'-Omethylcytosine phosphorothiorate
  modified_base 76: mod_base = OTHER; note = 2'-Omethyladenosine

SEQ ID NO: 7645 - RNA, 76 nt, synthetic construct; identical to SEQ ID NO: 3289
  source 1..76: mol_type = other RNA
  modified_base 1: mod_base = OTHER; note = 2'-Omethylguanosine
  modified_base 54: mod_base = OTHER; note = 2'-Omethyluridine phosphorothiorate
  modified_base 55: mod_base = OTHER; note = Uridine phosphorothiorate
  modified_base 56: mod_base = OTHER; note = 2'-Omethylcytosine
  modified_base 57: mod_base = OTHER; note = 2'-fluoroadenosine
  modified_base 58: mod_base = OTHER; note = 2'-fluoroadenosine phosphorothiorate
  modified_base 59: mod_base = OTHER; note = 2'-Omethylguanosine
  modified_base 60: mod_base = OTHER; note = 2'-fluorouridine
  modified_base 73: mod_base = OTHER; note = 2'-Omethylguanosine

SEQ ID NO: 7646 - RNA, 74 nt, synthetic construct; identical to SEQ ID NO: 3293
  source 1..74: mol_type = other RNA
  modified_base 1: mod_base = OTHER; note = 2'-Omethyladenosine
  modified_base 2: mod_base = OTHER; note = 2'-fluorocytosine
  modified_base 3: mod_base = OTHER; note = Cytosine phosphorothiorate
  modified_base 6: mod_base = OTHER; note = 2'-fluoroguanosine
  modified_base 8: mod_base = OTHER; note = Guanosine phosphorothiorate
  modified_base 9: mod_base = OTHER; note = 2'-fluoroguanosine
  modified_base 22: mod_base = OTHER; note = 2'-fluoroguanosine
  modified_base 27: mod_base = OTHER; note = 2'-Omethyluridine
  modified_base 35: mod_base = OTHER; note = 2'-fluoroguanosine
  modified_base 40: mod_base = OTHER; note = 2'-fluoroguanosine
  modified_base 42: mod_base = OTHER; note = Adenosine phosphorothiorate
  modified_base 43: mod_base = OTHER; note = 2'-fluoroguanosine
  modified_base 48: mod_base = OTHER; note = 2'-fluorocytosine
  modified_base 50: mod_base = OTHER; note = Uridine phosphorothiorate
  modified_base 51: mod_base = OTHER; note = 2'-fluoroguanosine
  modified_base 62: mod_base = OTHER; note = Guanosine phosphorothiorate
  modified_base 64: mod_base = OTHER; note = 2'-Omethylcytosine phosphorothiorate
  modified_base 73: mod_base = OTHER; note = 2'-Omethylcytosine phosphorothiorate

SEQ ID NO: 7647 - RNA, 85 nt, synthetic construct; identical to SEQ ID NO: 3286
  source 1..85: mol_type = other RNA
  modified_base 1: mod_base = OTHER; note = 2'-Omethylcytosine
  modified_base 11: mod_base = OTHER; note = Cytosine phosphorothiorate
  modified_base 15: mod_base = OTHER; note = 2'-fluorouridine
  modified_base 22: mod_base = OTHER; note = 2'-fluoroguanosine phosphorothiorate
  modified_base 26: mod_base = OTHER; note = 2'-fluorouridine
  modified_base 28: mod_base = OTHER; note = 2'-fluoroguanosine
  modified_base 30: mod_base = OTHER; note = 2'-fluoroadenosine
  modified_base 32: mod_base = OTHER; note = 2'-fluorouridine
  modified_base 43: mod_base = OTHER; note = 2'-Omethyluridine
  modified_base 45: mod_base = OTHER; note = Guanosine phosphorothiorate
  modified_base 48: mod_base = OTHER; note = 2'-Omethyladenosine
  modified_base 49: mod_base = OTHER; note = 2'-Omethyluridine phosphorothiorate
  modified_base 55: mod_base = OTHER; note = Cytosine phosphorothiorate
  modified_base 56: mod_base = OTHER; note = 2'-Omethylguanosine
  modified_base 59: mod_base = OTHER; note = 2'-Omethyluridine
  modified_base 61: mod_base = OTHER; note = 2'-fluoroguanosine
  modified_base 65: mod_base = OTHER; note = Cytosine phosphorothiorate

SEQ ID NO: 7648 - RNA, 76 nt, synthetic construct; identical to SEQ ID NO: 3295
  source 1..76: mol_type = other RNA
  modified_base 1: mod_base = OTHER; note = 2'-Omethylcytosine phosphorothiorate
  modified_base 2: mod_base = OTHER; note = 2'-fluorocytosine phosphorothiorate
  modified_base 3: mod_base = OTHER; note = 2'-Omethyluridine
  modified_base 7: mod_base = OTHER; note = 2'-Omethyladenosine phosphorothiorate
  modified_base 8: mod_base = OTHER; note = 2'-Omethyluridine
  modified_base 11: mod_base = OTHER; note = Cytosine phosphorothiorate
  modified_base 12: mod_base = OTHER; note = 2'-Omethyluridine
  modified_base 15: mod_base = OTHER; note = Guanosine phosphorothiorate
  modified_base 16: mod_base = OTHER; note = 2'-Omethyluridine phosphorothiorate
  modified_base 31: mod_base = OTHER; note = 2'-fluoroadenosine phosphorothiorate
  modified_base 38: mod_base = OTHER; note = 2'-fluoroadenosine phosphorothiorate
  modified_base 39: mod_base = OTHER; note = Uridine phosphorothiorate
  modified_base 43: mod_base = OTHER; note = 2'-Omethyluridine
  modified_base 49: mod_base = OTHER; note = 2'-Omethylguanosine
  modified_base 52: mod_base = OTHER; note = 2'-Omethylguanosine
  modified_base 53: mod_base = OTHER; note = 2'-fluoroguanosine phosphorothiorate
  modified_base 58: mod_base = OTHER; note = Adenosine phosphorothiorate
  modified_base 64: mod_base = OTHER; note = 2'-fluoroguanosine
  modified_base 74: mod_base = OTHER; note = Cytosine phosphorothiorate

SEQ ID NO: 7649 - RNA, 76 nt, synthetic construct; identical to SEQ ID NO: 625
  source 1..76: mol_type = other RNA
  modified_base 1: mod_base = OTHER; note = 2'-Omethylguanosine phosphorothiorate
  modified_base 2: mod_base = OTHER; note = 2'-Omethylguanosine phosphorothiorate
  modified_base 3: mod_base = OTHER; note = 2'-Omethylcytosine
  modified_base 4: mod_base = OTHER; note = 2'-Omethyluridine
  modified_base 5: mod_base = OTHER; note = 2'-Omethylcytosine
  modified_base 6: mod_base = OTHER; note = 2'-Omethylcytosine
  modified_base 16: mod_base = OTHER; note = 2'-Omethyluridine
  modified_base 17: mod_base = OTHER; note = 2'-Omethylguanosine
  modified_base 18: mod_base = OTHER; note = 2'-Omethylguanosine
  modified_base 20: mod_base = OTHER; note = 2'-Omethyluridine
  modified_base 22: mod_base = OTHER; note = 2'-Omethylguanosine
  modified_base 23: mod_base = OTHER; note = 2'-Omethylcytosine
  modified_base 24: mod_base = OTHER; note = 2'-Omethylguanosine
  modified_base 25: mod_base = OTHER; note = 2'-Omethylcytosine
  modified_base 33: mod_base = OTHER; note = 2'-fluorouridine
  modified_base 35: mod_base = OTHER; note = Cytosine phosphorothiorate
  modified_base 37: mod_base = OTHER; note = Adenosine phosphorothiorate
  modified_base 38: mod_base = OTHER; note = Adenosine phosphorothiorate
  modified_base 41: mod_base = OTHER; note = 2'-Omethylcytosine
  modified_base 42: mod_base = OTHER; note = 2'-Omethyladenosine
  modified_base 43: mod_base = OTHER; note = 2'-Omethyladenosine
  modified_base 44: mod_base = OTHER; note = 2'-Omethyladenosine
  modified_base 49: mod_base = OTHER; note = 2'-Omethylcytosine
  modified_base 50: mod_base = OTHER; note = 2'-Omethylcytosine
  modified_base 52: mod_base = OTHER; note = 2'-Omethylguanosine
  modified_base 54: mod_base = OTHER; note = 2'-Omethyluridine
  modified_base 55: mod_base = OTHER; note = Uridine phosphorothiorate
  modified_base 56: mod_base = OTHER; note = 2'-Omethylcytosine
  modified_base 57: mod_base = OTHER; note = 2'-fluoroguanosine
  modified_base 59: mod_base = OTHER; note = 2'-Omethylguanosine
  modified_base 61: mod_base = OTHER; note = 2'-Omethylcytosine
  modified_base 62: mod_base = OTHER; note = 2'-Omethylcytosine
  modified_base 63: mod_base = OTHER; note = 2'-fluorocytosine
  modified_base 64: mod_base = OTHER; note = 2'-Omethylguanosine
  modified_base 65: mod_base = OTHER; note = 2'-Omethylguanosine
  modified_base 74: mod_base = OTHER; note = Cytosine phosphorothiorate
  modified_base 75: mod_base = OTHER; note = 2'-Omethylcytosine

SEQ ID NO: 7650 - RNA, 86 nt, synthetic construct
  source 1..86: mol_type = other RNA
accaggatggccgagtggttaaggcgttggacttcagatccaatggacaattgtctgcgtgggttcgagccccactcctggtacca

SEQ ID NO: 7651 - RNA, 75 nt, synthetic construct; identical to SEQ ID NO: 3299
  source 1..75: mol_type = other RNA
  modified_base 1: mod_base = OTHER; note = 2'-Omethylcytosine
  modified_base 4: mod_base = OTHER; note = Guanosine phosphorothiorate
  modified_base 9: mod_base = OTHER; note = Guanosine phosphorothiorate
  modified_base 13: mod_base = OTHER; note = Adenosine phosphorothiorate
  modified_base 15: mod_base = OTHER; note = Uridine phosphorothiorate
  modified_base 19: mod_base = OTHER; note = 2'-fluorouridine
  modified_base 21: mod_base = OTHER; note = 2'-fluoroguanosine
  modified_base 23: mod_base = OTHER; note = 2'-fluoroguanosine
  modified_base 25: mod_base = OTHER; note = 2'-fluoroadenosine
  modified_base 28: mod_base = OTHER; note = 2'-fluoroadenosine
  modified_base 38: mod_base = OTHER; note = Uridine phosphorothiorate
  modified_base 41: mod_base = OTHER; note = 2'-fluoroguanosine
  modified_base 46: mod_base = OTHER; note = 2'-fluorouridine
  modified_base 47: mod_base = OTHER; note = 2'-fluorocytosine
  modified_base 49: mod_base = OTHER; note = 2'-Omethyladenosine phosphorothiorate
  modified_base 52: mod_base = OTHER; note = 2'-fluoroguanosine phosphorothiorate
  modified_base 55: mod_base = OTHER; note = 2'-fluorocytosine
  modified_base 61: mod_base = OTHER; note = 2'-fluorocytosine
  modified_base 62: mod_base = OTHER; note = Cytosine phosphorothiorate
  modified_base 73: mod_base = OTHER; note = Cytosine phosphorothiorate
  modified_base 74: mod_base = OTHER; note = 2'-Omethylcytosine

SEQ ID NO: 7652 - RNA, 75 nt, synthetic construct; identical to SEQ ID NO: 3306
  source 1..75: mol_type = other RNA
  modified_base 1: mod_base = OTHER; note = 2'-Omethylguanosine phosphorothiorate
  modified_base 2: mod_base = OTHER; note = 2'-Omethyladenosine

SEQ ID NO: 7653 - RNA, 86 nt, synthetic construct; identical to SEQ ID NO: 3290
  source 1..86: mol_type = other RNA
  modified_base 1: mod_base = OTHER; note = 2'-Omethyladenosine
  modified_base 2: mod_base = OTHER; note = 2'-Omethylcytosine
  modified_base 3: mod_base = OTHER; note = 2'-Omethylcytosine
  modified_base 4: mod_base = OTHER; note = 2'-Omethyladenosine
  modified_base 5: mod_base = OTHER; note = 2'-Omethylguanosine
  modified_base 6: mod_base = OTHER; note = 2'-Omethylguanosine
  modified_base 13: mod_base = OTHER; note = 2'-Omethylguanosine
  modified_base 17: mod_base = OTHER; note = 2'-Omethylguanosine
  modified_base 18: mod_base = OTHER; note = 2'-Omethylguanosine
  modified_base 25: mod_base = OTHER; note = 2'-Omethylcytosine
  modified_base 33: mod_base = OTHER; note = Uridine phosphorothiorate
  modified_base 34: mod_base = OTHER; note = 2'-Omethyluridine
  modified_base 35: mod_base = OTHER; note = Cytosine phosphorothiorate
  modified_base 37: mod_base = OTHER; note = Guanosine phosphorothiorate
  modified_base 38: mod_base = OTHER; note = Adenosine phosphorothiorate
  modified_base 41: mod_base = OTHER; note = 2'-fluorocytosine
  modified_base 42: mod_base = OTHER; note = 2'-Omethyladenosine
  modified_base 43: mod_base = OTHER; note = 2'-Omethyladenosine
  modified_base 44: mod_base = OTHER; note = 2'-fluorouridine
  modified_base 59: mod_base = OTHER; note = 2'-Omethylguanosine
  modified_base 60: mod_base = OTHER; note = 2'-Omethyluridine
  modified_base 61: mod_base = OTHER; note = 2'-Omethylguanosine
  modified_base 62: mod_base = OTHER; note = 2'-Omethylguanosine
  modified_base 63: mod_base = OTHER; note = 2'-Omethylguanosine
  modified_base 64: mod_base = OTHER; note = Uridine phosphorothiorate
  modified_base 65: mod_base = OTHER; note = Uridine phosphorothiorate
  modified_base 71: mod_base = OTHER; note = 2'-Omethylcytosine
  modified_base 75: mod_base = OTHER; note = 2'-Omethylcytosine
  modified_base 83: mod_base = OTHER; note = 2'-Omethyladenosine

SEQ ID NO: 7654 - RNA, 76 nt, synthetic construct; identical to SEQ ID NO: 625
  source 1..76: mol_type = other RNA
  modified_base 4: mod_base = OTHER; note = Uridine phosphorothiorate
  modified_base 5: mod_base = OTHER; note = 2'-fluorocytosine
  modified_base 6: mod_base = OTHER; note = Cytosine phosphorothiorate
  modified_base 10: mod_base = OTHER; note = 2'-Omethylguanosine
  modified_base 12: mod_base = OTHER; note = 2'-fluoroguanosine
  modified_base 13: mod_base = OTHER; note = Cytosine phosphorothiorate
  modified_base 18: mod_base = OTHER; note = 2'-fluoroguanosine
  modified_base 25: mod_base = OTHER; note = 2'-Omethylcytosine
  modified_base 27: mod_base = OTHER; note = Uridine phosphorothiorate
  modified_base 28: mod_base = OTHER; note = 2'-Omethyluridine
  modified_base 29: mod_base = OTHER; note = 2'-Omethylguanosine phosphorothiorate
  modified_base 30: mod_base = OTHER; note = 2'-fluoroguanosine
  modified_base 37: mod_base = OTHER; note = Adenosine phosphorothiorate
  modified_base 38: mod_base = OTHER; note = Adenosine phosphorothiorate
  modified_base 39: mod_base = OTHER; note = 2'-Omethyluridine
  modified_base 40: mod_base = OTHER; note = 2'-fluorouridine
  modified_base 42: mod_base = OTHER; note = Adenosine phosphorothiorate
  modified_base 43: mod_base = OTHER; note = 2'-fluoroadenosine
  modified_base 46: mod_base = OTHER; note = 2'-fluoroguanosine
  modified_base 48: mod_base = OTHER; note = 2'-Omethyluridine
  modified_base 49: mod_base = OTHER; note = 2'-Omethylcytosine
  modified_base 50: mod_base = OTHER; note = 2'-Omethylcytosine phosphorothiorate
  modified_base 52: mod_base = OTHER; note = 2'-Omethylguanosine
  modified_base 58: mod_base = OTHER; note = Adenosine phosphorothiorate
  modified_base 59: mod_base = OTHER; note = 2'-fluoroguanosine phosphorothiorate
  modified_base 62: mod_base = OTHER; note = 2'-fluorocytosine phosphorothiorate
  modified_base 63: mod_base = OTHER; note = 2'-fluorocytosine
  modified_base 64: mod_base = OTHER; note = Guanosine phosphorothiorate
  modified_base 70: mod_base = OTHER; note = 2'-Omethylguanosine
  modified_base 72: mod_base = OTHER; note = 2'-fluorocytosine
  modified_base 75: mod_base = OTHER; note = 2'-Omethylcytosine

SEQ ID NO: 7655 - RNA, 76 nt, synthetic construct; identical to SEQ ID NO: 625
  source 1..76: mol_type = other RNA
  modified_base 1: mod_base = OTHER; note = 2'-fluoroguanosine
  modified_base 2: mod_base = OTHER; note = 2'-fluoroguanosine
  modified_base 3: mod_base = OTHER; note = 2'-Omethylcytosine
  modified_base 10: mod_base = OTHER; note = 2'-Omethylguanosine
  modified_base 11: mod_base = OTHER; note = 2'-Omethylcytosine
  modified_base 12: mod_base = OTHER; note = 2'-fluoroguanosine
  modified_base 14: mod_base = OTHER; note = 2'-fluoroadenosine
  modified_base 15: mod_base = OTHER; note = 2'-fluoroadenosine
  modified_base 20: mod_base = OTHER; note = Uridine phosphorothiorate
  modified_base 25: mod_base = OTHER; note = 2'-fluorocytosine
  modified_base 26: mod_base = OTHER; note = 2'-fluoroadenosine
  modified_base 27: mod_base = OTHER; note = Uridine phosphorothiorate
  modified_base 33: mod_base = OTHER; note = 2'-fluorouridine
  modified_base 34: mod_base = OTHER; note = 2'-fluorouridine phosphorothiorate
  modified_base 38: mod_base = OTHER; note = 2'-fluoroadenosine
  modified_base 39: mod_base = OTHER; note = 2'-fluorouridine
  modified_base 41: mod_base = OTHER; note = 2'-fluorocytosine phosphorothiorate
  modified_base 42: mod_base = OTHER; note = 2'-Omethyladenosine
  modified_base 43: mod_base = OTHER; note = 2'-fluoroadenosine
  modified_base 45: mod_base = OTHER; note = Guanosine phosphorothiorate
  modified_base 46: mod_base = OTHER; note = 2'-fluoroguanosine
  modified_base 47: mod_base = OTHER; note = 2'-Omethyluridine
  modified_base 49: mod_base = OTHER; note = 2'-Omethylcytosine
  modified_base 50: mod_base = OTHER; note = 2'-Omethylcytosine
  modified_base 53: mod_base = OTHER; note = 2'-Omethylguanosine
  modified_base 54: mod_base = OTHER; note = 2'-Omethyluridine phosphorothiorate
  modified_base 62: mod_base = OTHER; note = 2'-fluorocytosine
  modified_base 63: mod_base = OTHER; note = 2'-Omethylcytosine
  modified_base 64: mod_base = OTHER; note = 2'-fluoroguanosine
  modified_base 66: mod_base = OTHER; note = 2'-Omethylcytosine
  modified_base 72: mod_base = OTHER; note = 2'-Omethylcytosine

SEQ ID NO: 7656 - RNA, 85 nt, synthetic construct; identical to SEQ ID NO: 3286
  source 1..85: mol_type = other RNA
  modified_base 1: mod_base = OTHER; note = 2'-Omethylcytosine phosphorothiorate
  modified_base 2: mod_base = OTHER; note = 2'-fluorocytosine phosphorothiorate
  modified_base 20: mod_base = OTHER; note = 2'-fluoroadenosine phosphorothiorate
  modified_base 26: mod_base = OTHER; note = 2'-fluorouridine
  modified_base 27: mod_base = OTHER; note = 2'-Omethyluridine phosphorothiorate
  modified_base 28: mod_base = OTHER; note = Guanosine phosphorothiorate
  modified_base 33: mod_base = OTHER; note = 2'-fluorouridine
  modified_base 44: mod_base = OTHER; note = 2'-Omethylguanosine
  modified_base 56: mod_base = OTHER; note = 2'-fluoroguanosine
  modified_base 57: mod_base = OTHER; note = 2'-fluorocytosine
  modified_base 58: mod_base = OTHER; note = 2'-Omethylguanosine
  modified_base 61: mod_base = OTHER; note = 2'-Omethylguanosine
  modified_base 71: mod_base = OTHER; note = Cytosine phosphorothiorate
  modified_base 73: mod_base = OTHER; note = 2'-fluoroadenosine phosphorothiorate
  modified_base 82: mod_base = OTHER; note = 2'-Omethyladenosine

SEQ ID NO: 7657 - DNA, 76 bp, synthetic construct; identical to SEQ ID NO: 1924
  source 1..76: mol_type = other DNA
  modified_base 1: mod_base = OTHER; note = 2'-Omethylguanosine phosphorothiorate
  modified_base 4: mod_base = OTHER; note = 2'-fluorouridine
  modified_base 10: mod_base = OTHER; note = Guanosine phosphorothiorate
  modified_base 11: mod_base = OTHER; note = 2'-O-(2-Methoxyethyl) 5-methylcytosine
  modified_base 15: mod_base = OTHER; note = Adenosine phosphorothiorate
  modified_base 16: mod_base = OTHER; note = 2'-fluorouridine
  modified_base 18: mod_base = OTHER; note = 2'-O-(2-Methoxyethyl) guanosine
  modified_base 20: mod_base = OTHER; note = Uridine phosphorothiorate
  modified_base 22: mod_base = OTHER; note = 2'-O-(2-Methoxyethyl) guanosine
  modified_base 24: mod_base = OTHER; note = 2'-fluoroguanosine
  modified_base 27: mod_base = OTHER; note = Uridine phosphorothiorate
  modified_base 28: mod_base = OTHER; note = Uridine phosphorothiorate
  modified_base 30: mod_base = OTHER; note = Guanosine phosphorothiorate
  modified_base 35: mod_base = OTHER; note = deoxycytosine phosphorothiorate
  modified_base 39: mod_base = OTHER; note = Uridine phosphorothiorate
  modified_base 43: mod_base = OTHER; note = 2'-O-(2-Methoxyethyl) adenosine phosphorothiorate
  modified_base 51: mod_base = OTHER; note = 2'-fluoroguanosine
  modified_base 52: mod_base = OTHER; note = 2'-O-(2-Methoxyethyl) guanosine
  modified_base 54: mod_base = OTHER; note = Uridine phosphorothiorate
  modified_base 58: mod_base = OTHER; note = Adenosine phosphorothiorate
  modified_base 59: mod_base = OTHER; note = 2'-O-(2-Methoxyethyl) guanosine phosphorothiorate
  modified_base 60: mod_base = OTHER; note = 2'-O-(2-Methoxyethyl) thymine
  modified_base 61: mod_base = OTHER; note = 2'-fluorocytosine phosphorothiorate
  modified_base 62: mod_base = OTHER; note = 2'-O-(2-Methoxyethyl) 5-methylcytosine
  modified_base 66: mod_base = OTHER; note = Cytosine phosphorothiorate
  modified_base 72: mod_base = OTHER; note = Cytosine phosphorothiorate
  misc_feature 1..28: note = RNA
  misc_feature 29: note = DNA
  misc_feature 30: note = RNA
  misc_feature 31: note = DNA
  misc_feature 32: note = RNA
  misc_feature 33: note = DNA
  misc_feature 34: note = RNA
  misc_feature 35: note = DNA
  misc_feature 36..45: note = RNA
  misc_feature 46: note = DNA
  misc_feature 47..55: note = RNA
  misc_feature 56: note = DNA
  misc_feature 57..66: note = RNA
  misc_feature 67: note = DNA
  misc_feature 68..76: note = RNA

SEQ ID NO: 7658 - RNA, 75 nt, synthetic construct; identical to SEQ ID NO: 3336
  source 1..75: mol_type = other RNA
  modified_base 20: mod_base = OTHER; note = 2'-fluoroadenosine
  modified_base 21: mod_base = OTHER; note = 2'-Omethylguanosine phosphorothiorate
  modified_base 27: mod_base = OTHER; note = Cytosine phosphorothiorate
  modified_base 29: mod_base = OTHER; note = 2'-fluoroguanosine phosphorothiorate
  modified_base 46: mod_base = OTHER; note = 2'-fluorouridine
  modified_base 47: mod_base = OTHER; note = 2'-fluorocytosine
  modified_base 55: mod_base = OTHER; note = 2'-Omethylcytosine phosphorothiorate
  modified_base 63: mod_base = OTHER; note = 2'-Omethyluridine phosphorothiorate
  modified_base 74: mod_base = OTHER; note = Cytosine phosphorothiorate

SEQ ID NO: 7659 - RNA, 85 nt, synthetic construct; identical to SEQ ID NO: 3317
  source 1..85: mol_type = other RNA
  modified_base 1: mod_base = OTHER; note = 2'-Omethylguanosine phosphorothiorate
  modified_base 2: mod_base = OTHER; note = 2'-Omethylcytosine phosphorothiorate
  modified_base 44: mod_base = OTHER; note = 2'-Omethyluridine phosphorothiorate
  modified_base 50: mod_base = OTHER; note = 2'-fluorocytosine
  modified_base 51: mod_base = OTHER; note = 2'-fluorouridine
  modified_base 62: mod_base = OTHER; note = Guanosine phosphorothiorate
  modified_base 79: mod_base = OTHER; note = 2'-fluoroadenosine
  modified_base 84: mod_base = OTHER; note = 2'-Omethylcytosine phosphorothiorate

SEQ ID NO: 7660 - RNA, 76 nt, synthetic construct; identical to SEQ ID NO: 625
  source 1..76: mol_type = other RNA
  modified_base 1: mod_base = OTHER; note = 2'-Omethylguanosine phosphorothiorate
  modified_base 2: mod_base = OTHER; note = 2'-Omethylguanosine
  modified_base 3: mod_base = OTHER; note = 2'-Omethylcytosine
  modified_base 4: mod_base = OTHER; note = 2'-Omethyluridine
  modified_base 5: mod_base = OTHER; note = 2'-Omethylcytosine
  modified_base 6: mod_base = OTHER; note = 2'-Omethylcytosine
  modified_base 16: mod_base = OTHER; note = 2'-Omethyluridine
  modified_base 17: mod_base = OTHER; note = 2'-Omethylguanosine
  modified_base 18: mod_base = OTHER; note = 2'-Omethylguanosine
  modified_base 49: mod_base = OTHER; note = 2'-Omethylcytosine
  modified_base 50: mod_base = OTHER; note = 2'-Omethylcytosine
  modified_base 51: mod_base = OTHER; note = 2'-Omethylguanosine
  modified_base 52: mod_base = OTHER; note = 2'-Omethylguanosine
  modified_base 53: mod_base = OTHER; note = 2'-Omethylguanosine
  modified_base 54: mod_base = OTHER; note = 2'-Omethyluridine phosphorothiorate
  modified_base 55: mod_base = OTHER; note = Uridine phosphorothiorate
  modified_base 56: mod_base = OTHER; note = 2'-Omethylcytosine
  modified_base 57: mod_base = OTHER; note = 2'-fluoroguanosine
  modified_base 59: mod_base = OTHER; note = 2'-Omethylguanosine
  modified_base 73: mod_base = OTHER; note = 2'-Omethylguanosine

SEQ ID NO: 7661 - RNA, 86 nt, synthetic construct; identical to SEQ ID NO: 3290
  source 1..86: mol_type = other RNA
  modified_base 79: mod_base = OTHER; note = 2'-fluorouridine

SEQ ID NO: 7662 - RNA, 86 nt, synthetic construct; identical to SEQ ID NO: 3290
  source 1..86: mol_type = other RNA
  modified_base 84: mod_base = OTHER; note = 2'-Omethylcytosine
  modified_base 85: mod_base = OTHER; note = 2'-Omethylcytosine

SEQ ID NO: 7663 - RNA, 85 nt, synthetic construct; identical to SEQ ID NO: 3301
  source 1..85: mol_type = other RNA
  modified_base 1: mod_base = OTHER; note = 2'-Omethylguanosine phosphorothiorate
  modified_base 2: mod_base = OTHER; note = 2'-Omethylcytosine phosphorothiorate
  modified_base 16: mod_base = OTHER; note = 2'-fluorouridine
  modified_base 17: mod_base = OTHER; note = 2'-Omethylguanosine phosphorothiorate
  modified_base 27: mod_base = OTHER; note = Uridine phosphorothiorate
  modified_base 34: mod_base = OTHER; note = 2'-Omethyluridine
  modified_base 36: mod_base = OTHER; note = 2'-fluoroadenosine phosphorothiorate
  modified_base 37: mod_base = OTHER; note = 2'-fluoroadenosine
  modified_base 42: mod_base = OTHER; note = 2'-Omethyladenosine
  modified_base 44: mod_base = OTHER; note = 2'-Omethyluridine
  modified_base 46: mod_base = OTHER; note = 2'-Omethylguanosine
  modified_base 50: mod_base = OTHER; note = 2'-fluorocytosine
  modified_base 51: mod_base = OTHER; note = 2'-Omethyluridine
  modified_base 53: mod_base = OTHER; note = 2'-Omethylcytosine phosphorothiorate
  modified_base 59: mod_base = OTHER; note = 2'-Omethylcytosine
  modified_base 60: mod_base = OTHER; note = Adenosine phosphorothiorate
  modified_base 72: mod_base = OTHER; note = 2'-fluorouridine
  modified_base 81: mod_base = OTHER; note = 2'-Omethylcytosine phosphorothiorate

SEQ ID NO: 7664 - RNA, 86 nt, synthetic construct; identical to SEQ ID NO: 3290
  source 1..86: mol_type = other RNA
  modified_base 53: mod_base = OTHER; note = 2'-Omethylguanosine

SEQ ID NO: 7665 - RNA, 74 nt, synthetic construct; identical to SEQ ID NO: 3293
  source 1..74: mol_type = other RNA
  modified_base 1: mod_base = OTHER; note = 2'-fluoroadenosine
  modified_base 2: mod_base = OTHER; note = Cytosine phosphorothiorate
  modified_base 3: mod_base = OTHER; note = Cytosine phosphorothiorate
  modified_base 4: mod_base = OTHER; note = Uridine phosphorothiorate
  modified_base 6: mod_base = OTHER; note = Guanosine phosphorothiorate
  modified_base 7: mod_base = OTHER; note = Uridine phosphorothiorate
  modified_base 8: mod_base = OTHER; note = 2'-fluoroguanosine
  modified_base 10: mod_base = OTHER; note = 2'-Omethylcytosine phosphorothiorate
  modified_base 11: mod_base = OTHER; note = 2'-fluoroguanosine
  modified_base 24: mod_base = OTHER; note = 2'-fluoroguanosine
  modified_base 25: mod_base = OTHER; note = 2'-fluorouridine phosphorothiorate
  modified_base 27: mod_base = OTHER; note = 2'-Omethyluridine
  modified_base 34: mod_base = OTHER; note = Adenosine phosphorothiorate
  modified_base 39: mod_base = OTHER; note = Adenosine phosphorothiorate
  modified_base 42: mod_base = OTHER; note = Adenosine phosphorothiorate
  modified_base 43: mod_base = OTHER; note = 2'-fluoroguanosine
  modified_base 48: mod_base = OTHER; note = 2'-fluorocytosine
  modified_base 50: mod_base = OTHER; note = Uridine phosphorothiorate
  modified_base 51: mod_base = OTHER; note = 2'-fluoroguanosine
  modified_base 62: mod_base = OTHER; note = Guanosine phosphorothiorate
  modified_base 73: mod_base = OTHER; note = 2'-Omethylcytosine phosphorothiorate

SEQ ID NO: 7666 - RNA, 76 nt, synthetic construct; identical to SEQ ID NO: 3615
  source 1..76: mol_type = other RNA
  modified_base 1: mod_base = OTHER; note = 2'-Omethylguanosine
  modified_base 13: mod_base = OTHER; note = 2'-Omethylcytosine
  modified_base 14: mod_base = OTHER; note = 2'-Omethyladenosine
  modified_base 15: mod_base = OTHER; note = 2'-Omethyladenosine
  modified_base 16: mod_base = OTHER; note = 2'-Omethyluridine
  modified_base 17: mod_base = OTHER; note = 2'-Omethylguanosine
  modified_base 18: mod_base = OTHER; note = 2'-Omethylguanosine
  modified_base 19: mod_base = OTHER; note = Adenosine phosphorothiorate
  modified_base 20: mod_base = OTHER; note = 2'-Omethyluridine
  modified_base 21: mod_base = OTHER; note = Adenosine phosphorothiorate
  modified_base 25: mod_base = OTHER; note = 2'-Omethylcytosine
  modified_base 41: mod_base = OTHER; note = 2'-fluorocytosine
  modified_base 42: mod_base = OTHER; note = 2'-Omethyladenosine
  modified_base 43: mod_base = OTHER; note = 2'-Omethyladenosine
  modified_base 44: mod_base = OTHER; note = 2'-fluoroguanosine
  modified_base 49: mod_base = OTHER; note = 2'-Omethylcytosine
  modified_base 50: mod_base = OTHER; note = 2'-Omethylcytosine
  modified_base 51: mod_base = OTHER; note = 2'-Omethylguanosine
  modified_base 52: mod_base = OTHER; note = 2'-Omethylguanosine
  modified_base 53: mod_base = OTHER; note = 2'-Omethylguanosine
  modified_base 54: mod_base = OTHER; note = Uridine phosphorothiorate
  modified_base 55: mod_base = OTHER; note = Uridine phosphorothiorate
  modified_base 61: mod_base = OTHER; note = 2'-Omethylcytosine
  modified_base 65: mod_base = OTHER; note = 2'-Omethylguanosine
  modified_base 73: mod_base = OTHER; note = 2'-Omethylguanosine

SEQ ID NO: 7667 - RNA, 76 nt, synthetic construct; identical to SEQ ID NO: 625
  source 1..76: mol_type = other RNA
  modified_base 1: mod_base = OTHER; note = 2'-Omethylguanosine phosphorothiorate
  modified_base 2: mod_base = OTHER; note = 2'-Omethylguanosine phosphorothiorate
  modified_base 3: mod_base = OTHER; note = 2'-Omethylcytosine phosphorothiorate
  modified_base 4: mod_base = OTHER; note = 2'-Omethyluridine phosphorothiorate
  modified_base 5: mod_base = OTHER; note = 2'-Omethylcytosine phosphorothiorate
  modified_base 6: mod_base = OTHER; note = 2'-Omethylcytosine phosphorothiorate

SEQ ID NO: 7668 - RNA, 76 nt, synthetic construct; identical to SEQ ID NO: 625
  source 1..76: mol_type = other RNA
  modified_base 1: mod_base = OTHER; note = 2'-Omethylguanosine phosphorothiorate
  modified_base 2: mod_base = OTHER; note = 2'-Omethylguanosine
  modified_base 33: mod_base = OTHER; note = 2'-fluorouridine
  modified_base 35: mod_base = OTHER; note = Cytosine phosphorothiorate
  modified_base 37: mod_base = OTHER; note = Adenosine phosphorothiorate
  modified_base 38: mod_base = OTHER; note = Adenosine phosphorothiorate
  modified_base 52: mod_base = OTHER; note = 2'-Omethylguanosine
  modified_base 56: mod_base = OTHER; note = 2'-Omethylcytosine
  modified_base 57: mod_base = OTHER; note = 2'-fluoroguanosine
  modified_base 62: mod_base = OTHER; note = 2'-Omethylcytosine
  modified_base 63: mod_base = OTHER; note = 2'-fluorocytosine
  modified_base 73: mod_base = OTHER; note = 2'-Omethylguanosine
  modified_base 75: mod_base = OTHER; note = 2'-fluorocytosine phosphorothiorate

SEQ ID NO: 7669 - RNA, 76 nt, synthetic construct; identical to SEQ ID NO: 625
  source 1..76: mol_type = other RNA
  modified_base 1: mod_base = OTHER; note = 2'-Omethylguanosine phosphorothiorate
  modified_base 2: mod_base = OTHER; note = 2'-Omethylguanosine phosphorothiorate
  modified_base 3: mod_base = OTHER; note = 2'-Omethylcytosine
  modified_base 4: mod_base = OTHER; note = 2'-Omethyluridine
  modified_base 5: mod_base = OTHER; note = 2'-Omethylcytosine
  modified_base 6: mod_base = OTHER; note = 2'-Omethylcytosine
  modified_base 16: mod_base = OTHER; note = 2'-Omethyluridine
  modified_base 17: mod_base = OTHER; note = 2'-Omethylguanosine
  modified_base 18: mod_base = OTHER; note = 2'-Omethylguanosine
  modified_base 20: mod_base = OTHER; note = 2'-Omethyluridine
  modified_base 25: mod_base = OTHER; note = 2'-Omethylcytosine
  modified_base 33: mod_base = OTHER; note = 2'-fluorouridine
  modified_base 35: mod_base = OTHER; note = Cytosine phosphorothiorate
  modified_base 37: mod_base = OTHER; note = Adenosine phosphorothiorate
  modified_base 38: mod_base = OTHER; note = Adenosine phosphorothiorate
  modified_base 41: mod_base = OTHER; note = 2'-Omethylcytosine
  modified_base 42: mod_base = OTHER; note = 2'-Omethyladenosine
  modified_base 43: mod_base = OTHER; note = 2'-Omethyladenosine
  modified_base 44: mod_base = OTHER; note = 2'-Omethyladenosine
  modified_base 49: mod_base = OTHER; note = 2'-Omethylcytosine
  modified_base 50: mod_base = OTHER; note = 2'-Omethylcytosine
  modified_base 52: mod_base = OTHER; note = 2'-Omethylguanosine
  modified_base 54: mod_base = OTHER; note = Uridine phosphorothiorate
  modified_base 55: mod_base = OTHER; note = Uridine phosphorothiorate
  modified_base 61: mod_base = OTHER; note = 2'-Omethylcytosine
  modified_base 65: mod_base = OTHER; note = 2'-Omethylguanosine
  modified_base 73: mod_base = OTHER; note = 2'-Omethylguanosine

SEQ ID NO: 7670 - RNA, 76 nt, synthetic construct; identical to SEQ ID NO: 625
  source 1..76: mol_type = other RNA
  modified_base 4: mod_base = OTHER; note = Thymine
  modified_base 8: mod_base = OTHER; note = Thymine
  modified_base 16: mod_base = OTHER; note = Thymine
  modified_base 20: mod_base = OTHER; note = Thymine
  modified_base 27: mod_base = OTHER; note = Thymine
  modified_base 28: mod_base = OTHER; note = Thymine
  modified_base 39: mod_base = OTHER; note = Thymine
  modified_base 40: mod_base = OTHER; note = Thymine
  modified_base 47: mod_base = OTHER; note = Thymine
  modified_base 48: mod_base = OTHER; note = Thymine
  modified_base 71: mod_base = OTHER; note = Thymine

SEQ ID NO: 7671 - RNA, 76 nt, synthetic construct; identical to SEQ ID NO: 625
  source 1..76: mol_type = other RNA
  modified_base 2: mod_base = OTHER; note = 2'-Omethylguanosine
  modified_base 3: mod_base = OTHER; note = 2'-fluorocytosine
  modified_base 4: mod_base = OTHER; note = Uridine phosphorothiorate
  modified_base 5: mod_base = OTHER; note = 2'-fluorocytosine
  modified_base 10: mod_base = OTHER; note = 2'-fluoroguanosine
  modified_base 13: mod_base = OTHER; note = Cytosine phosphorothiorate
  modified_base 14: mod_base = OTHER; note = 2'-fluoroadenosine
  modified_base 15: mod_base = OTHER; note = 2'-fluoroadenosine
  modified_base 16: mod_base = OTHER; note = Uridine phosphorothiorate
  modified_base 20: mod_base = OTHER; note = 2'-fluorouridine
  modified_base 23: mod_base = OTHER; note = 2'-Omethylcytosine phosphorothiorate
  modified_base 24: mod_base = OTHER; note = 2'-Omethylguanosine
  modified_base 26: mod_base = OTHER; note = 2'-fluoroadenosine
  modified_base 27: mod_base = OTHER; note = 2'-Omethyluridine phosphorothiorate
  modified_base 28: mod_base = OTHER; note = 2'-fluorouridine
  modified_base 29: mod_base = OTHER; note = 2'-Omethylguanosine
  modified_base 32: mod_base = OTHER; note = 2'-fluorocytosine
  modified_base 33: mod_base = OTHER; note = 2'-fluorouridine
  modified_base 39: mod_base = OTHER; note = Uridine phosphorothiorate
  modified_base 40: mod_base = OTHER; note = 2'-Omethyluridine
  modified_base 46: mod_base = OTHER; note = 2'-Omethylguanosine
  modified_base 47: mod_base = OTHER; note = 2'-Omethyluridine phosphorothiorate
  modified_base 48: mod_base = OTHER; note = 2'-Omethyluridine phosphorothiorate
  modified_base 49: mod_base = OTHER; note = 2'-Omethylcytosine
  modified_base 50: mod_base = OTHER; note = 2'-Omethylcytosine
  modified_base 52: mod_base = OTHER; note = 2'-Omethylguanosine
  modified_base 54: mod_base = OTHER; note = 2'-Omethyluridine
  modified_base 56: mod_base = OTHER; note = 2'-fluorocytosine
  modified_base 58: mod_base = OTHER; note = 2'-fluoroadenosine
  modified_base 61: mod_base = OTHER; note = 2'-fluorocytosine
  modified_base 63: mod_base = OTHER; note = 2'-Omethylcytosine
  modified_base 67: mod_base = OTHER; note = 2'-fluoroguanosine
  modified_base 73: mod_base = OTHER; note = 2'-Omethylguanosine

SEQ ID NO: 7672 - RNA, 76 nt, synthetic construct; identical to SEQ ID NO: 625
  source 1..76: mol_type = other RNA
  modified_base 1: mod_base = OTHER; note = 2'-Omethylguanosine
  modified_base 2: mod_base = OTHER; note = 2'-Omethylguanosine
  modified_base 3: mod_base = OTHER; note = 2'-Omethylcytosine
  modified_base 4: mod_base = OTHER; note = 2'-Omethyluridine
  modified_base 5: mod_base = OTHER; note = 2'-Omethylcytosine
  modified_base 6: mod_base = OTHER; note = 2'-Omethylcytosine
  modified_base 10: mod_base = OTHER; note = 2'-Omethylguanosine
  modified_base 11: mod_base = OTHER; note = 2'-Omethylcytosine
  modified_base 12: mod_base = OTHER; note = 2'-Omethylguanosine
  modified_base 13: mod_base = OTHER; note = 2'-Omethylcytosine
  modified_base 14: mod_base = OTHER; note = 2'-Omethyladenosine
  modified_base 15: mod_base = OTHER; note = 2'-fluoroadenosine
  modified_base 16: mod_base = OTHER; note = 2'-Omethyluridine
  modified_base 17: mod_base = OTHER; note = 2'-Omethylguanosine
  modified_base 18: mod_base = OTHER; note = 2'-Omethylguanosine
  modified_base 19: mod_base = OTHER; note = 2'-fluoroadenosine
  modified_base 20: mod_base = OTHER; note = 2'-Omethyluridine
  modified_base 21: mod_base = OTHER; note = 2'-fluoroadenosine
  modified_base 22: mod_base = OTHER; note = 2'-Omethylguanosine
  modified_base 23: mod_base = OTHER; note = 2'-Omethylcytosine
  modified_base 24: mod_base = OTHER; note = 2'-Omethylguanosine
  modified_base 25: mod_base = OTHER; note = 2'-Omethylcytosine
  modified_base 38: mod_base = OTHER; note = Adenosine phosphorothiorate
  modified_base 39: mod_base = OTHER; note = Uridine phosphorothiorate
  modified_base 40: mod_base = OTHER; note = 2'-fluorouridine
  modified_base 43: mod_base = OTHER; note = 2'-Omethyladenosine
  modified_base 44: mod_base = OTHER; note = 2'-Omethyladenosine
  modified_base 45: mod_base = OTHER; note = 2'-Omethylguanosine
  modified_base 46: mod_base = OTHER; note = 2'-fluoroguanosine
  modified_base 48: mod_base = OTHER; note = 2'-fluorouridine
  modified_base 49: mod_base = OTHER; note = 2'-Omethylcytosine
  modified_base 50: mod_base = OTHER; note = 2'-Omethylcytosine
  modified_base 54: mod_base = OTHER; note = Uridine phosphorothiorate
  modified_base 55: mod_base = OTHER; note = Uridine phosphorothiorate
  modified_base 56: mod_base = OTHER; note = 2'-Omethylcytosine
  modified_base 57: mod_base = OTHER; note = Guanosine phosphorothiorate
  modified_base 61: mod_base = OTHER; note = 2'-Omethylcytosine
  modified_base 62: mod_base = OTHER; note = 2'-Omethylcytosine
  modified_base 63: mod_base = OTHER; note = 2'-fluorocytosine
  modified_base 64: mod_base = OTHER; note = 2'-Omethylguanosine
  modified_base 65: mod_base = OTHER; note = 2'-Omethylguanosine
  modified_base 66: mod_base = OTHER; note = 2'-Omethylcytosine
  modified_base 67: mod_base = OTHER; note = 2'-Omethylguanosine
  modified_base 68: mod_base = OTHER; note = 2'-Omethylguanosine
  modified_base 69: mod_base = OTHER; note = 2'-fluoroadenosine
  modified_base 70: mod_base = OTHER; note = 2'-fluoroguanosine

SEQ ID NO: 7673 - RNA, 75 nt, synthetic construct; identical to SEQ ID NO: 3306
  source 1..75: mol_type = other RNA
  modified_base 1: mod_base = OTHER; note = 2'-Omethylguanosine
  modified_base 2: mod_base = OTHER; note = 2'-Omethyladenosine
  modified_base 3: mod_base = OTHER; note = 2'-Omethylcytosine
  modified_base 4: mod_base = OTHER; note = 2'-Omethylcytosine
  modified_base 5: mod_base = OTHER; note = 2'-Omethyluridine
  modified_base 6: mod_base = OTHER; note = 2'-Omethylcytosine
  modified_base 13: mod_base = OTHER; note = 2'-Omethylcytosine
  modified_base 14: mod_base = OTHER; note = 2'-Omethyladenosine
  modified_base 15: mod_base = OTHER; note = 2'-Omethyladenosine
  modified_base 16: mod_base = OTHER; note = 2'-Omethylcytosine
  modified_base 17: mod_base = OTHER; note = 2'-Omethylguanosine
  modified_base 18: mod_base = OTHER; note = 2'-Omethylguanosine
  modified_base 19: mod_base = OTHER; note = Uridine phosphorothiorate
  modified_base 20: mod_base = OTHER; note = Adenosine phosphorothiorate
  modified_base 24: mod_base = OTHER; note = 2'-Omethylcytosine
  modified_base 32: mod_base = OTHER; note = Uridine phosphorothiorate
  modified_base 33: mod_base = OTHER; note = 2'-Omethylcytosine
  modified_base 34: mod_base = OTHER; note = Uridine phosphorothiorate
  modified_base 36: mod_base = OTHER; note = Guanosine phosphorothiorate
  modified_base 37: mod_base = OTHER; note = Adenosine phosphorothiorate
  modified_base 48: mod_base = OTHER; note = 2'-Omethylguanosine
  modified_base 49: mod_base = OTHER; note = 2'-Omethylcytosine
  modified_base 51: mod_base = OTHER; note = 2'-Omethyluridine
  modified_base 53: mod_base = OTHER; note = Uridine phosphorothiorate
  modified_base 54: mod_base = OTHER; note = Uridine phosphorothiorate
  modified_base 60: mod_base = OTHER; note = 2'-Omethylcytosine
  modified_base 64: mod_base = OTHER; note = 2'-Omethyluridine
  modified_base 72: mod_base = OTHER; note = 2'-Omethyladenosine

SEQ ID NO: 7674 - RNA, 76 nt, synthetic construct; identical to SEQ ID NO: 625
  source 1..76: mol_type = other RNA
  modified_base 1: mod_base = OTHER; note = 2'-Omethylguanosine
  modified_base 2: mod_base = OTHER; note = 2'-Omethylguanosine
  modified_base 3: mod_base = OTHER; note = 2'-Omethylcytosine
  modified_base 4: mod_base = OTHER; note = 2'-Omethyluridine
  modified_base 5: mod_base = OTHER; note = 2'-Omethylcytosine
  modified_base 6: mod_base = OTHER; note = 2'-Omethylcytosine
  modified_base 10: mod_base = OTHER; note = 2'-Omethylguanosine
  modified_base 11: mod_base = OTHER; note = 2'-Omethylcytosine
  modified_base 12: mod_base = OTHER; note = Guanosine phosphorothiorate
  modified_base 13: mod_base = OTHER; note = 2'-Omethylcytosine
  modified_base 14: mod_base = OTHER; note = 2'-Omethyladenosine
  modified_base 15: mod_base = OTHER; note = 2'-fluoroadenosine
  modified_base 16: mod_base = OTHER; note = 2'-Omethyluridine
  modified_base 17: mod_base = OTHER; note = 2'-Omethylguanosine
  modified_base 18: mod_base = OTHER; note = 2'-Omethylguanosine
  modified_base 19: mod_base = OTHER; note = 2'-fluoroadenosine
  modified_base 20: mod_base = OTHER; note = 2'-Omethyluridine
  modified_base 21: mod_base = OTHER; note = 2'-fluoroadenosine
  modified_base 22: mod_base = OTHER; note = 2'-Omethylguanosine
  modified_base 23: mod_base = OTHER; note = 2'-Omethylcytosine
  modified_base 24: mod_base = OTHER; note = 2'-Omethylguanosine
  modified_base 25: mod_base = OTHER; note = Cytosine phosphorothiorate
  modified_base 33: mod_base = OTHER; note = 2'-fluorouridine
  modified_base 35: mod_base = OTHER; note = Cytosine phosphorothiorate
  modified_base 37: mod_base = OTHER; note = Adenosine phosphorothiorate
  modified_base 38: mod_base = OTHER; note = Adenosine phosphorothiorate
  modified_base 44: mod_base = OTHER; note = Adenosine phosphorothiorate
  modified_base 45: mod_base = OTHER; note = 2'-O-(2-Methoxyethyl) guanosine
  modified_base 51: mod_base = OTHER; note = Guanosine phosphorothiorate
  modified_base 52: mod_base = OTHER; note = 2'-Omethylguanosine
  modified_base 53: mod_base = OTHER; note = 2'-Omethylguanosine
  modified_base 54: mod_base = OTHER; note = 2'-Omethyluridine phosphorothiorate
  modified_base 55: mod_base = OTHER; note = Uridine phosphorothiorate
  modified_base 56: mod_base = OTHER; note = 2'-Omethylcytosine
  modified_base 57: mod_base = OTHER; note = 2'-fluoroguanosine
  modified_base 59: mod_base = OTHER; note = 2'-Omethylguanosine
  modified_base 62: mod_base = OTHER; note = 2'-Omethylcytosine
  modified_base 63: mod_base = OTHER; note = 2'-fluorocytosine
  modified_base 65: mod_base = OTHER; note = 2'-Omethylguanosine
  modified_base 73: mod_base = OTHER; note = 2'-Omethylguanosine
  modified_base 75: mod_base = OTHER; note = 2'-fluorocytosine phosphorothiorate

SEQ ID NO: 7675 - RNA, 73 nt, synthetic construct; identical to SEQ ID NO: 935
  source 1..73: mol_type = other RNA
  modified_base 1: mod_base = OTHER; note = 2'-Omethylguanosine phosphorothiorate
  modified_base 2: mod_base = OTHER; note = 2'-Omethylguanosine phosphorothiorate
  modified_base 16: mod_base = OTHER; note = 2'-O-(2-Methoxyethyl) thymine
  modified_base 54: mod_base = OTHER; note = 2'-fluorouridine
  modified_base 73: mod_base = OTHER; note = 2'-Omethylguanosine

SEQ ID NO: 7676 - RNA, 76 nt, synthetic construct; identical to SEQ ID NO: 625
  source 1..76: mol_type = other RNA
  modified_base 1: mod_base = OTHER; note = 2'-Omethylguanosine phosphorothiorate
  modified_base 2: mod_base = OTHER; note = 2'-Omethylguanosine
  modified_base 3: mod_base = OTHER; note = 2'-Omethylcytosine
  modified_base 4: mod_base = OTHER; note = 2'-Omethyluridine
  modified_base 5: mod_base = OTHER; note = 2'-Omethylcytosine
  modified_base 6: mod_base = OTHER; note = 2'-Omethylcytosine
  modified_base 10: mod_base = OTHER; note = 2'-Omethylguanosine
  modified_base 11: mod_base = OTHER; note = 2'-Omethylcytosine
  modified_base 12: mod_base = OTHER; note = 2'-Omethylguanosine
  modified_base 13: mod_base = OTHER; note = 2'-Omethylcytosine
  modified_base 17: mod_base = OTHER; note = 2'-Omethylguanosine
  modified_base 18: mod_base = OTHER; note = 2'-Omethylguanosine
  modified_base 19: mod_base = OTHER; note = Adenosine phosphorothiorate
  modified_base 20: mod_base = OTHER; note = 2'-Omethyluridine
  modified_base 22: mod_base = OTHER; note = 2'-Omethylguanosine
  modified_base 23: mod_base = OTHER; note = 2'-Omethylcytosine
  modified_base 24: mod_base = OTHER; note = 2'-Omethylguanosine
  modified_base 25: mod_base = OTHER; note = 2'-Omethylcytosine
  modified_base 29: mod_base = OTHER; note = 2'-Omethylguanosine
  modified_base 33: mod_base = OTHER; note = 2'-fluorouridine
  modified_base 35: mod_base = OTHER; note = Cytosine phosphorothiorate
  modified_base 37: mod_base = OTHER; note = Adenosine phosphorothiorate
  modified_base 38: mod_base = OTHER; note = Adenosine phosphorothiorate
  modified_base 40: mod_base = OTHER; note = 2'-fluorouridine
  modified_base 41: mod_base = OTHER; note = 2'-Omethylcytosine
  modified_base 42: mod_base = OTHER; note = 2'-Omethyladenosine
  modified_base 43: mod_base = OTHER; note = 2'-Omethyladenosine
  modified_base 44: mod_base = OTHER; note = 2'-fluoroadenosine
  modified_base 46: mod_base = OTHER; note = Guanosine phosphorothiorate
  modified_base 49: mod_base = OTHER; note = 2'-Omethylcytosine
  modified_base 50: mod_base = OTHER; note = 2'-Omethylcytosine
  modified_base 51: mod_base = OTHER; note = 2'-Omethylguanosine
  modified_base 52: mod_base = OTHER; note = 2'-Omethylguanosine
  modified_base 53: mod_base = OTHER; note = 2'-Omethylguanosine
  modified_base 54: mod_base = OTHER; note = Uridine phosphorothiorate
  modified_base 55: mod_base = OTHER; note = Uridine phosphorothiorate
  modified_base 56: mod_base = OTHER; note = 2'-Omethylcytosine
  modified_base 57: mod_base = OTHER; note = 2'-Omethylguanosine
  modified_base 61: mod_base = OTHER; note = 2'-Omethylcytosine
  modified_base 62: mod_base = OTHER; note = 2'-Omethylcytosine
  modified_base 63: mod_base = OTHER; note = 2'-fluorocytosine
  modified_base 64: mod_base = OTHER; note = 2'-Omethylguanosine
  modified_base 65: mod_base = OTHER; note = 2'-Omethylguanosine
  modified_base 66: mod_base = OTHER; note = 2'-Omethylcytosine
  modified_base 67: mod_base = OTHER; note = 2'-Omethylguanosine
  modified_base 68: mod_base = OTHER; note = 2'-Omethylguanosine
  modified_base 69: mod_base = OTHER; note = 2'-fluoroadenosine
  modified_base 70: mod_base = OTHER; note = 2'-fluoroguanosine
  modified_base 71: mod_base = OTHER; note = 2'-Omethyluridine
  modified_base 73: mod_base = OTHER; note = 2'-Omethylguanosine
  modified_base 74: mod_base = OTHER; note = Cytosine phosphorothiorate
  modified_base 75: mod_base = OTHER; note = 2'-Omethylcytosine

SEQ ID NO: 7677 - RNA, 76 nt, synthetic construct; identical to SEQ ID NO: 625
  source 1..76: mol_type = other RNA
  modified_base 1: mod_base = OTHER; note = Guanosine phosphorothiorate
  modified_base 4: mod_base = OTHER; note = 2'-fluorouridine
  modified_base 6: mod_base = OTHER; note = 2'-Omethylcytosine
  modified_base 11: mod_base = OTHER; note = 2'-fluorocytosine
  modified_base 12: mod_base = OTHER; note = 2'-Omethylguanosine phosphorothiorate
  modified_base 13: mod_base = OTHER; note = 2'-Omethylcytosine
  modified_base 15: mod_base = OTHER; note = 2'-Omethyladenosine
  modified_base 18: mod_base = OTHER; note = 2'-Omethylguanosine
  modified_base 20: mod_base = OTHER; note = 2'-Omethyluridine
  modified_base 22: mod_base = OTHER; note = 2'-Omethylguanosine
  modified_base 23: mod_base = OTHER; note = 2'-Omethylcytosine
  modified_base 25: mod_base = OTHER; note = 2'-Omethylcytosine
  modified_base 28: mod_base = OTHER; note = 2'-fluorouridine
  modified_base 31: mod_base = OTHER; note = 2'-fluoroadenosine
  modified_base 32: mod_base = OTHER; note = 2'-fluorocytosine
  modified_base 34: mod_base = OTHER; note = 2'-Omethyluridine phosphorothiorate
  modified_base 40: mod_base = OTHER; note = 2'-fluorouridine
  modified_base 41: mod_base = OTHER; note = 2'-Omethylcytosine
  modified_base 42: mod_base = OTHER; note = 2'-fluoroadenosine
  modified_base 43: mod_base = OTHER; note = 2'-fluoroadenosine
  modified_base 44: mod_base = OTHER; note = Adenosine phosphorothiorate
  modified_base 45: mod_base = OTHER; note = 2'-fluoroguanosine phosphorothiorate
  modified_base 46: mod_base = OTHER; note = 2'-fluoroguanosine phosphorothiorate
  modified_base 47: mod_base = OTHER; note = 2'-Omethyluridine
  modified_base 48: mod_base = OTHER; note = 2'-Omethyluridine
  modified_base 49: mod_base = OTHER; note = Cytosine phosphorothiorate
  modified_base 50: mod_base = OTHER; note = 2'-fluorocytosine
  modified_base 51: mod_base = OTHER; note = 2'-Omethylguanosine
  modified_base 52: mod_base = OTHER; note = Guanosine phosphorothiorate
  modified_base 53: mod_base = OTHER; note = 2'-fluoroguanosine
  modified_base 56: mod_base = OTHER; note = 2'-fluorocytosine
  modified_base 58: mod_base = OTHER; note = Adenosine phosphorothiorate
  modified_base 59: mod_base = OTHER; note = 2'-Omethylguanosine
  modified_base 62: mod_base = OTHER; note = 2'-fluorocytosine
  modified_base 64: mod_base = OTHER; note = 2'-fluoroguanosine
  modified_base 65: mod_base = OTHER; note = Guanosine phosphorothiorate
  modified_base 67: mod_base = OTHER; note = 2'-Omethylguanosine
  modified_base 72: mod_base = OTHER; note = 2'-fluorocytosine phosphorothiorate
  modified_base 73: mod_base = OTHER; note = 2'-fluoroguanosine
  modified_base 76: mod_base = OTHER; note = 2'-Omethyladenosine

SEQ ID NO: 7678 - RNA, 85 nt, synthetic construct; identical to SEQ ID NO: 3297
  source 1..85: mol_type = other RNA
  modified_base 1: mod_base = OTHER; note = 2'-Omethylguanosine phosphorothiorate
  modified_base 15: mod_base = OTHER; note = 2'-Omethylguanosine
  modified_base 35: mod_base = OTHER; note = 2'-fluorocytosine
  modified_base 42: mod_base = OTHER; note = Adenosine phosphorothiorate
  modified_base 57: mod_base = OTHER; note = 2'-Omethylcytosine phosphorothiorate
  modified_base 60: mod_base = OTHER; note = 2'-fluoroadenosine
  modified_base 82: mod_base = OTHER; note = 2'-Omethylguanosine

SEQ ID NO: 7679 - RNA, 76 nt, synthetic construct; identical to SEQ ID NO: 625
  source 1..76: mol_type = other RNA
  modified_base 1: mod_base = OTHER; note = Guanosine phosphorothiorate
  modified_base 2: mod_base = OTHER; note = 2'-fluoroguanosine phosphorothiorate
  modified_base 3: mod_base = OTHER; note = 2'-Omethylcytosine
  modified_base 4: mod_base = OTHER; note = 2'-fluorouridine phosphorothiorate
  modified_base 5: mod_base = OTHER; note = 2'-fluorocytosine
  modified_base 6: mod_base = OTHER; note = 2'-fluorocytosine
  modified_base 10: mod_base = OTHER; note = Guanosine phosphorothiorate
  modified_base 11: mod_base = OTHER; note = 2'-fluorocytosine phosphorothiorate
  modified_base 13: mod_base = OTHER; note = 2'-fluorocytosine
  modified_base 16: mod_base = OTHER; note = 2'-Omethyluridine
  modified_base 20: mod_base = OTHER; note = 2'-Omethyluridine
  modified_base 21: mod_base = OTHER; note = Adenosine phosphorothiorate
  modified_base 22: mod_base = OTHER; note = 2'-Omethylguanosine
  modified_base 24: mod_base = OTHER; note = 2'-fluoroguanosine
  modified_base 25: mod_base = OTHER; note = 2'-fluorocytosine
  modified_base 27: mod_base = OTHER; note = 2'-Omethyluridine
  modified_base 29: mod_base = OTHER; note = 2'-fluoroguanosine phosphorothiorate
  modified_base 30: mod_base = OTHER; note = Guanosine phosphorothiorate
  modified_base 31: mod_base = OTHER; note = 2'-Omethyladenosine
  modified_base 32: mod_base = OTHER; note = 2'-fluorocytosine
  modified_base 33: mod_base = OTHER; note = 2'-fluorouridine phosphorothiorate
  modified_base 36: mod_base = OTHER; note = Adenosine phosphorothiorate
  modified_base 38: mod_base = OTHER; note = 2'-fluoroadenosine
  modified_base 41: mod_base = OTHER; note = 2'-fluorocytosine
  modified_base 43: mod_base = OTHER; note = Adenosine phosphorothiorate
  modified_base 44: mod_base = OTHER; note = 2'-Omethyladenosine
  modified_base 45: mod_base = OTHER; note = 2'-Omethylguanosine
  modified_base 47: mod_base = OTHER; note = 2'-Omethyluridine
  modified_base 55: mod_base = OTHER; note = Uridine phosphorothiorate
  modified_base 56: mod_base = OTHER; note = 2'-fluorocytosine
  modified_base 59: mod_base = OTHER; note = 2'-Omethylguanosine phosphorothiorate
  modified_base 60: mod_base = OTHER; note = 2'-fluorouridine
  modified_base 66: mod_base = OTHER; note = 2'-Omethylcytosine
  modified_base 67: mod_base = OTHER; note = Guanosine phosphorothiorate
  modified_base 70: mod_base = OTHER; note = Guanosine phosphorothiorate
  modified_base 71: mod_base = OTHER; note = 2'-fluorouridine
  modified_base 72: mod_base = OTHER; note = 2'-Omethylcytosine
  modified_base 76: mod_base = OTHER; note = 2'-Omethyladenosine

SEQ ID NO: 7680 - RNA, 76 nt, synthetic construct; identical to SEQ ID NO: 625
  source 1..76: mol_type = other RNA
  modified_base 1: mod_base = OTHER; note = 2'-fluoroguanosine
  modified_base 2: mod_base = OTHER; note = Guanosine phosphorothiorate
  modified_base 4: mod_base = OTHER; note = 2'-fluorouridine
  modified_base 5: mod_base = OTHER; note = Cytosine phosphorothiorate
  modified_base 12: mod_base = OTHER; note = 2'-Omethylguanosine
  modified_base 15: mod_base = OTHER; note = 2'-fluoroadenosine
  modified_base 16: mod_base = OTHER; note = 2'-fluorouridine
  modified_base 18: mod_base = OTHER; note = 2'-Omethylguanosine phosphorothiorate
  modified_base 24: mod_base = OTHER; note = Guanosine phosphorothiorate
  modified_base 25: mod_base = OTHER; note = 2'-fluorocytosine
  modified_base 28: mod_base = OTHER; note = 2'-fluorouridine phosphorothiorate
  modified_base 31: mod_base = OTHER; note = 2'-fluoroadenosine
  modified_base 40: mod_base = OTHER; note = Uridine phosphorothiorate
  modified_base 43: mod_base = OTHER; note = 2'-Omethyladenosine
  modified_base 44: mod_base = OTHER; note = Adenosine phosphorothiorate
  modified_base 48: mod_base = OTHER; note = 2'-fluorouridine
  modified_base 49: mod_base = OTHER; note = 2'-Omethylcytosine phosphorothiorate
  modified_base 50: mod_base = OTHER; note = 2'-fluorocytosine
  modified_base 54: mod_base = OTHER; note = Uridine phosphorothiorate
  modified_base 55: mod_base = OTHER; note = Uridine phosphorothiorate
  modified_base 56: mod_base = OTHER; note = 2'-fluorocytosine phosphorothiorate
  modified_base 57: mod_base = OTHER; note = 2'-fluoroguanosine
  modified_base 58: mod_base = OTHER; note = 2'-fluoroadenosine
  modified_base 60: mod_base = OTHER; note = 2'-fluorouridine
  modified_base 61: mod_base = OTHER; note = Cytosine phosphorothiorate
  modified_base 65: mod_base = OTHER; note = Guanosine phosphorothiorate
  modified_base 66: mod_base = OTHER; note = 2'-fluorocytosine phosphorothiorate
  modified_base 69: mod_base = OTHER; note = 2'-fluoroadenosine
  modified_base 71: mod_base = OTHER; note = 2'-fluorouridine
  modified_base 72: mod_base = OTHER; note = 2'-Omethylcytosine
  modified_base 73: mod_base = OTHER; note = 2'-Omethylguanosine
  modified_base 75: mod_base = OTHER; note = 2'-fluorocytosine

SEQ ID NO: 7681 - RNA, 76 nt, synthetic construct; identical to SEQ ID NO: 625
  source 1..76: mol_type = other RNA
  modified_base 1: mod_base = OTHER; note = Guanosine phosphorothiorate
  modified_base 2: mod_base = OTHER; note = 2'-fluoroguanosine
  modified_base 3: mod_base = OTHER; note = Cytosine phosphorothiorate
  modified_base 6: mod_base = OTHER; note = 2'-Omethylcytosine phosphorothiorate
  modified_base 8: mod_base = OTHER; note = Uridine phosphorothiorate
  modified_base 10: mod_base = OTHER; note = 2'-fluoroguanosine
  modified_base 13: mod_base = OTHER; note = Cytosine phosphorothiorate
  modified_base 14: mod_base = OTHER; note = 2'-Omethyladenosine
  modified_base 15: mod_base = OTHER; note = Adenosine phosphorothiorate
  modified_base 16: mod_base = OTHER; note = 2'-fluorouridine
  modified_base 17: mod_base = OTHER; note = Guanosine phosphorothiorate
  modified_base 18: mod_base = OTHER; note = 2'-fluoroguanosine
  modified_base 20: mod_base = OTHER; note = 2'-Omethyluridine
  modified_base 24: mod_base = OTHER; note = Guanosine phosphorothiorate
  modified_base 26: mod_base = OTHER; note = 2'-Omethyladenosine
  modified_base 32: mod_base = OTHER; note = 2'-fluorocytosine
  modified_base 38: mod_base = OTHER; note = Adenosine phosphorothiorate
  modified_base 39: mod_base = OTHER; note = 2'-fluorouridine
  modified_base 41: mod_base = OTHER; note = Cytosine phosphorothiorate
  modified_base 42: mod_base = OTHER; note = 2'-Omethyladenosine
  modified_base 44: mod_base = OTHER; note = 2'-Omethyladenosine phosphorothiorate
  modified_base 45: mod_base = OTHER; note = 2'-fluoroguanosine
  modified_base 48: mod_base = OTHER; note = 2'-fluorouridine phosphorothiorate
  modified_base 54: mod_base = OTHER; note = Uridine phosphorothiorate
  modified_base 57: mod_base = OTHER; note = 2'-Omethylguanosine
  modified_base 58: mod_base = OTHER; note = 2'-fluoroadenosine
  modified_base 59: mod_base = OTHER; note = Guanosine phosphorothiorate
  modified_base 60: mod_base = OTHER; note = 2'-Omethyluridine
  modified_base 62: mod_base = OTHER; note = 2'-fluorocytosine phosphorothiorate
  modified_base 65: mod_base = OTHER; note = 2'-fluoroguanosine
  modified_base 67: mod_base = OTHER; note = Guanosine phosphorothiorate
  modified_base 68: mod_base = OTHER; note = 2'-Omethylguanosine
  modified_base 71: mod_base = OTHER; note = Uridine phosphorothiorate
  modified_base 72: mod_base = OTHER; note = 2'-Omethylcytosine
  modified_base 73: mod_base = OTHER; note = 2'-fluoroguanosine
  modified_base 74: mod_base = OTHER; note = Cytosine phosphorothiorate
  modified_base 75: mod_base = OTHER; note = 2'-fluorocytosine

SEQ ID NO: 7682 - RNA, 85 nt, synthetic construct; identical to SEQ ID NO: 3317
  source 1..85: mol_type = other RNA
  modified_base 1: mod_base = OTHER; note = 2'-Omethylguanosine phosphorothiorate
  modified_base 2: mod_base = OTHER; note = Cytosine phosphorothiorate
  modified_base 3: mod_base = OTHER; note = 2'-fluorouridine phosphorothiorate
  modified_base 14: mod_base = OTHER; note = 2'-Omethyladenosine phosphorothiorate
  modified_base 18: mod_base = OTHER; note = Guanosine phosphorothiorate
  modified_base 21: mod_base = OTHER; note = Adenosine phosphorothiorate
  modified_base 31: mod_base = OTHER; note = 2'-fluoroadenosine
  modified_base 35: mod_base = OTHER; note = 2'-fluorouridine
  modified_base 36: mod_base = OTHER; note = 2'-fluoroadenosine
  modified_base 37: mod_base = OTHER; note = 2'-Omethyladenosine
  modified_base 44: mod_base = OTHER; note = 2'-Omethyluridine
  modified_base 46: mod_base = OTHER; note = 2'-Omethylguanosine phosphorothiorate
  modified_base 56: mod_base = OTHER; note = 2'-Omethylguanosine
  modified_base 58: mod_base = OTHER; note = 2'-Omethylguanosine
  modified_base 60: mod_base = OTHER; note = 2'-Omethyladenosine
  modified_base 66: mod_base = OTHER; note = 2'-fluoroguanosine
  modified_base 73: mod_base = OTHER; note = Guanosine phosphorothiorate
  modified_base 77: mod_base = OTHER; note = Adenosine phosphorothiorate
  modified_base 82: mod_base = OTHER; note = 2'-Omethylguanosine

SEQ ID NO: 7683 - RNA, 76 nt, synthetic construct; identical to SEQ ID NO: 3318
  source 1..76: mol_type = other RNA
  modified_base 1: mod_base = OTHER; note = 2'-Omethylcytosine phosphorothiorate
  modified_base 2: mod_base = OTHER; note = 2'-Omethylcytosine phosphorothiorate
  modified_base 59: mod_base = OTHER; note = 2'-Omethyladenosine
  modified_base 75: mod_base = OTHER; note = Cytosine phosphorothiorate
  modified_base 76: mod_base = OTHER; note = 2'-Omethyladenosine

SEQ ID NO: 7684 - RNA, 85 nt, synthetic construct; identical to SEQ ID NO: 3297
  source 1..85: mol_type = other RNA
  modified_base 1: mod_base = OTHER; note = 2'-Omethylguanosine phosphorothiorate
  modified_base 2: mod_base = OTHER; note = 2'-Omethylcytosine phosphorothiorate
  modified_base 3: mod_base = OTHER; note = 2'-Omethyluridine
  modified_base 4: mod_base = OTHER; note = 2'-Omethylguanosine
  modified_base 5: mod_base = OTHER; note = 2'-Omethyluridine
  modified_base 6: mod_base = OTHER; note = 2'-Omethylguanosine
  modified_base 16: mod_base = OTHER; note = 2'-Omethyluridine
  modified_base 17: mod_base = OTHER; note = 2'-Omethylguanosine
  modified_base 18: mod_base = OTHER; note = 2'-Omethylguanosine
  modified_base 33: mod_base = OTHER; note = 2'-fluorouridine
  modified_base 35: mod_base = OTHER; note = Cytosine phosphorothiorate
  modified_base 37: mod_base = OTHER; note = Adenosine phosphorothiorate
  modified_base 38: mod_base = OTHER; note = Adenosine phosphorothiorate
  modified_base 44: mod_base = OTHER; note = 2'-Omethyluridine
  modified_base 56: mod_base = OTHER; note = 2'-fluoroguanosine
  modified_base 57: mod_base = OTHER; note = 2'-fluorocytosine
  modified_base 63: mod_base = OTHER; note = 2'-Omethyluridine
  modified_base 65: mod_base = OTHER; note = 2'-Omethylcytosine
  modified_base 68: mod_base = OTHER; note = 2'-Omethyladenosine
  modified_base 70: mod_base = OTHER; note = 2'-Omethylcytosine
  modified_base 71: mod_base = OTHER; note = 2'-Omethylcytosine
  modified_base 72: mod_base = OTHER; note = 2'-fluorouridine
  modified_base 73: mod_base = OTHER; note = 2'-Omethylguanosine
  modified_base 74: mod_base = OTHER; note = 2'-Omethylcytosine
  modified_base 75: mod_base = OTHER; note = 2'-Omethyluridine
  modified_base 76: mod_base = OTHER; note = 2'-Omethylcytosine
  modified_base 77: mod_base = OTHER; note = 2'-Omethyladenosine
  modified_base 82: mod_base = OTHER; note = 2'-Omethylguanosine

SEQ ID NO: 7685 - RNA, 76 nt, synthetic construct; identical to SEQ ID NO: 3289
  source 1..76: mol_type = other RNA
  modified_base 1: mod_base = OTHER; note = 2'-Omethylguanosine
  modified_base 16: mod_base = OTHER; note = 2'-Omethyluridine
  modified_base 18: mod_base = OTHER; note = 2'-Omethylguanosine
  modified_base 19: mod_base = OTHER; note = 2'-Omethylguanosine
  modified_base 54: mod_base = OTHER; note = 2'-Omethyluridine
  modified_base 56: mod_base = OTHER; note = 2'-Omethylcytosine
  modified_base 57: mod_base = OTHER; note = 2'-Omethyladenosine
  modified_base 59: mod_base = OTHER; note = 2'-Omethylguanosine
  modified_base 73: mod_base = OTHER; note = 2'-Omethylguanosine

SEQ ID NO: 7686 - RNA, 76 nt, synthetic construct; identical to SEQ ID NO: 625
  source 1..76: mol_type = other RNA
  modified_base 22: mod_base = OTHER; note = 2'-Omethylguanosine
  modified_base 23: mod_base = OTHER; note = 2'-Omethylcytosine
  modified_base 24: mod_base = OTHER; note = 2'-Omethylguanosine
  modified_base 25: mod_base = OTHER; note = 2'-Omethylcytosine
  modified_base 40: mod_base = OTHER; note = 2'-fluorouridine
  modified_base 41: mod_base = OTHER; note = 2'-fluorocytosine
  modified_base 42: mod_base = OTHER; note = 2'-fluoroadenosine
  modified_base 43: mod_base = OTHER; note = 2'-fluoroadenosine
  modified_base 61: mod_base = OTHER; note = 2'-Omethylcytosine
  modified_base 62: mod_base = OTHER; note = 2'-Omethylcytosine
  modified_base 63: mod_base = OTHER; note = 2'-Omethylcytosine
  modified_base 64: mod_base = OTHER; note = 2'-Omethylguanosine
  modified_base 65: mod_base = OTHER; note = 2'-Omethylguanosine
  modified_base 66: mod_base = OTHER; note = 2'-Omethylcytosine
  modified_base 67: mod_base = OTHER; note = 2'-Omethylguanosine
  modified_base 68: mod_base = OTHER; note = 2'-Omethylguanosine
  modified_base 69: mod_base = OTHER; note = 2'-Omethyladenosine

SEQ ID NO: 7687 - RNA, 86 nt, synthetic construct; identical to SEQ ID NO: 3290
  source 1..86: mol_type = other RNA
  modified_base 58: mod_base = OTHER; note = 2'-fluorocytosine

SEQ ID NO: 7688 - RNA, 85 nt, synthetic construct; identical to SEQ ID NO: 3286
  source 1..85: mol_type = other RNA
  modified_base 1: mod_base = OTHER; note = 2'-Omethylcytosine phosphorothiorate
  modified_base 11: mod_base = OTHER; note = Cytosine phosphorothiorate
  modified_base 26: mod_base = OTHER; note = 2'-fluorouridine
  modified_base 30: mod_base = OTHER; note = 2'-fluoroadenosine
  modified_base 36: mod_base = OTHER; note = Guanosine phosphorothiorate
  modified_base 44: mod_base = OTHER; note = 2'-Omethylguanosine
  modified_base 50: mod_base = OTHER; note = 2'-Omethyladenosine
  modified_base 55: mod_base = OTHER; note = 2'-Omethylcytosine
  modified_base 58: mod_base = OTHER; note = Guanosine phosphorothiorate
  modified_base 64: mod_base = OTHER; note = Uridine phosphorothiorate
  modified_base 84: mod_base = OTHER; note = 2'-fluorocytosine phosphorothiorate

SEQ ID NO: 7689 - RNA, 76 nt, synthetic construct; identical to SEQ ID NO: 3295
  source 1..76: mol_type = other RNA
  modified_base 1: mod_base = OTHER; note = 2'-Omethylcytosine
  modified_base 6: mod_base = OTHER; note = 2'-fluoroguanosine
  modified_base 7: mod_base = OTHER; note = 2'-fluoroadenosine phosphorothiorate
  modified_base 8: mod_base = OTHER; note = 2'-Omethyluridine phosphorothiorate
  modified_base 9: mod_base = OTHER; note = Adenosine phosphorothiorate
  modified_base 15: mod_base = OTHER; note = 2'-fluoroguanosine phosphorothiorate
  modified_base 17: mod_base = OTHER; note = 2'-Omethyluridine
  modified_base 24: mod_base = OTHER; note = 2'-fluoroguanosine
  modified_base 25: mod_base = OTHER; note = 2'-Omethylcytosine phosphorothiorate
  modified_base 28: mod_base = OTHER; note = 2'-Omethyladenosine phosphorothiorate
  modified_base 36: mod_base = OTHER; note = 2'-fluoroadenosine phosphorothiorate
  modified_base 45: mod_base = OTHER; note = 2'-fluoroguanosine
  modified_base 49: mod_base = OTHER; note = 2'-Omethylguanosine
  modified_base 53: mod_base = OTHER; note = 2'-fluoroguanosine phosphorothiorate
  modified_base 55: mod_base = OTHER; note = 2'-fluorouridine phosphorothiorate
  modified_base 58: mod_base = OTHER; note = 2'-fluoroadenosine phosphorothiorate
  modified_base 75: mod_base = OTHER; note = 2'-Omethylcytosine phosphorothiorate

SEQ ID NO: 7690 - RNA, 76 nt, synthetic construct; identical to SEQ ID NO: 3295
  source 1..76: mol_type = other RNA
  modified_base 1: mod_base = OTHER; note = 2'-fluorocytosine phosphorothiorate
  modified_base 2: mod_base = OTHER; note = 2'-fluorocytosine
  modified_base 3: mod_base = OTHER; note = 2'-fluorouridine
  modified_base 4: mod_base = OTHER; note = 2'-Omethyluridine
  modified_base 5: mod_base = OTHER; note = 2'-fluorocytosine
  modified_base 7: mod_base = OTHER; note = 2'-fluoroadenosine
  modified_base 8: mod_base = OTHER; note = 2'-fluorouridine phosphorothiorate
  modified_base 13: mod_base = OTHER; note = 2'-Omethylcytosine phosphorothiorate
  modified_base 17: mod_base = OTHER; note = 2'-Omethyluridine phosphorothiorate
  modified_base 24: mod_base = OTHER; note = 2'-Omethylguanosine phosphorothiorate
  modified_base 26: mod_base = OTHER; note = 2'-Omethylguanosine phosphorothiorate
  modified_base 34: mod_base = OTHER; note = 2'-fluorouridine
  modified_base 43: mod_base = OTHER; note = 2'-fluorouridine phosphorothiorate
  modified_base 44: mod_base = OTHER; note = 2'-fluoroadenosine phosphorothiorate
  modified_base 52: mod_base = OTHER; note = 2'-Omethylguanosine
  modified_base 53: mod_base = OTHER; note = 2'-Omethylguanosine phosphorothiorate
  modified_base 54: mod_base = OTHER; note = 2'-fluorouridine phosphorothiorate
  modified_base 58: mod_base = OTHER; note = 2'-fluoroadenosine phosphorothiorate
  modified_base 75: mod_base = OTHER; note = 2'-Omethylcytosine phosphorothiorate
  modified_base 76: mod_base = OTHER; note = 2'-fluoroadenosine

SEQ ID NO: 7691 - RNA, 76 nt, synthetic construct; identical to SEQ ID NO: 625
  source 1..76: mol_type = other RNA
  modified_base 4: mod_base = OTHER; note = 2'-Omethyluridine
  modified_base 5: mod_base = OTHER; note = Cytosine phosphorothiorate
  modified_base 12: mod_base = OTHER; note = 2'-Omethylguanosine
  modified_base 13: mod_base = OTHER; note = Cytosine phosphorothiorate
  modified_base 15: mod_base = OTHER; note = 2'-Omethyladenosine
  modified_base 16: mod_base = OTHER; note = Uridine phosphorothiorate
  modified_base 20: mod_base = OTHER; note = 2'-Omethyluridine
  modified_base 21: mod_base = OTHER; note = Adenosine phosphorothiorate
  modified_base 22: mod_base = OTHER; note = 2'-Omethylguanosine phosphorothiorate
  modified_base 23: mod_base = OTHER; note = 2'-Omethylcytosine
  modified_base 38: mod_base = OTHER; note = Adenosine phosphorothiorate
  modified_base 39: mod_base = OTHER; note = 2'-Omethyluridine phosphorothiorate
  modified_base 40: mod_base = OTHER; note = Uridine phosphorothiorate
  modified_base 41: mod_base = OTHER; note = 2'-Omethylcytosine phosphorothiorate
  modified_base 42: mod_base = OTHER; note = 2'-fluoroadenosine
  modified_base 43: mod_base = OTHER; note = 2'-fluoroadenosine
  modified_base 45: mod_base = OTHER; note = 2'-fluoroguanosine phosphorothiorate
  modified_base 46: mod_base = OTHER; note = 2'-Omethylguanosine
  modified_base 49: mod_base = OTHER; note = 2'-Omethylcytosine
  modified_base 52: mod_base = OTHER; note = 2'-Omethylguanosine
  modified_base 53: mod_base = OTHER; note = 2'-Omethylguanosine
  modified_base 54: mod_base = OTHER; note = Uridine phosphorothiorate
  modified_base 56: mod_base = OTHER; note = 2'-Omethylcytosine
  modified_base 57: mod_base = OTHER; note = Guanosine phosphorothiorate
  modified_base 58: mod_base = OTHER; note = 2'-fluoroadenosine
  modified_base 59: mod_base = OTHER; note = 2'-fluoroguanosine
  modified_base 60: mod_base = OTHER; note = Uridine phosphorothiorate
  modified_base 61: mod_base = OTHER; note = 2'-Omethylcytosine phosphorothiorate
  modified_base 62: mod_base = OTHER; note = 2'-Omethylcytosine
  modified_base 63: mod_base = OTHER; note = Cytosine phosphorothiorate
  modified_base 64: mod_base = OTHER; note = 2'-fluoroguanosine
  modified_base 69: mod_base = OTHER; note = 2'-Omethyladenosine
  modified_base 70: mod_base = OTHER; note = 2'-fluoroguanosine phosphorothiorate
  modified_base 71: mod_base = OTHER; note = 2'-fluorouridine phosphorothiorate
  modified_base 74: mod_base = OTHER; note = 2'-Omethylcytosine

SEQ ID NO: 7692 - RNA, 85 nt, synthetic construct; identical to SEQ ID NO: 3310
  source 1..85: mol_type = other RNA
  modified_base 2: mod_base = OTHER; note = 2'-Omethylcytosine phosphorothiorate
  modified_base 45: mod_base = OTHER; note = Guanosine phosphorothiorate
  modified_base 48: mod_base = OTHER; note = Adenosine phosphorothiorate
  modified_base 58: mod_base = OTHER; note = 2'-Omethylguanosine
  modified_base 67: mod_base = OTHER; note = Adenosine phosphorothiorate
  modified_base 84: mod_base = OTHER; note = 2'-fluorocytosine

SEQ ID NO: 7693 - RNA, 75 nt, synthetic construct; identical to SEQ ID NO: 3306
  source 1..75: mol_type = other RNA
  modified_base 1: mod_base = OTHER; note = 2'-Omethylguanosine
  modified_base 13: mod_base = OTHER; note = 2'-Omethylcytosine
  modified_base 14: mod_base = OTHER; note = 2'-Omethyladenosine
  modified_base 15: mod_base = OTHER; note = 2'-Omethyladenosine
  modified_base 16: mod_base = OTHER; note = 2'-Omethylcytosine
  modified_base 17: mod_base = OTHER; note = 2'-Omethylguanosine
  modified_base 18: mod_base = OTHER; note = 2'-Omethylguanosine
  modified_base 19: mod_base = OTHER; note = Uridine phosphorothiorate
  modified_base 20: mod_base = OTHER; note = Adenosine phosphorothiorate
  modified_base 24: mod_base = OTHER; note = 2'-Omethylcytosine
  modified_base 40: mod_base = OTHER; note = 2'-fluoroadenosine
  modified_base 41: mod_base = OTHER; note = 2'-Omethylguanosine
  modified_base 42: mod_base = OTHER; note = 2'-Omethyladenosine
  modified_base 43: mod_base = OTHER; note = 2'-fluoroadenosine
  modified_base 48: mod_base = OTHER; note = 2'-Omethylguanosine
  modified_base 49: mod_base = OTHER; note = 2'-Omethylcytosine
  modified_base 50: mod_base = OTHER; note = 2'-Omethylguanosine
  modified_base 51: mod_base = OTHER; note = 2'-Omethyluridine
  modified_base 52: mod_base = OTHER; note = 2'-Omethylguanosine
  modified_base 53: mod_base = OTHER; note = Uridine phosphorothiorate
  modified_base 54: mod_base = OTHER; note = Uridine phosphorothiorate
  modified_base 60: mod_base = OTHER; note = 2'-Omethylcytosine
  modified_base 64: mod_base = OTHER; note = 2'-Omethyluridine
  modified_base 72: mod_base = OTHER; note = 2'-Omethyladenosine

SEQ ID NO: 7694 - RNA, 76 nt, synthetic construct; identical to SEQ ID NO: 625
  source 1..76: mol_type = other RNA
  modified_base 1: mod_base = OTHER; note = 2'-Omethylguanosine
  modified_base 2: mod_base = OTHER; note = 2'-Omethylguanosine
  modified_base 3: mod_base = OTHER; note = 2'-Omethylcytosine
  modified_base 4: mod_base = OTHER; note = 2'-Omethyluridine
  modified_base 5: mod_base = OTHER; note = 2'-Omethylcytosine
  modified_base 6: mod_base = OTHER; note = 2'-Omethylcytosine
  modified_base 14: mod_base = OTHER; note = 2'-Omethyladenosine
  modified_base 16: mod_base = OTHER; note = 2'-Omethyluridine
  modified_base 17: mod_base = OTHER; note = 2'-fluoroguanosine phosphorothiorate
  modified_base 18: mod_base = OTHER; note = 2'-Omethylguanosine
  modified_base 19: mod_base = OTHER; note = 2'-fluoroadenosine phosphorothiorate
  modified_base 21: mod_base = OTHER; note = 2'-fluoroadenosine phosphorothiorate
  modified_base 22: mod_base = OTHER; note = 2'-Omethylguanosine
  modified_base 23: mod_base = OTHER; note = 2'-Omethylcytosine
  modified_base 24: mod_base = OTHER; note = 2'-Omethylguanosine phosphorothiorate
  modified_base 25: mod_base = OTHER; note = Cytosine phosphorothiorate
  modified_base 28: mod_base = OTHER; note = 2'-Omethyluridine phosphorothiorate
  modified_base 29: mod_base = OTHER; note = 2'-Omethylguanosine
  modified_base 30: mod_base = OTHER; note = 2'-fluoroguanosine phosphorothiorate
  modified_base 31: mod_base = OTHER; note = 2'-Omethyladenosine phosphorothiorate
  modified_base 33: mod_base = OTHER; note = 2'-fluorouridine
  modified_base 35: mod_base = OTHER; note = 2'-Omethylcytosine phosphorothiorate
  modified_base 37: mod_base = OTHER; note = Adenosine phosphorothiorate
  modified_base 40: mod_base = OTHER; note = 2'-Omethyluridine
  modified_base 41: mod_base = OTHER; note = 2'-fluorocytosine
  modified_base 44: mod_base = OTHER; note = 2'-Omethyladenosine
  modified_base 45: mod_base = OTHER; note = Guanosine phosphorothiorate
  modified_base 48: mod_base = OTHER; note = 2'-fluorouridine
  modified_base 49: mod_base = OTHER; note = 2'-Omethylcytosine phosphorothiorate
  modified_base 50: mod_base = OTHER; note = 2'-Omethylcytosine
  modified_base 52: mod_base = OTHER; note = 2'-Omethylguanosine
  modified_base 53: mod_base = OTHER; note = 2'-Omethylguanosine
  modified_base 55: mod_base = OTHER; note = Uridine phosphorothiorate
  modified_base 59: mod_base = OTHER; note = 2'-Omethylguanosine
  modified_base 62: mod_base = OTHER; note = 2'-Omethylcytosine
  modified_base 63: mod_base = OTHER; note = 2'-fluorocytosine
  modified_base 64: mod_base = OTHER; note = 2'-Omethylguanosine phosphorothiorate
  modified_base 65: mod_base = OTHER; note = 2'-Omethylguanosine
  modified_base 66: mod_base = OTHER; note = 2'-fluorocytosine phosphorothiorate
  modified_base 67: mod_base = OTHER; note = 2'-fluoroguanosine
  modified_base 68: mod_base = OTHER; note = 2'-Omethylguanosine phosphorothiorate
  modified_base 69: mod_base = OTHER; note = 2'-fluoroadenosine
  modified_base 71: mod_base = OTHER; note = 2'-Omethyluridine
  modified_base 72: mod_base = OTHER; note = 2'-Omethylcytosine phosphorothiorate
  modified_base 73: mod_base = OTHER; note = 2'-Omethylguanosine
  modified_base 74: mod_base = OTHER; note = 2'-fluorocytosine phosphorothiorate
  modified_base 76: mod_base = OTHER; note = 2'-Omethyladenosine

SEQ ID NO: 7695 - RNA, 86 nt, synthetic construct; identical to SEQ ID NO: 3290
  source 1..86: mol_type = other RNA
  modified_base 13: mod_base = OTHER; note = 2'-fluoroguanosine

SEQ ID NO: 7696 - RNA, 75 nt, synthetic construct; identical to SEQ ID NO: 3306
  source 1..75: mol_type = other RNA
  modified_base 1: mod_base = OTHER; note = 2'-Omethylguanosine
  modified_base 2: mod_base = OTHER; note = 2'-Omethyladenosine
  modified_base 3: mod_base = OTHER; note = 2'-Omethylcytosine
  modified_base 4: mod_base = OTHER; note = 2'-Omethylcytosine
  modified_base 5: mod_base = OTHER; note = 2'-Omethyluridine
  modified_base 6: mod_base = OTHER; note = 2'-Omethylcytosine
  modified_base 13: mod_base = OTHER; note = 2'-Omethylcytosine
  modified_base 14: mod_base = OTHER; note = 2'-Omethyladenosine
  modified_base 15: mod_base = OTHER; note = 2'-Omethyladenosine
  modified_base 16: mod_base = OTHER; note = 2'-Omethylcytosine
  modified_base 17: mod_base = OTHER; note = 2'-Omethylguanosine
  modified_base 18: mod_base = OTHER; note = 2'-Omethylguanosine
  modified_base 19: mod_base = OTHER; note = Uridine phosphorothiorate
  modified_base 20: mod_base = OTHER; note = Adenosine phosphorothiorate
  modified_base 24: mod_base = OTHER; note = 2'-Omethylcytosine
  modified_base 32: mod_base = OTHER; note = Uridine phosphorothiorate
  modified_base 33: mod_base = OTHER; note = 2'-Omethylcytosine
  modified_base 34: mod_base = OTHER; note = Uridine phosphorothiorate
  modified_base 36: mod_base = OTHER; note = Guanosine phosphorothiorate
  modified_base 37: mod_base = OTHER; note = Adenosine phosphorothiorate
  modified_base 40: mod_base = OTHER; note = 2'-fluoroadenosine
  modified_base 41: mod_base = OTHER; note = 2'-Omethylguanosine
  modified_base 42: mod_base = OTHER; note = 2'-Omethyladenosine
  modified_base 43: mod_base = OTHER; note = 2'-fluoroadenosine
  modified_base 48: mod_base = OTHER; note = 2'-Omethylguanosine
  modified_base 49: mod_base = OTHER; note = 2'-Omethylcytosine
  modified_base 51: mod_base = OTHER; note = 2'-Omethyluridine
  modified_base 53: mod_base = OTHER; note = Uridine phosphorothiorate
  modified_base 54: mod_base = OTHER; note = Uridine phosphorothiorate
  modified_base 60: mod_base = OTHER; note = 2'-Omethylcytosine
  modified_base 64: mod_base = OTHER; note = 2'-Omethyluridine
  modified_base 72: mod_base = OTHER; note = 2'-Omethyladenosine

SEQ ID NO: 7697 - RNA, 75 nt, synthetic construct; identical to SEQ ID NO: 1045
  source 1..75: mol_type = other RNA
  modified_base 1: mod_base = OTHER; note = 2'-Omethylguanosine phosphorothiorate
  modified_base 2: mod_base = OTHER; note = 2'-Omethylguanosine phosphorothiorate
  modified_base 19: mod_base = OTHER; note = 2'-fluorouridine
  modified_base 23: mod_base = OTHER; note = 2'-fluorocytosine
  modified_base 27: mod_base = OTHER; note = Cytosine phosphorothiorate
  modified_base 28: mod_base = OTHER; note = 2'-fluorouridine
  modified_base 40: mod_base = OTHER; note = Cytosine phosphorothiorate
  modified_base 41: mod_base = OTHER; note = 2'-fluorocytosine
  modified_base 43: mod_base = OTHER; note = 2'-fluoroguanosine
  modified_base 44: mod_base = OTHER; note = 2'-fluorocytosine
  modified_base 58: mod_base = OTHER; note = Guanosine phosphorothiorate
  modified_base 59: mod_base = OTHER; note = 2'-fluorouridine
  modified_base 66: mod_base = OTHER; note = 2'-fluoroguanosine
  modified_base 67: mod_base = OTHER; note = 2'-fluoroguanosine
  modified_base 68: mod_base = OTHER; note = 2'-fluoroadenosine
  modified_base 69: mod_base = OTHER; note = Adenosine phosphorothiorate
  modified_base 73: mod_base = OTHER; note = Cytosine phosphorothiorate

SEQ ID NO: 7698 - RNA, 76 nt, synthetic construct; identical to SEQ ID NO: 625
  source 1..76: mol_type = other RNA
  modified_base 32: mod_base = OTHER; note = 2'-fluorocytosine
  modified_base 33: mod_base = OTHER; note = 2'-fluorouridine
  modified_base 34: mod_base = OTHER; note = 2'-fluorouridine
  modified_base 35: mod_base = OTHER; note = 2'-fluorocytosine
  modified_base 36: mod_base = OTHER; note = 2'-fluoroadenosine
  modified_base 37: mod_base = OTHER; note = 2'-fluoroadenosine
  modified_base 38: mod_base = OTHER; note = 2'-fluoroadenosine

SEQ ID NO: 7699 - RNA, 85 nt, synthetic construct; identical to SEQ ID NO: 3297
  source 1..85: mol_type = other RNA
  modified_base 1: mod_base = OTHER; note = 2'-Omethylguanosine
  modified_base 10: mod_base = OTHER; note = 2'-Omethylguanosine
  modified_base 13: mod_base = OTHER; note = 2'-Omethylguanosine
  modified_base 16: mod_base = OTHER; note = Uridine phosphorothiorate
  modified_base 17: mod_base = OTHER; note = Guanosine phosphorothiorate
  modified_base 18: mod_base = OTHER; note = 2'-Omethylguanosine phosphorothiorate
  modified_base 19: mod_base = OTHER; note = Uridine phosphorothiorate
  modified_base 20: mod_base = OTHER; note = 2'-Omethyluridine phosphorothiorate
  modified_base 25: mod_base = OTHER; note = 2'-Omethylcytosine
  modified_base 29: mod_base = OTHER; note = 2'-Omethylguanosine
  modified_base 33: mod_base = OTHER; note = 2'-fluorouridine phosphorothiorate
  modified_base 35: mod_base = OTHER; note = Cytosine phosphorothiorate
  modified_base 37: mod_base = OTHER; note = Adenosine phosphorothiorate
  modified_base 38: mod_base = OTHER; note = Adenosine phosphorothiorate
  modified_base 41: mod_base = OTHER; note = 2'-fluorocytosine
  modified_base 42: mod_base = OTHER; note = Adenosine phosphorothiorate
  modified_base 43: mod_base = OTHER; note = 2'-Omethyladenosine
  modified_base 44: mod_base = OTHER; note = 2'-fluorouridine
  modified_base 56: mod_base = OTHER; note = Guanosine phosphorothiorate
  modified_base 59: mod_base = OTHER; note = 2'-Omethylcytosine
  modified_base 61: mod_base = OTHER; note = 2'-Omethylguanosine
  modified_base 63: mod_base = OTHER; note = Uridine phosphorothiorate
  modified_base 64: mod_base = OTHER; note = Uridine phosphorothiorate
  modified_base 65: mod_base = OTHER; note = 2'-Omethylcytosine
  modified_base 66: mod_base = OTHER; note = Guanosine phosphorothiorate
  modified_base 69: mod_base = OTHER; note = Uridine phosphorothiorate
  modified_base 71: mod_base = OTHER; note = 2'-Omethylcytosine
  modified_base 72: mod_base = OTHER; note = 2'-fluorouridine
  modified_base 74: mod_base = OTHER; note = 2'-Omethylcytosine
  modified_base 80: mod_base = OTHER; note = 2'-Omethylguanosine
  modified_base 82: mod_base = OTHER; note = 2'-Omethylguanosine

SEQ ID NO: 7700 - RNA, 76 nt, synthetic construct; identical to SEQ ID NO: 3318
  source 1..76: mol_type = other RNA
  modified_base 1: mod_base = OTHER; note = 2'-Omethylcytosine
  modified_base 2: mod_base = OTHER; note = 2'-Omethylcytosine

SEQ ID NO: 7701 - RNA, 76 nt, synthetic construct; identical to SEQ ID NO: 3289
  source 1..76: mol_type = other RNA
  modified_base 1: mod_base = OTHER; note = 2'-Omethylguanosine phosphorothiorate
  modified_base 2: mod_base = OTHER; note = 2'-Omethylcytosine phosphorothiorate
  modified_base 3: mod_base = OTHER; note = 2'-Omethylcytosine
  modified_base 4: mod_base = OTHER; note = 2'-Omethyluridine
  modified_base 5: mod_base = OTHER; note = 2'-Omethylguanosine
  modified_base 6: mod_base = OTHER; note = 2'-Omethylguanosine
  modified_base 16: mod_base = OTHER; note = 2'-Omethyluridine
  modified_base 18: mod_base = OTHER; note = 2'-Omethylguanosine
  modified_base 19: mod_base = OTHER; note = 2'-Omethylguanosine
  modified_base 33: mod_base = OTHER; note = 2'-fluorouridine
  modified_base 35: mod_base = OTHER; note = Uridine phosphorothiorate
  modified_base 37: mod_base = OTHER; note = Adenosine phosphorothiorate
  modified_base 38: mod_base = OTHER; note = Adenosine phosphorothiorate
  modified_base 44: mod_base = OTHER; note = 2'-Omethylguanosine
  modified_base 45: mod_base = OTHER; note = 2'-Omethylguanosine
  modified_base 46: mod_base = OTHER; note = 2'-fluoroguanosine
  modified_base 47: mod_base = OTHER; note = 2'-fluorouridine
  modified_base 48: mod_base = OTHER; note = 2'-fluorocytosine
  modified_base 49: mod_base = OTHER; note = 2'-Omethylcytosine
  modified_base 50: mod_base = OTHER; note = 2'-Omethyladenosine
  modified_base 51: mod_base = OTHER; note = 2'-Omethylguanosine
  modified_base 52: mod_base = OTHER; note = 2'-Omethylguanosine
  modified_base 53: mod_base = OTHER; note = 2'-Omethylguanosine
  modified_base 54: mod_base = OTHER; note = 2'-Omethyluridine
  modified_base 56: mod_base = OTHER; note = 2'-Omethylcytosine
  modified_base 59: mod_base = OTHER; note = 2'-Omethylguanosine
  modified_base 61: mod_base = OTHER; note = 2'-Omethylcytosine
  modified_base 62: mod_base = OTHER; note = 2'-Omethylcytosine
  modified_base 63: mod_base = OTHER; note = 2'-fluorocytosine
  modified_base 64: mod_base = OTHER; note = 2'-Omethyluridine
  modified_base 65: mod_base = OTHER; note = 2'-Omethylguanosine
  modified_base 66: mod_base = OTHER; note = 2'-Omethyluridine
  modified_base 67: mod_base = OTHER; note = 2'-Omethylcytosine
  modified_base 68: mod_base = OTHER; note = 2'-Omethylcytosine
  modified_base 73: mod_base = OTHER; note = 2'-Omethylguanosine

SEQ ID NO: 7702 - RNA, 86 nt, synthetic construct; identical to SEQ ID NO: 3290
  source 1..86: mol_type = other RNA
  modified_base 5: mod_base = OTHER; note = Guanosine phosphorothiorate

SEQ ID NO: 7703 - RNA, 75 nt, synthetic construct; identical to SEQ ID NO: 3311
  source 1..75: mol_type = other RNA
  modified_base 1: mod_base = OTHER; note = 2'-Omethylguanosine phosphorothiorate
  modified_base 2: mod_base = OTHER; note = 2'-Omethylguanosine phosphorothiorate
  modified_base 6: mod_base = OTHER; note = 2'-Omethylcytosine
  modified_base 7: mod_base = OTHER; note = Adenosine phosphorothiorate
  modified_base 16: mod_base = OTHER; note = 2'-fluorouridine
  modified_base 19: mod_base = OTHER; note = 2'-fluorouridine
  modified_base 20: mod_base = OTHER; note = Adenosine phosphorothiorate
  modified_base 21: mod_base = OTHER; note = Adenosine phosphorothiorate
  modified_base 24: mod_base = OTHER; note = 2'-fluoroadenosine
  modified_base 34: mod_base = OTHER; note = 2'-fluorocytosine
  modified_base 40: mod_base = OTHER; note = 2'-fluorocytosine
  modified_base 43: mod_base = OTHER; note = 2'-Omethylguanosine
  modified_base 47: mod_base = OTHER; note = 2'-fluorouridine
  modified_base 53: mod_base = OTHER; note = 2'-fluorouridine phosphorothiorate
  modified_base 56: mod_base = OTHER; note = 2'-Omethylguanosine
  modified_base 62: mod_base = OTHER; note = 2'-fluorocytosine
  modified_base 66: mod_base = OTHER; note = Guanosine phosphorothiorate
  modified_base 67: mod_base = OTHER; note = 2'-fluoroguanosine
  modified_base 68: mod_base = OTHER; note = Adenosine phosphorothiorate
  modified_base 74: mod_base = OTHER; note = 2'-fluorocytosine phosphorothiorate

SEQ ID NO: 7704 - RNA, 76 nt, synthetic construct; identical to SEQ ID NO: 625
  source 1..76: mol_type = other RNA
  modified_base 4: mod_base = OTHER; note = Thymine

SEQ ID NO: 7705 - RNA, 85 nt, synthetic construct; identical to SEQ ID NO: 3297
  source 1..85: mol_type = other RNA
  modified_base 1: mod_base = OTHER; note = 2'-Omethylguanosine
  modified_base 63: mod_base = OTHER; note = 2'-Omethyluridine
  modified_base 65: mod_base = OTHER; note = 2'-Omethylcytosine
  modified_base 66: mod_base = OTHER; note = 2'-fluoroguanosine
  modified_base 67: mod_base = OTHER; note = 2'-fluoroadenosine
  modified_base 68: mod_base = OTHER; note = 2'-Omethyladenosine
  modified_base 69: mod_base = OTHER; note = 2'-fluorouridine
  modified_base 82: mod_base = OTHER; note = 2'-Omethylguanosine

SEQ ID NO: 7706 - RNA, 76 nt, synthetic construct; identical to SEQ ID NO: 3675
  source 1..76: mol_type = other RNA
  modified_base 1: mod_base = OTHER; note = 2'-Omethylguanosine
  modified_base 14: mod_base = OTHER; note = 2'-Omethyladenosine
  modified_base 15: mod_base = OTHER; note = 2'-fluoroadenosine
  modified_base 16: mod_base = OTHER; note = 2'-Omethyluridine
  modified_base 17: mod_base = OTHER; note = 2'-Omethylguanosine
  modified_base 18: mod_base = OTHER; note = 2'-Omethylguanosine
  modified_base 19: mod_base = OTHER; note = 2'-fluoroadenosine
  modified_base 20: mod_base = OTHER; note = 2'-Omethyluridine
  modified_base 54: mod_base = OTHER; note = 2'-Omethyluridine phosphorothiorate
  modified_base 55: mod_base = OTHER; note = Uridine phosphorothiorate
  modified_base 56: mod_base = OTHER; note = 2'-Omethylcytosine
  modified_base 57: mod_base = OTHER; note = 2'-Omethylguanosine
  modified_base 59: mod_base = OTHER; note = 2'-Omethylguanosine
  modified_base 73: mod_base = OTHER; note = 2'-Omethylguanosine

SEQ ID NO: 7707 - RNA, 76 nt, synthetic construct; identical to SEQ ID NO: 625
  source 1..76: mol_type = other RNA
  modified_base 1: mod_base = OTHER; note = 2'-Omethylguanosine phosphorothiorate
  modified_base 2: mod_base = OTHER; note = 2'-Omethylguanosine
  modified_base 13: mod_base = OTHER; note = 2'-Omethylcytosine
  modified_base 17: mod_base = OTHER; note = 2'-Omethylguanosine
  modified_base 33: mod_base = OTHER; note = 2'-fluorouridine
  modified_base 35: mod_base = OTHER; note = Cytosine phosphorothiorate
  modified_base 37: mod_base = OTHER; note = Adenosine phosphorothiorate
  modified_base 38: mod_base = OTHER; note = Adenosine phosphorothiorate
  modified_base 52: mod_base = OTHER; note = 2'-Omethylguanosine
  modified_base 62: mod_base = OTHER; note = 2'-Omethylcytosine
  modified_base 73: mod_base = OTHER; note = 2'-Omethylguanosine
  modified_base 75: mod_base = OTHER; note = 2'-fluorocytosine phosphorothiorate
  modified_base 76: mod_base = OTHER; note = 2'-Omethyladenosine

SEQ ID NO: 7708 - RNA, 74 nt, synthetic construct; identical to SEQ ID NO: 766
  source 1..74: mol_type = other RNA
  modified_base 1: mod_base = OTHER; note = 2'-Omethylguanosine phosphorothiorate
  modified_base 2: mod_base = OTHER; note = 2'-Omethylguanosine phosphorothiorate
  modified_base 3: mod_base = OTHER; note = 2'-Omethylcytosine
  modified_base 4: mod_base = OTHER; note = 2'-Omethyluridine
  modified_base 5: mod_base = OTHER; note = 2'-Omethylcytosine
  modified_base 6: mod_base = OTHER; note = 2'-Omethylcytosine
  modified_base 16: mod_base = OTHER; note = 2'-Omethyluridine
  modified_base 17: mod_base = OTHER; note = 2'-Omethylguanosine
  modified_base 18: mod_base = OTHER; note = 2'-Omethylguanosine
  modified_base 20: mod_base = OTHER; note = 2'-Omethyluridine
  modified_base 25: mod_base = OTHER; note = 2'-Omethylcytosine
  modified_base 33: mod_base = OTHER; note = 2'-fluorouridine
  modified_base 35: mod_base = OTHER; note = Cytosine phosphorothiorate
  modified_base 37: mod_base = OTHER; note = Adenosine phosphorothiorate
  modified_base 38: mod_base = OTHER; note = Adenosine phosphorothiorate
  modified_base 41: mod_base = OTHER; note = 2'-fluorocytosine
  modified_base 42: mod_base = OTHER; note = 2'-Omethyladenosine
  modified_base 43: mod_base = OTHER; note = 2'-Omethyladenosine
  modified_base 44: mod_base = OTHER; note = 2'-fluoroadenosine
  modified_base 49: mod_base = OTHER; note = 2'-Omethylcytosine
  modified_base 50: mod_base = OTHER; note = 2'-Omethylcytosine
  modified_base 52: mod_base = OTHER; note = 2'-Omethylguanosine
  modified_base 54: mod_base = OTHER; note = 2'-Omethyluridine
  modified_base 55: mod_base = OTHER; note = Uridine phosphorothiorate
  modified_base 56: mod_base = OTHER; note = 2'-Omethylcytosine
  modified_base 57: mod_base = OTHER; note = 2'-fluoroguanosine
  modified_base 59: mod_base = OTHER; note = 2'-Omethylguanosine
  modified_base 61: mod_base = OTHER; note = 2'-Omethylcytosine
  modified_base 62: mod_base = OTHER; note = 2'-Omethylcytosine
  modified_base 63: mod_base = OTHER; note = 2'-fluorocytosine
  modified_base 64: mod_base = OTHER; note = 2'-Omethylguanosine
  modified_base 65: mod_base = OTHER; note = 2'-Omethylguanosine
  modified_base 72: mod_base = OTHER; note = 2'-Omethylcytosine phosphorothiorate
  modified_base 73: mod_base = OTHER; note = 2'-Omethylguanosine phosphorothiorate

SEQ ID NO: 7709 - DNA, 76 bp, synthetic construct; identical to SEQ ID NO: 1924
  source 1..76: mol_type = other DNA
  modified_base 1: mod_base = OTHER; note = 2'-Omethylguanosine phosphorothiorate
  modified_base 2: mod_base = OTHER; note = deoxyguanosine phosphorothiorate
  modified_base 3: mod_base = OTHER; note = 2'-Omethylcytosine
  modified_base 4: mod_base = OTHER; note = 2'-Omethyluridine
  modified_base 15: mod_base = OTHER; note = 2'-fluoroadenosine
  modified_base 16: mod_base = OTHER; note = Uridine phosphorothiorate
  modified_base 17: mod_base = OTHER; note = 2'-fluoroguanosine
  modified_base 18: mod_base = OTHER; note = 2'-O-(2-Methoxyethyl) guanosine phosphorothiorate
  modified_base 19: mod_base = OTHER; note = Adenosine phosphorothiorate
  modified_base 21: mod_base = OTHER; note = Adenosine phosphorothiorate
  modified_base 22: mod_base = OTHER; note = deoxyguanosine phosphorothiorate
  modified_base 26: mod_base = OTHER; note = 2'-fluoroadenosine phosphorothiorate
  modified_base 28: mod_base = OTHER; note = Uridine phosphorothiorate
  modified_base 29: mod_base = OTHER; note = Guanosine phosphorothiorate
  modified_base 30: mod_base = OTHER; note = 2'-fluoroguanosine
  modified_base 31: mod_base = OTHER; note = 2'-fluoroadenosine
  modified_base 35: mod_base = OTHER; note = Cytosine phosphorothiorate
  modified_base 36: mod_base = OTHER; note = 2'-Omethyladenosine
  modified_base 38: mod_base = OTHER; note = Adenosine phosphorothiorate
  modified_base 39: mod_base = OTHER; note = deoxyuridine phosphorothiorate
  modified_base 44: mod_base = OTHER; note = Adenosine phosphorothiorate
  modified_base 46: mod_base = OTHER; note = Guanosine phosphorothiorate
  modified_base 47: mod_base = OTHER; note = 2'-Omethyluridine phosphorothiorate
  modified_base 48: mod_base = OTHER; note = 2'-Omethyluridine phosphorothiorate
  modified_base 49: mod_base = OTHER; note = 2'-fluorocytosine
  modified_base 51: mod_base = OTHER; note = Guanosine phosphorothiorate
  modified_base 56: mod_base = OTHER; note = 2'-Omethylcytosine phosphorothiorate
  modified_base 59: mod_base = OTHER; note = Guanosine phosphorothiorate
  modified_base 61: mod_base = OTHER; note = 2'-O-(2-Methoxyethyl) 5-methylcytosine phosphorothiorate
  modified_base 62: mod_base = OTHER; note = 2'-fluorocytosine phosphorothiorate
  modified_base 63: mod_base = OTHER; note = 2'-fluorocytosine
  modified_base 64: mod_base = OTHER; note = Guanosine phosphorothiorate
  modified_base 65: mod_base = OTHER; note = 2'-Omethylguanosine phosphorothiorate
  modified_base 66: mod_base = OTHER; note = 2'-Omethylcytosine
  modified_base 68: mod_base = OTHER; note = 2'-Omethylguanosine phosphorothiorate
  modified_base 69: mod_base = OTHER; note = 2'-O-(2-Methoxyethyl) adenosine
  modified_base 70: mod_base = OTHER; note = 2'-O-(2-Methoxyethyl) guanosine
  modified_base 72: mod_base = OTHER; note = 2'-O-(2-Methoxyethyl) 5-methylcytosine
  modified_base 74: mod_base = OTHER; note = Cytosine phosphorothiorate
  modified_base 75: mod_base = OTHER; note = 2'-Omethylcytosine phosphorothiorate
  modified_base 76: mod_base = OTHER; note = 2'-O-(2-Methoxyethyl) adenosine
  misc_feature 1: note = RNA
  misc_feature 2: note = DNA
  misc_feature 3..21: note = RNA
  misc_feature 22: note = DNA
  misc_feature 23..38: note = RNA
  misc_feature 39: note = DNA
  misc_feature 40..41: note = RNA
  misc_feature 42: note = DNA
  misc_feature 43..51: note = RNA
  misc_feature 52: note = DNA
  misc_feature 53..76: note = RNA

SEQ ID NO: 7710 - RNA, 85 nt, synthetic construct; identical to SEQ ID NO: 3288
  source 1..85: mol_type = other RNA
  modified_base 1: mod_base = OTHER; note = 2'-Omethylcytosine
  modified_base 29: mod_base = OTHER; note = 2'-fluoroguanosine
  modified_base 33: mod_base = OTHER; note = Uridine phosphorothiorate
  modified_base 34: mod_base = OTHER; note = 2'-fluorocytosine
  modified_base 38: mod_base = OTHER; note = 2'-Omethyluridine
  modified_base 46: mod_base = OTHER; note = 2'-Omethyladenosine
  modified_base 54: mod_base = OTHER; note = 2'-fluorocytosine
  modified_base 64: mod_base = OTHER; note = Uridine phosphorothiorate

SEQ ID NO: 7711 - RNA, 75 nt, synthetic construct; identical to SEQ ID NO: 3306
  source 1..75: mol_type = other RNA
  modified_base 1: mod_base = OTHER; note = 2'-Omethylguanosine phosphorothiorate
  modified_base 2: mod_base = OTHER; note = 2'-Omethyladenosine phosphorothiorate
  modified_base 3: mod_base = OTHER; note = 2'-Omethylcytosine
  modified_base 4: mod_base = OTHER; note = 2'-Omethylcytosine
  modified_base 5: mod_base = OTHER; note = 2'-Omethyluridine
  modified_base 6: mod_base = OTHER; note = 2'-Omethylcytosine
  modified_base 16: mod_base = OTHER; note = 2'-Omethylcytosine
  modified_base 17: mod_base = OTHER; note = 2'-Omethylguanosine
  modified_base 18: mod_base = OTHER; note = 2'-Omethylguanosine
  modified_base 24: mod_base = OTHER; note = 2'-Omethylcytosine
  modified_base 32: mod_base = OTHER; note = 2'-fluorouridine
  modified_base 34: mod_base = OTHER; note = Uridine phosphorothiorate
  modified_base 36: mod_base = OTHER; note = Guanosine phosphorothiorate
  modified_base 37: mod_base = OTHER; note = Adenosine phosphorothiorate
  modified_base 40: mod_base = OTHER; note = 2'-fluoroadenosine phosphorothiorate
  modified_base 41: mod_base = OTHER; note = 2'-Omethylguanosine
  modified_base 42: mod_base = OTHER; note = 2'-Omethyladenosine
  modified_base 43: mod_base = OTHER; note = 2'-Omethyladenosine
  modified_base 44: mod_base = OTHER; note = 2'-Omethylguanosine
  modified_base 45: mod_base = OTHER; note = 2'-fluoroguanosine
  modified_base 46: mod_base = OTHER; note = 2'-fluorouridine
  modified_base 47: mod_base = OTHER; note = 2'-fluorouridine
  modified_base 55: mod_base = OTHER; note = 2'-Omethylcytosine
  modified_base 58: mod_base = OTHER; note = 2'-Omethyladenosine
  modified_base 60: mod_base = OTHER; note = 2'-Omethylcytosine
  modified_base 61: mod_base = OTHER; note = 2'-Omethyladenosine
  modified_base 62: mod_base = OTHER; note = 2'-fluorocytosine
  modified_base 63: mod_base = OTHER; note = 2'-Omethylguanosine
  modified_base 64: mod_base = OTHER; note = 2'-Omethyluridine
  modified_base 65: mod_base = OTHER; note = 2'-Omethylcytosine
  modified_base 66: mod_base = OTHER; note = 2'-Omethylguanosine
  modified_base 67: mod_base = OTHER; note = 2'-Omethylguanosine
  modified_base 72: mod_base = OTHER; note = 2'-Omethyladenosine

SEQ ID NO: 7712 - RNA, 76 nt, synthetic construct; identical to SEQ ID NO: 625
  source 1..76: mol_type = other RNA
  modified_base 1: mod_base = OTHER; note = 2'-Omethylguanosine phosphorothiorate
  modified_base 2: mod_base = OTHER; note = 2'-Omethylguanosine phosphorothiorate
  modified_base 10: mod_base = OTHER; note = Guanosine phosphorothiorate
  modified_base 11: mod_base = OTHER; note = 2'-O-(2-Methoxyethyl) 5-methylcytosine
  modified_base 74: mod_base = OTHER; note = Cytosine phosphorothiorate
  modified_base 75: mod_base = OTHER; note = 2'-Omethylcytosine phosphorothiorate
  modified_base 76: mod_base = OTHER; note = 2'-Omethyladenosine

SEQ ID NO: 7713 - RNA, 76 nt, synthetic construct; identical to SEQ ID NO: 625
  source 1..76: mol_type = other RNA
  modified_base 1: mod_base = OTHER; note = 2'-Omethylguanosine phosphorothiorate
  modified_base 2: mod_base = OTHER; note = 2'-Omethylguanosine
  modified_base 3: mod_base = OTHER; note = 2'-Omethylcytosine
  modified_base 4: mod_base = OTHER; note = 2'-Omethyluridine
  modified_base 5: mod_base = OTHER; note = 2'-Omethylcytosine
  modified_base 6: mod_base = OTHER; note = 2'-Omethylcytosine
  modified_base 16: mod_base = OTHER; note = 2'-Omethyluridine
  modified_base 17: mod_base = OTHER; note = 2'-Omethylguanosine
  modified_base 18: mod_base = OTHER; note = 2'-Omethylguanosine
  modified_base 22: mod_base = OTHER; note = 2'-Omethylguanosine
  modified_base 23: mod_base = OTHER; note = 2'-Omethylcytosine
  modified_base 24: mod_base = OTHER; note = 2'-Omethylguanosine
  modified_base 25: mod_base = OTHER; note = 2'-Omethylcytosine
  modified_base 40: mod_base = OTHER; note = 2'-fluorouridine
  modified_base 41: mod_base = OTHER; note = 2'-fluorocytosine
  modified_base 42: mod_base = OTHER; note = 2'-fluoroadenosine
  modified_base 43: mod_base = OTHER; note = 2'-fluoroadenosine
  modified_base 49: mod_base = OTHER; note = 2'-Omethylcytosine
  modified_base 50: mod_base = OTHER; note = 2'-Omethylcytosine
  modified_base 51: mod_base = OTHER; note = 2'-Omethylguanosine
  modified_base 52: mod_base = OTHER; note = 2'-Omethylguanosine
  modified_base 53: mod_base = OTHER; note = 2'-Omethylguanosine
  modified_base 54: mod_base = OTHER; note = 2'-Omethyluridine phosphorothiorate
  modified_base 56: mod_base = OTHER; note = 2'-Omethylcytosine
  modified_base 57: mod_base = OTHER; note = 2'-fluoroguanosine
  modified_base 59: mod_base = OTHER; note = 2'-Omethylguanosine
  modified_base 61: mod_base = OTHER; note = 2'-Omethylcytosine
  modified_base 62: mod_base = OTHER; note = 2'-Omethylcytosine
  modified_base 63: mod_base = OTHER; note = 2'-Omethylcytosine
  modified_base 64: mod_base = OTHER; note = 2'-Omethylguanosine
  modified_base 65: mod_base = OTHER; note = 2'-Omethylguanosine
  modified_base 66: mod_base = OTHER; note = 2'-Omethylcytosine
  modified_base 67: mod_base = OTHER; note = 2'-Omethylguanosine
  modified_base 68: mod_base = OTHER; note = 2'-Omethylguanosine
  modified_base 69: mod_base = OTHER; note = 2'-Omethyladenosine
  modified_base 73: mod_base = OTHER; note = 2'-Omethylguanosine

SEQ ID NO: 7714 - RNA, 76 nt, synthetic construct; identical to SEQ ID NO: 625
  source 1..76: mol_type = other RNA
  modified_base 1: mod_base = OTHER; note = 2'-Omethylguanosine
  modified_base 4: mod_base = OTHER; note = 2'-Omethyluridine
  modified_base 5: mod_base = OTHER; note = 2'-fluorocytosine
  modified_base 10: mod_base = OTHER; note = 2'-fluoroguanosine phosphorothiorate
  modified_base 16: mod_base = OTHER; note = 2'-fluorouridine
  modified_base 21: mod_base = OTHER; note = Adenosine phosphorothiorate
  modified_base 22: mod_base = OTHER; note = 2'-Omethylguanosine
  modified_base 23: mod_base = OTHER; note = Cytosine phosphorothiorate
  modified_base 25: mod_base = OTHER; note = 2'-Omethylcytosine
  modified_base 27: mod_base = OTHER; note = 2'-Omethyluridine phosphorothiorate
  modified_base 28: mod_base = OTHER; note = 2'-fluorouridine
  modified_base 31: mod_base = OTHER; note = 2'-fluoroadenosine
  modified_base 41: mod_base = OTHER; note = Cytosine phosphorothiorate
  modified_base 42: mod_base = OTHER; note = Adenosine phosphorothiorate
  modified_base 44: mod_base = OTHER; note = 2'-fluoroadenosine
  modified_base 45: mod_base = OTHER; note = 2'-fluoroguanosine
  modified_base 49: mod_base = OTHER; note = 2'-Omethylcytosine
  modified_base 50: mod_base = OTHER; note = Cytosine phosphorothiorate
  modified_base 51: mod_base = OTHER; note = Guanosine phosphorothiorate
  modified_base 52: mod_base = OTHER; note = 2'-Omethylguanosine
  modified_base 54: mod_base = OTHER; note = 2'-fluorouridine phosphorothiorate
  modified_base 58: mod_base = OTHER; note = Adenosine phosphorothiorate
  modified_base 59: mod_base = OTHER; note = Guanosine phosphorothiorate
  modified_base 60: mod_base = OTHER; note = 2'-Omethyluridine
  modified_base 61: mod_base = OTHER; note = 2'-Omethylcytosine
  modified_base 62: mod_base = OTHER; note = 2'-Omethylcytosine
  modified_base 64: mod_base = OTHER; note = 2'-fluoroguanosine
  modified_base 65: mod_base = OTHER; note = Guanosine phosphorothiorate
  modified_base 66: mod_base = OTHER; note = 2'-Omethylcytosine
  modified_base 69: mod_base = OTHER; note = 2'-fluoroadenosine
  modified_base 70: mod_base = OTHER; note = 2'-fluoroguanosine
  modified_base 72: mod_base = OTHER; note = 2'-Omethylcytosine
  modified_base 74: mod_base = OTHER; note = 2'-fluorocytosine phosphorothiorate
  modified_base 76: mod_base = OTHER; note = 2'-fluoroadenosine

SEQ ID NO: 7715 - RNA, 73 nt, synthetic construct; identical to SEQ ID NO: 935
  source 1..73: mol_type = other RNA
  modified_base 1: mod_base = OTHER; note = 2'-Omethylguanosine phosphorothiorate
  modified_base 2: mod_base = OTHER; note = 2'-Omethylguanosine
  modified_base 26: mod_base = OTHER; note = Adenosine phosphorothiorate
  modified_base 27: mod_base = OTHER; note = 2'-O-(2-Methoxyethyl) thymine
  modified_base 51: mod_base = OTHER; note = Guanosine phosphorothiorate
  modified_base 52: mod_base = OTHER; note = 2'-fluoroguanosine
  modified_base 59: mod_base = OTHER; note = 2'-O-(2-Methoxyethyl) guanosine
  modified_base 73: mod_base = OTHER; note = 2'-Omethylguanosine

SEQ ID NO: 7716 - RNA, 76 nt, synthetic construct; identical to SEQ ID NO: 3295
  source 1..76: mol_type = other RNA
  modified_base 1: mod_base = OTHER; note = 2'-Omethylcytosine
  modified_base 3: mod_base = OTHER; note = 2'-Omethyluridine
  modified_base 10: mod_base = OTHER; note = 2'-fluoroguanosine phosphorothiorate
  modified_base 42: mod_base = OTHER; note = 2'-Omethyluridine
  modified_base 52: mod_base = OTHER; note = 2'-fluoroguanosine phosphorothiorate
  modified_base 53: mod_base = OTHER; note = 2'-fluoroguanosine phosphorothiorate
  modified_base 54: mod_base = OTHER; note = 2'-Omethyluridine phosphorothiorate
  modified_base 75: mod_base = OTHER; note = Cytosine phosphorothiorate
  modified_base 76: mod_base = OTHER; note = 2'-Omethyladenosine

SEQ ID NO: 7717 - RNA, 76 nt, synthetic construct; identical to SEQ ID NO: 3329
  source 1..76: mol_type = other RNA
  modified_base 1: mod_base = OTHER; note = 2'-Omethylguanosine
  modified_base 2: mod_base = OTHER; note = 2'-Omethylguanosine
  modified_base 3: mod_base = OTHER; note = 2'-Omethylcytosine
  modified_base 4: mod_base = OTHER; note = 2'-Omethylcytosine
  modified_base 5: mod_base = OTHER; note = 2'-Omethylcytosine
  modified_base 6: mod_base = OTHER; note = 2'-Omethylcytosine
  modified_base 13: mod_base = OTHER; note = 2'-Omethylcytosine
  modified_base 14: mod_base = OTHER; note = 2'-Omethyladenosine
  modified_base 15: mod_base = OTHER; note = 2'-Omethyladenosine
  modified_base 16: mod_base = OTHER; note = 2'-Omethyluridine
  modified_base 17: mod_base = OTHER; note = 2'-Omethylguanosine
  modified_base 18: mod_base = OTHER; note = 2'-Omethylguanosine
  modified_base 19: mod_base = OTHER; note = Adenosine phosphorothiorate
  modified_base 20: mod_base = OTHER; note = 2'-Omethyluridine
  modified_base 21: mod_base = OTHER; note = Adenosine phosphorothiorate
  modified_base 25: mod_base = OTHER; note = 2'-Omethylcytosine
  modified_base 33: mod_base = OTHER; note = Uridine phosphorothiorate
  modified_base 34: mod_base = OTHER; note = 2'-Omethyluridine
  modified_base 35: mod_base = OTHER; note = Cytosine phosphorothiorate
  modified_base 37: mod_base = OTHER; note = Adenosine phosphorothiorate
  modified_base 38: mod_base = OTHER; note = Adenosine phosphorothiorate
  modified_base 49: mod_base = OTHER; note = 2'-Omethylcytosine
  modified_base 50: mod_base = OTHER; note = 2'-Omethylcytosine
  modified_base 51: mod_base = OTHER; note = 2'-Omethylguanosine
  modified_base 52: mod_base = OTHER; note = 2'-Omethylguanosine
  modified_base 53: mod_base = OTHER; note = 2'-Omethylguanosine
  modified_base 54: mod_base = OTHER; note = Uridine phosphorothiorate
  modified_base 55: mod_base = OTHER; note = Uridine phosphorothiorate
  modified_base 61: mod_base = OTHER; note = 2'-Omethylcytosine
  modified_base 65: mod_base = OTHER; note = 2'-Omethylguanosine
  modified_base 73: mod_base = OTHER; note = 2'-Omethylguanosine

SEQ ID NO: 7718 - RNA, 86 nt, synthetic construct; identical to SEQ ID NO: 3290
  source 1..86: mol_type = other RNA
  modified_base 27: mod_base = OTHER; note = 2'-fluorouridine

SEQ ID NO: 7719 - RNA, 76 nt, synthetic construct; identical to SEQ ID NO: 625
  source 1..76: mol_type = other RNA
  modified_base 3: mod_base = OTHER; note = 2'-Omethylcytosine
  modified_base 10: mod_base = OTHER; note = 2'-Omethylguanosine phosphorothiorate
  modified_base 12: mod_base = OTHER; note = 2'-fluoroguanosine
  modified_base 13: mod_base = OTHER; note = 2'-Omethylcytosine
  modified_base 18: mod_base = OTHER; note = 2'-fluoroguanosine phosphorothiorate
  modified_base 20: mod_base = OTHER; note = 2'-fluorouridine
  modified_base 22: mod_base = OTHER; note = 2'-Omethylguanosine phosphorothiorate
  modified_base 23: mod_base = OTHER; note = Cytosine phosphorothiorate
  modified_base 25: mod_base = OTHER; note = 2'-Omethylcytosine phosphorothiorate
  modified_base 26: mod_base = OTHER; note = 2'-Omethyladenosine
  modified_base 28: mod_base = OTHER; note = 2'-fluorouridine
  modified_base 29: mod_base = OTHER; note = 2'-fluoroguanosine
  modified_base 30: mod_base = OTHER; note = 2'-Omethylguanosine
  modified_base 31: mod_base = OTHER; note = 2'-fluoroadenosine
  modified_base 38: mod_base = OTHER; note = 2'-Omethyladenosine
  modified_base 39: mod_base = OTHER; note = 2'-Omethyluridine
  modified_base 41: mod_base = OTHER; note = 2'-fluorocytosine
  modified_base 42: mod_base = OTHER; note = 2'-Omethyladenosine
  modified_base 45: mod_base = OTHER; note = 2'-Omethylguanosine
  modified_base 46: mod_base = OTHER; note = Guanosine phosphorothiorate
  modified_base 47: mod_base = OTHER; note = 2'-fluorouridine
  modified_base 48: mod_base = OTHER; note = Uridine phosphorothiorate
  modified_base 49: mod_base = OTHER; note = 2'-Omethylcytosine
  modified_base 50: mod_base = OTHER; note = 2'-fluorocytosine
  modified_base 57: mod_base = OTHER; note = Guanosine phosphorothiorate
  modified_base 58: mod_base = OTHER; note = 2'-fluoroadenosine
  modified_base 60: mod_base = OTHER; note = Uridine phosphorothiorate
  modified_base 61: mod_base = OTHER; note = 2'-fluorocytosine
  modified_base 62: mod_base = OTHER; note = 2'-fluorocytosine phosphorothiorate
  modified_base 63: mod_base = OTHER; note = 2'-fluorocytosine
  modified_base 64: mod_base = OTHER; note = Guanosine phosphorothiorate
  modified_base 65: mod_base = OTHER; note = 2'-Omethylguanosine
  modified_base 68: mod_base = OTHER; note = Guanosine phosphorothiorate
  modified_base 69: mod_base = OTHER; note = 2'-fluoroadenosine
  modified_base 70: mod_base = OTHER; note = 2'-Omethylguanosine

SEQ ID NO: 7720 - RNA, 75 nt, synthetic construct; identical to SEQ ID NO: 3306
  source 1..75: mol_type = other RNA
  modified_base 1: mod_base = OTHER; note = 2'-Omethylguanosine
  modified_base 64: mod_base = OTHER; note = 2'-Omethyluridine

SEQ ID NO: 7721 - RNA, 86 nt, synthetic construct; identical to SEQ ID NO: 3290
  source 1..86: mol_type = other RNA
  modified_base 4: mod_base = OTHER; note = 2'-Omethyladenosine

SEQ ID NO: 7722 - RNA, 85 nt, synthetic construct; identical to SEQ ID NO: 3286
  source 1..85: mol_type = other RNA
  modified_base 1: mod_base = OTHER; note = 2'-Omethylcytosine
  modified_base 11: mod_base = OTHER; note = Cytosine phosphorothiorate
  modified_base 17: mod_base = OTHER; note = 2'-Omethylguanosine
  modified_base 26: mod_base = OTHER; note = 2'-Omethyluridine
  modified_base 28: mod_base = OTHER; note = 2'-fluoroguanosine
  modified_base 32: mod_base = OTHER; note = 2'-fluorouridine
  modified_base 36: mod_base = OTHER; note = Guanosine phosphorothiorate
  modified_base 42: mod_base = OTHER; note = Adenosine phosphorothiorate
  modified_base 64: mod_base = OTHER; note = Uridine phosphorothiorate
  modified_base 84: mod_base = OTHER; note = 2'-Omethylcytosine

SEQ ID NO: 7723 - RNA, 76 nt, synthetic construct; identical to SEQ ID NO: 625
  source 1..76: mol_type = other RNA
  modified_base 1: mod_base = OTHER; note = 2'-Omethylguanosine phosphorothiorate
  modified_base 2: mod_base = OTHER; note = 2'-Omethylguanosine
  modified_base 17: mod_base = OTHER; note = 2'-Omethylguanosine
  modified_base 33: mod_base = OTHER; note = 2'-fluorouridine
  modified_base 35: mod_base = OTHER; note = Cytosine phosphorothiorate
  modified_base 37: mod_base = OTHER; note = Adenosine phosphorothiorate
  modified_base 38: mod_base = OTHER; note = Adenosine phosphorothiorate
  modified_base 56: mod_base = OTHER; note = 2'-Omethylcytosine
  modified_base 62: mod_base = OTHER; note = 2'-Omethylcytosine
  modified_base 73: mod_base = OTHER; note = 2'-Omethylguanosine
  modified_base 75: mod_base = OTHER; note = 2'-fluorocytosine phosphorothiorate

SEQ ID NO: 7724 - RNA, 75 nt, synthetic construct; identical to SEQ ID NO: 3336
  source 1..75: mol_type = other RNA

SEQ ID NO: 7725 - RNA, 75 nt, synthetic construct; identical to SEQ ID NO: 3299
  source 1..75: mol_type = other RNA
  modified_base 1: mod_base = OTHER; note = 2'-Omethylcytosine
  modified_base 8: mod_base = OTHER; note = 2'-Omethyladenosine
  modified_base 16: mod_base = OTHER; note = 2'-fluorocytosine
  modified_base 21: mod_base = OTHER; note = 2'-fluoroguanosine
  modified_base 22: mod_base = OTHER; note = 2'-Omethyladenosine
  modified_base 26: mod_base = OTHER; note = Uridine phosphorothiorate
  modified_base 27: mod_base = OTHER; note = 2'-Omethylcytosine phosphorothiorate
  modified_base 33: mod_base = OTHER; note = 2'-fluorouridine
  modified_base 35: mod_base = OTHER; note = 2'-fluoroadenosine
  modified_base 36: mod_base = OTHER; note = 2'-fluoroadenosine
  modified_base 39: mod_base = OTHER; note = 2'-Omethylcytosine phosphorothiorate
  modified_base 46: mod_base = OTHER; note = 2'-fluorouridine
  modified_base 48: mod_base = OTHER; note = 2'-fluorocytosine
  modified_base 49: mod_base = OTHER; note = 2'-fluoroadenosine
  modified_base 53: mod_base = OTHER; note = 2'-fluorouridine
  modified_base 58: mod_base = OTHER; note = Guanosine phosphorothiorate
  modified_base 62: mod_base = OTHER; note = 2'-Omethylcytosine phosphorothiorate
  modified_base 63: mod_base = OTHER; note = 2'-fluorouridine phosphorothiorate
  modified_base 72: mod_base = OTHER; note = 2'-fluoroguanosine phosphorothiorate
  modified_base 74: mod_base = OTHER; note = Cytosine phosphorothiorate

SEQ ID NO: 7726 - RNA, 76 nt, synthetic construct; identical to SEQ ID NO: 3342
  source 1..76: mol_type = other RNA
  modified_base 1: mod_base = OTHER; note = 2'-Omethylguanosine
  modified_base 2: mod_base = OTHER; note = 2'-Omethylguanosine
  modified_base 3: mod_base = OTHER; note = 2'-Omethylcytosine
  modified_base 4: mod_base = OTHER; note = 2'-Omethyluridine
  modified_base 5: mod_base = OTHER; note = 2'-Omethylcytosine
  modified_base 6: mod_base = OTHER; note = 2'-Omethylcytosine
  modified_base 10: mod_base = OTHER; note = 2'-Omethylguanosine
  modified_base 11: mod_base = OTHER; note = 2'-Omethylcytosine
  modified_base 12: mod_base = OTHER; note = 2'-Omethylguanosine
  modified_base 13: mod_base = OTHER; note = 2'-Omethylcytosine
  modified_base 14: mod_base = OTHER; note = 2'-Omethyladenosine
  modified_base 15: mod_base = OTHER; note = 2'-fluoroadenosine
  modified_base 16: mod_base = OTHER; note = 2'-Omethyluridine
  modified_base 17: mod_base = OTHER; note = 2'-Omethylguanosine
  modified_base 18: mod_base = OTHER; note = 2'-Omethylguanosine
  modified_base 19: mod_base = OTHER; note = 2'-fluoroadenosine
  modified_base 20: mod_base = OTHER; note = 2'-Omethyluridine
  modified_base 25: mod_base = OTHER; note = 2'-Omethylcytosine
  modified_base 33: mod_base = OTHER; note = 2'-fluorouridine
  modified_base 35: mod_base = OTHER; note = Cytosine phosphorothiorate
  modified_base 37: mod_base = OTHER; note = Adenosine phosphorothiorate
  modified_base 38: mod_base = OTHER; note = Adenosine phosphorothiorate
  modified_base 41: mod_base = OTHER; note = 2'-Omethylcytosine
  modified_base 42: mod_base = OTHER; note = 2'-Omethylguanosine
  modified_base 43: mod_base = OTHER; note = 2'-Omethyladenosine
  modified_base 44: mod_base = OTHER; note = 2'-Omethyladenosine
  modified_base 49: mod_base = OTHER; note = 2'-Omethylcytosine
  modified_base 50: mod_base = OTHER; note = 2'-Omethylcytosine
  modified_base 52: mod_base = OTHER; note = 2'-Omethylguanosine
  modified_base 54: mod_base = OTHER; note = 2'-Omethyluridine
  modified_base 55: mod_base = OTHER; note = Uridine phosphorothiorate
  modified_base 56: mod_base = OTHER; note = 2'-Omethylcytosine
  modified_base 57: mod_base = OTHER; note = 2'-fluoroguanosine
  modified_base 59: mod_base = OTHER; note = 2'-Omethylguanosine
  modified_base 61: mod_base = OTHER; note = 2'-Omethylcytosine
  modified_base 65: mod_base = OTHER; note = 2'-Omethylguanosine
  modified_base 73: mod_base = OTHER; note = 2'-Omethylguanosine

SEQ ID NO: 7727 - RNA, 76 nt, synthetic construct; identical to SEQ ID NO: 3318
  source 1..76: mol_type = other RNA
  modified_base 1: mod_base = OTHER; note = 2'-Omethylcytosine phosphorothiorate
  modified_base 2: mod_base = OTHER; note = 2'-Omethylcytosine phosphorothiorate
  modified_base 3: mod_base = OTHER; note = 2'-Omethyluridine
  modified_base 4: mod_base = OTHER; note = 2'-Omethyluridine
  modified_base 5: mod_base = OTHER; note = 2'-Omethylcytosine
  modified_base 6: mod_base = OTHER; note = 2'-Omethylguanosine
  modified_base 16: mod_base = OTHER; note = 2'-Omethyluridine
  modified_base 18: mod_base = OTHER; note = 2'-Omethylguanosine
  modified_base 19: mod_base = OTHER; note = 2'-Omethylguanosine
  modified_base 25: mod_base = OTHER; note = 2'-Omethylcytosine
  modified_base 33: mod_base = OTHER; note = 2'-fluorouridine
  modified_base 35: mod_base = OTHER; note = Uridine phosphorothiorate
  modified_base 37: mod_base = OTHER; note = Guanosine phosphorothiorate
  modified_base 38: mod_base = OTHER; note = Adenosine phosphorothiorate
  modified_base 41: mod_base = OTHER; note = 2'-Omethylcytosine
  modified_base 44: mod_base = OTHER; note = 2'-Omethyladenosine
  modified_base 45: mod_base = OTHER; note = 2'-Omethylguanosine
  modified_base 46: mod_base = OTHER; note = 2'-fluoroguanosine
  modified_base 47: mod_base = OTHER; note = 2'-fluorouridine
  modified_base 48: mod_base = OTHER; note = 2'-fluorocytosine
  modified_base 49: mod_base = OTHER; note = 2'-Omethylguanosine
  modified_base 50: mod_base = OTHER; note = 2'-Omethylcytosine
  modified_base 51: mod_base = OTHER; note = 2'-Omethyluridine
  modified_base 52: mod_base = OTHER; note = 2'-Omethylguanosine
  modified_base 53: mod_base = OTHER; note = 2'-Omethylguanosine
  modified_base 54: mod_base = OTHER; note = 2'-Omethyluridine
  modified_base 56: mod_base = OTHER; note = 2'-Omethylcytosine
  modified_base 59: mod_base = OTHER; note = 2'-Omethyladenosine
  modified_base 73: mod_base = OTHER; note = 2'-Omethyladenosine

SEQ ID NO: 7728 - RNA, 76 nt, synthetic construct; identical to SEQ ID NO: 625
  source 1..76: mol_type = other RNA
  modified_base 1: mod_base = OTHER; note = 2'-Omethylguanosine
  modified_base 17: mod_base = OTHER; note = 2'-Omethylguanosine
  modified_base 18: mod_base = OTHER; note = 2'-Omethylguanosine
  modified_base 33: mod_base = OTHER; note = 2'-fluorouridine
  modified_base 39: mod_base = OTHER; note = Thymine
  modified_base 50: mod_base = OTHER; note = 2'-Omethylcytosine
  modified_base 52: mod_base = OTHER; note = 2'-Omethylguanosine
  modified_base 55: mod_base = OTHER; note = Uridine phosphorothiorate
  modified_base 73: mod_base = OTHER; note = 2'-Omethylguanosine

SEQ ID NO: 7729 - RNA, 85 nt, synthetic construct; identical to SEQ ID NO: 3297
  source 1..85: mol_type = other RNA
  modified_base 1: mod_base = OTHER; note = 2'-Omethylguanosine
  modified_base 10: mod_base = OTHER; note = 2'-Omethylguanosine
  modified_base 11: mod_base = OTHER; note = 2'-Omethylcytosine
  modified_base 12: mod_base = OTHER; note = 2'-Omethylcytosine
  modified_base 13: mod_base = OTHER; note = 2'-Omethylguanosine
  modified_base 14: mod_base = OTHER; note = 2'-Omethyladenosine
  modified_base 15: mod_base = OTHER; note = 2'-Omethylguanosine
  modified_base 16: mod_base = OTHER; note = 2'-Omethyluridine
  modified_base 17: mod_base = OTHER; note = 2'-Omethylguanosine
  modified_base 18: mod_base = OTHER; note = 2'-Omethylguanosine
  modified_base 19: mod_base = OTHER; note = Uridine phosphorothiorate
  modified_base 20: mod_base = OTHER; note = 2'-Omethyluridine
  modified_base 21: mod_base = OTHER; note = Adenosine phosphorothiorate
  modified_base 25: mod_base = OTHER; note = 2'-Omethylcytosine
  modified_base 41: mod_base = OTHER; note = 2'-Omethylcytosine
  modified_base 42: mod_base = OTHER; note = 2'-Omethyladenosine
  modified_base 43: mod_base = OTHER; note = 2'-Omethyladenosine
  modified_base 44: mod_base = OTHER; note = 2'-Omethyluridine
  modified_base 58: mod_base = OTHER; note = 2'-Omethylguanosine
  modified_base 59: mod_base = OTHER; note = 2'-Omethylcytosine
  modified_base 61: mod_base = OTHER; note = 2'-Omethylguanosine
  modified_base 63: mod_base = OTHER; note = Uridine phosphorothiorate
  modified_base 64: mod_base = OTHER; note = Uridine phosphorothiorate
  modified_base 70: mod_base = OTHER; note = 2'-Omethylcytosine
  modified_base 74: mod_base = OTHER; note = 2'-Omethylcytosine
  modified_base 82: mod_base = OTHER; note = 2'-Omethylguanosine

SEQ ID NO: 7730 - RNA, 75 nt, synthetic construct; identical to SEQ ID NO: 1045
  source 1..75: mol_type = other RNA
  modified_base 1: mod_base = OTHER; note = 2'-Omethylguanosine phosphorothiorate
  modified_base 2: mod_base = OTHER; note = 2'-fluoroguanosine phosphorothiorate
  modified_base 11: mod_base = OTHER; note = 2'-fluorouridine
  modified_base 21: mod_base = OTHER; note = 2'-fluoroadenosine
  modified_base 26: mod_base = OTHER; note = Uridine phosphorothiorate
  modified_base 29: mod_base = OTHER; note = 2'-Omethylguanosine phosphorothiorate
  modified_base 38: mod_base = OTHER; note = 2'-fluoroadenosine
  modified_base 41: mod_base = OTHER; note = 2'-fluorocytosine
  modified_base 54: mod_base = OTHER; note = 2'-Omethyluridine
  modified_base 55: mod_base = OTHER; note = 2'-Omethylcytosine
  modified_base 61: mod_base = OTHER; note = 2'-fluorouridine phosphorothiorate
  modified_base 62: mod_base = OTHER; note = 2'-fluorocytosine
  modified_base 66: mod_base = OTHER; note = Guanosine phosphorothiorate
  modified_base 74: mod_base = OTHER; note = Cytosine phosphorothiorate

SEQ ID NO: 7731 - RNA, 86 nt, synthetic construct; identical to SEQ ID NO: 3290
  source 1..86: mol_type = other RNA
  modified_base 1: mod_base = OTHER; note = 2'-Omethyladenosine
  modified_base 2: mod_base = OTHER; note = 2'-Omethylcytosine
  modified_base 3: mod_base = OTHER; note = 2'-Omethylcytosine
  modified_base 4: mod_base = OTHER; note = 2'-Omethyladenosine
  modified_base 5: mod_base = OTHER; note = 2'-Omethylguanosine
  modified_base 6: mod_base = OTHER; note = 2'-Omethylguanosine
  modified_base 14: mod_base = OTHER; note = 2'-Omethyladenosine
  modified_base 15: mod_base = OTHER; note = 2'-Omethylguanosine
  modified_base 16: mod_base = OTHER; note = 2'-Omethyluridine
  modified_base 17: mod_base = OTHER; note = 2'-Omethylguanosine
  modified_base 18: mod_base = OTHER; note = 2'-Omethylguanosine
  modified_base 20: mod_base = OTHER; note = 2'-Omethyluridine
  modified_base 25: mod_base = OTHER; note = 2'-Omethylcytosine
  modified_base 41: mod_base = OTHER; note = 2'-Omethylcytosine
  modified_base 42: mod_base = OTHER; note = 2'-Omethyladenosine
  modified_base 43: mod_base = OTHER; note = 2'-Omethyladenosine
  modified_base 44: mod_base = OTHER; note = 2'-Omethyluridine
  modified_base 59: mod_base = OTHER; note = 2'-Omethylguanosine
  modified_base 60: mod_base = OTHER; note = 2'-Omethyluridine
  modified_base 62: mod_base = OTHER; note = 2'-Omethylguanosine
  modified_base 64: mod_base = OTHER; note = 2'-Omethyluridine
  modified_base 65: mod_base = OTHER; note = Uridine phosphorothiorate
  modified_base 66: mod_base = OTHER; note = 2'-Omethylcytosine
  modified_base 67: mod_base = OTHER; note = 2'-fluoroguanosine
  modified_base 69: mod_base = OTHER; note = 2'-Omethyladenosine
  modified_base 71: mod_base = OTHER; note = 2'-Omethylcytosine
  modified_base 72: mod_base = OTHER; note = 2'-Omethylcytosine
  modified_base 73: mod_base = OTHER; note = 2'-fluorocytosine
  modified_base 74: mod_base = OTHER; note = 2'-Omethyladenosine
  modified_base 75: mod_base = OTHER; note = 2'-Omethylcytosine
  modified_base 83: mod_base = OTHER; note = 2'-Omethyladenosine

SEQ ID NO: 7732 - RNA, 75 nt, synthetic construct; identical to SEQ ID NO: 1045
  source 1..75: mol_type = other RNA
  modified_base 4: mod_base = OTHER; note = 2'-Omethyluridine
  modified_base 12: mod_base = OTHER; note = 2'-fluoroguanosine phosphorothiorate
  modified_base 18: mod_base = OTHER; note = 2'-fluoroguanosine
  modified_base 20: mod_base = OTHER; note = 2'-fluoroadenosine
  modified_base 21: mod_base = OTHER; note = 2'-fluoroadenosine
  modified_base 27: mod_base = OTHER; note = 2'-fluorocytosine
  modified_base 28: mod_base = OTHER; note = 2'-fluorouridine phosphorothiorate
  modified_base 32: mod_base = OTHER; note = 2'-fluorocytosine
  modified_base 38: mod_base = OTHER; note = Adenosine phosphorothiorate
  modified_base 39: mod_base = OTHER; note = Uridine phosphorothiorate
  modified_base 40: mod_base = OTHER; note = 2'-Omethylcytosine
  modified_base 44: mod_base = OTHER; note = 2'-fluorocytosine
  modified_base 57: mod_base = OTHER; note = 2'-Omethyladenosine
  modified_base 62: mod_base = OTHER; note = 2'-fluorocytosine
  modified_base 67: mod_base = OTHER; note = Guanosine phosphorothiorate
  modified_base 68: mod_base = OTHER; note = Adenosine phosphorothiorate
  modified_base 69: mod_base = OTHER; note = 2'-fluoroadenosine
  modified_base 73: mod_base = OTHER; note = Cytosine phosphorothiorate
  modified_base 74: mod_base = OTHER; note = 2'-fluorocytosine phosphorothiorate
  modified_base 75: mod_base = OTHER; note = 2'-fluoroadenosine

SEQ ID NO: 7733 - RNA, 76 nt, synthetic construct; identical to SEQ ID NO: 3795
  source 1..76: mol_type = other RNA
  modified_base 1: mod_base = OTHER; note = 2'-Omethylguanosine
  modified_base 2: mod_base = OTHER; note = 2'-Omethylcytosine
  modified_base 3: mod_base = OTHER; note = 2'-Omethylcytosine
  modified_base 4: mod_base = OTHER; note = 2'-Omethyluridine
  modified_base 5: mod_base = OTHER; note = 2'-Omethylcytosine
  modified_base 6: mod_base = OTHER; note = 2'-Omethylcytosine
  modified_base 14: mod_base = OTHER; note = 2'-Omethyladenosine
  modified_base 15: mod_base = OTHER; note = 2'-Omethyladenosine
  modified_base 16: mod_base = OTHER; note = 2'-Omethyluridine
  modified_base 17: mod_base = OTHER; note = 2'-Omethylguanosine
  modified_base 18: mod_base = OTHER; note = 2'-Omethylguanosine
  modified_base 20: mod_base = OTHER; note = 2'-Omethyluridine
  modified_base 25: mod_base = OTHER; note = 2'-Omethylcytosine
  modified_base 33: mod_base = OTHER; note = 2'-fluorouridine
  modified_base 35: mod_base = OTHER; note = Cytosine phosphorothiorate
  modified_base 37: mod_base = OTHER; note = Adenosine phosphorothiorate
  modified_base 38: mod_base = OTHER; note = Adenosine phosphorothiorate
  modified_base 41: mod_base = OTHER; note = 2'-Omethylcytosine
  modified_base 42: mod_base = OTHER; note = 2'-Omethylguanosine
  modified_base 43: mod_base = OTHER; note = 2'-Omethylguanosine
  modified_base 44: mod_base = OTHER; note = 2'-fluoroguanosine
  modified_base 49: mod_base = OTHER; note = 2'-Omethylguanosine
  modified_base 50: mod_base = OTHER; note = 2'-Omethylcytosine
  modified_base 52: mod_base = OTHER; note = 2'-Omethylguanosine
  modified_base 54: mod_base = OTHER; note = 2'-Omethyluridine
  modified_base 55: mod_base = OTHER; note = Uridine phosphorothiorate
  modified_base 56: mod_base = OTHER; note = 2'-Omethylcytosine
  modified_base 57: mod_base = OTHER; note = 2'-fluoroguanosine
  modified_base 59: mod_base = OTHER; note = 2'-Omethylguanosine
  modified_base 61: mod_base = OTHER; note = 2'-Omethylcytosine
  modified_base 65: mod_base = OTHER; note = 2'-Omethyluridine
  modified_base 73: mod_base = OTHER; note = 2'-Omethylguanosine

SEQ ID NO: 7734 - RNA, 73 nt, synthetic construct; identical to SEQ ID NO: 935
  source 1..73: mol_type = other RNA
  modified_base 1: mod_base = OTHER; note = 2'-Omethylguanosine phosphorothiorate
  modified_base 2: mod_base = OTHER; note = 2'-Omethylguanosine
  modified_base 3: mod_base = OTHER; note = 2'-Omethylcytosine
  modified_base 4: mod_base = OTHER; note = 2'-Omethyluridine
  modified_base 5: mod_base = OTHER; note = 2'-Omethylcytosine
  modified_base 6: mod_base = OTHER; note = 2'-Omethylcytosine
  modified_base 54: mod_base = OTHER; note = 2'-Omethyluridine phosphorothiorate
  modified_base 56: mod_base = OTHER; note = 2'-Omethylcytosine
  modified_base 57: mod_base = OTHER; note = 2'-fluoroguanosine
  modified_base 59: mod_base = OTHER; note = 2'-Omethylguanosine
  modified_base 73: mod_base = OTHER; note = 2'-Omethylguanosine

SEQ ID NO: 7735 - RNA, 76 nt, synthetic construct; identical to SEQ ID NO: 625
  source 1..76: mol_type = other RNA
  modified_base 1: mod_base = OTHER; note = 2'-Omethylguanosine
  modified_base 4: mod_base = OTHER; note = 2'-Omethyluridine
  modified_base 5: mod_base = OTHER; note = 2'-fluorocytosine phosphorothiorate
  modified_base 10: mod_base = OTHER; note = Guanosine phosphorothiorate
  modified_base 11: mod_base = OTHER; note = 2'-Omethylcytosine
  modified_base 12: mod_base = OTHER; note = 2'-Omethylguanosine
  modified_base 15: mod_base = OTHER; note = 2'-fluoroadenosine
  modified_base 20: mod_base = OTHER; note = 2'-Omethyluridine
  modified_base 23: mod_base = OTHER; note = 2'-Omethylcytosine
  modified_base 26: mod_base = OTHER; note = Adenosine phosphorothiorate
  modified_base 27: mod_base = OTHER; note = 2'-fluorouridine phosphorothiorate
  modified_base 29: mod_base = OTHER; note = 2'-Omethylguanosine phosphorothiorate
  modified_base 30: mod_base = OTHER; note = 2'-Omethylguanosine
  modified_base 32: mod_base = OTHER; note = 2'-fluorocytosine
  modified_base 33: mod_base = OTHER; note = 2'-fluorouridine
  modified_base 34: mod_base = OTHER; note = 2'-fluorouridine
  modified_base 36: mod_base = OTHER; note = Adenosine phosphorothiorate
  modified_base 38: mod_base = OTHER; note = 2'-Omethyladenosine
  modified_base 43: mod_base = OTHER; note = Adenosine phosphorothiorate
  modified_base 45: mod_base = OTHER; note = Guanosine phosphorothiorate
  modified_base 47: mod_base = OTHER; note = Uridine phosphorothiorate
  modified_base 51: mod_base = OTHER; note = Guanosine phosphorothiorate
  modified_base 52: mod_base = OTHER; note = 2'-Omethylguanosine phosphorothiorate
  modified_base 53: mod_base = OTHER; note = 2'-fluoroguanosine
  modified_base 60: mod_base = OTHER; note = Uridine phosphorothiorate
  modified_base 62: mod_base = OTHER; note = Cytosine phosphorothiorate
  modified_base 64: mod_base = OTHER; note = Guanosine phosphorothiorate
  modified_base 65: mod_base = OTHER; note = 2'-Omethylguanosine
  modified_base 69: mod_base = OTHER; note = 2'-fluoroadenosine phosphorothiorate
  modified_base 70: mod_base = OTHER; note = 2'-Omethylguanosine phosphorothiorate
  modified_base 72: mod_base = OTHER; note = 2'-Omethylcytosine
  modified_base 74: mod_base = OTHER; note = 2'-fluorocytosine
  modified_base 75: mod_base = OTHER; note = 2'-fluorocytosine

SEQ ID NO: 7736 - RNA, 76 nt, synthetic construct; identical to SEQ ID NO: 3318
  source 1..76: mol_type = other RNA
  modified_base 1: mod_base = OTHER; note = 2'-Omethylcytosine
  modified_base 2: mod_base = OTHER; note = 2'-Omethylcytosine
  modified_base 3: mod_base = OTHER; note = 2'-Omethyluridine
  modified_base 4: mod_base = OTHER; note = 2'-Omethyluridine
  modified_base 5: mod_base = OTHER; note = 2'-Omethylcytosine
  modified_base 6: mod_base = OTHER; note = 2'-Omethylguanosine
  modified_base 13: mod_base = OTHER; note = 2'-Omethylcytosine
  modified_base 14: mod_base = OTHER; note = 2'-Omethyladenosine
  modified_base 15: mod_base = OTHER; note = 2'-Omethylguanosine
  modified_base 16: mod_base = OTHER; note = 2'-Omethyluridine
  modified_base 18: mod_base = OTHER; note = 2'-Omethylguanosine
  modified_base 19: mod_base = OTHER; note = 2'-Omethylguanosine
  modified_base 20: mod_base = OTHER; note = Uridine phosphorothiorate
  modified_base 21: mod_base = OTHER; note = Adenosine phosphorothiorate
  modified_base 25: mod_base = OTHER; note = 2'-Omethylcytosine
  modified_base 33: mod_base = OTHER; note = 2'-fluorouridine
  modified_base 34: mod_base = OTHER; note = 2'-Omethylcytosine
  modified_base 35: mod_base = OTHER; note = Uridine phosphorothiorate
  modified_base 37: mod_base = OTHER; note = Guanosine phosphorothiorate
  modified_base 38: mod_base = OTHER; note = Adenosine phosphorothiorate
  modified_base 49: mod_base = OTHER; note = 2'-Omethylguanosine
  modified_base 50: mod_base = OTHER; note = 2'-Omethylcytosine
  modified_base 52: mod_base = OTHER; note = 2'-Omethylguanosine
  modified_base 54: mod_base = OTHER; note = Uridine phosphorothiorate
  modified_base 55: mod_base = OTHER; note = Uridine phosphorothiorate
  modified_base 61: mod_base = OTHER; note = 2'-Omethylcytosine
  modified_base 65: mod_base = OTHER; note = 2'-Omethylcytosine
  modified_base 73: mod_base = OTHER; note = 2'-Omethyladenosine

SEQ ID NO: 7737 - RNA, 85 nt, synthetic construct; identical to SEQ ID NO: 3286
  source 1..85: mol_type = other RNA
  modified_base 2: mod_base = OTHER; note = 2'-Omethylcytosine
  modified_base 29: mod_base = OTHER; note = 2'-fluoroguanosine
  modified_base 65: mod_base = OTHER; note = Cytosine phosphorothiorate
  modified_base 75: mod_base = OTHER; note = Uridine phosphorothiorate

SEQ ID NO: 7738 - RNA, 86 nt, synthetic construct; identical to SEQ ID NO: 3290
  source 1..86: mol_type = other RNA
  modified_base 1: mod_base = OTHER; note = 2'-Omethyladenosine
  modified_base 2: mod_base = OTHER; note = 2'-Omethylcytosine
  modified_base 3: mod_base = OTHER; note = 2'-Omethylcytosine
  modified_base 4: mod_base = OTHER; note = 2'-Omethyladenosine
  modified_base 5: mod_base = OTHER; note = 2'-Omethylguanosine
  modified_base 6: mod_base = OTHER; note = 2'-Omethylguanosine
  modified_base 16: mod_base = OTHER; note = 2'-Omethyluridine
  modified_base 17: mod_base = OTHER; note = 2'-Omethylguanosine
  modified_base 18: mod_base = OTHER; note = 2'-Omethylguanosine
  modified_base 20: mod_base = OTHER; note = 2'-Omethyluridine
  modified_base 25: mod_base = OTHER; note = 2'-Omethylcytosine
  modified_base 33: mod_base = OTHER; note = 2'-fluorouridine
  modified_base 35: mod_base = OTHER; note = Cytosine phosphorothiorate
  modified_base 37: mod_base = OTHER; note = Guanosine phosphorothiorate
  modified_base 38: mod_base = OTHER; note = Adenosine phosphorothiorate
  modified_base 41: mod_base = OTHER; note = 2'-Omethylcytosine
  modified_base 44: mod_base = OTHER; note = 2'-Omethyluridine
  modified_base 57: mod_base = OTHER; note = 2'-fluoroguanosine
  modified_base 58: mod_base = OTHER; note = 2'-fluorocytosine
  modified_base 59: mod_base = OTHER; note = 2'-Omethylguanosine
  modified_base 60: mod_base = OTHER; note = 2'-Omethyluridine
  modified_base 61: mod_base = OTHER; note = 2'-Omethylguanosine
  modified_base 62: mod_base = OTHER; note = 2'-Omethylguanosine
  modified_base 63: mod_base = OTHER; note = 2'-Omethylguanosine
  modified_base 64: mod_base = OTHER; note = 2'-Omethyluridine
  modified_base 66: mod_base = OTHER; note = 2'-Omethylcytosine
  modified_base 69: mod_base = OTHER; note = 2'-Omethyladenosine
  modified_base 83: mod_base = OTHER; note = 2'-Omethyladenosine

SEQ ID NO: 7739 - RNA, 76 nt, synthetic construct; identical to SEQ ID NO: 625
  source 1..76: mol_type = other RNA
  modified_base 1: mod_base = OTHER; note = 2'-Omethylguanosine phosphorothiorate
  modified_base 2: mod_base = OTHER; note = 2'-Omethylguanosine
  modified_base 3: mod_base = OTHER; note = 2'-Omethylcytosine
  modified_base 4: mod_base = OTHER; note = 2'-Omethyluridine
  modified_base 5: mod_base = OTHER; note = 2'-Omethylcytosine
  modified_base 6: mod_base = OTHER; note = 2'-Omethylcytosine
  modified_base 10: mod_base = OTHER; note = 2'-Omethylguanosine
  modified_base 11: mod_base = OTHER; note = 2'-Omethylcytosine
  modified_base 12: mod_base = OTHER; note = 2'-Omethylguanosine
  modified_base 13: mod_base = OTHER; note = 2'-Omethylcytosine
  modified_base 14: mod_base = OTHER; note = 2'-Omethyladenosine
  modified_base 15: mod_base = OTHER; note = 2'-Omethyladenosine
  modified_base 16: mod_base = OTHER; note = 2'-Omethyluridine
  modified_base 17: mod_base = OTHER; note = 2'-Omethylguanosine
  modified_base 18: mod_base = OTHER; note = 2'-Omethylguanosine
  modified_base 19: mod_base = OTHER; note = 2'-Omethyladenosine
  modified_base 20: mod_base = OTHER; note = 2'-Omethyluridine
  modified_base 22: mod_base = OTHER; note = 2'-Omethylguanosine
  modified_base 23: mod_base = OTHER; note = 2'-Omethylcytosine
  modified_base 24: mod_base = OTHER; note = 2'-Omethylguanosine
  modified_base 25: mod_base = OTHER; note = 2'-Omethylcytosine
  modified_base 49: mod_base = OTHER; note = 2'-Omethylcytosine
  modified_base 50: mod_base = OTHER; note = 2'-Omethylcytosine
  modified_base 51: mod_base = OTHER; note = 2'-Omethylguanosine
  modified_base 52: mod_base = OTHER; note = 2'-Omethylguanosine
  modified_base 53: mod_base = OTHER; note = 2'-Omethylguanosine
  modified_base 54: mod_base = OTHER; note = Uridine phosphorothiorate
  modified_base 55: mod_base = OTHER; note = Uridine phosphorothiorate
  modified_base 56: mod_base = OTHER; note = Cytosine phosphorothiorate
  modified_base 57: mod_base = OTHER; note = Guanosine phosphorothiorate
  modified_base 61: mod_base = OTHER; note = 2'-Omethylcytosine
  modified_base 62: mod_base = OTHER; note = 2'-Omethylcytosine
  modified_base 63: mod_base = OTHER; note = 2'-fluorocytosine
  modified_base 64: mod_base = OTHER; note = 2'-Omethylguanosine
  modified_base 65: mod_base = OTHER; note = 2'-Omethylguanosine
  modified_base 66: mod_base = OTHER; note = 2'-Omethylcytosine
  modified_base 67: mod_base = OTHER; note = 2'-Omethylguanosine
  modified_base 68: mod_base = OTHER; note = 2'-Omethylguanosine
  modified_base 69: mod_base = OTHER; note = 2'-fluoroadenosine
  modified_base 70: mod_base = OTHER; note = 2'-fluoroguanosine

SEQ ID NO: 7740 - RNA, 85 nt, synthetic construct; identical to SEQ ID NO: 3286
  source 1..85: mol_type = other RNA
  modified_base 2: mod_base = OTHER; note = 2'-fluorocytosine
  modified_base 12: mod_base = OTHER; note = Guanosine phosphorothiorate
  modified_base 23: mod_base = OTHER; note = Guanosine phosphorothiorate
  modified_base 27: mod_base = OTHER; note = 2'-fluorouridine
  modified_base 28: mod_base = OTHER; note = 2'-Omethylguanosine
  modified_base 34: mod_base = OTHER; note = 2'-fluorouridine
  modified_base 40: mod_base = OTHER; note = 2'-Omethylcytosine
  modified_base 43: mod_base = OTHER; note = Uridine phosphorothiorate
  modified_base 51: mod_base = OTHER; note = 2'-Omethyluridine
  modified_base 65: mod_base = OTHER; note = Cytosine phosphorothiorate
  modified_base 75: mod_base = OTHER; note = Uridine phosphorothiorate
  modified_base 77: mod_base = OTHER; note = 2'-fluorocytosine

SEQ ID NO: 7741 - RNA, 76 nt, synthetic construct; identical to SEQ ID NO: 3289
  source 1..76: mol_type = other RNA
  modified_base 1: mod_base = OTHER; note = 2'-Omethylguanosine
  modified_base 14: mod_base = OTHER; note = 2'-Omethyladenosine
  modified_base 15: mod_base = OTHER; note = 2'-Omethylguanosine
  modified_base 16: mod_base = OTHER; note = 2'-Omethyluridine
  modified_base 18: mod_base = OTHER; note = 2'-Omethylguanosine
  modified_base 19: mod_base = OTHER; note = 2'-Omethylguanosine
  modified_base 20: mod_base = OTHER; note = Uridine phosphorothiorate
  modified_base 21: mod_base = OTHER; note = Adenosine phosphorothiorate
  modified_base 33: mod_base = OTHER; note = 2'-fluorouridine
  modified_base 34: mod_base = OTHER; note = 2'-Omethyluridine
  modified_base 35: mod_base = OTHER; note = Uridine phosphorothiorate
  modified_base 37: mod_base = OTHER; note = Adenosine phosphorothiorate
  modified_base 38: mod_base = OTHER; note = Adenosine phosphorothiorate
  modified_base 50: mod_base = OTHER; note = 2'-Omethyladenosine
  modified_base 52: mod_base = OTHER; note = 2'-Omethylguanosine
  modified_base 73: mod_base = OTHER; note = 2'-Omethylguanosine

SEQ ID NO: 7742 - DNA, 76 bp, synthetic construct; identical to SEQ ID NO: 1924
  source 1..76: mol_type = other DNA
  modified_base 1: mod_base = OTHER; note = 2'-Omethylguanosine phosphorothiorate
  modified_base 2: mod_base = OTHER; note = 2'-Omethylguanosine phosphorothiorate
  modified_base 3: mod_base = OTHER; note = 2'-fluorocytosine
  modified_base 16: mod_base = OTHER; note = Uridine phosphorothiorate
  modified_base 17: mod_base = OTHER; note = 2'-fluoroguanosine
  modified_base 19: mod_base = OTHER; note = Adenosine phosphorothiorate
  modified_base 75: mod_base = OTHER; note = 2'-O-(2-Methoxyethyl) 5-methylcytosine phosphorothiorate
  modified_base 76: mod_base = OTHER; note = 2'-Omethyladenosine
  misc_feature 1..19: note = RNA
  misc_feature 20: note = DNA
  misc_feature 21..76: note = RNA

SEQ ID NO: 7743 - RNA, 76 nt, synthetic construct; identical to SEQ ID NO: 3289
  source 1..76: mol_type = other RNA
  modified_base 1: mod_base = OTHER; note = 2'-Omethylguanosine
  modified_base 35: mod_base = OTHER; note = Uridine phosphorothiorate
  modified_base 37: mod_base = OTHER; note = Adenosine phosphorothiorate
  modified_base 38: mod_base = OTHER; note = Adenosine phosphorothiorate
  modified_base 73: mod_base = OTHER; note = 2'-Omethylguanosine

SEQ ID NO: 7744 - DNA, 76 bp, synthetic construct; identical to SEQ ID NO: 1924
  source 1..76: mol_type = other DNA
  modified_base 1: mod_base = OTHER; note = 2'-Omethylguanosine
  modified_base 3: mod_base = OTHER; note = 2'-O-(2-Methoxyethyl) 5-methylcytosine
  modified_base 9: mod_base = OTHER; note = 2'-Omethylguanosine phosphorothiorate
  modified_base 10: mod_base = OTHER; note = 2'-O-(2-Methoxyethyl) guanosine
  modified_base 11: mod_base = OTHER; note = 2'-O-(2-Methoxyethyl) 5-methylcytosine
  modified_base 13: mod_base = OTHER; note = Cytosine phosphorothiorate
  modified_base 14: mod_base = OTHER; note = 2'-O-(2-Methoxyethyl) adenosine
  modified_base 16: mod_base = OTHER; note = 2'-fluorouridine
  modified_base 21: mod_base = OTHER; note = Adenosine phosphorothiorate
  modified_base 22: mod_base = OTHER; note = Guanosine phosphorothiorate
  modified_base 23: mod_base = OTHER; note = 2'-Omethylcytosine
  modified_base 34: mod_base = OTHER; note = 2'-fluorouridine
  modified_base 37: mod_base = OTHER; note = 2'-O-(2-Methoxyethyl) adenosine
  modified_base 39: mod_base = OTHER; note = 2'-fluorouridine
  modified_base 44: mod_base = OTHER; note = Adenosine phosphorothiorate
  modified_base 45: mod_base = OTHER; note = 2'-O-(2-Methoxyethyl) guanosine
  modified_base 53: mod_base = OTHER; note = Guanosine phosphorothiorate
  modified_base 54: mod_base = OTHER; note = 2'-fluorouridine
  modified_base 59: mod_base = OTHER; note = 2'-O-(2-Methoxyethyl) guanosine
  modified_base 63: mod_base = OTHER; note = 2'-fluorocytosine
  modified_base 67: mod_base = OTHER; note = 2'-O-(2-Methoxyethyl) guanosine
  modified_base 68: mod_base = OTHER; note = 2'-fluoroguanosine
  modified_base 69: mod_base = OTHER; note = Adenosine phosphorothiorate
  modified_base 75: mod_base = OTHER; note = deoxycytosine phosphorothiorate
  modified_base 76: mod_base = OTHER; note = 2'-Omethyladenosine
  misc_feature 1..19: note = RNA
  misc_feature 20: note = DNA
  misc_feature 21..28: note = RNA
  misc_feature 29: note = DNA
  misc_feature 30..39: note = RNA
  misc_feature 40: note = DNA
  misc_feature 41..59: note = RNA
  misc_feature 60: note = DNA
  misc_feature 61..63: note = RNA
  misc_feature 64..65: note = DNA
  misc_feature 66..74: note = RNA
  misc_feature 75: note = DNA
  misc_feature 76: note = RNA

SEQ ID NO: 7745 - RNA, 76 nt, synthetic construct; identical to SEQ ID NO: 625
  source 1..76: mol_type = other RNA
  modified_base 17: mod_base = OTHER; note = Guanosine phosphorothiorate
  modified_base 18: mod_base = OTHER; note = 2'-Omethylguanosine
  modified_base 19: mod_base = OTHER; note = Adenosine phosphorothiorate
  modified_base 20: mod_base = OTHER; note = 2'-Omethyluridine

SEQ ID NO: 7746 - RNA, 85 nt, synthetic construct; identical to SEQ ID NO: 3286
  source 1..85: mol_type = other RNA
  modified_base 1: mod_base = OTHER; note = 2'-Omethylcytosine
  modified_base 12: mod_base = OTHER; note = Guanosine phosphorothiorate
  modified_base 19: mod_base = OTHER; note = 2'-fluorouridine
  modified_base 27: mod_base = OTHER; note = 2'-fluorouridine
  modified_base 29: mod_base = OTHER; note = 2'-fluoroguanosine
  modified_base 35: mod_base = OTHER; note = 2'-fluoroadenosine
  modified_base 43: mod_base = OTHER; note = 2'-Omethyluridine
  modified_base 45: mod_base = OTHER; note = Guanosine phosphorothiorate
  modified_base 46: mod_base = OTHER; note = 2'-fluoroadenosine
  modified_base 49: mod_base = OTHER; note = 2'-Omethyluridine
  modified_base 55: mod_base = OTHER; note = 2'-fluorocytosine
  modified_base 59: mod_base = OTHER; note = 2'-Omethyluridine phosphorothiorate
  modified_base 67: mod_base = OTHER; note = Adenosine phosphorothiorate
  modified_base 68: mod_base = OTHER; note = Adenosine phosphorothiorate
  modified_base 75: mod_base = OTHER; note = 2'-fluorouridine
  modified_base 80: mod_base = OTHER; note = 2'-Omethylguanosine
  modified_base 84: mod_base = OTHER; note = Cytosine phosphorothiorate

SEQ ID NO: 7747 - RNA, 76 nt, synthetic construct; identical to SEQ ID NO: 3318
  source 1..76: mol_type = other RNA
  modified_base 1: mod_base = OTHER; note = 2'-Omethylcytosine
  modified_base 2: mod_base = OTHER; note = 2'-Omethylcytosine
  modified_base 3: mod_base = OTHER; note = 2'-Omethyluridine
  modified_base 4: mod_base = OTHER; note = 2'-Omethyluridine
  modified_base 5: mod_base = OTHER; note = 2'-Omethylcytosine
  modified_base 6: mod_base = OTHER; note = 2'-Omethylguanosine
  modified_base 14: mod_base = OTHER; note = 2'-Omethyladenosine
  modified_base 15: mod_base = OTHER; note = 2'-Omethylguanosine
  modified_base 16: mod_base = OTHER; note = 2'-Omethyluridine
  modified_base 18: mod_base = OTHER; note = 2'-Omethylguanosine
  modified_base 19: mod_base = OTHER; note = 2'-Omethylguanosine
  modified_base 25: mod_base = OTHER; note = 2'-Omethylcytosine
  modified_base 41: mod_base = OTHER; note = 2'-Omethylcytosine
  modified_base 42: mod_base = OTHER; note = 2'-Omethyluridine
  modified_base 43: mod_base = OTHER; note = 2'-Omethyluridine
  modified_base 44: mod_base = OTHER; note = 2'-Omethyladenosine
  modified_base 49: mod_base = OTHER; note = 2'-Omethylguanosine
  modified_base 50: mod_base = OTHER; note = 2'-Omethylcytosine
  modified_base 52: mod_base = OTHER; note = 2'-Omethylguanosine
  modified_base 54: mod_base = OTHER; note = 2'-Omethyluridine
  modified_base 55: mod_base = OTHER; note = Uridine phosphorothiorate
  modified_base 56: mod_base = OTHER; note = 2'-Omethylcytosine
  modified_base 57: mod_base = OTHER; note = 2'-fluoroguanosine
  modified_base 59: mod_base = OTHER; note = 2'-Omethyladenosine
  modified_base 61: mod_base = OTHER; note = 2'-Omethylcytosine
  modified_base 62: mod_base = OTHER; note = 2'-Omethylcytosine
  modified_base 63: mod_base = OTHER; note = 2'-fluoroguanosine
  modified_base 64: mod_base = OTHER; note = 2'-Omethylguanosine
  modified_base 65: mod_base = OTHER; note = 2'-Omethylcytosine
  modified_base 73: mod_base = OTHER; note = 2'-Omethyladenosine

SEQ ID NO: 7748 - RNA, 75 nt, synthetic construct; identical to SEQ ID NO: 1045
  source 1..75: mol_type = other RNA
  modified_base 1: mod_base = OTHER; note = 2'-Omethylguanosine phosphorothiorate
  modified_base 2: mod_base = OTHER; note = 2'-Omethylguanosine phosphorothiorate
  modified_base 3: mod_base = OTHER; note = 2'-Omethyluridine
  modified_base 4: mod_base = OTHER; note = 2'-Omethyluridine
  modified_base 5: mod_base = OTHER; note = 2'-Omethylcytosine
  modified_base 6: mod_base = OTHER; note = 2'-Omethylcytosine
  modified_base 10: mod_base = OTHER; note = 2'-Omethylguanosine
  modified_base 11: mod_base = OTHER; note = 2'-Omethyluridine
  modified_base 12: mod_base = OTHER; note = 2'-Omethylguanosine
  modified_base 13: mod_base = OTHER; note = 2'-Omethyluridine
  modified_base 14: mod_base = OTHER; note = 2'-Omethyladenosine
  modified_base 15: mod_base = OTHER; note = 2'-fluoroadenosine
  modified_base 16: mod_base = OTHER; note = 2'-Omethyluridine
  modified_base 17: mod_base = OTHER; note = 2'-Omethylguanosine
  modified_base 18: mod_base = OTHER; note = 2'-Omethylguanosine
  modified_base 19: mod_base = OTHER; note = 2'-fluorouridine
  modified_base 20: mod_base = OTHER; note = 2'-Omethyladenosine
  modified_base 33: mod_base = OTHER; note = 2'-fluorouridine
  modified_base 35: mod_base = OTHER; note = Uridine phosphorothiorate
  modified_base 37: mod_base = OTHER; note = Adenosine phosphorothiorate
  modified_base 38: mod_base = OTHER; note = Adenosine phosphorothiorate
  modified_base 44: mod_base = OTHER; note = 2'-Omethylcytosine
  modified_base 45: mod_base = OTHER; note = 2'-Omethylguanosine
  modified_base 46: mod_base = OTHER; note = 2'-fluoroadenosine
  modified_base 47: mod_base = OTHER; note = 2'-fluorouridine
  modified_base 55: mod_base = OTHER; note = 2'-Omethylcytosine
  modified_base 58: mod_base = OTHER; note = 2'-Omethylguanosine
  modified_base 60: mod_base = OTHER; note = 2'-Omethylcytosine
  modified_base 61: mod_base = OTHER; note = 2'-Omethyluridine
  modified_base 62: mod_base = OTHER; note = 2'-fluorocytosine
  modified_base 63: mod_base = OTHER; note = 2'-Omethylguanosine
  modified_base 64: mod_base = OTHER; note = 2'-Omethylguanosine
  modified_base 65: mod_base = OTHER; note = 2'-Omethyluridine
  modified_base 66: mod_base = OTHER; note = 2'-Omethylguanosine
  modified_base 67: mod_base = OTHER; note = 2'-Omethylguanosine
  modified_base 72: mod_base = OTHER; note = 2'-Omethyluridine

SEQ ID NO: 7749 - RNA, 76 nt, synthetic construct; identical to SEQ ID NO: 625
  source 1..76: mol_type = other RNA
  modified_base 1: mod_base = OTHER; note = 2'-fluoroguanosine phosphorothiorate
  modified_base 2: mod_base = OTHER; note = 2'-fluoroguanosine
  modified_base 3: mod_base = OTHER; note = 2'-fluorocytosine
  modified_base 4: mod_base = OTHER; note = 2'-fluorouridine phosphorothiorate
  modified_base 5: mod_base = OTHER; note = 2'-Omethylcytosine
  modified_base 8: mod_base = OTHER; note = Uridine phosphorothiorate
  modified_base 11: mod_base = OTHER; note = 2'-fluorocytosine phosphorothiorate
  modified_base 12: mod_base = OTHER; note = 2'-fluoroguanosine
  modified_base 14: mod_base = OTHER; note = 2'-Omethyladenosine
  modified_base 16: mod_base = OTHER; note = Uridine phosphorothiorate
  modified_base 23: mod_base = OTHER; note = Cytosine phosphorothiorate
  modified_base 24: mod_base = OTHER; note = 2'-fluoroguanosine
  modified_base 25: mod_base = OTHER; note = 2'-fluorocytosine
  modified_base 26: mod_base = OTHER; note = 2'-Omethyladenosine
  modified_base 28: mod_base = OTHER; note = 2'-fluorouridine
  modified_base 31: mod_base = OTHER; note = 2'-fluoroadenosine
  modified_base 38: mod_base = OTHER; note = 2'-fluoroadenosine
  modified_base 39: mod_base = OTHER; note = 2'-fluorouridine phosphorothiorate
  modified_base 40: mod_base = OTHER; note = 2'-fluorouridine
  modified_base 42: mod_base = OTHER; note = 2'-fluoroadenosine phosphorothiorate
  modified_base 43: mod_base = OTHER; note = Adenosine phosphorothiorate
  modified_base 44: mod_base = OTHER; note = 2'-Omethyladenosine
  modified_base 45: mod_base = OTHER; note = 2'-Omethylguanosine
  modified_base 46: mod_base = OTHER; note = Guanosine phosphorothiorate
  modified_base 47: mod_base = OTHER; note = 2'-fluorouridine
  modified_base 48: mod_base = OTHER; note = 2'-fluorouridine
  modified_base 49: mod_base = OTHER; note = 2'-fluorocytosine
  modified_base 56: mod_base = OTHER; note = 2'-fluorocytosine
  modified_base 57: mod_base = OTHER; note = 2'-fluoroguanosine
  modified_base 60: mod_base = OTHER; note = 2'-fluorouridine
  modified_base 61: mod_base = OTHER; note = 2'-fluorocytosine
  modified_base 62: mod_base = OTHER; note = Cytosine phosphorothiorate
  modified_base 63: mod_base = OTHER; note = 2'-Omethylcytosine
  modified_base 67: mod_base = OTHER; note = 2'-fluoroguanosine phosphorothiorate
  modified_base 68: mod_base = OTHER; note = 2'-Omethylguanosine
  modified_base 73: mod_base = OTHER; note = 2'-fluoroguanosine
  modified_base 75: mod_base = OTHER; note = 2'-Omethylcytosine
  modified_base 76: mod_base = OTHER; note = 2'-fluoroadenosine

SEQ ID NO: 7750 - RNA, 86 nt, synthetic construct; identical to SEQ ID NO: 3290
  source 1..86: mol_type = other RNA
  modified_base 1: mod_base = OTHER; note = 2'-Omethyladenosine
  modified_base 2: mod_base = OTHER; note = 2'-Omethylcytosine
  modified_base 3: mod_base = OTHER; note = 2'-Omethylcytosine
  modified_base 4: mod_base = OTHER; note = 2'-Omethyladenosine
  modified_base 5: mod_base = OTHER; note = 2'-Omethylguanosine
  modified_base 6: mod_base = OTHER; note = 2'-Omethylguanosine

SEQ ID NO: 7751 - RNA, 85 nt, synthetic construct; identical to SEQ ID NO: 3297
  source 1..85: mol_type = other RNA
  modified_base 1: mod_base = OTHER; note = 2'-Omethylguanosine phosphorothiorate
  modified_base 2: mod_base = OTHER; note = 2'-Omethylcytosine
  modified_base 3: mod_base = OTHER; note = 2'-Omethyluridine
  modified_base 4: mod_base = OTHER; note = 2'-Omethylguanosine
  modified_base 5: mod_base = OTHER; note = 2'-Omethyluridine
  modified_base 6: mod_base = OTHER; note = 2'-Omethylguanosine
  modified_base 16: mod_base = OTHER; note = 2'-Omethyluridine
  modified_base 17: mod_base = OTHER; note = 2'-Omethylguanosine
  modified_base 18: mod_base = OTHER; note = 2'-Omethylguanosine
  modified_base 33: mod_base = OTHER; note = 2'-fluorouridine
  modified_base 35: mod_base = OTHER; note = Cytosine phosphorothiorate
  modified_base 37: mod_base = OTHER; note = Adenosine phosphorothiorate
  modified_base 38: mod_base = OTHER; note = Adenosine phosphorothiorate
  modified_base 44: mod_base = OTHER; note = 2'-Omethyluridine
  modified_base 56: mod_base = OTHER; note = 2'-fluoroguanosine
  modified_base 57: mod_base = OTHER; note = 2'-fluorocytosine
  modified_base 58: mod_base = OTHER; note = 2'-Omethylguanosine
  modified_base 59: mod_base = OTHER; note = 2'-Omethylcytosine
  modified_base 60: mod_base = OTHER; note = 2'-Omethyladenosine
  modified_base 61: mod_base = OTHER; note = 2'-Omethylguanosine
  modified_base 62: mod_base = OTHER; note = 2'-Omethylguanosine
  modified_base 63: mod_base = OTHER; note = 2'-Omethyluridine
  modified_base 65: mod_base = OTHER; note = 2'-Omethylcytosine
  modified_base 68: mod_base = OTHER; note = 2'-Omethyladenosine
  modified_base 70: mod_base = OTHER; note = 2'-Omethylcytosine
  modified_base 71: mod_base = OTHER; note = 2'-Omethylcytosine
  modified_base 72: mod_base = OTHER; note = 2'-fluorouridine
  modified_base 73: mod_base = OTHER; note = 2'-Omethylguanosine
  modified_base 74: mod_base = OTHER; note = 2'-Omethylcytosine
  modified_base 75: mod_base = OTHER; note = 2'-Omethyluridine
  modified_base 76: mod_base = OTHER; note = 2'-Omethylcytosine
  modified_base 77: mod_base = OTHER; note = 2'-Omethyladenosine
  modified_base 82: mod_base = OTHER; note = 2'-Omethylguanosine

SEQ ID NO: 7752 - RNA, 76 nt, synthetic construct; identical to SEQ ID NO: 3289
  source 1..76: mol_type = other RNA
  modified_base 1: mod_base = OTHER; note = 2'-Omethylguanosine
  modified_base 28: mod_base = OTHER; note = 2'-Omethylcytosine
  modified_base 29: mod_base = OTHER; note = 2'-Omethyladenosine
  modified_base 30: mod_base = OTHER; note = 2'-Omethylguanosine
  modified_base 40: mod_base = OTHER; note = 2'-fluorocytosine
  modified_base 41: mod_base = OTHER; note = 2'-fluorouridine
  modified_base 42: mod_base = OTHER; note = 2'-Omethylguanosine phosphorothiorate
  modified_base 43: mod_base = OTHER; note = 2'-Omethyladenosine
  modified_base 73: mod_base = OTHER; note = 2'-Omethylguanosine

SEQ ID NO: 7753 - DNA, 76 bp, synthetic construct; identical to SEQ ID NO: 1924
  source 1..76: mol_type = other DNA
  modified_base 1: mod_base = OTHER; note = 2'-Omethylguanosine phosphorothiorate
  modified_base 2: mod_base = OTHER; note = 2'-Omethylguanosine phosphorothiorate
  modified_base 12: mod_base = OTHER; note = Guanosine phosphorothiorate
  modified_base 25: mod_base = OTHER; note = 2'-O-(2-Methoxyethyl) 5-methylcytosine phosphorothiorate
  modified_base 26: mod_base = OTHER; note = Adenosine phosphorothiorate
  modified_base 39: mod_base = OTHER; note = 2'-Omethyluridine
  modified_base 58: mod_base = OTHER; note = Adenosine phosphorothiorate
  modified_base 74: mod_base = OTHER; note = Cytosine phosphorothiorate
  modified_base 75: mod_base = OTHER; note = 2'-Omethylcytosine phosphorothiorate
  misc_feature 1..12: note = RNA
  misc_feature 13: note = DNA
  misc_feature 14..26: note = RNA
  misc_feature 27: note = DNA
  misc_feature 28..37: note = RNA
  misc_feature 38: note = DNA
  misc_feature 39..75: note = RNA
  misc_feature 76: note = DNA

SEQ ID NO: 7754 - RNA, 76 nt, synthetic construct; identical to SEQ ID NO: 625
  source 1..76: mol_type = other RNA
  modified_base 49: mod_base = OTHER; note = 2'-O-(2-Methoxyethyl) cytosine
  modified_base 50: mod_base = OTHER; note = 2'-O-(2-Methoxyethyl) cytosine
  modified_base 51: mod_base = OTHER; note = 2'-O-(2-Methoxyethyl) guanosine
  modified_base 52: mod_base = OTHER; note = 2'-O-(2-Methoxyethyl) guanosine
  modified_base 53: mod_base = OTHER; note = 2'-O-(2-Methoxyethyl) guanosine
  modified_base 61: mod_base = OTHER; note = 2'-O-(2-Methoxyethyl) cytosine
  modified_base 62: mod_base = OTHER; note = 2'-O-(2-Methoxyethyl) cytosine
  modified_base 63: mod_base = OTHER; note = 2'-O-(2-Methoxyethyl) cytosine
  modified_base 64: mod_base = OTHER; note = 2'-O-(2-Methoxyethyl) guanosine
  modified_base 65: mod_base = OTHER; note = 2'-O-(2-Methoxyethyl) guanosine

SEQ ID NO: 7755 - RNA, 74 nt, synthetic construct; identical to SEQ ID NO: 3293
  source 1..74: mol_type = other RNA
  modified_base 9: mod_base = OTHER; note = Guanosine phosphorothiorate
  modified_base 11: mod_base = OTHER; note = 2'-fluoroguanosine
  modified_base 24: mod_base = OTHER; note = 2'-Omethylguanosine
  modified_base 44: mod_base = OTHER; note = Guanosine phosphorothiorate
  modified_base 72: mod_base = OTHER; note = Cytosine phosphorothiorate
  modified_base 73: mod_base = OTHER; note = 2'-fluorocytosine

SEQ ID NO: 7756 - RNA, 76 nt, synthetic construct; identical to SEQ ID NO: 3318
  source 1..76: mol_type = other RNA
  modified_base 1: mod_base = OTHER; note = 2'-Omethylcytosine
  modified_base 2: mod_base = OTHER; note = 2'-Omethylcytosine
  modified_base 3: mod_base = OTHER; note = 2'-Omethyluridine
  modified_base 4: mod_base = OTHER; note = 2'-Omethyluridine
  modified_base 5: mod_base = OTHER; note = 2'-Omethylcytosine
  modified_base 6: mod_base = OTHER; note = 2'-Omethylguanosine
  modified_base 14: mod_base = OTHER; note = 2'-Omethyladenosine
  modified_base 15: mod_base = OTHER; note = 2'-fluoroguanosine
  modified_base 16: mod_base = OTHER; note = 2'-Omethyluridine
  modified_base 18: mod_base = OTHER; note = 2'-Omethylguanosine
  modified_base 19: mod_base = OTHER; note = 2'-Omethylguanosine
  modified_base 25: mod_base = OTHER; note = 2'-Omethylcytosine
  modified_base 33: mod_base = OTHER; note = 2'-fluorouridine
  modified_base 35: mod_base = OTHER; note = Uridine phosphorothiorate
  modified_base 37: mod_base = OTHER; note = Guanosine phosphorothiorate
  modified_base 38: mod_base = OTHER; note = Adenosine phosphorothiorate
  modified_base 41: mod_base = OTHER; note = 2'-Omethylcytosine
  modified_base 42: mod_base = OTHER; note = 2'-Omethyluridine
  modified_base 43: mod_base = OTHER; note = 2'-Omethyluridine
  modified_base 44: mod_base = OTHER; note = 2'-Omethyladenosine
  modified_base 49: mod_base = OTHER; note = 2'-Omethylguanosine
  modified_base 50: mod_base = OTHER; note = 2'-Omethylcytosine
  modified_base 52: mod_base = OTHER; note = 2'-Omethylguanosine
  modified_base 54: mod_base = OTHER; note = 2'-Omethyluridine
  modified_base 55: mod_base = OTHER; note = Uridine phosphorothiorate
  modified_base 56: mod_base = OTHER; note = 2'-Omethylcytosine
  modified_base 57: mod_base = OTHER; note = 2'-fluoroguanosine
  modified_base 59: mod_base = OTHER; note = 2'-Omethyladenosine
  modified_base 61: mod_base = OTHER; note = 2'-Omethylcytosine
  modified_base 65: mod_base = OTHER; note = 2'-Omethylcytosine
  modified_base 73: mod_base = OTHER; note = 2'-Omethyladenosine

SEQ ID NO: 7757 - RNA, 76 nt, synthetic construct; identical to SEQ ID NO: 625
  source 1..76: mol_type = other RNA
  modified_base 1: mod_base = OTHER; note = 2'-Omethylguanosine
  modified_base 2: mod_base = OTHER; note = 2'-Omethylguanosine
  modified_base 3: mod_base = OTHER; note = 2'-Omethylcytosine
  modified_base 10: mod_base = OTHER; note = 2'-Omethylguanosine
  modified_base 11: mod_base = OTHER; note = 2'-Omethylcytosine
  modified_base 12: mod_base = OTHER; note = 2'-Omethylguanosine
  modified_base 13: mod_base = OTHER; note = 2'-Omethylcytosine
  modified_base 14: mod_base = OTHER; note = 2'-Omethyladenosine
  modified_base 15: mod_base = OTHER; note = 2'-fluoroadenosine
  modified_base 16: mod_base = OTHER; note = 2'-Omethyluridine
  modified_base 17: mod_base = OTHER; note = 2'-Omethylguanosine
  modified_base 18: mod_base = OTHER; note = 2'-Omethylguanosine
  modified_base 19: mod_base = OTHER; note = 2'-fluoroadenosine
  modified_base 20: mod_base = OTHER; note = 2'-Omethyluridine
  modified_base 21: mod_base = OTHER; note = 2'-fluoroadenosine
  modified_base 22: mod_base = OTHER; note = 2'-Omethylguanosine
  modified_base 23: mod_base = OTHER; note = 2'-Omethylcytosine
  modified_base 24: mod_base = OTHER; note = 2'-Omethylguanosine
  modified_base 25: mod_base = OTHER; note = 2'-Omethylcytosine
  modified_base 38: mod_base = OTHER; note = Adenosine phosphorothiorate
  modified_base 39: mod_base = OTHER; note = Uridine phosphorothiorate
  modified_base 40: mod_base = OTHER; note = 2'-fluorouridine
  modified_base 43: mod_base = OTHER; note = 2'-Omethyladenosine
  modified_base 44: mod_base = OTHER; note = 2'-Omethyladenosine
  modified_base 45: mod_base = OTHER; note = 2'-Omethylguanosine
  modified_base 46: mod_base = OTHER; note = 2'-fluoroguanosine
  modified_base 48: mod_base = OTHER; note = 2'-fluorouridine
  modified_base 49: mod_base = OTHER; note = 2'-Omethylcytosine
  modified_base 50: mod_base = OTHER; note = 2'-Omethylcytosine
  modified_base 54: mod_base = OTHER; note = Uridine phosphorothiorate
  modified_base 55: mod_base = OTHER; note = Uridine phosphorothiorate
  modified_base 56: mod_base = OTHER; note = 2'-Omethylcytosine
  modified_base 57: mod_base = OTHER; note = Guanosine phosphorothiorate
  modified_base 61: mod_base = OTHER; note = 2'-Omethylcytosine
  modified_base 62: mod_base = OTHER; note = 2'-Omethylcytosine
  modified_base 63: mod_base = OTHER; note = 2'-fluorocytosine
  modified_base 64: mod_base = OTHER; note = 2'-Omethylguanosine
  modified_base 65: mod_base = OTHER; note = 2'-Omethylguanosine
  modified_base 66: mod_base = OTHER; note = 2'-Omethylcytosine
  modified_base 67: mod_base = OTHER; note = 2'-Omethylguanosine
  modified_base 68: mod_base = OTHER; note = 2'-Omethylguanosine
  modified_base 69: mod_base = OTHER; note = 2'-fluoroadenosine

SEQ ID NO: 7758 - RNA, 85 nt, synthetic construct; identical to SEQ ID NO: 3297
  source 1..85: mol_type = other RNA
  modified_base 1: mod_base = OTHER; note = 2'-Omethylguanosine phosphorothiorate
  modified_base 2: mod_base = OTHER; note = Cytosine phosphorothiorate
  modified_base 4: mod_base = OTHER; note = 2'-Omethylguanosine
  modified_base 12: mod_base = OTHER; note = Cytosine phosphorothiorate
  modified_base 35: mod_base = OTHER; note = 2'-fluorocytosine
  modified_base 36: mod_base = OTHER; note = 2'-Omethyladenosine
  modified_base 45: mod_base = OTHER; note = 2'-Omethylguanosine
  modified_base 57: mod_base = OTHER; note = 2'-fluorocytosine
  modified_base 61: mod_base = OTHER; note = Guanosine phosphorothiorate
  modified_base 82: mod_base = OTHER; note = 2'-Omethylguanosine

SEQ ID NO: 7759 - RNA, 75 nt, synthetic construct; identical to SEQ ID NO: 1045
  source 1..75: mol_type = other RNA
  modified_base 1: mod_base = OTHER; note = 2'-Omethylguanosine
  modified_base 10: mod_base = OTHER; note = 2'-Omethylguanosine
  modified_base 13: mod_base = OTHER; note = 2'-Omethyluridine
  modified_base 17: mod_base = OTHER; note = Guanosine phosphorothiorate
  modified_base 18: mod_base = OTHER; note = 2'-Omethylguanosine
  modified_base 19: mod_base = OTHER; note = Uridine phosphorothiorate
  modified_base 20: mod_base = OTHER; note = 2'-Omethyladenosine
  modified_base 25: mod_base = OTHER; note = 2'-Omethylcytosine
  modified_base 29: mod_base = OTHER; note = 2'-Omethylguanosine
  modified_base 33: mod_base = OTHER; note = 2'-fluorouridine
  modified_base 35: mod_base = OTHER; note = Uridine phosphorothiorate
  modified_base 37: mod_base = OTHER; note = Adenosine phosphorothiorate
  modified_base 38: mod_base = OTHER; note = Adenosine phosphorothiorate
  modified_base 41: mod_base = OTHER; note = 2'-fluorocytosine phosphorothiorate
  modified_base 43: mod_base = OTHER; note = 2'-Omethylguanosine
  modified_base 44: mod_base = OTHER; note = 2'-fluorocytosine
  modified_base 46: mod_base = OTHER; note = Adenosine phosphorothiorate
  modified_base 49: mod_base = OTHER; note = 2'-Omethylcytosine
  modified_base 51: mod_base = OTHER; note = 2'-Omethyladenosine
  modified_base 53: mod_base = OTHER; note = Uridine phosphorothiorate
  modified_base 54: mod_base = OTHER; note = Uridine phosphorothiorate
  modified_base 55: mod_base = OTHER; note = 2'-Omethylcytosine
  modified_base 56: mod_base = OTHER; note = Guanosine phosphorothiorate
  modified_base 61: mod_base = OTHER; note = 2'-Omethyluridine
  modified_base 62: mod_base = OTHER; note = 2'-fluorocytosine
  modified_base 64: mod_base = OTHER; note = 2'-Omethylguanosine
  modified_base 70: mod_base = OTHER; note = 2'-Omethylcytosine
  modified_base 72: mod_base = OTHER; note = 2'-Omethyluridine

SEQ ID NO: 7760 - RNA, 76 nt, synthetic construct; identical to SEQ ID NO: 625
  source 1..76: mol_type = other RNA
  modified_base 1: mod_base = OTHER; note = 2'-Omethylguanosine
  modified_base 17: mod_base = OTHER; note = 2'-Omethylguanosine
  modified_base 18: mod_base = OTHER; note = 2'-Omethylguanosine
  modified_base 33: mod_base = OTHER; note = 2'-O-(2-Methoxyethyl) thymine
  modified_base 50: mod_base = OTHER; note = 2'-Omethylcytosine
  modified_base 52: mod_base = OTHER; note = 2'-Omethylguanosine
  modified_base 73: mod_base = OTHER; note = 2'-Omethylguanosine

SEQ ID NO: 7761 - RNA, 76 nt, synthetic construct; identical to SEQ ID NO: 625
  source 1..76: mol_type = other RNA
  modified_base 1: mod_base = OTHER; note = Guanosine phosphorothiorate
  modified_base 2: mod_base = OTHER; note = 2'-fluoroguanosine
  modified_base 5: mod_base = OTHER; note = Cytosine phosphorothiorate
  modified_base 6: mod_base = OTHER; note = 2'-Omethylcytosine
  modified_base 12: mod_base = OTHER; note = Guanosine phosphorothiorate
  modified_base 13: mod_base = OTHER; note = Cytosine phosphorothiorate
  modified_base 15: mod_base = OTHER; note = 2'-Omethyladenosine
  modified_base 17: mod_base = OTHER; note = Guanosine phosphorothiorate
  modified_base 20: mod_base = OTHER; note = 2'-Omethyluridine
  modified_base 22: mod_base = OTHER; note = 2'-Omethylguanosine
  modified_base 24: mod_base = OTHER; note = 2'-fluoroguanosine
  modified_base 25: mod_base = OTHER; note = 2'-Omethylcytosine
  modified_base 26: mod_base = OTHER; note = 2'-fluoroadenosine phosphorothiorate
  modified_base 28: mod_base = OTHER; note = 2'-fluorouridine
  modified_base 30: mod_base = OTHER; note = Guanosine phosphorothiorate
  modified_base 31: mod_base = OTHER; note = 2'-Omethyladenosine
  modified_base 38: mod_base = OTHER; note = 2'-Omethyladenosine
  modified_base 39: mod_base = OTHER; note = 2'-Omethyluridine
  modified_base 40: mod_base = OTHER; note = Uridine phosphorothiorate
  modified_base 41: mod_base = OTHER; note = Cytosine phosphorothiorate
  modified_base 45: mod_base = OTHER; note = 2'-Omethylguanosine
  modified_base 46: mod_base = OTHER; note = 2'-fluoroguanosine
  modified_base 49: mod_base = OTHER; note = 2'-Omethylcytosine
  modified_base 50: mod_base = OTHER; note = 2'-Omethylcytosine
  modified_base 52: mod_base = OTHER; note = 2'-fluoroguanosine
  modified_base 54: mod_base = OTHER; note = 2'-fluorouridine
  modified_base 56: mod_base = OTHER; note = 2'-fluorocytosine
  modified_base 59: mod_base = OTHER; note = 2'-Omethylguanosine
  modified_base 64: mod_base = OTHER; note = 2'-Omethylguanosine
  modified_base 67: mod_base = OTHER; note = 2'-fluoroguanosine
  modified_base 69: mod_base = OTHER; note = 2'-fluoroadenosine
  modified_base 71: mod_base = OTHER; note = 2'-fluorouridine
  modified_base 72: mod_base = OTHER; note = Cytosine phosphorothiorate
  modified_base 73: mod_base = OTHER; note = 2'-fluoroguanosine phosphorothiorate
  modified_base 74: mod_base = OTHER; note = 2'-fluorocytosine

SEQ ID NO: 7762 - RNA, 76 nt, synthetic construct; identical to SEQ ID NO: 3490
  source 1..76: mol_type = other RNA
  modified_base 1: mod_base = OTHER; note = 2'-Omethylguanosine
  modified_base 61: mod_base = OTHER; note = 2'-Omethylcytosine
  modified_base 62: mod_base = OTHER; note = 2'-Omethylcytosine
  modified_base 64: mod_base = OTHER; note = 2'-Omethylguanosine
  modified_base 65: mod_base = OTHER; note = 2'-Omethylcytosine
  modified_base 66: mod_base = OTHER; note = 2'-Omethylcytosine
  modified_base 67: mod_base = OTHER; note = 2'-Omethylguanosine
  modified_base 68: mod_base = OTHER; note = 2'-Omethylguanosine
  modified_base 69: mod_base = OTHER; note = 2'-Omethyladenosine
  modified_base 70: mod_base = OTHER; note = 2'-fluoroguanosine
  modified_base 71: mod_base = OTHER; note = 2'-Omethyluridine
  modified_base 72: mod_base = OTHER; note = 2'-Omethylcytosine
  modified_base 73: mod_base = OTHER; note = 2'-Omethylguanosine

SEQ ID NO: 7763 - RNA, 75 nt, synthetic construct; identical to SEQ ID NO: 3299
  source 1..75: mol_type = other RNA
  modified_base 1: mod_base = OTHER; note = 2'-Omethylcytosine
  modified_base 2: mod_base = OTHER; note = Cytosine phosphorothiorate
  modified_base 5: mod_base = OTHER; note = 2'-fluoroguanosine
  modified_base 10: mod_base = OTHER; note = Cytosine phosphorothiorate
  modified_base 11: mod_base = OTHER; note = Uridine phosphorothiorate
  modified_base 15: mod_base = OTHER; note = 2'-Omethyluridine
  modified_base 19: mod_base = OTHER; note = 2'-fluorouridine
  modified_base 20: mod_base = OTHER; note = 2'-fluoroadenosine
  modified_base 23: mod_base = OTHER; note = 2'-fluoroguanosine
  modified_base 27: mod_base = OTHER; note = 2'-fluorocytosine
  modified_base 28: mod_base = OTHER; note = 2'-fluoroadenosine
  modified_base 35: mod_base = OTHER; note = 2'-fluoroadenosine phosphorothiorate
  modified_base 36: mod_base = OTHER; note = Adenosine phosphorothiorate
  modified_base 38: mod_base = OTHER; note = 2'-Omethyluridine
  modified_base 41: mod_base = OTHER; note = 2'-fluoroguanosine
  modified_base 47: mod_base = OTHER; note = 2'-fluorocytosine
  modified_base 48: mod_base = OTHER; note = 2'-fluorocytosine
  modified_base 56: mod_base = OTHER; note = 2'-Omethyladenosine phosphorothiorate
  modified_base 57: mod_base = OTHER; note = Adenosine phosphorothiorate
  modified_base 62: mod_base = OTHER; note = 2'-fluorocytosine phosphorothiorate
  modified_base 69: mod_base = OTHER; note = 2'-Omethylguanosine phosphorothiorate
  modified_base 73: mod_base = OTHER; note = Cytosine phosphorothiorate
  modified_base 74: mod_base = OTHER; note = 2'-Omethylcytosine

SEQ ID NO: 7764 - RNA, 76 nt, synthetic construct; identical to SEQ ID NO: 625
  source 1..76: mol_type = other RNA
  modified_base 2: mod_base = OTHER; note = 2'-Omethylguanosine
  modified_base 4: mod_base = OTHER; note = 2'-fluorouridine
  modified_base 6: mod_base = OTHER; note = 2'-fluorocytosine phosphorothiorate
  modified_base 11: mod_base = OTHER; note = 2'-fluorocytosine
  modified_base 16: mod_base = OTHER; note = Uridine phosphorothiorate
  modified_base 17: mod_base = OTHER; note = 2'-Omethylguanosine
  modified_base 20: mod_base = OTHER; note = 2'-Omethyluridine
  modified_base 22: mod_base = OTHER; note = Guanosine phosphorothiorate
  modified_base 23: mod_base = OTHER; note = 2'-Omethylcytosine
  modified_base 25: mod_base = OTHER; note = 2'-fluorocytosine
  modified_base 26: mod_base = OTHER; note = 2'-Omethyladenosine
  modified_base 27: mod_base = OTHER; note = 2'-fluorouridine phosphorothiorate
  modified_base 28: mod_base = OTHER; note = 2'-Omethyluridine
  modified_base 29: mod_base = OTHER; note = 2'-fluoroguanosine
  modified_base 30: mod_base = OTHER; note = 2'-Omethylguanosine
  modified_base 34: mod_base = OTHER; note = 2'-Omethyluridine
  modified_base 39: mod_base = OTHER; note = 2'-fluorouridine
  modified_base 41: mod_base = OTHER; note = 2'-fluorocytosine
  modified_base 43: mod_base = OTHER; note = Adenosine phosphorothiorate
  modified_base 44: mod_base = OTHER; note = Adenosine phosphorothiorate
  modified_base 45: mod_base = OTHER; note = 2'-Omethylguanosine phosphorothiorate
  modified_base 46: mod_base = OTHER; note = Guanosine phosphorothiorate
  modified_base 47: mod_base = OTHER; note = 2'-fluorouridine
  modified_base 53: mod_base = OTHER; note = Guanosine phosphorothiorate
  modified_base 54: mod_base = OTHER; note = 2'-fluorouridine
  modified_base 60: mod_base = OTHER; note = 2'-fluorouridine
  modified_base 61: mod_base = OTHER; note = 2'-Omethylcytosine
  modified_base 65: mod_base = OTHER; note = 2'-fluoroguanosine
  modified_base 68: mod_base = OTHER; note = 2'-Omethylguanosine
  modified_base 70: mod_base = OTHER; note = Guanosine phosphorothiorate
  modified_base 71: mod_base = OTHER; note = 2'-Omethyluridine phosphorothiorate
  modified_base 72: mod_base = OTHER; note = 2'-Omethylcytosine phosphorothiorate
  modified_base 73: mod_base = OTHER; note = 2'-Omethylguanosine phosphorothiorate
  modified_base 74: mod_base = OTHER; note = 2'-fluorocytosine
  modified_base 76: mod_base = OTHER; note = 2'-fluoroadenosine

SEQ ID NO: 7765 - RNA, 86 nt, synthetic construct; identical to SEQ ID NO: 3290
  source 1..86: mol_type = other RNA
  modified_base 83: mod_base = OTHER; note = Adenosine phosphorothiorate

SEQ ID NO: 7766 - RNA, 75 nt, synthetic construct; identical to SEQ ID NO: 3311
  source 1..75: mol_type = other RNA
  modified_base 1: mod_base = OTHER; note = 2'-Omethylguanosine phosphorothiorate
  modified_base 2: mod_base = OTHER; note = 2'-Omethylguanosine
  modified_base 11: mod_base = OTHER; note = 2'-fluorouridine
  modified_base 15: mod_base = OTHER; note = Adenosine phosphorothiorate
  modified_base 21: mod_base = OTHER; note = 2'-fluoroadenosine
  modified_base 23: mod_base = OTHER; note = Cytosine phosphorothiorate
  modified_base 24: mod_base = OTHER; note = 2'-fluoroadenosine
  modified_base 32: mod_base = OTHER; note = 2'-fluorocytosine phosphorothiorate
  modified_base 37: mod_base = OTHER; note = 2'-fluoroadenosine
  modified_base 50: mod_base = OTHER; note = 2'-fluoroguanosine phosphorothiorate
  modified_base 52: mod_base = OTHER; note = 2'-fluoroguanosine phosphorothiorate
  modified_base 59: mod_base = OTHER; note = Uridine phosphorothiorate
  modified_base 65: mod_base = OTHER; note = Uridine phosphorothiorate
  modified_base 68: mod_base = OTHER; note = Adenosine phosphorothiorate
  modified_base 69: mod_base = OTHER; note = Adenosine phosphorothiorate
  modified_base 70: mod_base = OTHER; note = 2'-fluorocytosine
  modified_base 74: mod_base = OTHER; note = 2'-fluorocytosine phosphorothiorate

SEQ ID NO: 7767 - RNA, 75 nt, synthetic construct; identical to SEQ ID NO: 1045
  source 1..75: mol_type = other RNA
  modified_base 1: mod_base = OTHER; note = 2'-Omethylguanosine
  modified_base 17: mod_base = OTHER; note = 2'-Omethylguanosine
  modified_base 18: mod_base = OTHER; note = 2'-Omethylguanosine
  modified_base 33: mod_base = OTHER; note = Uridine phosphorothiorate
  modified_base 34: mod_base = OTHER; note = 2'-Omethyluridine
  modified_base 35: mod_base = OTHER; note = Uridine phosphorothiorate
  modified_base 37: mod_base = OTHER; note = Adenosine phosphorothiorate
  modified_base 38: mod_base = OTHER; note = Adenosine phosphorothiorate
  modified_base 41: mod_base = OTHER; note = 2'-Omethylcytosine
  modified_base 42: mod_base = OTHER; note = 2'-Omethyladenosine
  modified_base 43: mod_base = OTHER; note = 2'-Omethylguanosine
  modified_base 44: mod_base = OTHER; note = 2'-Omethylcytosine
  modified_base 49: mod_base = OTHER; note = 2'-Omethylcytosine
  modified_base 51: mod_base = OTHER; note = 2'-Omethyladenosine
  modified_base 72: mod_base = OTHER; note = 2'-Omethyluridine

SEQ ID NO: 7768 - RNA, 76 nt, synthetic construct; identical to SEQ ID NO: 625
  source 1..76: mol_type = other RNA
  modified_base 1: mod_base = OTHER; note = 2'-Omethylguanosine
  modified_base 10: mod_base = OTHER; note = 2'-Omethylguanosine
  modified_base 13: mod_base = OTHER; note = 2'-Omethylcytosine
  modified_base 17: mod_base = OTHER; note = Guanosine phosphorothiorate
  modified_base 18: mod_base = OTHER; note = 2'-Omethylguanosine
  modified_base 19: mod_base = OTHER; note = Adenosine phosphorothiorate
  modified_base 20: mod_base = OTHER; note = 2'-Omethyluridine
  modified_base 25: mod_base = OTHER; note = 2'-Omethylcytosine
  modified_base 29: mod_base = OTHER; note = 2'-Omethylguanosine
  modified_base 33: mod_base = OTHER; note = 2'-fluorouridine
  modified_base 35: mod_base = OTHER; note = Cytosine phosphorothiorate
  modified_base 37: mod_base = OTHER; note = Adenosine phosphorothiorate
  modified_base 38: mod_base = OTHER; note = Adenosine phosphorothiorate
  modified_base 43: mod_base = OTHER; note = 2'-Omethyladenosine
  modified_base 44: mod_base = OTHER; note = 2'-fluoroadenosine
  modified_base 50: mod_base = OTHER; note = 2'-Omethylcytosine
  modified_base 52: mod_base = OTHER; note = 2'-Omethylguanosine
  modified_base 54: mod_base = OTHER; note = Uridine phosphorothiorate
  modified_base 55: mod_base = OTHER; note = Uridine phosphorothiorate
  modified_base 56: mod_base = OTHER; note = 2'-Omethylcytosine
  modified_base 57: mod_base = OTHER; note = Guanosine phosphorothiorate
  modified_base 62: mod_base = OTHER; note = 2'-Omethylcytosine
  modified_base 63: mod_base = OTHER; note = 2'-fluorocytosine
  modified_base 65: mod_base = OTHER; note = 2'-Omethylguanosine
  modified_base 71: mod_base = OTHER; note = 2'-Omethyluridine
  modified_base 73: mod_base = OTHER; note = 2'-Omethylguanosine

SEQ ID NO: 7769 - RNA, 86 nt, synthetic construct; identical to SEQ ID NO: 3290
  source 1..86: mol_type = other RNA
  modified_base 72: mod_base = OTHER; note = 2'-fluorocytosine

SEQ ID NO: 7770 - RNA, 76 nt, synthetic construct; identical to SEQ ID NO: 625
  source 1..76: mol_type = other RNA
  modified_base 1: mod_base = OTHER; note = 2'-Omethylguanosine
  modified_base 2: mod_base = OTHER; note = 2'-fluoroguanosine
  modified_base 10: mod_base = OTHER; note = 2'-Omethylguanosine
  modified_base 13: mod_base = OTHER; note = 2'-Omethylcytosine
  modified_base 17: mod_base = OTHER; note = Guanosine phosphorothiorate
  modified_base 18: mod_base = OTHER; note = 2'-Omethylguanosine
  modified_base 19: mod_base = OTHER; note = Adenosine phosphorothiorate
  modified_base 20: mod_base = OTHER; note = 2'-Omethyluridine
  modified_base 25: mod_base = OTHER; note = 2'-Omethylcytosine
  modified_base 29: mod_base = OTHER; note = 2'-Omethylguanosine
  modified_base 33: mod_base = OTHER; note = 2'-fluorouridine
  modified_base 35: mod_base = OTHER; note = Cytosine phosphorothiorate
  modified_base 37: mod_base = OTHER; note = Adenosine phosphorothiorate
  modified_base 38: mod_base = OTHER; note = Adenosine phosphorothiorate
  modified_base 41: mod_base = OTHER; note = 2'-fluorocytosine phosphorothiorate
  modified_base 43: mod_base = OTHER; note = 2'-Omethyladenosine
  modified_base 44: mod_base = OTHER; note = 2'-fluoroadenosine
  modified_base 50: mod_base = OTHER; note = 2'-Omethylcytosine
  modified_base 52: mod_base = OTHER; note = 2'-Omethylguanosine
  modified_base 54: mod_base = OTHER; note = Uridine phosphorothiorate
  modified_base 55: mod_base = OTHER; note = Uridine phosphorothiorate
  modified_base 56: mod_base = OTHER; note = 2'-Omethylcytosine
  modified_base 57: mod_base = OTHER; note = Guanosine phosphorothiorate
  modified_base 62: mod_base = OTHER; note = 2'-Omethylcytosine
  modified_base 63: mod_base = OTHER; note = 2'-fluorocytosine
  modified_base 65: mod_base = OTHER; note = 2'-Omethylguanosine
  modified_base 71: mod_base = OTHER; note = 2'-Omethyluridine
  modified_base 73: mod_base = OTHER; note = 2'-Omethylguanosine

SEQ ID NO: 7771 - RNA, 76 nt, synthetic construct; identical to SEQ ID NO: 3289
  source 1..76: mol_type = other RNA
  modified_base 1: mod_base = OTHER; note = 2'-Omethylguanosine
  modified_base 13: mod_base = OTHER; note = 2'-Omethylcytosine
  modified_base 14: mod_base = OTHER; note = 2'-Omethyladenosine
  modified_base 15: mod_base = OTHER; note = 2'-Omethylguanosine
  modified_base 16: mod_base = OTHER; note = 2'-Omethyluridine
  modified_base 18: mod_base = OTHER; note = 2'-Omethylguanosine
  modified_base 19: mod_base = OTHER; note = 2'-Omethylguanosine
  modified_base 20: mod_base = OTHER; note = Uridine phosphorothiorate
  modified_base 21: mod_base = OTHER; note = Adenosine phosphorothiorate
  modified_base 25: mod_base = OTHER; note = 2'-Omethylcytosine
  modified_base 41: mod_base = OTHER; note = 2'-fluorouridine
  modified_base 42: mod_base = OTHER; note = 2'-Omethylguanosine
  modified_base 43: mod_base = OTHER; note = 2'-Omethyladenosine
  modified_base 44: mod_base = OTHER; note = 2'-fluoroguanosine
  modified_base 49: mod_base = OTHER; note = 2'-Omethylcytosine
  modified_base 50: mod_base = OTHER; note = 2'-Omethyladenosine
  modified_base 52: mod_base = OTHER; note = 2'-Omethylguanosine
  modified_base 54: mod_base = OTHER; note = Uridine phosphorothiorate
  modified_base 55: mod_base = OTHER; note = Uridine phosphorothiorate
  modified_base 61: mod_base = OTHER; note = 2'-Omethylcytosine
  modified_base 65: mod_base = OTHER; note = 2'-Omethylguanosine
  modified_base 73: mod_base = OTHER; note = 2'-Omethylguanosine

SEQ ID NO: 7772 - DNA, 76 bp, synthetic construct; identical to SEQ ID NO: 1924
  source 1..76: mol_type = other DNA
  modified_base 1: mod_base = OTHER; note = 2'-Omethylguanosine
  modified_base 2: mod_base = OTHER; note = 2'-Omethylguanosine phosphorothiorate
  modified_base 3: mod_base = OTHER; note = Cytosine phosphorothiorate
  modified_base 4: mod_base = OTHER; note = 2'-O-(2-Methoxyethyl) thymine phosphorothiorate
  modified_base 5: mod_base = OTHER; note = 2'-O-(2-Methoxyethyl) 5-methylcytosine
  modified_base 7: mod_base = OTHER; note = Guanosine phosphorothiorate
  modified_base 8: mod_base = OTHER; note = 2'-Omethyluridine
  modified_base 10: mod_base = OTHER; note = Guanosine phosphorothiorate
  modified_base 11: mod_base = OTHER; note = deoxycytosine phosphorothiorate
  modified_base 16: mod_base = OTHER; note = Uridine phosphorothiorate
  modified_base 17: mod_base = OTHER; note = 2'-O-(2-Methoxyethyl) guanosine
  modified_base 18: mod_base = OTHER; note = Guanosine phosphorothiorate
  modified_base 19: mod_base = OTHER; note = Adenosine phosphorothiorate
  modified_base 20: mod_base = OTHER; note = 2'-fluorouridine
  modified_base 27: mod_base = OTHER; note = Uridine phosphorothiorate
  modified_base 28: mod_base = OTHER; note = 2'-fluorouridine
  modified_base 29: mod_base = OTHER; note = 2'-fluoroguanosine
  modified_base 31: mod_base = OTHER; note = 2'-Omethyladenosine phosphorothiorate
  modified_base 32: mod_base = OTHER; note = 2'-Omethylcytosine
  modified_base 33: mod_base = OTHER; note = Uridine phosphorothiorate
  modified_base 37: mod_base = OTHER; note = 2'-O-(2-Methoxyethyl) adenosine phosphorothiorate
  modified_base 38: mod_base = OTHER; note = 2'-Omethyladenosine
  modified_base 42: mod_base = OTHER; note = 2'-O-(2-Methoxyethyl) adenosine
  modified_base 43: mod_base = OTHER; note = 2'-Omethyladenosine
  modified_base 44: mod_base = OTHER; note = Adenosine phosphorothiorate
  modified_base 46: mod_base = OTHER; note = Guanosine phosphorothiorate
  modified_base 48: mod_base = OTHER; note = Uridine phosphorothiorate
  modified_base 49: mod_base = OTHER; note = Cytosine phosphorothiorate
  modified_base 50: mod_base = OTHER; note = 2'-fluorocytosine
  modified_base 52: mod_base = OTHER; note = Guanosine phosphorothiorate
  modified_base 56: mod_base = OTHER; note = Cytosine phosphorothiorate
  modified_base 60: mod_base = OTHER; note = Uridine phosphorothiorate
  modified_base 61: mod_base = OTHER; note = Cytosine phosphorothiorate
  modified_base 67: mod_base = OTHER; note = 2'-O-(2-Methoxyethyl) guanosine phosphorothiorate
  modified_base 74: mod_base = OTHER; note = Cytosine phosphorothiorate
  modified_base 75: mod_base = OTHER; note = 2'-fluorocytosine phosphorothiorate
  misc_feature 1..10: note = RNA
  misc_feature 11..12: note = DNA
  misc_feature 13..22: note = RNA
  misc_feature 23: note = DNA
  misc_feature 24..33: note = RNA
  misc_feature 34: note = DNA
  misc_feature 35..67: note = RNA
  misc_feature 68: note = DNA
  misc_feature 69..75: note = RNA
  misc_feature 76: note = DNA

SEQ ID NO: 7773 - RNA, 75 nt, synthetic construct; identical to SEQ ID NO: 1045
  source 1..75: mol_type = other RNA
  modified_base 1: mod_base = OTHER; note = 2'-Omethylguanosine phosphorothiorate
  modified_base 2: mod_base = OTHER; note = Guanosine phosphorothiorate
  modified_base 18: mod_base = OTHER; note = Guanosine phosphorothiorate
  modified_base 19: mod_base = OTHER; note = 2'-fluorouridine
  modified_base 28: mod_base = OTHER; note = 2'-fluorouridine
  modified_base 36: mod_base = OTHER; note = 2'-fluoroadenosine
  modified_base 39: mod_base = OTHER; note = 2'-fluorouridine phosphorothiorate
  modified_base 58: mod_base = OTHER; note = 2'-fluoroguanosine
  modified_base 73: mod_base = OTHER; note = Cytosine phosphorothiorate
  modified_base 74: mod_base = OTHER; note = 2'-Omethylcytosine

SEQ ID NO: 7774 - RNA, 75 nt, synthetic construct; identical to SEQ ID NO: 1045
  source 1..75: mol_type = other RNA
  modified_base 1: mod_base = OTHER; note = 2'-Omethylguanosine
  modified_base 2: mod_base = OTHER; note = 2'-Omethylguanosine phosphorothiorate
  modified_base 3: mod_base = OTHER; note = 2'-Omethyluridine
  modified_base 8: mod_base = OTHER; note = 2'-fluorouridine phosphorothiorate
  modified_base 15: mod_base = OTHER; note = 2'-Omethyladenosine
  modified_base 17: mod_base = OTHER; note = 2'-Omethylguanosine
  modified_base 20: mod_base = OTHER; note = 2'-fluoroadenosine phosphorothiorate
  modified_base 47: mod_base = OTHER; note = 2'-Omethyluridine phosphorothiorate
  modified_base 49: mod_base = OTHER; note = Cytosine phosphorothiorate
  modified_base 53: mod_base = OTHER; note = 2'-Omethyluridine phosphorothiorate
  modified_base 62: mod_base = OTHER; note = 2'-fluorocytosine phosphorothiorate
  modified_base 72: mod_base = OTHER; note = 2'-Omethyluridine
  modified_base 73: mod_base = OTHER; note = 2'-Omethylcytosine phosphorothiorate
  modified_base 74: mod_base = OTHER; note = 2'-Omethylcytosine phosphorothiorate

SEQ ID NO: 7775 - RNA, 76 nt, synthetic construct; identical to SEQ ID NO: 625
  source 1..76: mol_type = other RNA
  modified_base 1: mod_base = OTHER; note = 2'-Omethylguanosine phosphorothiorate
  modified_base 2: mod_base = OTHER; note = 2'-Omethylguanosine
  modified_base 17: mod_base = OTHER; note = 2'-Omethylguanosine
  modified_base 25: mod_base = OTHER; note = 2'-Omethylcytosine
  modified_base 33: mod_base = OTHER; note = 2'-fluorouridine
  modified_base 35: mod_base = OTHER; note = Cytosine phosphorothiorate
  modified_base 37: mod_base = OTHER; note = Adenosine phosphorothiorate
  modified_base 38: mod_base = OTHER; note = Adenosine phosphorothiorate
  modified_base 52: mod_base = OTHER; note = 2'-fluoroguanosine
  modified_base 56: mod_base = OTHER; note = 2'-Omethylcytosine
  modified_base 57: mod_base = OTHER; note = 2'-Omethylguanosine
  modified_base 62: mod_base = OTHER; note = 2'-Omethylcytosine
  modified_base 68: mod_base = OTHER; note = 2'-Omethylguanosine
  modified_base 73: mod_base = OTHER; note = 2'-Omethylguanosine
  modified_base 75: mod_base = OTHER; note = 2'-fluorocytosine phosphorothiorate

SEQ ID NO: 7776 - RNA, 76 nt, synthetic construct; identical to SEQ ID NO: 625
  source 1..76: mol_type = other RNA
  modified_base 1: mod_base = OTHER; note = 2'-O-(2-Methoxyethyl) guanosine
  modified_base 2: mod_base = OTHER; note = 2'-O-(2-Methoxyethyl) guanosine
  modified_base 3: mod_base = OTHER; note = 2'-O-(2-Methoxyethyl) cytosine
  modified_base 4: mod_base = OTHER; note = 2'-O-(2-Methoxyethyl) thymine
  modified_base 5: mod_base = OTHER; note = 2'-O-(2-Methoxyethyl) cytosine
  modified_base 6: mod_base = OTHER; note = 2'-O-(2-Methoxyethyl) cytosine
  modified_base 7: mod_base = OTHER; note = 2'-O-(2-Methoxyethyl) guanosine
  modified_base 66: mod_base = OTHER; note = 2'-O-(2-Methoxyethyl) cytosine
  modified_base 67: mod_base = OTHER; note = 2'-O-(2-Methoxyethyl) guanosine
  modified_base 68: mod_base = OTHER; note = 2'-O-(2-Methoxyethyl) guanosine
  modified_base 69: mod_base = OTHER; note = 2'-O-(2-Methoxyethyl) adenosine
  modified_base 70: mod_base = OTHER; note = 2'-O-(2-Methoxyethyl) guanosine
  modified_base 71: mod_base = OTHER; note = 2'-O-(2-Methoxyethyl) thymine
  modified_base 72: mod_base = OTHER; note = 2'-O-(2-Methoxyethyl) cytosine

SEQ ID NO: 7777 - RNA, 76 nt, synthetic construct; identical to SEQ ID NO: 3295
  source 1..76: mol_type = other RNA
  modified_base 1: mod_base = OTHER; note = 2'-Omethylcytosine
  modified_base 2: mod_base = OTHER; note = 2'-fluorocytosine phosphorothiorate
  modified_base 20: mod_base = OTHER; note = 2'-fluorouridine phosphorothiorate
  modified_base 26: mod_base = OTHER; note = Guanosine phosphorothiorate
  modified_base 46: mod_base = OTHER; note = 2'-Omethylguanosine
  modified_base 52: mod_base = OTHER; note = Guanosine phosphorothiorate
  modified_base 53: mod_base = OTHER; note = 2'-fluoroguanosine phosphorothiorate
  modified_base 54: mod_base = OTHER; note = 2'-fluorouridine phosphorothiorate
  modified_base 66: mod_base = OTHER; note = 2'-fluorouridine
  modified_base 76: mod_base = OTHER; note = 2'-fluoroadenosine

SEQ ID NO: 7778 - RNA, 85 nt, synthetic construct; identical to SEQ ID NO: 3297
  source 1..85: mol_type = other RNA
  modified_base 1: mod_base = OTHER; note = 2'-Omethylguanosine phosphorothiorate
  modified_base 2: mod_base = OTHER; note = 2'-Omethylcytosine phosphorothiorate
  modified_base 44: mod_base = OTHER; note = 2'-Omethyluridine phosphorothiorate
  modified_base 50: mod_base = OTHER; note = 2'-fluorocytosine
  modified_base 51: mod_base = OTHER; note = 2'-fluorouridine
  modified_base 62: mod_base = OTHER; note = Guanosine phosphorothiorate
  modified_base 79: mod_base = OTHER; note = 2'-fluoroadenosine
  modified_base 84: mod_base = OTHER; note = 2'-Omethylcytosine phosphorothiorate

SEQ ID NO: 7779 - RNA, 75 nt, synthetic construct; identical to SEQ ID NO: 1045
  source 1..75: mol_type = other RNA
  modified_base 1: mod_base = OTHER; note = 2'-Omethylguanosine phosphorothiorate
  modified_base 2: mod_base = OTHER; note = 2'-Omethylguanosine phosphorothiorate
  modified_base 12: mod_base = OTHER; note = Guanosine phosphorothiorate
  modified_base 14: mod_base = OTHER; note = 2'-Omethyladenosine
  modified_base 22: mod_base = OTHER; note = 2'-fluoroguanosine
  modified_base 24: mod_base = OTHER; note = 2'-fluoroadenosine
  modified_base 32: mod_base = OTHER; note = 2'-fluorocytosine
  modified_base 39: mod_base = OTHER; note = 2'-fluorouridine
  modified_base 42: mod_base = OTHER; note = 2'-fluoroadenosine
  modified_base 51: mod_base = OTHER; note = Adenosine phosphorothiorate
  modified_base 60: mod_base = OTHER; note = 2'-fluorocytosine
  modified_base 66: mod_base = OTHER; note = 2'-fluoroguanosine
  modified_base 73: mod_base = OTHER; note = Cytosine phosphorothiorate
  modified_base 74: mod_base = OTHER; note = 2'-Omethylcytosine

SEQ ID NO: 7780 - DNA, 76 bp, synthetic construct; identical to SEQ ID NO: 1924
  source 1..76: mol_type = other DNA
  modified_base 1: mod_base = OTHER; note = 2'-Omethylguanosine phosphorothiorate
  modified_base 2: mod_base = OTHER; note = 2'-O-(2-Methoxyethyl) guanosine
  modified_base 10: mod_base = OTHER; note = Guanosine phosphorothiorate
  modified_base 11: mod_base = OTHER; note = 2'-O-(2-Methoxyethyl) 5-methylcytosine phosphorothiorate
  modified_base 12: mod_base = OTHER; note = 2'-fluoroguanosine phosphorothiorate
  modified_base 14: mod_base = OTHER; note = deoxyadenosine phosphorothiorate
  modified_base 15: mod_base = OTHER; note = 2'-Omethyladenosine phosphorothiorate
  modified_base 17: mod_base = OTHER; note = 2'-O-(2-Methoxyethyl) guanosine
  modified_base 19: mod_base = OTHER; note = 2'-O-(2-Methoxyethyl) adenosine
  modified_base 20: mod_base = OTHER; note = Uridine phosphorothiorate
  modified_base 21: mod_base = OTHER; note = Adenosine phosphorothiorate
  modified_base 22: mod_base = OTHER; note = Guanosine phosphorothiorate
  modified_base 23: mod_base = OTHER; note = 2'-fluorocytosine
  modified_base 24: mod_base = OTHER; note = 2'-Omethylguanosine
  modified_base 25: mod_base = OTHER; note = Cytosine phosphorothiorate
  modified_base 26: mod_base = OTHER; note = deoxyadenosine phosphorothiorate
  modified_base 32: mod_base = OTHER; note = Cytosine phosphorothiorate
  modified_base 33: mod_base = OTHER; note = Uridine phosphorothiorate
  modified_base 37: mod_base = OTHER; note = Adenosine phosphorothiorate
  modified_base 38: mod_base = OTHER; note = 2'-fluoroadenosine
  modified_base 41: mod_base = OTHER; note = 2'-Omethylcytosine
  modified_base 46: mod_base = OTHER; note = Guanosine phosphorothiorate
  modified_base 48: mod_base = OTHER; note = 2'-Omethyluridine phosphorothiorate
  modified_base 49: mod_base = OTHER; note = 2'-fluorocytosine
  modified_base 50: mod_base = OTHER; note = deoxycytosine phosphorothiorate
  modified_base 51: mod_base = OTHER; note = 2'-fluoroguanosine
  modified_base 54: mod_base = OTHER; note = 2'-fluorouridine
  modified_base 55: mod_base = OTHER; note = Uridine phosphorothiorate
  modified_base 56: mod_base = OTHER; note = 2'-fluorocytosine
  modified_base 61: mod_base = OTHER; note = Cytosine phosphorothiorate
  modified_base 64: mod_base = OTHER; note = 2'-Omethylguanosine
  modified_base 65: mod_base = OTHER; note = Guanosine phosphorothiorate
  modified_base 66: mod_base = OTHER; note = 2'-Omethylcytosine
  modified_base 68: mod_base = OTHER; note = Guanosine phosphorothiorate
  modified_base 69: mod_base = OTHER; note = 2'-O-(2-Methoxyethyl) adenosine phosphorothiorate
  modified_base 71: mod_base = OTHER; note = Uridine phosphorothiorate
  modified_base 72: mod_base = OTHER; note = 2'-Omethylcytosine
  modified_base 75: mod_base = OTHER; note = 2'-Omethylcytosine
  misc_feature 1..13: note = RNA
  misc_feature 14: note = DNA
  misc_feature 15..25: note = RNA
  misc_feature 26: note = DNA
  misc_feature 27..41: note = RNA
  misc_feature 42: note = DNA
  misc_feature 43..49: note = RNA
  misc_feature 50: note = DNA
  misc_feature 51..76: note = RNA

SEQ ID NO: 7781 - RNA, 76 nt, synthetic construct; identical to SEQ ID NO: 625
  source 1..76: mol_type = other RNA
  modified_base 1: mod_base = OTHER; note = 2'-Omethylguanosine
  modified_base 17: mod_base = OTHER; note = 2'-Omethylguanosine
  modified_base 18: mod_base = OTHER; note = 2'-Omethylguanosine
  modified_base 50: mod_base = OTHER; note = 2'-Omethylcytosine
  modified_base 52: mod_base = OTHER; note = 2'-Omethylguanosine
  modified_base 60: mod_base = OTHER; note = Thymine
  modified_base 73: mod_base = OTHER; note = 2'-Omethylguanosine

SEQ ID NO: 7782 - RNA, 76 nt, synthetic construct; identical to SEQ ID NO: 3318
  source 1..76: mol_type = other RNA
  modified_base 1: mod_base = OTHER; note = 2'-Omethylcytosine phosphorothiorate
  modified_base 2: mod_base = OTHER; note = 2'-Omethylcytosine phosphorothiorate
  modified_base 3: mod_base = OTHER; note = 2'-Omethyluridine
  modified_base 4: mod_base = OTHER; note = 2'-Omethyluridine
  modified_base 5: mod_base = OTHER; note = 2'-Omethylcytosine
  modified_base 6: mod_base = OTHER; note = 2'-Omethylguanosine
  modified_base 10: mod_base = OTHER; note = 2'-Omethylguanosine
  modified_base 11: mod_base = OTHER; note = 2'-Omethylcytosine
  modified_base 12: mod_base = OTHER; note = 2'-Omethyluridine
  modified_base 13: mod_base = OTHER; note = 2'-Omethylcytosine
  modified_base 16: mod_base = OTHER; note = 2'-Omethyluridine
  modified_base 18: mod_base = OTHER; note = 2'-Omethylguanosine
  modified_base 19: mod_base = OTHER; note = 2'-Omethylguanosine
  modified_base 33: mod_base = OTHER; note = 2'-fluorouridine
  modified_base 35: mod_base = OTHER; note = Uridine phosphorothiorate
  modified_base 37: mod_base = OTHER; note = Guanosine phosphorothiorate
  modified_base 38: mod_base = OTHER; note = Adenosine phosphorothiorate
  modified_base 44: mod_base = OTHER; note = 2'-Omethyladenosine
  modified_base 45: mod_base = OTHER; note = 2'-Omethylguanosine
  modified_base 46: mod_base = OTHER; note = 2'-fluoroguanosine
  modified_base 47: mod_base = OTHER; note = 2'-fluorouridine
  modified_base 48: mod_base = OTHER; note = 2'-fluorocytosine
  modified_base 49: mod_base = OTHER; note = 2'-Omethylguanosine
  modified_base 50: mod_base = OTHER; note = 2'-Omethylcytosine
  modified_base 51: mod_base = OTHER; note = 2'-Omethyluridine
  modified_base 52: mod_base = OTHER; note = 2'-Omethylguanosine
  modified_base 53: mod_base = OTHER; note = 2'-Omethylguanosine
  modified_base 54: mod_base = OTHER; note = 2'-Omethyluridine
  modified_base 56: mod_base = OTHER; note = 2'-Omethylcytosine
  modified_base 59: mod_base = OTHER; note = 2'-Omethyladenosine
  modified_base 61: mod_base = OTHER; note = 2'-Omethylcytosine
  modified_base 62: mod_base = OTHER; note = 2'-Omethylcytosine
  modified_base 63: mod_base = OTHER; note = 2'-fluoroguanosine
  modified_base 64: mod_base = OTHER; note = 2'-Omethylguanosine
  modified_base 65: mod_base = OTHER; note = 2'-Omethylcytosine
  modified_base 66: mod_base = OTHER; note = 2'-Omethyluridine
  modified_base 67: mod_base = OTHER; note = 2'-Omethylcytosine
  modified_base 68: mod_base = OTHER; note = 2'-Omethylguanosine
  modified_base 73: mod_base = OTHER; note = 2'-Omethyladenosine

SEQ ID NO: 7783 - RNA, 86 nt, synthetic construct; identical to SEQ ID NO: 3290
  source 1..86: mol_type = other RNA
  modified_base 1: mod_base = OTHER; note = 2'-Omethyladenosine
  modified_base 2: mod_base = OTHER; note = 2'-Omethylcytosine
  modified_base 3: mod_base = OTHER; note = 2'-Omethylcytosine
  modified_base 4: mod_base = OTHER; note = 2'-Omethyladenosine
  modified_base 5: mod_base = OTHER; note = 2'-Omethylguanosine
  modified_base 6: mod_base = OTHER; note = 2'-Omethylguanosine
  modified_base 13: mod_base = OTHER; note = 2'-Omethylguanosine
  modified_base 17: mod_base = OTHER; note = 2'-Omethylguanosine
  modified_base 18: mod_base = OTHER; note = 2'-Omethylguanosine
  modified_base 25: mod_base = OTHER; note = 2'-Omethylcytosine
  modified_base 33: mod_base = OTHER; note = 2'-fluorouridine
  modified_base 34: mod_base = OTHER; note = 2'-Omethyluridine
  modified_base 35: mod_base = OTHER; note = Cytosine phosphorothiorate
  modified_base 37: mod_base = OTHER; note = Guanosine phosphorothiorate
  modified_base 38: mod_base = OTHER; note = Adenosine phosphorothiorate
  modified_base 41: mod_base = OTHER; note = 2'-Omethylcytosine
  modified_base 42: mod_base = OTHER; note = 2'-Omethyladenosine
  modified_base 43: mod_base = OTHER; note = 2'-Omethyladenosine
  modified_base 44: mod_base = OTHER; note = 2'-Omethyluridine
  modified_base 59: mod_base = OTHER; note = 2'-Omethylguanosine
  modified_base 60: mod_base = OTHER; note = 2'-Omethyluridine
  modified_base 61: mod_base = OTHER; note = 2'-Omethylguanosine
  modified_base 62: mod_base = OTHER; note = 2'-Omethylguanosine
  modified_base 63: mod_base = OTHER; note = 2'-Omethylguanosine
  modified_base 64: mod_base = OTHER; note = Uridine phosphorothiorate
  modified_base 65: mod_base = OTHER; note = Uridine phosphorothiorate
  modified_base 71: mod_base = OTHER; note = 2'-Omethylcytosine
  modified_base 75: mod_base = OTHER; note = 2'-Omethylcytosine
  modified_base 83: mod_base = OTHER; note = 2'-Omethyladenosine

SEQ ID NO: 7784 - RNA, 75 nt, synthetic construct; identical to SEQ ID NO: 3306
  source 1..75: mol_type = other RNA
  modified_base 1: mod_base = OTHER; note = 2'-Omethylguanosine
  modified_base 19: mod_base = OTHER; note = 2'-fluorouridine
  modified_base 20: mod_base = OTHER; note = 2'-Omethyladenosine
  modified_base 21: mod_base = OTHER; note = 2'-Omethylguanosine
  modified_base 39: mod_base = OTHER; note = 2'-fluorocytosine
  modified_base 40: mod_base = OTHER; note = 2'-Omethyladenosine
  modified_base 41: mod_base = OTHER; note = 2'-Omethylguanosine
  modified_base 42: mod_base = OTHER; note = 2'-Omethyladenosine
  modified_base 72: mod_base = OTHER; note = 2'-Omethyladenosine

SEQ ID NO: 7785 - RNA, 76 nt, synthetic construct; identical to SEQ ID NO: 625
  source 1..76: mol_type = other RNA
  modified_base 1: mod_base = OTHER; note = 2'-Omethylguanosine phosphorothiorate
  modified_base 2: mod_base = OTHER; note = 2'-Omethylguanosine
  modified_base 3: mod_base = OTHER; note = 2'-Omethylcytosine
  modified_base 4: mod_base = OTHER; note = 2'-Omethyluridine
  modified_base 5: mod_base = OTHER; note = 2'-Omethylcytosine
  modified_base 6: mod_base = OTHER; note = 2'-Omethylcytosine
  modified_base 22: mod_base = OTHER; note = 2'-Omethylguanosine
  modified_base 23: mod_base = OTHER; note = 2'-Omethylcytosine
  modified_base 24: mod_base = OTHER; note = 2'-Omethylguanosine
  modified_base 25: mod_base = OTHER; note = 2'-Omethylcytosine
  modified_base 49: mod_base = OTHER; note = 2'-Omethylcytosine
  modified_base 50: mod_base = OTHER; note = 2'-Omethylcytosine
  modified_base 51: mod_base = OTHER; note = 2'-Omethylguanosine
  modified_base 52: mod_base = OTHER; note = 2'-Omethylguanosine
  modified_base 53: mod_base = OTHER; note = 2'-Omethylguanosine
  modified_base 61: mod_base = OTHER; note = 2'-Omethylcytosine
  modified_base 62: mod_base = OTHER; note = 2'-Omethylcytosine
  modified_base 63: mod_base = OTHER; note = 2'-fluorocytosine
  modified_base 64: mod_base = OTHER; note = 2'-Omethylguanosine
  modified_base 65: mod_base = OTHER; note = 2'-Omethylguanosine
  modified_base 66: mod_base = OTHER; note = 2'-Omethylcytosine
  modified_base 67: mod_base = OTHER; note = 2'-Omethylguanosine
  modified_base 68: mod_base = OTHER; note = 2'-Omethylguanosine
  modified_base 69: mod_base = OTHER; note = 2'-Omethyladenosine
  modified_base 70: mod_base = OTHER; note = 2'-fluoroguanosine

SEQ ID NO: 7786 - RNA, 76 nt, synthetic construct; identical to SEQ ID NO: 3289
  source 1..76: mol_type = other RNA
  modified_base 1: mod_base = OTHER; note = 2'-Omethylguanosine
  modified_base 13: mod_base = OTHER; note = 2'-Omethylcytosine
  modified_base 14: mod_base = OTHER; note = 2'-Omethyladenosine
  modified_base 15: mod_base = OTHER; note = 2'-Omethylguanosine
  modified_base 16: mod_base = OTHER; note = 2'-Omethyluridine
  modified_base 18: mod_base = OTHER; note = 2'-Omethylguanosine
  modified_base 19: mod_base = OTHER; note = 2'-Omethylguanosine
  modified_base 20: mod_base = OTHER; note = Uridine phosphorothiorate
  modified_base 21: mod_base = OTHER; note = Adenosine phosphorothiorate
  modified_base 25: mod_base = OTHER; note = 2'-Omethylcytosine
  modified_base 33: mod_base = OTHER; note = Uridine phosphorothiorate
  modified_base 34: mod_base = OTHER; note = 2'-Omethyluridine
  modified_base 35: mod_base = OTHER; note = Uridine phosphorothiorate
  modified_base 37: mod_base = OTHER; note = Adenosine phosphorothiorate
  modified_base 38: mod_base = OTHER; note = Adenosine phosphorothiorate
  modified_base 41: mod_base = OTHER; note = 2'-fluorouridine
  modified_base 42: mod_base = OTHER; note = 2'-Omethylguanosine
  modified_base 43: mod_base = OTHER; note = 2'-Omethyladenosine
  modified_base 44: mod_base = OTHER; note = 2'-fluoroguanosine
  modified_base 49: mod_base = OTHER; note = 2'-Omethylcytosine
  modified_base 50: mod_base = OTHER; note = 2'-Omethyladenosine
  modified_base 52: mod_base = OTHER; note = 2'-Omethylguanosine
  modified_base 54: mod_base = OTHER; note = Uridine phosphorothiorate
  modified_base 55: mod_base = OTHER; note = Uridine phosphorothiorate
  modified_base 61: mod_base = OTHER; note = 2'-Omethylcytosine
  modified_base 65: mod_base = OTHER; note = 2'-Omethylguanosine
  modified_base 73: mod_base = OTHER; note = 2'-Omethylguanosine

SEQ ID NO: 7787 - RNA, 76 nt, synthetic construct; identical to SEQ ID NO: 3289
  source 1..76: mol_type = other RNA
  modified_base 1: mod_base = OTHER; note = 2'-Omethylguanosine
  modified_base 13: mod_base = OTHER; note = 2'-Omethylcytosine
  modified_base 14: mod_base = OTHER; note = 2'-Omethyladenosine
  modified_base 15: mod_base = OTHER; note = 2'-Omethylguanosine
  modified_base 16: mod_base = OTHER; note = 2'-Omethyluridine
  modified_base 18: mod_base = OTHER; note = 2'-Omethylguanosine
  modified_base 19: mod_base = OTHER; note = 2'-Omethylguanosine
  modified_base 20: mod_base = OTHER; note = Uridine phosphorothiorate
  modified_base 21: mod_base = OTHER; note = Adenosine phosphorothiorate
  modified_base 25: mod_base = OTHER; note = 2'-Omethylcytosine
  modified_base 33: mod_base = OTHER; note = 2'-fluorouridine
  modified_base 34: mod_base = OTHER; note = 2'-Omethyluridine
  modified_base 35: mod_base = OTHER; note = Uridine phosphorothiorate
  modified_base 37: mod_base = OTHER; note = Adenosine phosphorothiorate
  modified_base 38: mod_base = OTHER; note = Adenosine phosphorothiorate
  modified_base 41: mod_base = OTHER; note = 2'-Omethyluridine
  modified_base 42: mod_base = OTHER; note = 2'-Omethylguanosine
  modified_base 43: mod_base = OTHER; note = 2'-Omethyladenosine
  modified_base 44: mod_base = OTHER; note = 2'-Omethylguanosine
  modified_base 49: mod_base = OTHER; note = 2'-Omethylcytosine
  modified_base 50: mod_base = OTHER; note = 2'-Omethyladenosine
  modified_base 52: mod_base = OTHER; note = 2'-Omethylguanosine
  modified_base 54: mod_base = OTHER; note = Uridine phosphorothiorate
  modified_base 55: mod_base = OTHER; note = Uridine phosphorothiorate
  modified_base 61: mod_base = OTHER; note = 2'-Omethylcytosine
  modified_base 65: mod_base = OTHER; note = 2'-Omethylguanosine
  modified_base 73: mod_base = OTHER; note = 2'-Omethylguanosine

SEQ ID NO: 7788 - RNA, 76 nt, synthetic construct; identical to SEQ ID NO: 625
  source 1..76: mol_type = other RNA
  modified_base 1: mod_base = OTHER; note = 2'-Omethylguanosine phosphorothiorate
  modified_base 2: mod_base = OTHER; note = 2'-Omethylguanosine
  modified_base 3: mod_base = OTHER; note = 2'-Omethylcytosine
  modified_base 4: mod_base = OTHER; note = 2'-Omethyluridine
  modified_base 5: mod_base = OTHER; note = 2'-Omethylcytosine
  modified_base 6: mod_base = OTHER; note = 2'-Omethylcytosine
  modified_base 17: mod_base = OTHER; note = 2'-Omethylguanosine
  modified_base 33: mod_base = OTHER; note = 2'-fluorouridine
  modified_base 35: mod_base = OTHER; note = Cytosine phosphorothiorate
  modified_base 37: mod_base = OTHER; note = Adenosine phosphorothiorate
  modified_base 38: mod_base = OTHER; note = Adenosine phosphorothiorate
  modified_base 48: mod_base = OTHER; note = 2'-fluorouridine
  modified_base 49: mod_base = OTHER; note = 2'-Omethylcytosine
  modified_base 50: mod_base = OTHER; note = 2'-Omethylcytosine
  modified_base 51: mod_base = OTHER; note = 2'-Omethylguanosine
  modified_base 52: mod_base = OTHER; note = 2'-Omethylguanosine
  modified_base 53: mod_base = OTHER; note = 2'-Omethylguanosine
  modified_base 54: mod_base = OTHER; note = 2'-Omethyluridine
  modified_base 56: mod_base = OTHER; note = 2'-Omethylcytosine
  modified_base 57: mod_base = OTHER; note = 2'-Omethylguanosine
  modified_base 59: mod_base = OTHER; note = 2'-Omethylguanosine
  modified_base 61: mod_base = OTHER; note = 2'-Omethylcytosine
  modified_base 62: mod_base = OTHER; note = 2'-Omethylcytosine
  modified_base 63: mod_base = OTHER; note = 2'-fluorocytosine
  modified_base 64: mod_base = OTHER; note = 2'-Omethylguanosine
  modified_base 65: mod_base = OTHER; note = 2'-Omethylguanosine
  modified_base 66: mod_base = OTHER; note = 2'-Omethylcytosine
  modified_base 67: mod_base = OTHER; note = 2'-Omethylguanosine
  modified_base 68: mod_base = OTHER; note = 2'-Omethylguanosine
  modified_base 73: mod_base = OTHER; note = 2'-Omethylguanosine
  modified_base 75: mod_base = OTHER; note = 2'-fluorocytosine phosphorothiorate

SEQ ID NO: 7789 - RNA, 85 nt, synthetic construct; identical to SEQ ID NO: 3288
  source 1..85: mol_type = other RNA
  modified_base 1: mod_base = OTHER; note = 2'-Omethylcytosine
  modified_base 6: mod_base = OTHER; note = 2'-Omethyladenosine
  modified_base 12: mod_base = OTHER; note = Guanosine phosphorothiorate
  modified_base 16: mod_base = OTHER; note = Guanosine phosphorothiorate
  modified_base 29: mod_base = OTHER; note = 2'-fluoroguanosine
  modified_base 33: mod_base = OTHER; note = 2'-fluorouridine
  modified_base 53: mod_base = OTHER; note = 2'-Omethyluridine
  modified_base 58: mod_base = OTHER; note = Guanosine phosphorothiorate
  modified_base 59: mod_base = OTHER; note = 2'-fluorouridine
  modified_base 65: mod_base = OTHER; note = Cytosine phosphorothiorate
  modified_base 75: mod_base = OTHER; note = 2'-fluorouridine
  modified_base 76: mod_base = OTHER; note = 2'-fluorocytosine phosphorothiorate
  modified_base 79: mod_base = OTHER; note = Guanosine phosphorothiorate

SEQ ID NO: 7790 - RNA, 86 nt, synthetic construct; identical to SEQ ID NO: 3290
  source 1..86: mol_type = other RNA
  modified_base 17: mod_base = OTHER; note = 2'-fluoroguanosine

SEQ ID NO: 7791 - RNA, 76 nt, synthetic construct; identical to SEQ ID NO: 625
  source 1..76: mol_type = other RNA
  modified_base 1: mod_base = OTHER; note = 2'-Omethylguanosine phosphorothiorate
  modified_base 2: mod_base = OTHER; note = 2'-Omethylguanosine phosphorothiorate
  modified_base 3: mod_base = OTHER; note = 2'-Omethylcytosine phosphorothiorate
  modified_base 4: mod_base = OTHER; note = 2'-Omethyluridine phosphorothiorate
  modified_base 5: mod_base = OTHER; note = 2'-Omethylcytosine phosphorothiorate
  modified_base 6: mod_base = OTHER; note = 2'-Omethylcytosine phosphorothiorate
  modified_base 10: mod_base = OTHER; note = 2'-Omethylguanosine
  modified_base 11: mod_base = OTHER; note = 2'-Omethylcytosine
  modified_base 12: mod_base = OTHER; note = 2'-Omethylguanosine
  modified_base 13: mod_base = OTHER; note = 2'-Omethylcytosine
  modified_base 22: mod_base = OTHER; note = 2'-Omethylguanosine
  modified_base 23: mod_base = OTHER; note = 2'-Omethylcytosine
  modified_base 24: mod_base = OTHER; note = 2'-Omethylguanosine
  modified_base 25: mod_base = OTHER; note = 2'-Omethylcytosine
  modified_base 54: mod_base = OTHER; note = Uridine phosphorothiorate
  modified_base 55: mod_base = OTHER; note = Uridine phosphorothiorate
  modified_base 56: mod_base = OTHER; note = Cytosine phosphorothiorate
  modified_base 57: mod_base = OTHER; note = Guanosine phosphorothiorate

SEQ ID NO: 7792 - RNA, 76 nt, synthetic construct; identical to SEQ ID NO: 625
  source 1..76: mol_type = other RNA
  modified_base 1: mod_base = OTHER; note = 2'-Omethylguanosine phosphorothiorate
  modified_base 2: mod_base = OTHER; note = 2'-Omethylguanosine
  modified_base 17: mod_base = OTHER; note = 2'-Omethylguanosine
  modified_base 33: mod_base = OTHER; note = 2'-fluorouridine
  modified_base 35: mod_base = OTHER; note = Cytosine phosphorothiorate
  modified_base 37: mod_base = OTHER; note = Adenosine phosphorothiorate
  modified_base 38: mod_base = OTHER; note = Adenosine phosphorothiorate
  modified_base 52: mod_base = OTHER; note = 2'-fluoroguanosine
  modified_base 62: mod_base = OTHER; note = 2'-Omethylcytosine
  modified_base 65: mod_base = OTHER; note = 2'-Omethylguanosine
  modified_base 73: mod_base = OTHER; note = 2'-Omethylguanosine
  modified_base 75: mod_base = OTHER; note = 2'-fluorocytosine phosphorothiorate

SEQ ID NO: 7793 - RNA, 75 nt, synthetic construct; identical to SEQ ID NO: 1045
  source 1..75: mol_type = other RNA
  modified_base 1: mod_base = OTHER; note = 2'-Omethylguanosine phosphorothiorate
  modified_base 2: mod_base = OTHER; note = 2'-Omethylguanosine phosphorothiorate
  modified_base 11: mod_base = OTHER; note = 2'-fluorouridine
  modified_base 12: mod_base = OTHER; note = Guanosine phosphorothiorate
  modified_base 15: mod_base = OTHER; note = 2'-fluoroadenosine
  modified_base 19: mod_base = OTHER; note = 2'-fluorouridine
  modified_base 23: mod_base = OTHER; note = 2'-fluorocytosine
  modified_base 39: mod_base = OTHER; note = 2'-fluorouridine
  modified_base 42: mod_base = OTHER; note = 2'-fluoroadenosine
  modified_base 59: mod_base = OTHER; note = Uridine phosphorothiorate
  modified_base 60: mod_base = OTHER; note = 2'-fluorocytosine
  modified_base 61: mod_base = OTHER; note = 2'-fluorouridine
  modified_base 68: mod_base = OTHER; note = 2'-fluoroadenosine
  modified_base 73: mod_base = OTHER; note = Cytosine phosphorothiorate
  modified_base 74: mod_base = OTHER; note = 2'-fluorocytosine phosphorothiorate
  modified_base 75: mod_base = OTHER; note = 2'-fluoroadenosine

SEQ ID NO: 7794 - RNA, 76 nt, synthetic construct; identical to SEQ ID NO: 625
  source 1..76: mol_type = other RNA
  modified_base 1: mod_base = OTHER; note = 2'-Omethylguanosine phosphorothiorate
  modified_base 2: mod_base = OTHER; note = 2'-Omethylguanosine
  modified_base 13: mod_base = OTHER; note = 2'-Omethylcytosine
  modified_base 33: mod_base = OTHER; note = 2'-fluorouridine
  modified_base 35: mod_base = OTHER; note = Cytosine phosphorothiorate
  modified_base 37: mod_base = OTHER; note = Adenosine phosphorothiorate
  modified_base 52: mod_base = OTHER; note = 2'-Omethylguanosine
  modified_base 56: mod_base = OTHER; note = 2'-Omethylcytosine
  modified_base 62: mod_base = OTHER; note = 2'-Omethylcytosine
  modified_base 63: mod_base = OTHER; note = 2'-fluorocytosine
  modified_base 73: mod_base = OTHER; note = 2'-Omethylguanosine
  modified_base 75: mod_base = OTHER; note = 2'-Omethylcytosine

SEQ ID NO: 7795 - RNA, 75 nt, synthetic construct; identical to SEQ ID NO: 3311
  source 1..75: mol_type = other RNA
  modified_base 1: mod_base = OTHER; note = 2'-Omethylguanosine phosphorothiorate
  modified_base 2: mod_base = OTHER; note = 2'-fluoroguanosine phosphorothiorate
  modified_base 9: mod_base = OTHER; note = Guanosine phosphorothiorate
  modified_base 13: mod_base = OTHER; note = Uridine phosphorothiorate
  modified_base 20: mod_base = OTHER; note = 2'-fluoroadenosine
  modified_base 21: mod_base = OTHER; note = 2'-fluoroadenosine phosphorothiorate
  modified_base 31: mod_base = OTHER; note = 2'-fluoroadenosine phosphorothiorate
  modified_base 34: mod_base = OTHER; note = 2'-fluorocytosine
  modified_base 38: mod_base = OTHER; note = Adenosine phosphorothiorate
  modified_base 41: mod_base = OTHER; note = 2'-fluorocytosine
  modified_base 42: mod_base = OTHER; note = 2'-Omethyladenosine
  modified_base 51: mod_base = OTHER; note = Adenosine phosphorothiorate
  modified_base 55: mod_base = OTHER; note = 2'-fluorocytosine
  modified_base 68: mod_base = OTHER; note = 2'-fluoroadenosine
  modified_base 69: mod_base = OTHER; note = Adenosine phosphorothiorate
  modified_base 73: mod_base = OTHER; note = 2'-fluorocytosine
  modified_base 75: mod_base = OTHER; note = 2'-fluoroadenosine

SEQ ID NO: 7796 - RNA, 76 nt, synthetic construct; identical to SEQ ID NO: 3289
  source 1..76: mol_type = other RNA
  modified_base 19: mod_base = OTHER; note = 2'-Omethylguanosine
  modified_base 39: mod_base = OTHER; note = 2'-Omethyluridine

SEQ ID NO: 7797 - RNA, 75 nt, synthetic construct; identical to SEQ ID NO: 3311
  source 1..75: mol_type = other RNA
  modified_base 1: mod_base = OTHER; note = 2'-Omethylguanosine phosphorothiorate
  modified_base 2: mod_base = OTHER; note = 2'-Omethylguanosine phosphorothiorate
  modified_base 19: mod_base = OTHER; note = 2'-fluorouridine
  modified_base 20: mod_base = OTHER; note = 2'-Omethyladenosine phosphorothiorate
  modified_base 22: mod_base = OTHER; note = 2'-fluoroguanosine
  modified_base 24: mod_base = OTHER; note = 2'-fluoroadenosine
  modified_base 25: mod_base = OTHER; note = Cytosine phosphorothiorate
  modified_base 27: mod_base = OTHER; note = 2'-fluorocytosine
  modified_base 38: mod_base = OTHER; note = 2'-fluoroadenosine
  modified_base 44: mod_base = OTHER; note = 2'-fluorocytosine
  modified_base 50: mod_base = OTHER; note = 2'-Omethylguanosine
  modified_base 54: mod_base = OTHER; note = 2'-fluorouridine phosphorothiorate
  modified_base 62: mod_base = OTHER; note = Cytosine phosphorothiorate
  modified_base 65: mod_base = OTHER; note = 2'-fluorouridine
  modified_base 66: mod_base = OTHER; note = Guanosine phosphorothiorate
  modified_base 72: mod_base = OTHER; note = Uridine phosphorothiorate
  modified_base 73: mod_base = OTHER; note = Cytosine phosphorothiorate
  modified_base 74: mod_base = OTHER; note = 2'-fluorocytosine phosphorothiorate
  modified_base 75: mod_base = OTHER; note = 2'-Omethyladenosine

SEQ ID NO: 7798 - RNA, 76 nt, synthetic construct; identical to SEQ ID NO: 625
  source 1..76: mol_type = other RNA
  modified_base 3: mod_base = OTHER; note = Cytosine phosphorothiorate
  modified_base 4: mod_base = OTHER; note = 2'-fluorouridine
  modified_base 5: mod_base = OTHER; note = 2'-Omethylcytosine
  modified_base 10: mod_base = OTHER; note = 2'-Omethylguanosine phosphorothiorate
  modified_base 11: mod_base = OTHER; note = Cytosine phosphorothiorate
  modified_base 12: mod_base = OTHER; note = 2'-fluoroguanosine phosphorothiorate
  modified_base 15: mod_base = OTHER; note = 2'-fluoroadenosine
  modified_base 16: mod_base = OTHER; note = 2'-Omethyluridine phosphorothiorate
  modified_base 22: mod_base = OTHER; note = 2'-fluoroguanosine phosphorothiorate
  modified_base 23: mod_base = OTHER; note = 2'-fluorocytosine
  modified_base 24: mod_base = OTHER; note = 2'-fluoroguanosine
  modified_base 28: mod_base = OTHER; note = 2'-fluorouridine
  modified_base 29: mod_base = OTHER; note = 2'-fluoroguanosine
  modified_base 30: mod_base = OTHER; note = 2'-fluoroguanosine
  modified_base 31: mod_base = OTHER; note = 2'-fluoroadenosine
  modified_base 33: mod_base = OTHER; note = Uridine phosphorothiorate
  modified_base 38: mod_base = OTHER; note = 2'-Omethyladenosine
  modified_base 39: mod_base = OTHER; note = Uridine phosphorothiorate
  modified_base 40: mod_base = OTHER; note = 2'-fluorouridine
  modified_base 41: mod_base = OTHER; note = 2'-fluorocytosine
  modified_base 42: mod_base = OTHER; note = Adenosine phosphorothiorate
  modified_base 43: mod_base = OTHER; note = Adenosine phosphorothiorate
  modified_base 44: mod_base = OTHER; note = 2'-fluoroadenosine
  modified_base 49: mod_base = OTHER; note = 2'-Omethylcytosine
  modified_base 54: mod_base = OTHER; note = 2'-fluorouridine
  modified_base 57: mod_base = OTHER; note = 2'-Omethylguanosine phosphorothiorate
  modified_base 58: mod_base = OTHER; note = 2'-fluoroadenosine
  modified_base 59: mod_base = OTHER; note = 2'-Omethylguanosine
  modified_base 60: mod_base = OTHER; note = 2'-Omethyluridine
  modified_base 61: mod_base = OTHER; note = 2'-fluorocytosine
  modified_base 63: mod_base = OTHER; note = Cytosine phosphorothiorate
  modified_base 66: mod_base = OTHER; note = 2'-Omethylcytosine phosphorothiorate
  modified_base 67: mod_base = OTHER; note = 2'-Omethylguanosine
  modified_base 68: mod_base = OTHER; note = 2'-Omethylguanosine
  modified_base 69: mod_base = OTHER; note = 2'-fluoroadenosine
  modified_base 70: mod_base = OTHER; note = 2'-Omethylguanosine
  modified_base 74: mod_base = OTHER; note = 2'-Omethylcytosine
  modified_base 75: mod_base = OTHER; note = Cytosine phosphorothiorate

SEQ ID NO: 7799 - RNA, 75 nt, synthetic construct; identical to SEQ ID NO: 3336
  source 1..75: mol_type = other RNA
  modified_base 2: mod_base = OTHER; note = 2'-Omethylcytosine phosphorothiorate
  modified_base 4: mod_base = OTHER; note = 2'-Omethylguanosine
  modified_base 9: mod_base = OTHER; note = 2'-Omethylguanosine phosphorothiorate
  modified_base 11: mod_base = OTHER; note = 2'-fluorouridine
  modified_base 20: mod_base = OTHER; note = 2'-fluoroadenosine
  modified_base 21: mod_base = OTHER; note = 2'-Omethylguanosine
  modified_base 22: mod_base = OTHER; note = 2'-fluoroadenosine
  modified_base 25: mod_base = OTHER; note = Adenosine phosphorothiorate
  modified_base 26: mod_base = OTHER; note = 2'-fluorouridine phosphorothiorate
  modified_base 28: mod_base = OTHER; note = 2'-Omethyladenosine phosphorothiorate
  modified_base 39: mod_base = OTHER; note = 2'-fluorocytosine phosphorothiorate
  modified_base 46: mod_base = OTHER; note = 2'-fluorouridine
  modified_base 48: mod_base = OTHER; note = 2'-fluorocytosine phosphorothiorate
  modified_base 54: mod_base = OTHER; note = 2'-Omethyluridine
  modified_base 58: mod_base = OTHER; note = Guanosine phosphorothiorate
  modified_base 62: mod_base = OTHER; note = 2'-Omethylcytosine phosphorothiorate
  modified_base 73: mod_base = OTHER; note = 2'-fluorocytosine
  modified_base 74: mod_base = OTHER; note = Cytosine phosphorothiorate

SEQ ID NO: 7800 - RNA, 85 nt, synthetic construct; identical to SEQ ID NO: 3286
  source 1..85: mol_type = other RNA
  modified_base 28: mod_base = OTHER; note = 2'-fluoroguanosine
  modified_base 47: mod_base = OTHER; note = 2'-Omethylcytosine
  modified_base 58: mod_base = OTHER; note = 2'-fluoroguanosine
  modified_base 61: mod_base = OTHER; note = Guanosine phosphorothiorate
  modified_base 76: mod_base = OTHER; note = 2'-fluorocytosine

SEQ ID NO: 7801 - RNA, 86 nt, synthetic construct; identical to SEQ ID NO: 3290
  source 1..86: mol_type = other RNA
  modified_base 72: mod_base = OTHER; note = Cytosine phosphorothiorate

SEQ ID NO: 7802 - RNA, 76 nt, synthetic construct; identical to SEQ ID NO: 625
  source 1..76: mol_type = other RNA
  modified_base 1: mod_base = OTHER; note = 2'-Omethylguanosine phosphorothiorate
  modified_base 2: mod_base = OTHER; note = 2'-Omethylguanosine
  modified_base 3: mod_base = OTHER; note = 2'-Omethylcytosine
  modified_base 4: mod_base = OTHER; note = 2'-Omethyluridine
  modified_base 5: mod_base = OTHER; note = 2'-Omethylcytosine
  modified_base 6: mod_base = OTHER; note = 2'-Omethylcytosine
  modified_base 10: mod_base = OTHER; note = 2'-Omethylguanosine
  modified_base 11: mod_base = OTHER; note = 2'-Omethylcytosine
  modified_base 12: mod_base = OTHER; note = 2'-Omethylguanosine
  modified_base 13: mod_base = OTHER; note = 2'-Omethylcytosine
  modified_base 16: mod_base = OTHER; note = 2'-Omethyluridine
  modified_base 17: mod_base = OTHER; note = 2'-Omethylguanosine
  modified_base 18: mod_base = OTHER; note = 2'-Omethylguanosine
  modified_base 49: mod_base = OTHER; note = 2'-Omethylcytosine
  modified_base 50: mod_base = OTHER; note = 2'-Omethylcytosine
  modified_base 51: mod_base = OTHER; note = 2'-Omethylguanosine
  modified_base 52: mod_base = OTHER; note = 2'-Omethylguanosine
  modified_base 53: mod_base = OTHER; note = 2'-Omethylguanosine
  modified_base 54: mod_base = OTHER; note = 2'-Omethyluridine phosphorothiorate
  modified_base 56: mod_base = OTHER; note = 2'-Omethylcytosine
  modified_base 57: mod_base = OTHER; note = 2'-fluoroguanosine
  modified_base 59: mod_base = OTHER; note = 2'-Omethylguanosine
  modified_base 61: mod_base = OTHER; note = 2'-Omethylcytosine
  modified_base 62: mod_base = OTHER; note = 2'-Omethylcytosine
  modified_base 63: mod_base = OTHER; note = 2'-Omethylcytosine
  modified_base 64: mod_base = OTHER; note = 2'-Omethylguanosine
  modified_base 65: mod_base = OTHER; note = 2'-Omethylguanosine
  modified_base 66: mod_base = OTHER; note = 2'-Omethylcytosine
  modified_base 67: mod_base = OTHER; note = 2'-Omethylguanosine
  modified_base 68: mod_base = OTHER; note = 2'-Omethylguanosine
  modified_base 69: mod_base = OTHER; note = 2'-Omethyladenosine
  modified_base 73: mod_base = OTHER; note = 2'-Omethylguanosine

SEQ ID NO: 7803 - RNA, 76 nt, synthetic construct; identical to SEQ ID NO: 3318
  source 1..76: mol_type = other RNA
  modified_base 1: mod_base = OTHER; note = 2'-Omethylcytosine
  modified_base 16: mod_base = OTHER; note = 2'-Omethyluridine
  modified_base 18: mod_base = OTHER; note = 2'-Omethylguanosine
  modified_base 19: mod_base = OTHER; note = 2'-Omethylguanosine
  modified_base 54: mod_base = OTHER; note = 2'-Omethyluridine phosphorothiorate
  modified_base 55: mod_base = OTHER; note = Uridine phosphorothiorate
  modified_base 56: mod_base = OTHER; note = 2'-Omethylcytosine
  modified_base 59: mod_base = OTHER; note = 2'-Omethyladenosine
  modified_base 73: mod_base = OTHER; note = 2'-Omethyladenosine

SEQ ID NO: 7804 - RNA, 76 nt, synthetic construct; identical to SEQ ID NO: 625
  source 1..76: mol_type = other RNA
  modified_base 1: mod_base = OTHER; note = 2'-Omethylguanosine phosphorothiorate
  modified_base 2: mod_base = OTHER; note = 2'-Omethylguanosine phosphorothiorate
  modified_base 3: mod_base = OTHER; note = 2'-Omethylcytosine
  modified_base 4: mod_base = OTHER; note = 2'-Omethyluridine
  modified_base 5: mod_base = OTHER; note = 2'-Omethylcytosine
  modified_base 6: mod_base = OTHER; note = 2'-Omethylcytosine
  modified_base 10: mod_base = OTHER; note = 2'-Omethylguanosine
  modified_base 11: mod_base = OTHER; note = 2'-Omethylcytosine
  modified_base 12: mod_base = OTHER; note = 2'-Omethylguanosine
  modified_base 13: mod_base = OTHER; note = 2'-Omethylcytosine
  modified_base 14: mod_base = OTHER; note = 2'-Omethyladenosine
  modified_base 15: mod_base = OTHER; note = 2'-Omethyladenosine
  modified_base 16: mod_base = OTHER; note = 2'-Omethyluridine
  modified_base 17: mod_base = OTHER; note = 2'-Omethylguanosine
  modified_base 18: mod_base = OTHER; note = 2'-Omethylguanosine
  modified_base 20: mod_base = OTHER; note = 2'-Omethyluridine
  modified_base 22: mod_base = OTHER; note = 2'-Omethylguanosine
  modified_base 23: mod_base = OTHER; note = 2'-Omethylcytosine
  modified_base 24: mod_base = OTHER; note = 2'-Omethylguanosine
  modified_base 25: mod_base = OTHER; note = 2'-Omethylcytosine
  modified_base 33: mod_base = OTHER; note = 2'-fluorouridine
  modified_base 35: mod_base = OTHER; note = Cytosine phosphorothiorate
  modified_base 37: mod_base = OTHER; note = Adenosine phosphorothiorate
  modified_base 38: mod_base = OTHER; note = Adenosine phosphorothiorate
  modified_base 41: mod_base = OTHER; note = 2'-fluorocytosine
  modified_base 42: mod_base = OTHER; note = 2'-Omethyladenosine
  modified_base 43: mod_base = OTHER; note = 2'-Omethyladenosine
  modified_base 44: mod_base = OTHER; note = 2'-fluoroadenosine
  modified_base 49: mod_base = OTHER; note = 2'-Omethylcytosine
  modified_base 50: mod_base = OTHER; note = 2'-Omethylcytosine
  modified_base 52: mod_base = OTHER; note = 2'-Omethylguanosine
  modified_base 54: mod_base = OTHER; note = 2'-Omethyluridine
  modified_base 55: mod_base = OTHER; note = Uridine phosphorothiorate
  modified_base 56: mod_base = OTHER; note = 2'-Omethylcytosine
  modified_base 57: mod_base = OTHER; note = 2'-fluoroguanosine
  modified_base 59: mod_base = OTHER; note = 2'-Omethylguanosine
  modified_base 61: mod_base = OTHER; note = 2'-Omethylcytosine
  modified_base 65: mod_base = OTHER; note = 2'-Omethylguanosine
  modified_base 74: mod_base = OTHER; note = Cytosine phosphorothiorate
  modified_base 75: mod_base = OTHER; note = 2'-Omethylcytosine phosphorothiorate
  modified_base 76: mod_base = OTHER; note = 2'-Omethyladenosine

SEQ ID NO: 7805 - RNA, 74 nt, synthetic construct; identical to SEQ ID NO: 3293
  source 1..74: mol_type = other RNA
  modified_base 1: mod_base = OTHER; note = 2'-fluoroadenosine phosphorothiorate
  modified_base 33: mod_base = OTHER; note = Uridine phosphorothiorate
  modified_base 43: mod_base = OTHER; note = Guanosine phosphorothiorate
  modified_base 46: mod_base = OTHER; note = 2'-fluorouridine
  modified_base 73: mod_base = OTHER; note = 2'-Omethylcytosine phosphorothiorate
  modified_base 74: mod_base = OTHER; note = 2'-fluoroadenosine

SEQ ID NO: 7806 - RNA, 76 nt, synthetic construct; identical to SEQ ID NO: 3289
  source 1..76: mol_type = other RNA
  modified_base 1: mod_base = OTHER; note = 2'-Omethylguanosine
  modified_base 19: mod_base = OTHER; note = 2'-Omethylguanosine

SEQ ID NO: 7807 - RNA, 75 nt, synthetic construct; identical to SEQ ID NO: 3306
  source 1..75: mol_type = other RNA
  modified_base 1: mod_base = OTHER; note = 2'-Omethylguanosine
  modified_base 2: mod_base = OTHER; note = 2'-Omethyladenosine
  modified_base 3: mod_base = OTHER; note = 2'-Omethylcytosine
  modified_base 4: mod_base = OTHER; note = 2'-Omethylcytosine
  modified_base 5: mod_base = OTHER; note = 2'-Omethyluridine
  modified_base 6: mod_base = OTHER; note = 2'-Omethylcytosine
  modified_base 10: mod_base = OTHER; note = 2'-Omethylguanosine
  modified_base 11: mod_base = OTHER; note = 2'-Omethylcytosine
  modified_base 12: mod_base = OTHER; note = 2'-Omethylguanosine
  modified_base 13: mod_base = OTHER; note = 2'-Omethylcytosine
  modified_base 14: mod_base = OTHER; note = 2'-Omethyladenosine
  modified_base 15: mod_base = OTHER; note = 2'-fluoroadenosine
  modified_base 16: mod_base = OTHER; note = 2'-Omethylcytosine
  modified_base 17: mod_base = OTHER; note = 2'-Omethylguanosine
  modified_base 18: mod_base = OTHER; note = 2'-Omethylguanosine
  modified_base 21: mod_base = OTHER; note = 2'-Omethylguanosine
  modified_base 22: mod_base = OTHER; note = 2'-Omethylcytosine
  modified_base 23: mod_base = OTHER; note = 2'-Omethylguanosine
  modified_base 24: mod_base = OTHER; note = 2'-Omethylcytosine
  modified_base 32: mod_base = OTHER; note = 2'-fluorouridine
  modified_base 34: mod_base = OTHER; note = Uridine phosphorothiorate
  modified_base 36: mod_base = OTHER; note = Guanosine phosphorothiorate
  modified_base 37: mod_base = OTHER; note = Adenosine phosphorothiorate
  modified_base 40: mod_base = OTHER; note = 2'-Omethyladenosine
  modified_base 41: mod_base = OTHER; note = 2'-Omethylguanosine
  modified_base 42: mod_base = OTHER; note = 2'-Omethyladenosine
  modified_base 43: mod_base = OTHER; note = 2'-Omethyladenosine
  modified_base 48: mod_base = OTHER; note = 2'-Omethylguanosine
  modified_base 49: mod_base = OTHER; note = 2'-Omethylcytosine
  modified_base 51: mod_base = OTHER; note = 2'-Omethyluridine
  modified_base 53: mod_base = OTHER; note = 2'-Omethyluridine
  modified_base 54: mod_base = OTHER; note = Uridine phosphorothiorate
  modified_base 55: mod_base = OTHER; note = 2'-Omethylcytosine
  modified_base 56: mod_base = OTHER; note = 2'-fluoroadenosine
  modified_base 58: mod_base = OTHER; note = 2'-Omethyladenosine
  modified_base 60: mod_base = OTHER; note = 2'-Omethylcytosine
  modified_base 64: mod_base = OTHER; note = 2'-Omethyluridine
  modified_base 72: mod_base = OTHER; note = 2'-Omethyladenosine

SEQ ID NO: 7808 - RNA, 76 nt, synthetic construct; identical to SEQ ID NO: 625
  source 1..76: mol_type = other RNA
  modified_base 1: mod_base = OTHER; note = 2'-Omethylguanosine phosphorothiorate
  modified_base 2: mod_base = OTHER; note = 2'-Omethylguanosine
  modified_base 3: mod_base = OTHER; note = 2'-Omethylcytosine
  modified_base 4: mod_base = OTHER; note = 2'-Omethyluridine
  modified_base 5: mod_base = OTHER; note = 2'-Omethylcytosine
  modified_base 6: mod_base = OTHER; note = 2'-Omethylcytosine
  modified_base 40: mod_base = OTHER; note = 2'-fluorouridine
  modified_base 41: mod_base = OTHER; note = 2'-fluorocytosine
  modified_base 42: mod_base = OTHER; note = 2'-fluoroadenosine
  modified_base 43: mod_base = OTHER; note = 2'-fluoroadenosine
  modified_base 49: mod_base = OTHER; note = 2'-Omethylcytosine
  modified_base 50: mod_base = OTHER; note = 2'-Omethylcytosine
  modified_base 51: mod_base = OTHER; note = 2'-Omethylguanosine
  modified_base 52: mod_base = OTHER; note = 2'-Omethylguanosine
  modified_base 53: mod_base = OTHER; note = 2'-Omethylguanosine
  modified_base 61: mod_base = OTHER; note = 2'-Omethylcytosine
  modified_base 62: mod_base = OTHER; note = 2'-Omethylcytosine
  modified_base 63: mod_base = OTHER; note = 2'-fluorocytosine
  modified_base 64: mod_base = OTHER; note = 2'-Omethylguanosine
  modified_base 65: mod_base = OTHER; note = 2'-Omethylguanosine
  modified_base 66: mod_base = OTHER; note = 2'-Omethylcytosine
  modified_base 67: mod_base = OTHER; note = 2'-Omethylguanosine
  modified_base 68: mod_base = OTHER; note = 2'-Omethylguanosine
  modified_base 69: mod_base = OTHER; note = 2'-fluoroadenosine
  modified_base 71: mod_base = OTHER; note = 2'-Omethyluridine

SEQ ID NO: 7809 - RNA, 85 nt, synthetic construct; identical to SEQ ID NO: 3286
  source 1..85: mol_type = other RNA
  modified_base 1: mod_base = OTHER; note = 2'-Omethylcytosine
  modified_base 2: mod_base = OTHER; note = 2'-fluorocytosine phosphorothiorate
  modified_base 8: mod_base = OTHER; note = Guanosine phosphorothiorate
  modified_base 12: mod_base = OTHER; note = Guanosine phosphorothiorate
  modified_base 19: mod_base = OTHER; note = 2'-fluorouridine
  modified_base 22: mod_base = OTHER; note = 2'-Omethylguanosine
  modified_base 26: mod_base = OTHER; note = 2'-fluorouridine
  modified_base 30: mod_base = OTHER; note = 2'-Omethyladenosine phosphorothiorate
  modified_base 34: mod_base = OTHER; note = 2'-fluorouridine phosphorothiorate
  modified_base 36: mod_base = OTHER; note = Guanosine phosphorothiorate
  modified_base 49: mod_base = OTHER; note = 2'-Omethyluridine
  modified_base 52: mod_base = OTHER; note = 2'-fluoroguanosine phosphorothiorate
  modified_base 53: mod_base = OTHER; note = 2'-Omethyluridine
  modified_base 56: mod_base = OTHER; note = 2'-Omethylguanosine
  modified_base 58: mod_base = OTHER; note = 2'-fluoroguanosine
  modified_base 60: mod_base = OTHER; note = 2'-Omethylguanosine
  modified_base 62: mod_base = OTHER; note = 2'-fluoroguanosine phosphorothiorate
  modified_base 66: mod_base = OTHER; note = Guanosine phosphorothiorate
  modified_base 77: mod_base = OTHER; note = 2'-fluorocytosine phosphorothiorate
  modified_base 83: mod_base = OTHER; note = Cytosine phosphorothiorate
  modified_base 84: mod_base = OTHER; note = 2'-fluorocytosine phosphorothiorate

SEQ ID NO: 7810 - RNA, 75 nt, synthetic construct; identical to SEQ ID NO: 1045
  source 1..75: mol_type = other RNA
  modified_base 1: mod_base = OTHER; note = 2'-Omethylguanosine
  modified_base 2: mod_base = OTHER; note = 2'-Omethylguanosine
  modified_base 3: mod_base = OTHER; note = 2'-Omethyluridine
  modified_base 4: mod_base = OTHER; note = 2'-Omethyluridine
  modified_base 5: mod_base = OTHER; note = 2'-Omethylcytosine
  modified_base 6: mod_base = OTHER; note = 2'-Omethylcytosine
  modified_base 16: mod_base = OTHER; note = 2'-Omethyluridine
  modified_base 17: mod_base = OTHER; note = 2'-Omethylguanosine
  modified_base 18: mod_base = OTHER; note = 2'-Omethylguanosine
  modified_base 20: mod_base = OTHER; note = 2'-Omethyladenosine
  modified_base 25: mod_base = OTHER; note = 2'-Omethylcytosine
  modified_base 33: mod_base = OTHER; note = 2'-fluorouridine
  modified_base 35: mod_base = OTHER; note = Uridine phosphorothiorate
  modified_base 37: mod_base = OTHER; note = Adenosine phosphorothiorate
  modified_base 38: mod_base = OTHER; note = Adenosine phosphorothiorate
  modified_base 41: mod_base = OTHER; note = 2'-Omethylcytosine
  modified_base 44: mod_base = OTHER; note = 2'-Omethylcytosine
  modified_base 45: mod_base = OTHER; note = 2'-Omethylguanosine
  modified_base 46: mod_base = OTHER; note = 2'-fluoroadenosine
  modified_base 47: mod_base = OTHER; note = 2'-fluorouridine
  modified_base 48: mod_base = OTHER; note = 2'-Omethylcytosine
  modified_base 49: mod_base = OTHER; note = 2'-Omethylcytosine
  modified_base 50: mod_base = OTHER; note = 2'-Omethylguanosine
  modified_base 51: mod_base = OTHER; note = 2'-Omethyladenosine
  modified_base 52: mod_base = OTHER; note = 2'-Omethylguanosine
  modified_base 53: mod_base = OTHER; note = 2'-Omethyluridine
  modified_base 55: mod_base = OTHER; note = 2'-Omethylcytosine
  modified_base 58: mod_base = OTHER; note = 2'-Omethylguanosine
  modified_base 72: mod_base = OTHER; note = 2'-Omethyluridine

SEQ ID NO: 7811 - RNA, 86 nt, synthetic construct; identical to SEQ ID NO: 3290
  source 1..86: mol_type = other RNA
  modified_base 16: mod_base = OTHER; note = Uridine phosphorothiorate

SEQ ID NO: 7812 - RNA, 75 nt, synthetic construct; identical to SEQ ID NO: 1045
  source 1..75: mol_type = other RNA
  modified_base 1: mod_base = OTHER; note = 2'-Omethylguanosine
  modified_base 10: mod_base = OTHER; note = 2'-Omethylguanosine
  modified_base 11: mod_base = OTHER; note = 2'-Omethyluridine
  modified_base 12: mod_base = OTHER; note = 2'-Omethylguanosine
  modified_base 13: mod_base = OTHER; note = 2'-Omethyluridine
  modified_base 16: mod_base = OTHER; note = 2'-Omethyluridine
  modified_base 17: mod_base = OTHER; note = 2'-Omethylguanosine
  modified_base 18: mod_base = OTHER; note = 2'-Omethylguanosine
  modified_base 22: mod_base = OTHER; note = 2'-Omethylguanosine
  modified_base 23: mod_base = OTHER; note = 2'-Omethylcytosine
  modified_base 24: mod_base = OTHER; note = 2'-Omethyladenosine
  modified_base 25: mod_base = OTHER; note = 2'-Omethylcytosine
  modified_base 44: mod_base = OTHER; note = 2'-Omethylcytosine
  modified_base 45: mod_base = OTHER; note = 2'-Omethylguanosine
  modified_base 46: mod_base = OTHER; note = 2'-fluoroadenosine
  modified_base 47: mod_base = OTHER; note = 2'-fluorouridine
  modified_base 72: mod_base = OTHER; note = 2'-Omethyluridine

SEQ ID NO: 7813 - RNA, 74 nt, synthetic construct; identical to SEQ ID NO: 3293
  source 1..74: mol_type = other RNA
  modified_base 1: mod_base = OTHER; note = 2'-Omethyladenosine
  modified_base 2: mod_base = OTHER; note = Cytosine phosphorothiorate
  modified_base 3: mod_base = OTHER; note = Cytosine phosphorothiorate
  modified_base 4: mod_base = OTHER; note = 2'-fluorouridine
  modified_base 6: mod_base = OTHER; note = 2'-fluoroguanosine
  modified_base 8: mod_base = OTHER; note = Guanosine phosphorothiorate
  modified_base 9: mod_base = OTHER; note = 2'-fluoroguanosine
  modified_base 24: mod_base = OTHER; note = Guanosine phosphorothiorate
  modified_base 27: mod_base = OTHER; note = Uridine phosphorothiorate
  modified_base 36: mod_base = OTHER; note = 2'-Omethyladenosine
  modified_base 39: mod_base = OTHER; note = Adenosine phosphorothiorate
  modified_base 43: mod_base = OTHER; note = 2'-fluoroguanosine
  modified_base 44: mod_base = OTHER; note = Guanosine phosphorothiorate
  modified_base 50: mod_base = OTHER; note = Uridine phosphorothiorate
  modified_base 51: mod_base = OTHER; note = 2'-fluoroguanosine
  modified_base 62: mod_base = OTHER; note = Guanosine phosphorothiorate
  modified_base 73: mod_base = OTHER; note = 2'-Omethylcytosine phosphorothiorate
  modified_base 74: mod_base = OTHER; note = 2'-fluoroadenosine

SEQ ID NO: 7814 - RNA, 76 nt, synthetic construct; identical to SEQ ID NO: 625
  source 1..76: mol_type = other RNA
  modified_base 1: mod_base = OTHER; note = 2'-Omethylguanosine phosphorothiorate
  modified_base 2: mod_base = OTHER; note = 2'-Omethylguanosine phosphorothiorate
  modified_base 22: mod_base = OTHER; note = Guanosine phosphorothiorate
  modified_base 23: mod_base = OTHER; note = 2'-O-(2-Methoxyethyl) 5-methylcytosine
  modified_base 32: mod_base = OTHER; note = Cytosine phosphorothiorate
  modified_base 33: mod_base = OTHER; note = 2'-Omethyluridine

SEQ ID NO: 7815 - RNA, 86 nt, synthetic construct; identical to SEQ ID NO: 3290
  source 1..86: mol_type = other RNA
  modified_base 1: mod_base = OTHER; note = 2'-Omethyladenosine phosphorothiorate
  modified_base 2: mod_base = OTHER; note = 2'-Omethylcytosine phosphorothiorate
  modified_base 41: mod_base = OTHER; note = Cytosine phosphorothiorate
  modified_base 42: mod_base = OTHER; note = 2'-fluoroadenosine
  modified_base 64: mod_base = OTHER; note = 2'-fluorouridine
  modified_base 79: mod_base = OTHER; note = 2'-fluorouridine
  modified_base 84: mod_base = OTHER; note = Cytosine phosphorothiorate
  modified_base 85: mod_base = OTHER; note = 2'-Omethylcytosine

SEQ ID NO: 7816 - RNA, 85 nt, synthetic construct; identical to SEQ ID NO: 3297
  source 1..85: mol_type = other RNA
  modified_base 1: mod_base = OTHER; note = 2'-Omethylguanosine phosphorothiorate
  modified_base 2: mod_base = OTHER; note = 2'-Omethylcytosine phosphorothiorate
  modified_base 10: mod_base = OTHER; note = 2'-Omethylguanosine
  modified_base 13: mod_base = OTHER; note = 2'-Omethylguanosine
  modified_base 16: mod_base = OTHER; note = Uridine phosphorothiorate
  modified_base 17: mod_base = OTHER; note = Guanosine phosphorothiorate
  modified_base 18: mod_base = OTHER; note = 2'-Omethylguanosine phosphorothiorate
  modified_base 19: mod_base = OTHER; note = Uridine phosphorothiorate
  modified_base 20: mod_base = OTHER; note = 2'-Omethyluridine phosphorothiorate
  modified_base 25: mod_base = OTHER; note = 2'-Omethylcytosine
  modified_base 29: mod_base = OTHER; note = 2'-Omethylguanosine
  modified_base 33: mod_base = OTHER; note = 2'-fluorouridine
  modified_base 35: mod_base = OTHER; note = Cytosine phosphorothiorate
  modified_base 37: mod_base = OTHER; note = Adenosine phosphorothiorate
  modified_base 38: mod_base = OTHER; note = Adenosine phosphorothiorate
  modified_base 41: mod_base = OTHER; note = 2'-fluorocytosine
  modified_base 42: mod_base = OTHER; note = Adenosine phosphorothiorate
  modified_base 43: mod_base = OTHER; note = 2'-Omethyladenosine
  modified_base 44: mod_base = OTHER; note = 2'-fluorouridine
  modified_base 56: mod_base = OTHER; note = Guanosine phosphorothiorate
  modified_base 59: mod_base = OTHER; note = 2'-Omethylcytosine
  modified_base 61: mod_base = OTHER; note = 2'-Omethylguanosine
  modified_base 63: mod_base = OTHER; note = Uridine phosphorothiorate
  modified_base 64: mod_base = OTHER; note = Uridine phosphorothiorate
  modified_base 65: mod_base = OTHER; note = 2'-Omethylcytosine
  modified_base 66: mod_base = OTHER; note = Guanosine phosphorothiorate
  modified_base 71: mod_base = OTHER; note = 2'-Omethylcytosine
  modified_base 72: mod_base = OTHER; note = 2'-fluorouridine
  modified_base 74: mod_base = OTHER; note = 2'-Omethylcytosine
  modified_base 80: mod_base = OTHER; note = 2'-Omethylguanosine
  modified_base 82: mod_base = OTHER; note = 2'-Omethylguanosine

SEQ ID NO: 7817 - RNA, 76 nt, synthetic construct; identical to SEQ ID NO: 625
  source 1..76: mol_type = other RNA
  modified_base 1: mod_base = OTHER; note = 2'-Omethylguanosine phosphorothiorate
  modified_base 2: mod_base = OTHER; note = 2'-Omethylguanosine
  modified_base 3: mod_base = OTHER; note = 2'-Omethylcytosine
  modified_base 4: mod_base = OTHER; note = 2'-Omethyluridine
  modified_base 5: mod_base = OTHER; note = 2'-Omethylcytosine
  modified_base 6: mod_base = OTHER; note = 2'-Omethylcytosine
  modified_base 10: mod_base = OTHER; note = 2'-Omethylguanosine
  modified_base 11: mod_base = OTHER; note = 2'-Omethylcytosine
  modified_base 12: mod_base = OTHER; note = 2'-Omethylguanosine
  modified_base 13: mod_base = OTHER; note = 2'-Omethylcytosine
  modified_base 14: mod_base = OTHER; note = 2'-Omethyladenosine
  modified_base 15: mod_base = OTHER; note = 2'-fluoroadenosine
  modified_base 16: mod_base = OTHER; note = 2'-Omethyluridine
  modified_base 17: mod_base = OTHER; note = 2'-Omethylguanosine
  modified_base 18: mod_base = OTHER; note = 2'-Omethylguanosine
  modified_base 19: mod_base = OTHER; note = 2'-fluoroadenosine
  modified_base 20: mod_base = OTHER; note = 2'-Omethyluridine
  modified_base 54: mod_base = OTHER; note = 2'-Omethyluridine
  modified_base 56: mod_base = OTHER; note = 2'-Omethylcytosine
  modified_base 57: mod_base = OTHER; note = 2'-fluoroguanosine
  modified_base 59: mod_base = OTHER; note = 2'-Omethylguanosine
  modified_base 73: mod_base = OTHER; note = 2'-Omethylguanosine

SEQ ID NO: 7818 - RNA, 75 nt, synthetic construct; identical to SEQ ID NO: 3306
  source 1..75: mol_type = other RNA
  modified_base 1: mod_base = OTHER; note = 2'-Omethylguanosine
  modified_base 4: mod_base = OTHER; note = 2'-Omethylcytosine
  modified_base 6: mod_base = OTHER; note = 2'-Omethylcytosine
  modified_base 10: mod_base = OTHER; note = 2'-Omethylguanosine
  modified_base 11: mod_base = OTHER; note = 2'-Omethylcytosine
  modified_base 12: mod_base = OTHER; note = 2'-Omethylguanosine
  modified_base 13: mod_base = OTHER; note = 2'-Omethylcytosine
  modified_base 17: mod_base = OTHER; note = 2'-Omethylguanosine
  modified_base 18: mod_base = OTHER; note = 2'-Omethylguanosine
  modified_base 21: mod_base = OTHER; note = 2'-Omethylguanosine
  modified_base 24: mod_base = OTHER; note = 2'-Omethylcytosine
  modified_base 28: mod_base = OTHER; note = 2'-Omethyluridine
  modified_base 29: mod_base = OTHER; note = 2'-Omethylguanosine
  modified_base 40: mod_base = OTHER; note = 2'-Omethyladenosine
  modified_base 41: mod_base = OTHER; note = 2'-Omethylguanosine
  modified_base 42: mod_base = OTHER; note = 2'-Omethyladenosine
  modified_base 44: mod_base = OTHER; note = 2'-Omethylguanosine
  modified_base 48: mod_base = OTHER; note = 2'-Omethylguanosine
  modified_base 49: mod_base = OTHER; note = 2'-Omethylcytosine
  modified_base 51: mod_base = OTHER; note = 2'-Omethyluridine
  modified_base 55: mod_base = OTHER; note = 2'-Omethylcytosine
  modified_base 58: mod_base = OTHER; note = 2'-Omethyladenosine
  modified_base 60: mod_base = OTHER; note = 2'-Omethylcytosine
  modified_base 61: mod_base = OTHER; note = 2'-Omethyladenosine
  modified_base 64: mod_base = OTHER; note = 2'-Omethyluridine
  modified_base 65: mod_base = OTHER; note = 2'-Omethylcytosine
  modified_base 66: mod_base = OTHER; note = 2'-Omethylguanosine
  modified_base 67: mod_base = OTHER; note = 2'-Omethylguanosine
  modified_base 68: mod_base = OTHER; note = 2'-Omethylguanosine
  modified_base 70: mod_base = OTHER; note = 2'-Omethyluridine
  modified_base 71: mod_base = OTHER; note = 2'-Omethylcytosine
  modified_base 72: mod_base = OTHER; note = 2'-Omethyladenosine
  modified_base 75: mod_base = OTHER; note = 2'-Omethyladenosine

SEQ ID NO: 7819 - RNA, 76 nt, synthetic construct; identical to SEQ ID NO: 3295
  source 1..76: mol_type = other RNA
  modified_base 1: mod_base = OTHER; note = 2'-Omethylcytosine
  modified_base 2: mod_base = OTHER; note = 2'-Omethylcytosine
  modified_base 4: mod_base = OTHER; note = 2'-fluorouridine phosphorothiorate
  modified_base 8: mod_base = OTHER; note = Uridine phosphorothiorate
  modified_base 10: mod_base = OTHER; note = 2'-fluoroguanosine phosphorothiorate
  modified_base 41: mod_base = OTHER; note = Cytosine phosphorothiorate
  modified_base 54: mod_base = OTHER; note = 2'-fluorouridine phosphorothiorate
  modified_base 67: mod_base = OTHER; note = 2'-fluorocytosine

SEQ ID NO: 7820 - RNA, 73 nt, synthetic construct; identical to SEQ ID NO: 935
  source 1..73: mol_type = other RNA
  modified_base 55: mod_base = OTHER; note = Uridine phosphorothiorate

SEQ ID NO: 7821 - RNA, 86 nt, synthetic construct; identical to SEQ ID NO: 3290
  source 1..86: mol_type = other RNA
  modified_base 1: mod_base = OTHER; note = 2'-Omethyladenosine
  modified_base 2: mod_base = OTHER; note = 2'-Omethylcytosine
  modified_base 3: mod_base = OTHER; note = 2'-Omethylcytosine
  modified_base 4: mod_base = OTHER; note = 2'-Omethyladenosine
  modified_base 5: mod_base = OTHER; note = 2'-Omethylguanosine
  modified_base 6: mod_base = OTHER; note = 2'-Omethylguanosine
  modified_base 14: mod_base = OTHER; note = 2'-Omethyladenosine
  modified_base 17: mod_base = OTHER; note = 2'-Omethylguanosine
  modified_base 18: mod_base = OTHER; note = 2'-Omethylguanosine
  modified_base 20: mod_base = OTHER; note = 2'-Omethyluridine
  modified_base 22: mod_base = OTHER; note = 2'-Omethyladenosine
  modified_base 25: mod_base = OTHER; note = 2'-Omethylcytosine
  modified_base 27: mod_base = OTHER; note = 2'-Omethyluridine
  modified_base 33: mod_base = OTHER; note = 2'-fluorouridine
  modified_base 41: mod_base = OTHER; note = 2'-Omethylcytosine
  modified_base 44: mod_base = OTHER; note = 2'-Omethyluridine
  modified_base 57: mod_base = OTHER; note = 2'-fluoroguanosine
  modified_base 58: mod_base = OTHER; note = 2'-fluorocytosine
  modified_base 62: mod_base = OTHER; note = 2'-Omethylguanosine
  modified_base 65: mod_base = OTHER; note = Uridine phosphorothiorate
  modified_base 83: mod_base = OTHER; note = 2'-Omethyladenosine

SEQ ID NO: 7822 - RNA, 76 nt, synthetic construct; identical to SEQ ID NO: 3316
  source 1..76: mol_type = other RNA
  modified_base 1: mod_base = OTHER; note = 2'-Omethyladenosine
  modified_base 2: mod_base = OTHER; note = 2'-Omethylcytosine
  modified_base 3: mod_base = OTHER; note = 2'-Omethylcytosine
  modified_base 4: mod_base = OTHER; note = 2'-Omethyladenosine
  modified_base 5: mod_base = OTHER; note = 2'-Omethyladenosine
  modified_base 6: mod_base = OTHER; note = 2'-Omethylcytosine
  modified_base 14: mod_base = OTHER; note = 2'-Omethyladenosine
  modified_base 17: mod_base = OTHER; note = 2'-Omethylguanosine
  modified_base 18: mod_base = OTHER; note = 2'-Omethylguanosine
  modified_base 20: mod_base = OTHER; note = 2'-Omethyluridine
  modified_base 22: mod_base = OTHER; note = 2'-Omethylguanosine
  modified_base 25: mod_base = OTHER; note = 2'-Omethylcytosine
  modified_base 27: mod_base = OTHER; note = 2'-Omethyluridine
  modified_base 33: mod_base = OTHER; note = 2'-fluorouridine
  modified_base 71: mod_base = OTHER; note = 2'-Omethylguanosine
  modified_base 73: mod_base = OTHER; note = 2'-Omethylguanosine

SEQ ID NO: 7823 - RNA, 85 nt, synthetic construct; identical to SEQ ID NO: 3286
  source 1..85: mol_type = other RNA
  modified_base 1: mod_base = OTHER; note = 2'-Omethylcytosine
  modified_base 12: mod_base = OTHER; note = Guanosine phosphorothiorate
  modified_base 13: mod_base = OTHER; note = Adenosine phosphorothiorate
  modified_base 28: mod_base = OTHER; note = 2'-fluoroguanosine
  modified_base 30: mod_base = OTHER; note = 2'-fluoroadenosine
  modified_base 43: mod_base = OTHER; note = 2'-Omethyluridine
  modified_base 46: mod_base = OTHER; note = Adenosine phosphorothiorate
  modified_base 53: mod_base = OTHER; note = Uridine phosphorothiorate
  modified_base 54: mod_base = OTHER; note = 2'-fluorocytosine
  modified_base 56: mod_base = OTHER; note = 2'-Omethylguanosine
  modified_base 58: mod_base = OTHER; note = 2'-Omethylguanosine
  modified_base 72: mod_base = OTHER; note = 2'-fluorocytosine
  modified_base 76: mod_base = OTHER; note = 2'-fluorocytosine
  modified_base 83: mod_base = OTHER; note = Cytosine phosphorothiorate
  modified_base 84: mod_base = OTHER; note = Cytosine phosphorothiorate

SEQ ID NO: 7824 - RNA, 76 nt, synthetic construct; identical to SEQ ID NO: 625
  source 1..76: mol_type = other RNA
  modified_base 1: mod_base = OTHER; note = 2'-Omethylguanosine
  modified_base 2: mod_base = OTHER; note = 2'-Omethylguanosine
  modified_base 3: mod_base = OTHER; note = 2'-Omethylcytosine
  modified_base 4: mod_base = OTHER; note = 2'-Omethyluridine
  modified_base 5: mod_base = OTHER; note = 2'-Omethylcytosine
  modified_base 10: mod_base = OTHER; note = 2'-Omethylguanosine
  modified_base 13: mod_base = OTHER; note = 2'-Omethylcytosine
  modified_base 17: mod_base = OTHER; note = Guanosine phosphorothiorate
  modified_base 18: mod_base = OTHER; note = 2'-Omethylguanosine
  modified_base 19: mod_base = OTHER; note = Adenosine phosphorothiorate
  modified_base 20: mod_base = OTHER; note = 2'-Omethyluridine
  modified_base 25: mod_base = OTHER; note = 2'-Omethylcytosine
  modified_base 29: mod_base = OTHER; note = 2'-Omethylguanosine
  modified_base 33: mod_base = OTHER; note = 2'-fluorouridine
  modified_base 35: mod_base = OTHER; note = Cytosine phosphorothiorate
  modified_base 37: mod_base = OTHER; note = Adenosine phosphorothiorate
  modified_base 38: mod_base = OTHER; note = Adenosine phosphorothiorate
  modified_base 41: mod_base = OTHER; note = 2'-fluorocytosine phosphorothiorate
  modified_base 43: mod_base = OTHER; note = 2'-Omethyladenosine
  modified_base 44: mod_base = OTHER; note = 2'-fluoroadenosine
  modified_base 46: mod_base = OTHER; note = Guanosine phosphorothiorate
  modified_base 50: mod_base = OTHER; note = 2'-Omethylcytosine
  modified_base 52: mod_base = OTHER; note = 2'-Omethylguanosine
  modified_base 54: mod_base = OTHER; note = Uridine phosphorothiorate
  modified_base 55: mod_base = OTHER; note = Uridine phosphorothiorate
  modified_base 56: mod_base = OTHER; note = 2'-Omethylcytosine
  modified_base 57: mod_base = OTHER; note = Guanosine phosphorothiorate
  modified_base 62: mod_base = OTHER; note = 2'-Omethylcytosine
  modified_base 63: mod_base = OTHER; note = 2'-fluorocytosine
  modified_base 65: mod_base = OTHER; note = 2'-Omethylguanosine
  modified_base 71: mod_base = OTHER; note = 2'-Omethyluridine
  modified_base 73: mod_base = OTHER; note = 2'-Omethylguanosine

SEQ ID NO: 7825 - RNA, 85 nt, synthetic construct; identical to SEQ ID NO: 3297
  source 1..85: mol_type = other RNA
  modified_base 61: mod_base = OTHER; note = 2'-Omethylguanosine
  modified_base 82: mod_base = OTHER; note = 2'-Omethylguanosine

SEQ ID NO: 7826 - RNA, 86 nt, synthetic construct; identical to SEQ ID NO: 3290
  source 1..86: mol_type = other RNA
  modified_base 71: mod_base = OTHER; note = Cytosine phosphorothiorate

SEQ ID NO: 7827 - RNA, 85 nt, synthetic construct; identical to SEQ ID NO: 3317
  source 1..85: mol_type = other RNA
  modified_base 1: mod_base = OTHER; note = 2'-Omethylguanosine phosphorothiorate
  modified_base 4: mod_base = OTHER; note = Guanosine phosphorothiorate
  modified_base 17: mod_base = OTHER; note = 2'-fluoroguanosine phosphorothiorate
  modified_base 22: mod_base = OTHER; note = 2'-fluoroadenosine
  modified_base 37: mod_base = OTHER; note = 2'-Omethyladenosine
  modified_base 46: mod_base = OTHER; note = 2'-Omethylguanosine phosphorothiorate
  modified_base 48: mod_base = OTHER; note = 2'-Omethylguanosine
  modified_base 56: mod_base = OTHER; note = 2'-Omethylguanosine phosphorothiorate

SEQ ID NO: 7828 - RNA, 85 nt, synthetic construct; identical to SEQ ID NO: 3288
  source 1..85: mol_type = other RNA
  modified_base 2: mod_base = OTHER; note = 2'-Omethylcytosine
  modified_base 26: mod_base = OTHER; note = 2'-fluorouridine phosphorothiorate
  modified_base 35: mod_base = OTHER; note = 2'-fluoroadenosine
  modified_base 39: mod_base = OTHER; note = Cytosine phosphorothiorate
  modified_base 43: mod_base = OTHER; note = 2'-Omethyluridine
  modified_base 45: mod_base = OTHER; note = 2'-fluoroguanosine
  modified_base 51: mod_base = OTHER; note = 2'-Omethyluridine
  modified_base 56: mod_base = OTHER; note = 2'-fluoroguanosine
  modified_base 57: mod_base = OTHER; note = 2'-Omethylcytosine
  modified_base 67: mod_base = OTHER; note = Adenosine phosphorothiorate
  modified_base 77: mod_base = OTHER; note = 2'-fluorocytosine phosphorothiorate
  modified_base 83: mod_base = OTHER; note = Cytosine phosphorothiorate

SEQ ID NO: 7829 - RNA, 76 nt, synthetic construct; identical to SEQ ID NO: 625
  source 1..76: mol_type = other RNA
  modified_base 2: mod_base = OTHER; note = 2'-fluoroguanosine
  modified_base 3: mod_base = OTHER; note = 2'-fluorocytosine
  modified_base 6: mod_base = OTHER; note = 2'-fluorocytosine
  modified_base 10: mod_base = OTHER; note = 2'-fluoroguanosine
  modified_base 13: mod_base = OTHER; note = 2'-fluorocytosine
  modified_base 14: mod_base = OTHER; note = Adenosine phosphorothiorate
  modified_base 15: mod_base = OTHER; note = 2'-fluoroadenosine
  modified_base 17: mod_base = OTHER; note = 2'-Omethylguanosine
  modified_base 18: mod_base = OTHER; note = 2'-Omethylguanosine
  modified_base 20: mod_base = OTHER; note = 2'-Omethyluridine
  modified_base 22: mod_base = OTHER; note = 2'-Omethylguanosine
  modified_base 23: mod_base = OTHER; note = 2'-fluorocytosine
  modified_base 24: mod_base = OTHER; note = Guanosine phosphorothiorate
  modified_base 25: mod_base = OTHER; note = 2'-fluorocytosine
  modified_base 26: mod_base = OTHER; note = Adenosine phosphorothiorate
  modified_base 27: mod_base = OTHER; note = 2'-Omethyluridine
  modified_base 28: mod_base = OTHER; note = Uridine phosphorothiorate
  modified_base 32: mod_base = OTHER; note = 2'-fluorocytosine
  modified_base 34: mod_base = OTHER; note = 2'-Omethyluridine
  modified_base 38: mod_base = OTHER; note = 2'-Omethyladenosine phosphorothiorate
  modified_base 39: mod_base = OTHER; note = 2'-Omethyluridine
  modified_base 40: mod_base = OTHER; note = Uridine phosphorothiorate
  modified_base 41: mod_base = OTHER; note = 2'-fluorocytosine
  modified_base 42: mod_base = OTHER; note = 2'-Omethyladenosine
  modified_base 43: mod_base = OTHER; note = 2'-Omethyladenosine
  modified_base 44: mod_base = OTHER; note = Adenosine phosphorothiorate
  modified_base 45: mod_base = OTHER; note = 2'-fluoroguanosine
  modified_base 46: mod_base = OTHER; note = 2'-fluoroguanosine
  modified_base 47: mod_base = OTHER; note = 2'-fluorouridine
  modified_base 49: mod_base = OTHER; note = 2'-fluorocytosine phosphorothiorate
  modified_base 52: mod_base = OTHER; note = 2'-fluoroguanosine
  modified_base 53: mod_base = OTHER; note = 2'-fluoroguanosine phosphorothiorate
  modified_base 54: mod_base = OTHER; note = 2'-fluorouridine
  modified_base 56: mod_base = OTHER; note = 2'-Omethylcytosine
  modified_base 57: mod_base = OTHER; note = 2'-Omethylguanosine
  modified_base 61: mod_base = OTHER; note = 2'-Omethylcytosine
  modified_base 62: mod_base = OTHER; note = 2'-Omethylcytosine phosphorothiorate
  modified_base 63: mod_base = OTHER; note = Cytosine phosphorothiorate
  modified_base 64: mod_base = OTHER; note = 2'-fluoroguanosine
  modified_base 65: mod_base = OTHER; note = 2'-fluoroguanosine
  modified_base 66: mod_base = OTHER; note = 2'-fluorocytosine
  modified_base 68: mod_base = OTHER; note = 2'-Omethylguanosine
  modified_base 73: mod_base = OTHER; note = Guanosine phosphorothiorate
  modified_base 74: mod_base = OTHER; note = 2'-fluorocytosine

SEQ ID NO: 7830 - RNA, 75 nt, synthetic construct; identical to SEQ ID NO: 1045
  source 1..75: mol_type = other RNA
  modified_base 2: mod_base = OTHER; note = 2'-Omethylguanosine phosphorothiorate
  modified_base 3: mod_base = OTHER; note = 2'-Omethyluridine
  modified_base 5: mod_base = OTHER; note = 2'-Omethylcytosine phosphorothiorate
  modified_base 6: mod_base = OTHER; note = 2'-Omethylcytosine phosphorothiorate
  modified_base 10: mod_base = OTHER; note = 2'-Omethylguanosine phosphorothiorate
  modified_base 15: mod_base = OTHER; note = 2'-Omethyladenosine
  modified_base 16: mod_base = OTHER; note = 2'-Omethyluridine
  modified_base 17: mod_base = OTHER; note = 2'-Omethylguanosine
  modified_base 19: mod_base = OTHER; note = 2'-fluorouridine
  modified_base 30: mod_base = OTHER; note = 2'-fluoroguanosine phosphorothiorate
  modified_base 44: mod_base = OTHER; note = 2'-fluorocytosine phosphorothiorate
  modified_base 51: mod_base = OTHER; note = 2'-Omethyladenosine phosphorothiorate
  modified_base 52: mod_base = OTHER; note = 2'-Omethylguanosine phosphorothiorate
  modified_base 53: mod_base = OTHER; note = 2'-Omethyluridine
  modified_base 60: mod_base = OTHER; note = Cytosine phosphorothiorate
  modified_base 72: mod_base = OTHER; note = 2'-Omethyluridine
  modified_base 75: mod_base = OTHER; note = 2'-Omethyladenosine

SEQ ID NO: 7831 - RNA, 85 nt, synthetic construct; identical to SEQ ID NO: 3310
  source 1..85: mol_type = other RNA
  modified_base 1: mod_base = OTHER; note = Cytosine phosphorothiorate
  modified_base 9: mod_base = OTHER; note = Guanosine phosphorothiorate
  modified_base 38: mod_base = OTHER; note = Uridine phosphorothiorate
  modified_base 55: mod_base = OTHER; note = 2'-Omethylcytosine
  modified_base 57: mod_base = OTHER; note = Cytosine phosphorothiorate
  modified_base 73: mod_base = OTHER; note = Adenosine phosphorothiorate

SEQ ID NO: 7832 - RNA, 76 nt, synthetic construct; identical to SEQ ID NO: 625
  source 1..76: mol_type = other RNA
  modified_base 1: mod_base = OTHER; note = 2'-Omethylguanosine
  modified_base 2: mod_base = OTHER; note = 2'-Omethylguanosine
  modified_base 3: mod_base = OTHER; note = 2'-Omethylcytosine
  modified_base 4: mod_base = OTHER; note = 2'-Omethyluridine
  modified_base 5: mod_base = OTHER; note = 2'-Omethylcytosine
  modified_base 6: mod_base = OTHER; note = 2'-Omethylcytosine
  modified_base 10: mod_base = OTHER; note = 2'-Omethylguanosine
  modified_base 11: mod_base = OTHER; note = 2'-Omethylcytosine
  modified_base 12: mod_base = OTHER; note = 2'-Omethylguanosine
  modified_base 13: mod_base = OTHER; note = 2'-Omethylcytosine
  modified_base 14: mod_base = OTHER; note = 2'-Omethyladenosine
  modified_base 15: mod_base = OTHER; note = 2'-fluoroadenosine
  modified_base 16: mod_base = OTHER; note = 2'-Omethyluridine
  modified_base 17: mod_base = OTHER; note = 2'-Omethylguanosine
  modified_base 18: mod_base = OTHER; note = 2'-Omethylguanosine
  modified_base 19: mod_base = OTHER; note = 2'-fluoroadenosine
  modified_base 20: mod_base = OTHER; note = 2'-Omethyluridine
  modified_base 22: mod_base = OTHER; note = 2'-Omethylguanosine
  modified_base 23: mod_base = OTHER; note = 2'-Omethylcytosine
  modified_base 24: mod_base = OTHER; note = 2'-Omethylguanosine
  modified_base 25: mod_base = OTHER; note = 2'-Omethylcytosine
  modified_base 38: mod_base = OTHER; note = Adenosine phosphorothiorate
  modified_base 39: mod_base = OTHER; note = Uridine phosphorothiorate
  modified_base 40: mod_base = OTHER; note = 2'-fluorouridine
  modified_base 43: mod_base = OTHER; note = 2'-Omethyladenosine
  modified_base 44: mod_base = OTHER; note = 2'-Omethyladenosine
  modified_base 45: mod_base = OTHER; note = 2'-Omethylguanosine
  modified_base 46: mod_base = OTHER; note = 2'-fluoroguanosine
  modified_base 48: mod_base = OTHER; note = 2'-fluorouridine
  modified_base 49: mod_base = OTHER; note = 2'-Omethylcytosine
  modified_base 50: mod_base = OTHER; note = 2'-Omethylcytosine
  modified_base 54: mod_base = OTHER; note = Uridine phosphorothiorate
  modified_base 55: mod_base = OTHER; note = Uridine phosphorothiorate
  modified_base 56: mod_base = OTHER; note = 2'-Omethylcytosine
  modified_base 57: mod_base = OTHER; note = Guanosine phosphorothiorate
  modified_base 61: mod_base = OTHER; note = 2'-Omethylcytosine
  modified_base 62: mod_base = OTHER; note = 2'-Omethylcytosine
  modified_base 63: mod_base = OTHER; note = 2'-fluorocytosine
  modified_base 64: mod_base = OTHER; note = 2'-Omethylguanosine
  modified_base 65: mod_base = OTHER; note = 2'-Omethylguanosine
  modified_base 66: mod_base = OTHER; note = 2'-Omethylcytosine
  modified_base 67: mod_base = OTHER; note = 2'-Omethylguanosine
  modified_base 68: mod_base = OTHER; note = 2'-Omethylguanosine

SEQ ID NO: 7833 - RNA, 85 nt, synthetic construct; identical to SEQ ID NO: 3310
  source 1..85: mol_type = other RNA
  modified_base 1: mod_base = OTHER; note = 2'-fluorocytosine
  modified_base 12: mod_base = OTHER; note = Guanosine phosphorothiorate
  modified_base 30: mod_base = OTHER; note = 2'-fluoroadenosine
  modified_base 34: mod_base = OTHER; note = Uridine phosphorothiorate
  modified_base 44: mod_base = OTHER; note = 2'-Omethylguanosine
  modified_base 54: mod_base = OTHER; note = 2'-fluorocytosine
  modified_base 56: mod_base = OTHER; note = Guanosine phosphorothiorate
  modified_base 58: mod_base = OTHER; note = 2'-Omethylguanosine
  modified_base 76: mod_base = OTHER; note = 2'-fluorocytosine
  modified_base 84: mod_base = OTHER; note = Cytosine phosphorothiorate
  modified_base 85: mod_base = OTHER; note = 2'-Omethyladenosine

SEQ ID NO: 7834 - RNA, 85 nt, synthetic construct; identical to SEQ ID NO: 3301
  source 1..85: mol_type = other RNA
  modified_base 1: mod_base = OTHER; note = 2'-Omethylguanosine phosphorothiorate
  modified_base 2: mod_base = OTHER; note = 2'-Omethylcytosine phosphorothiorate
  modified_base 3: mod_base = OTHER; note = 2'-Omethyluridine phosphorothiorate
  modified_base 4: mod_base = OTHER; note = 2'-Omethylguanosine phosphorothiorate
  modified_base 14: mod_base = OTHER; note = 2'-Omethyladenosine phosphorothiorate
  modified_base 17: mod_base = OTHER; note = 2'-fluoroguanosine
  modified_base 18: mod_base = OTHER; note = Guanosine phosphorothiorate
  modified_base 21: mod_base = OTHER; note = Adenosine phosphorothiorate
  modified_base 22: mod_base = OTHER; note = 2'-Omethyladenosine phosphorothiorate
  modified_base 23: mod_base = OTHER; note = 2'-fluoroguanosine
  modified_base 25: mod_base = OTHER; note = 2'-Omethylcytosine phosphorothiorate
  modified_base 27: mod_base = OTHER; note = Uridine phosphorothiorate
  modified_base 33: mod_base = OTHER; note = 2'-fluorouridine phosphorothiorate
  modified_base 35: mod_base = OTHER; note = 2'-fluorouridine
  modified_base 44: mod_base = OTHER; note = 2'-Omethyluridine
  modified_base 47: mod_base = OTHER; note = 2'-Omethylguanosine phosphorothiorate
  modified_base 54: mod_base = OTHER; note = 2'-Omethylcytosine
  modified_base 56: mod_base = OTHER; note = 2'-Omethylguanosine
  modified_base 62: mod_base = OTHER; note = 2'-fluoroguanosine
  modified_base 73: mod_base = OTHER; note = 2'-fluoroguanosine
  modified_base 74: mod_base = OTHER; note = 2'-fluorocytosine
  modified_base 81: mod_base = OTHER; note = 2'-Omethylcytosine phosphorothiorate

SEQ ID NO: 7835 - RNA, 75 nt, synthetic construct; identical to SEQ ID NO: 3299
  source 1..75: mol_type = other RNA
  modified_base 1: mod_base = OTHER; note = 2'-Omethylcytosine phosphorothiorate
  modified_base 15: mod_base = OTHER; note = 2'-Omethyluridine
  modified_base 18: mod_base = OTHER; note = 2'-fluoroguanosine
  modified_base 23: mod_base = OTHER; note = 2'-Omethylguanosine phosphorothiorate
  modified_base 25: mod_base = OTHER; note = 2'-fluoroadenosine
  modified_base 28: mod_base = OTHER; note = 2'-fluoroadenosine phosphorothiorate
  modified_base 29: mod_base = OTHER; note = 2'-Omethylguanosine phosphorothiorate
  modified_base 37: mod_base = OTHER; note = 2'-fluoroadenosine
  modified_base 38: mod_base = OTHER; note = 2'-fluorouridine
  modified_base 41: mod_base = OTHER; note = Guanosine phosphorothiorate
  modified_base 46: mod_base = OTHER; note = 2'-fluorouridine
  modified_base 49: mod_base = OTHER; note = 2'-fluoroadenosine
  modified_base 50: mod_base = OTHER; note = 2'-fluoroguanosine
  modified_base 61: mod_base = OTHER; note = 2'-fluorocytosine phosphorothiorate
  modified_base 72: mod_base = OTHER; note = 2'-Omethylguanosine
  modified_base 73: mod_base = OTHER; note = 2'-fluorocytosine phosphorothiorate
  modified_base 74: mod_base = OTHER; note = Cytosine phosphorothiorate

SEQ ID NO: 7836 - RNA, 85 nt, synthetic construct; identical to SEQ ID NO: 3286
  source 1..85: mol_type = other RNA
  modified_base 1: mod_base = OTHER; note = 2'-Omethylcytosine
  modified_base 8: mod_base = OTHER; note = Guanosine phosphorothiorate
  modified_base 22: mod_base = OTHER; note = 2'-fluoroguanosine phosphorothiorate
  modified_base 25: mod_base = OTHER; note = 2'-Omethylguanosine phosphorothiorate
  modified_base 26: mod_base = OTHER; note = 2'-fluorouridine
  modified_base 28: mod_base = OTHER; note = 2'-fluoroguanosine
  modified_base 29: mod_base = OTHER; note = 2'-fluoroguanosine
  modified_base 33: mod_base = OTHER; note = 2'-fluorouridine phosphorothiorate
  modified_base 34: mod_base = OTHER; note = Uridine phosphorothiorate
  modified_base 42: mod_base = OTHER; note = Adenosine phosphorothiorate
  modified_base 54: mod_base = OTHER; note = 2'-Omethylcytosine
  modified_base 56: mod_base = OTHER; note = 2'-Omethylguanosine
  modified_base 58: mod_base = OTHER; note = 2'-Omethylguanosine
  modified_base 73: mod_base = OTHER; note = 2'-fluoroadenosine
  modified_base 76: mod_base = OTHER; note = 2'-fluorocytosine
  modified_base 84: mod_base = OTHER; note = 2'-Omethylcytosine

SEQ ID NO: 7837 - RNA, 76 nt, synthetic construct; identical to SEQ ID NO: 3318
  source 1..76: mol_type = other RNA
  modified_base 1: mod_base = OTHER; note = 2'-Omethylcytosine
  modified_base 49: mod_base = OTHER; note = 2'-Omethylguanosine

SEQ ID NO: 7838 - DNA, 76 bp, synthetic construct; identical to SEQ ID NO: 1924
  source 1..76: mol_type = other DNA
  modified_base 1: mod_base = OTHER; note = 2'-Omethylguanosine phosphorothiorate
  modified_base 2: mod_base = OTHER; note = 2'-Omethylguanosine phosphorothiorate
  modified_base 5: mod_base = OTHER; note = Cytosine phosphorothiorate
  modified_base 6: mod_base = OTHER; note = 2'-O-(2-Methoxyethyl) 5-methylcytosine
  modified_base 9: mod_base = OTHER; note = Guanosine phosphorothiorate
  modified_base 10: mod_base = OTHER; note = Guanosine phosphorothiorate
  modified_base 12: mod_base = OTHER; note = Guanosine phosphorothiorate
  modified_base 13: mod_base = OTHER; note = 2'-O-(2-Methoxyethyl) 5-methylcytosine
  modified_base 16: mod_base = OTHER; note = 2'-fluorouridine
  modified_base 17: mod_base = OTHER; note = 2'-O-(2-Methoxyethyl) guanosine
  modified_base 18: mod_base = OTHER; note = Guanosine phosphorothiorate
  modified_base 19: mod_base = OTHER; note = 2'-Omethyladenosine
  modified_base 24: mod_base = OTHER; note = Guanosine phosphorothiorate
  modified_base 25: mod_base = OTHER; note = 2'-fluorocytosine phosphorothiorate
  modified_base 30: mod_base = OTHER; note = Guanosine phosphorothiorate
  modified_base 31: mod_base = OTHER; note = 2'-fluoroadenosine phosphorothiorate
  modified_base 32: mod_base = OTHER; note = 2'-O-(2-Methoxyethyl) 5-methylcytosine
  modified_base 33: mod_base = OTHER; note = Uridine phosphorothiorate
  modified_base 45: mod_base = OTHER; note = 2'-fluoroguanosine
  modified_base 51: mod_base = OTHER; note = 2'-fluoroguanosine
  modified_base 53: mod_base = OTHER; note = 2'-Omethylguanosine phosphorothiorate
  modified_base 56: mod_base = OTHER; note = 2'-O-(2-Methoxyethyl) 5-methylcytosine phosphorothiorate
  modified_base 57: mod_base = OTHER; note = Guanosine phosphorothiorate
  modified_base 62: mod_base = OTHER; note = 2'-O-(2-Methoxyethyl) 5-methylcytosine phosphorothiorate
  modified_base 63: mod_base = OTHER; note = 2'-Omethylcytosine
  modified_base 65: mod_base = OTHER; note = Guanosine phosphorothiorate
  modified_base 66: mod_base = OTHER; note = 2'-O-(2-Methoxyethyl) 5-methylcytosine
  modified_base 67: mod_base = OTHER; note = 2'-fluoroguanosine phosphorothiorate
  modified_base 68: mod_base = OTHER; note = 2'-Omethylguanosine
  modified_base 69: mod_base = OTHER; note = 2'-fluoroadenosine
  modified_base 74: mod_base = OTHER; note = Cytosine phosphorothiorate
  modified_base 75: mod_base = OTHER; note = 2'-Omethylcytosine phosphorothiorate
  modified_base 76: mod_base = OTHER; note = 2'-fluoroadenosine
  misc_feature 1..33: note = RNA
  misc_feature 34: note = DNA
  misc_feature 35..46: note = RNA
  misc_feature 47: note = DNA
  misc_feature 48..58: note = RNA
  misc_feature 59: note = DNA
  misc_feature 60..76: note = RNA

SEQ ID NO: 7839 - RNA, 85 nt, synthetic construct; identical to SEQ ID NO: 3297
  source 1..85: mol_type = other RNA
  modified_base 1: mod_base = OTHER; note = 2'-Omethylguanosine
  modified_base 2: mod_base = OTHER; note = 2'-Omethylcytosine
  modified_base 3: mod_base = OTHER; note = 2'-Omethyluridine
  modified_base 4: mod_base = OTHER; note = 2'-Omethylguanosine
  modified_base 5: mod_base = OTHER; note = 2'-Omethyluridine
  modified_base 6: mod_base = OTHER; note = 2'-Omethylguanosine
  modified_base 16: mod_base = OTHER; note = 2'-Omethyluridine
  modified_base 17: mod_base = OTHER; note = 2'-Omethylguanosine
  modified_base 18: mod_base = OTHER; note = 2'-Omethylguanosine
  modified_base 20: mod_base = OTHER; note = 2'-Omethyluridine
  modified_base 22: mod_base = OTHER; note = 2'-Omethyladenosine
  modified_base 23: mod_base = OTHER; note = 2'-Omethylguanosine
  modified_base 24: mod_base = OTHER; note = 2'-Omethylguanosine
  modified_base 25: mod_base = OTHER; note = 2'-Omethylcytosine
  modified_base 33: mod_base = OTHER; note = 2'-fluorouridine
  modified_base 35: mod_base = OTHER; note = Cytosine phosphorothiorate
  modified_base 37: mod_base = OTHER; note = Adenosine phosphorothiorate
  modified_base 38: mod_base = OTHER; note = Adenosine phosphorothiorate
  modified_base 41: mod_base = OTHER; note = 2'-Omethylcytosine
  modified_base 42: mod_base = OTHER; note = 2'-Omethyladenosine
  modified_base 43: mod_base = OTHER; note = 2'-Omethyladenosine
  modified_base 44: mod_base = OTHER; note = 2'-Omethyluridine
  modified_base 56: mod_base = OTHER; note = 2'-fluoroguanosine
  modified_base 57: mod_base = OTHER; note = 2'-fluorocytosine
  modified_base 58: mod_base = OTHER; note = 2'-Omethylguanosine
  modified_base 59: mod_base = OTHER; note = 2'-Omethylcytosine
  modified_base 61: mod_base = OTHER; note = 2'-Omethylguanosine
  modified_base 63: mod_base = OTHER; note = 2'-Omethyluridine
  modified_base 64: mod_base = OTHER; note = Uridine phosphorothiorate
  modified_base 65: mod_base = OTHER; note = 2'-Omethylcytosine
  modified_base 66: mod_base = OTHER; note = 2'-fluoroguanosine
  modified_base 68: mod_base = OTHER; note = 2'-Omethyladenosine
  modified_base 70: mod_base = OTHER; note = 2'-Omethylcytosine
  modified_base 74: mod_base = OTHER; note = 2'-Omethylcytosine
  modified_base 82: mod_base = OTHER; note = 2'-Omethylguanosine

SEQ ID NO: 7840 - RNA, 76 nt, synthetic construct; identical to SEQ ID NO: 625
  source 1..76: mol_type = other RNA
  modified_base 33: mod_base = OTHER; note = Thymine

SEQ ID NO: 7841 - RNA, 76 nt, synthetic construct; identical to SEQ ID NO: 625
  source 1..76: mol_type = other RNA
  modified_base 1: mod_base = OTHER; note = 2'-fluoroguanosine
  modified_base 2: mod_base = OTHER; note = 2'-Omethylguanosine
  modified_base 4: mod_base = OTHER; note = 2'-fluorouridine
  modified_base 6: mod_base = OTHER; note = 2'-fluorocytosine
  modified_base 9: mod_base = OTHER; note = Guanosine phosphorothiorate
  modified_base 10: mod_base = OTHER; note = 2'-fluoroguanosine
  modified_base 12: mod_base = OTHER; note = 2'-Omethylguanosine
  modified_base 14: mod_base = OTHER; note = 2'-fluoroadenosine
  modified_base 15: mod_base = OTHER; note = 2'-fluoroadenosine
  modified_base 18: mod_base = OTHER; note = Guanosine phosphorothiorate
  modified_base 22: mod_base = OTHER; note = 2'-fluoroguanosine
  modified_base 23: mod_base = OTHER; note = 2'-Omethylcytosine phosphorothiorate
  modified_base 24: mod_base = OTHER; note = 2'-Omethylguanosine
  modified_base 28: mod_base = OTHER; note = 2'-fluorouridine
  modified_base 29: mod_base = OTHER; note = Guanosine phosphorothiorate
  modified_base 30: mod_base = OTHER; note = 2'-Omethylguanosine
  modified_base 31: mod_base = OTHER; note = 2'-Omethyladenosine
  modified_base 36: mod_base = OTHER; note = Adenosine phosphorothiorate
  modified_base 38: mod_base = OTHER; note = 2'-Omethyladenosine
  modified_base 39: mod_base = OTHER; note = 2'-Omethyluridine
  modified_base 43: mod_base = OTHER; note = Adenosine phosphorothiorate
  modified_base 46: mod_base = OTHER; note = 2'-fluoroguanosine phosphorothiorate
  modified_base 47: mod_base = OTHER; note = 2'-fluorouridine
  modified_base 48: mod_base = OTHER; note = 2'-Omethyluridine
  modified_base 49: mod_base = OTHER; note = 2'-fluorocytosine
  modified_base 50: mod_base = OTHER; note = 2'-fluorocytosine
  modified_base 52: mod_base = OTHER; note = 2'-fluoroguanosine phosphorothiorate
  modified_base 53: mod_base = OTHER; note = 2'-fluoroguanosine
  modified_base 56: mod_base = OTHER; note = 2'-fluorocytosine
  modified_base 59: mod_base = OTHER; note = 2'-fluoroguanosine
  modified_base 62: mod_base = OTHER; note = 2'-Omethylcytosine
  modified_base 63: mod_base = OTHER; note = 2'-fluorocytosine
  modified_base 66: mod_base = OTHER; note = 2'-fluorocytosine
  modified_base 67: mod_base = OTHER; note = 2'-Omethylguanosine
  modified_base 68: mod_base = OTHER; note = 2'-fluoroguanosine phosphorothiorate
  modified_base 70: mod_base = OTHER; note = 2'-Omethylguanosine
  modified_base 71: mod_base = OTHER; note = 2'-Omethyluridine

SEQ ID NO: 7842 - RNA, 75 nt, synthetic construct; identical to SEQ ID NO: 3311
  source 1..75: mol_type = other RNA
  modified_base 1: mod_base = OTHER; note = 2'-Omethylguanosine phosphorothiorate
  modified_base 2: mod_base = OTHER; note = 2'-Omethylguanosine
  modified_base 13: mod_base = OTHER; note = Uridine phosphorothiorate
  modified_base 20: mod_base = OTHER; note = 2'-fluoroadenosine
  modified_base 21: mod_base = OTHER; note = Adenosine phosphorothiorate
  modified_base 22: mod_base = OTHER; note = 2'-fluoroguanosine
  modified_base 23: mod_base = OTHER; note = 2'-fluorocytosine
  modified_base 29: mod_base = OTHER; note = 2'-Omethylguanosine
  modified_base 39: mod_base = OTHER; note = 2'-Omethyluridine
  modified_base 40: mod_base = OTHER; note = 2'-fluorocytosine
  modified_base 56: mod_base = OTHER; note = 2'-Omethylguanosine
  modified_base 62: mod_base = OTHER; note = 2'-fluorocytosine
  modified_base 64: mod_base = OTHER; note = 2'-fluoroguanosine
  modified_base 67: mod_base = OTHER; note = Guanosine phosphorothiorate
  modified_base 68: mod_base = OTHER; note = 2'-fluoroadenosine
  modified_base 74: mod_base = OTHER; note = Cytosine phosphorothiorate
  modified_base 75: mod_base = OTHER; note = 2'-Omethyladenosine

SEQ ID NO: 7843 - RNA, 76 nt, synthetic construct; identical to SEQ ID NO: 625
  source 1..76: mol_type = other RNA
  modified_base 4: mod_base = OTHER; note = Uridine phosphorothiorate
  modified_base 5: mod_base = OTHER; note = 2'-Omethylcytosine
  modified_base 8: mod_base = OTHER; note = Uridine phosphorothiorate
  modified_base 12: mod_base = OTHER; note = 2'-Omethylguanosine
  modified_base 13: mod_base = OTHER; note = 2'-fluorocytosine
  modified_base 14: mod_base = OTHER; note = Adenosine phosphorothiorate
  modified_base 15: mod_base = OTHER; note = 2'-fluoroadenosine phosphorothiorate
  modified_base 16: mod_base = OTHER; note = 2'-Omethyluridine phosphorothiorate
  modified_base 17: mod_base = OTHER; note = 2'-Omethylguanosine
  modified_base 18: mod_base = OTHER; note = 2'-Omethylguanosine
  modified_base 22: mod_base = OTHER; note = 2'-fluoroguanosine
  modified_base 23: mod_base = OTHER; note = 2'-Omethylcytosine
  modified_base 24: mod_base = OTHER; note = Guanosine phosphorothiorate
  modified_base 25: mod_base = OTHER; note = 2'-fluorocytosine
  modified_base 27: mod_base = OTHER; note = 2'-fluorouridine
  modified_base 28: mod_base = OTHER; note = 2'-fluorouridine
  modified_base 33: mod_base = OTHER; note = 2'-fluorouridine
  modified_base 34: mod_base = OTHER; note = Uridine phosphorothiorate
  modified_base 39: mod_base = OTHER; note = 2'-Omethyluridine
  modified_base 42: mod_base = OTHER; note = Adenosine phosphorothiorate
  modified_base 43: mod_base = OTHER; note = 2'-fluoroadenosine phosphorothiorate
  modified_base 48: mod_base = OTHER; note = 2'-Omethyluridine
  modified_base 49: mod_base = OTHER; note = 2'-Omethylcytosine phosphorothiorate
  modified_base 53: mod_base = OTHER; note = Guanosine phosphorothiorate
  modified_base 54: mod_base = OTHER; note = 2'-fluorouridine
  modified_base 57: mod_base = OTHER; note = 2'-Omethylguanosine
  modified_base 60: mod_base = OTHER; note = 2'-Omethyluridine
  modified_base 64: mod_base = OTHER; note = Guanosine phosphorothiorate
  modified_base 65: mod_base = OTHER; note = 2'-Omethylguanosine
  modified_base 66: mod_base = OTHER; note = Cytosine phosphorothiorate
  modified_base 67: mod_base = OTHER; note = Guanosine phosphorothiorate
  modified_base 68: mod_base = OTHER; note = 2'-fluoroguanosine
  modified_base 70: mod_base = OTHER; note = Guanosine phosphorothiorate
  modified_base 72: mod_base = OTHER; note = 2'-fluorocytosine
  modified_base 76: mod_base = OTHER; note = 2'-fluoroadenosine

SEQ ID NO: 7844 - RNA, 75 nt, synthetic construct; identical to SEQ ID NO: 1045
  source 1..75: mol_type = other RNA
  modified_base 1: mod_base = OTHER; note = 2'-Omethylguanosine
  modified_base 2: mod_base = OTHER; note = 2'-Omethylguanosine
  modified_base 3: mod_base = OTHER; note = 2'-Omethyluridine
  modified_base 4: mod_base = OTHER; note = 2'-Omethyluridine
  modified_base 5: mod_base = OTHER; note = 2'-Omethylcytosine
  modified_base 6: mod_base = OTHER; note = 2'-Omethylcytosine
  modified_base 14: mod_base = OTHER; note = 2'-Omethyladenosine
  modified_base 15: mod_base = OTHER; note = 2'-Omethyladenosine
  modified_base 16: mod_base = OTHER; note = 2'-Omethyluridine
  modified_base 17: mod_base = OTHER; note = 2'-Omethylguanosine
  modified_base 18: mod_base = OTHER; note = 2'-Omethylguanosine
  modified_base 20: mod_base = OTHER; note = 2'-Omethyladenosine
  modified_base 25: mod_base = OTHER; note = 2'-Omethylcytosine
  modified_base 33: mod_base = OTHER; note = 2'-fluorouridine
  modified_base 35: mod_base = OTHER; note = Uridine phosphorothiorate
  modified_base 37: mod_base = OTHER; note = Adenosine phosphorothiorate
  modified_base 38: mod_base = OTHER; note = Adenosine phosphorothiorate
  modified_base 41: mod_base = OTHER; note = 2'-Omethylcytosine
  modified_base 42: mod_base = OTHER; note = 2'-Omethyladenosine
  modified_base 43: mod_base = OTHER; note = 2'-Omethylguanosine
  modified_base 44: mod_base = OTHER; note = 2'-fluorocytosine
  modified_base 48: mod_base = OTHER; note = 2'-Omethylcytosine
  modified_base 49: mod_base = OTHER; note = 2'-Omethylcytosine
  modified_base 51: mod_base = OTHER; note = 2'-Omethyladenosine
  modified_base 53: mod_base = OTHER; note = 2'-Omethyluridine
  modified_base 54: mod_base = OTHER; note = Uridine phosphorothiorate
  modified_base 55: mod_base = OTHER; note = 2'-Omethylcytosine
  modified_base 56: mod_base = OTHER; note = 2'-fluoroguanosine
  modified_base 58: mod_base = OTHER; note = 2'-Omethylguanosine
  modified_base 60: mod_base = OTHER; note = 2'-Omethylcytosine
  modified_base 64: mod_base = OTHER; note = 2'-Omethylguanosine
  modified_base 72: mod_base = OTHER; note = 2'-Omethyluridine

SEQ ID NO: 7845 - RNA, 75 nt, synthetic construct; identical to SEQ ID NO: 3306
  source 1..75: mol_type = other RNA
  modified_base 1: mod_base = OTHER; note = 2'-Omethylguanosine
  modified_base 2: mod_base = OTHER; note = 2'-Omethyladenosine
  modified_base 3: mod_base = OTHER; note = 2'-Omethylcytosine
  modified_base 4: mod_base = OTHER; note = 2'-Omethylcytosine
  modified_base 5: mod_base = OTHER; note = 2'-Omethyluridine
  modified_base 6: mod_base = OTHER; note = 2'-Omethylcytosine
  modified_base 14: mod_base = OTHER; note = 2'-Omethyladenosine
  modified_base 15: mod_base = OTHER; note = 2'-Omethyladenosine
  modified_base 16: mod_base = OTHER; note = 2'-Omethylcytosine
  modified_base 17: mod_base = OTHER; note = 2'-Omethylguanosine
  modified_base 18: mod_base = OTHER; note = 2'-Omethylguanosine
  modified_base 24: mod_base = OTHER; note = 2'-Omethylcytosine
  modified_base 40: mod_base = OTHER; note = 2'-Omethyladenosine
  modified_base 41: mod_base = OTHER; note = 2'-Omethylguanosine
  modified_base 42: mod_base = OTHER; note = 2'-Omethyladenosine
  modified_base 43: mod_base = OTHER; note = 2'-Omethyladenosine
  modified_base 48: mod_base = OTHER; note = 2'-Omethylguanosine
  modified_base 49: mod_base = OTHER; note = 2'-Omethylcytosine
  modified_base 51: mod_base = OTHER; note = 2'-Omethyluridine
  modified_base 53: mod_base = OTHER; note = 2'-Omethyluridine
  modified_base 54: mod_base = OTHER; note = Uridine phosphorothiorate
  modified_base 55: mod_base = OTHER; note = 2'-Omethylcytosine
  modified_base 56: mod_base = OTHER; note = 2'-fluoroadenosine
  modified_base 58: mod_base = OTHER; note = 2'-Omethyladenosine
  modified_base 60: mod_base = OTHER; note = 2'-Omethylcytosine
  modified_base 61: mod_base = OTHER; note = 2'-Omethyladenosine
  modified_base 62: mod_base = OTHER; note = 2'-fluorocytosine
  modified_base 63: mod_base = OTHER; note = 2'-Omethylguanosine
  modified_base 64: mod_base = OTHER; note = 2'-Omethyluridine
  modified_base 72: mod_base = OTHER; note = 2'-Omethyladenosine

SEQ ID NO: 7846 - RNA, 86 nt, synthetic construct
  source 1..86: mol_type = other RNA
accaggatggccgagtggttaaggcgttggacttcagatccaatggacagatgtcctcgtgggttcgaaccccactcctggtacca

SEQ ID NO: 7847 - RNA, 75 nt, synthetic construct; identical to SEQ ID NO: 3299
  source 1..75: mol_type = other RNA
  modified_base 21: mod_base = OTHER; note = 2'-fluoroguanosine
  modified_base 26: mod_base = OTHER; note = 2'-Omethyluridine
  modified_base 27: mod_base = OTHER; note = 2'-fluorocytosine
  modified_base 28: mod_base = OTHER; note = Adenosine phosphorothiorate
  modified_base 33: mod_base = OTHER; note = 2'-fluorouridine
  modified_base 34: mod_base = OTHER; note = 2'-fluorouridine
  modified_base 35: mod_base = OTHER; note = 2'-fluoroadenosine
  modified_base 38: mod_base = OTHER; note = 2'-Omethyluridine phosphorothiorate
  modified_base 39: mod_base = OTHER; note = 2'-fluorocytosine phosphorothiorate
  modified_base 40: mod_base = OTHER; note = 2'-Omethyluridine phosphorothiorate
  modified_base 49: mod_base = OTHER; note = Adenosine phosphorothiorate
  modified_base 55: mod_base = OTHER; note = Cytosine phosphorothiorate
  modified_base 56: mod_base = OTHER; note = Adenosine phosphorothiorate
  modified_base 59: mod_base = OTHER; note = 2'-Omethyluridine phosphorothiorate
  modified_base 72: mod_base = OTHER; note = 2'-fluoroguanosine phosphorothiorate
  modified_base 74: mod_base = OTHER; note = 2'-Omethylcytosine

SEQ ID NO: 7848 - RNA, 76 nt, synthetic construct; identical to SEQ ID NO: 625
  source 1..76: mol_type = other RNA
  modified_base 1: mod_base = OTHER; note = 2'-Omethylguanosine phosphorothiorate
  modified_base 2: mod_base = OTHER; note = 2'-Omethylguanosine
  modified_base 3: mod_base = OTHER; note = 2'-Omethylcytosine
  modified_base 4: mod_base = OTHER; note = 2'-Omethyluridine
  modified_base 5: mod_base = OTHER; note = 2'-Omethylcytosine
  modified_base 6: mod_base = OTHER; note = 2'-Omethylcytosine
  modified_base 10: mod_base = OTHER; note = 2'-Omethylguanosine
  modified_base 11: mod_base = OTHER; note = 2'-Omethylcytosine
  modified_base 12: mod_base = OTHER; note = 2'-Omethylguanosine
  modified_base 13: mod_base = OTHER; note = 2'-Omethylcytosine
  modified_base 16: mod_base = OTHER; note = 2'-Omethyluridine
  modified_base 17: mod_base = OTHER; note = 2'-Omethylguanosine
  modified_base 18: mod_base = OTHER; note = 2'-Omethylguanosine
  modified_base 20: mod_base = OTHER; note = 2'-Omethyluridine
  modified_base 25: mod_base = OTHER; note = 2'-Omethylcytosine
  modified_base 33: mod_base = OTHER; note = 2'-fluorouridine
  modified_base 35: mod_base = OTHER; note = Cytosine phosphorothiorate
  modified_base 37: mod_base = OTHER; note = Adenosine phosphorothiorate
  modified_base 38: mod_base = OTHER; note = Adenosine phosphorothiorate
  modified_base 41: mod_base = OTHER; note = 2'-fluorocytosine
  modified_base 42: mod_base = OTHER; note = 2'-Omethyladenosine
  modified_base 43: mod_base = OTHER; note = 2'-Omethyladenosine
  modified_base 44: mod_base = OTHER; note = 2'-fluoroadenosine
  modified_base 49: mod_base = OTHER; note = 2'-Omethylcytosine
  modified_base 50: mod_base = OTHER; note = 2'-Omethylcytosine
  modified_base 52: mod_base = OTHER; note = 2'-Omethylguanosine
  modified_base 54: mod_base = OTHER; note = 2'-Omethyluridine
  modified_base 55: mod_base = OTHER; note = Uridine phosphorothiorate
  modified_base 56: mod_base = OTHER; note = 2'-Omethylcytosine
  modified_base 57: mod_base = OTHER; note = 2'-fluoroguanosine
  modified_base 59: mod_base = OTHER; note = 2'-Omethylguanosine
  modified_base 61: mod_base = OTHER; note = 2'-Omethylcytosine
  modified_base 65: mod_base = OTHER; note = 2'-Omethylguanosine
  modified_base 73: mod_base = OTHER; note = 2'-Omethylguanosine

SEQ ID NO: 7849 - RNA, 86 nt, synthetic construct; identical to SEQ ID NO: 3290
  source 1..86: mol_type = other RNA
  modified_base 81: mod_base = OTHER; note = 2'-Omethylguanosine

SEQ ID NO: 7850 - RNA, 75 nt, synthetic construct; identical to SEQ ID NO: 3306
  source 1..75: mol_type = other RNA
  modified_base 1: mod_base = OTHER; note = 2'-Omethylguanosine phosphorothiorate
  modified_base 2: mod_base = OTHER; note = 2'-Omethyladenosine phosphorothiorate
  modified_base 3: mod_base = OTHER; note = 2'-Omethylcytosine
  modified_base 4: mod_base = OTHER; note = 2'-Omethylcytosine
  modified_base 5: mod_base = OTHER; note = 2'-Omethyluridine
  modified_base 6: mod_base = OTHER; note = 2'-Omethylcytosine
  modified_base 8: mod_base = OTHER; note = Uridine phosphorothiorate
  modified_base 16: mod_base = OTHER; note = 2'-Omethylcytosine
  modified_base 17: mod_base = OTHER; note = 2'-Omethylguanosine
  modified_base 18: mod_base = OTHER; note = 2'-Omethylguanosine
  modified_base 32: mod_base = OTHER; note = 2'-fluorouridine
  modified_base 34: mod_base = OTHER; note = Uridine phosphorothiorate
  modified_base 36: mod_base = OTHER; note = Guanosine phosphorothiorate
  modified_base 37: mod_base = OTHER; note = Adenosine phosphorothiorate
  modified_base 43: mod_base = OTHER; note = 2'-Omethyladenosine
  modified_base 44: mod_base = OTHER; note = 2'-Omethylguanosine
  modified_base 45: mod_base = OTHER; note = 2'-fluoroguanosine
  modified_base 46: mod_base = OTHER; note = 2'-fluorouridine
  modified_base 47: mod_base = OTHER; note = 2'-fluorouridine
  modified_base 48: mod_base = OTHER; note = 2'-Omethylguanosine
  modified_base 49: mod_base = OTHER; note = 2'-Omethylcytosine
  modified_base 50: mod_base = OTHER; note = 2'-Omethylguanosine
  modified_base 51: mod_base = OTHER; note = 2'-Omethyluridine
  modified_base 52: mod_base = OTHER; note = 2'-Omethylguanosine
  modified_base 53: mod_base = OTHER; note = 2'-Omethyluridine
  modified_base 55: mod_base = OTHER; note = 2'-Omethylcytosine
  modified_base 58: mod_base = OTHER; note = 2'-Omethyladenosine
  modified_base 60: mod_base = OTHER; note = 2'-Omethylcytosine
  modified_base 61: mod_base = OTHER; note = 2'-Omethyladenosine
  modified_base 62: mod_base = OTHER; note = 2'-fluorocytosine
  modified_base 63: mod_base = OTHER; note = 2'-Omethylguanosine
  modified_base 64: mod_base = OTHER; note = 2'-Omethyluridine
  modified_base 65: mod_base = OTHER; note = 2'-Omethylcytosine
  modified_base 66: mod_base = OTHER; note = 2'-Omethylguanosine
  modified_base 67: mod_base = OTHER; note = 2'-Omethylguanosine
  modified_base 72: mod_base = OTHER; note = 2'-Omethyladenosine

SEQ ID NO: 7851 - RNA, 74 nt, synthetic construct; identical to SEQ ID NO: 3293
  source 1..74: mol_type = other RNA
  modified_base 1: mod_base = OTHER; note = 2'-fluoroadenosine phosphorothiorate
  modified_base 2: mod_base = OTHER; note = Cytosine phosphorothiorate
  modified_base 7: mod_base = OTHER; note = 2'-Omethyluridine phosphorothiorate
  modified_base 15: mod_base = OTHER; note = 2'-Omethylcytosine
  modified_base 25: mod_base = OTHER; note = Uridine phosphorothiorate
  modified_base 43: mod_base = OTHER; note = Guanosine phosphorothiorate
  modified_base 62: mod_base = OTHER; note = 2'-Omethylguanosine phosphorothiorate
  modified_base 73: mod_base = OTHER; note = 2'-Omethylcytosine phosphorothiorate

SEQ ID NO: 7852 - RNA, 75 nt, synthetic construct; identical to SEQ ID NO: 1045
  source 1..75: mol_type = other RNA
  modified_base 1: mod_base = OTHER; note = 2'-Omethylguanosine phosphorothiorate
  modified_base 2: mod_base = OTHER; note = 2'-Omethylguanosine phosphorothiorate
  modified_base 18: mod_base = OTHER; note = 2'-Omethylguanosine
  modified_base 19: mod_base = OTHER; note = Uridine phosphorothiorate
  modified_base 20: mod_base = OTHER; note = 2'-Omethyladenosine phosphorothiorate
  modified_base 30: mod_base = OTHER; note = 2'-fluoroguanosine phosphorothiorate
  modified_base 50: mod_base = OTHER; note = 2'-fluoroguanosine phosphorothiorate
  modified_base 55: mod_base = OTHER; note = 2'-fluorocytosine
  modified_base 56: mod_base = OTHER; note = 2'-fluoroguanosine phosphorothiorate
  modified_base 61: mod_base = OTHER; note = 2'-Omethyluridine
  modified_base 67: mod_base = OTHER; note = 2'-Omethylguanosine
  modified_base 72: mod_base = OTHER; note = 2'-Omethyluridine
  modified_base 74: mod_base = OTHER; note = 2'-Omethylcytosine phosphorothiorate

SEQ ID NO: 7853 - RNA, 75 nt, synthetic construct; identical to SEQ ID NO: 1045
  source 1..75: mol_type = other RNA
  modified_base 2: mod_base = OTHER; note = 2'-Omethylguanosine phosphorothiorate
  modified_base 3: mod_base = OTHER; note = 2'-Omethyluridine phosphorothiorate
  modified_base 5: mod_base = OTHER; note = Cytosine phosphorothiorate
  modified_base 6: mod_base = OTHER; note = 2'-Omethylcytosine
  modified_base 7: mod_base = OTHER; note = 2'-Omethyladenosine
  modified_base 14: mod_base = OTHER; note = Adenosine phosphorothiorate
  modified_base 15: mod_base = OTHER; note = 2'-Omethyladenosine
  modified_base 41: mod_base = OTHER; note = 2'-Omethylcytosine
  modified_base 52: mod_base = OTHER; note = 2'-Omethylguanosine
  modified_base 53: mod_base = OTHER; note = 2'-Omethyluridine phosphorothiorate
  modified_base 55: mod_base = OTHER; note = 2'-fluorocytosine phosphorothiorate
  modified_base 57: mod_base = OTHER; note = 2'-Omethyladenosine
  modified_base 63: mod_base = OTHER; note = 2'-Omethylguanosine
  modified_base 72: mod_base = OTHER; note = 2'-Omethyluridine
  modified_base 73: mod_base = OTHER; note = 2'-Omethylcytosine
  modified_base 74: mod_base = OTHER; note = 2'-Omethylcytosine phosphorothiorate

SEQ ID NO: 7854 - RNA, 75 nt, synthetic construct; identical to SEQ ID NO: 3299
  source 1..75: mol_type = other RNA
  modified_base 2: mod_base = OTHER; note = 2'-Omethylcytosine phosphorothiorate
  modified_base 3: mod_base = OTHER; note = 2'-fluorouridine phosphorothiorate
  modified_base 8: mod_base = OTHER; note = 2'-Omethyladenosine phosphorothiorate
  modified_base 14: mod_base = OTHER; note = 2'-fluoroguanosine phosphorothiorate
  modified_base 25: mod_base = OTHER; note = Adenosine phosphorothiorate
  modified_base 35: mod_base = OTHER; note = 2'-Omethyladenosine phosphorothiorate
  modified_base 48: mod_base = OTHER; note = 2'-fluorocytosine phosphorothiorate
  modified_base 63: mod_base = OTHER; note = 2'-fluorouridine phosphorothiorate
  modified_base 72: mod_base = OTHER; note = Guanosine phosphorothiorate
  modified_base 74: mod_base = OTHER; note = Cytosine phosphorothiorate

SEQ ID NO: 7855 - RNA, 76 nt, synthetic construct; identical to SEQ ID NO: 625
  source 1..76: mol_type = other RNA
  modified_base 1: mod_base = OTHER; note = 2'-Omethylguanosine
  modified_base 3: mod_base = OTHER; note = 2'-fluorocytosine
  modified_base 10: mod_base = OTHER; note = Guanosine phosphorothiorate
  modified_base 11: mod_base = OTHER; note = 2'-Omethylcytosine
  modified_base 12: mod_base = OTHER; note = 2'-fluoroguanosine phosphorothiorate
  modified_base 13: mod_base = OTHER; note = 2'-fluorocytosine
  modified_base 18: mod_base = OTHER; note = 2'-fluoroguanosine
  modified_base 20: mod_base = OTHER; note = 2'-Omethyluridine
  modified_base 23: mod_base = OTHER; note = Cytosine phosphorothiorate
  modified_base 24: mod_base = OTHER; note = 2'-fluoroguanosine
  modified_base 26: mod_base = OTHER; note = 2'-Omethyladenosine
  modified_base 28: mod_base = OTHER; note = 2'-fluorouridine
  modified_base 29: mod_base = OTHER; note = 2'-fluoroguanosine phosphorothiorate
  modified_base 30: mod_base = OTHER; note = 2'-Omethylguanosine
  modified_base 36: mod_base = OTHER; note = Adenosine phosphorothiorate
  modified_base 39: mod_base = OTHER; note = 2'-Omethyluridine
  modified_base 41: mod_base = OTHER; note = Cytosine phosphorothiorate
  modified_base 43: mod_base = OTHER; note = 2'-fluoroadenosine
  modified_base 45: mod_base = OTHER; note = 2'-fluoroguanosine
  modified_base 48: mod_base = OTHER; note = Uridine phosphorothiorate
  modified_base 49: mod_base = OTHER; note = Cytosine phosphorothiorate
  modified_base 50: mod_base = OTHER; note = 2'-Omethylcytosine
  modified_base 51: mod_base = OTHER; note = Guanosine phosphorothiorate
  modified_base 52: mod_base = OTHER; note = 2'-fluoroguanosine
  modified_base 54: mod_base = OTHER; note = 2'-fluorouridine
  modified_base 56: mod_base = OTHER; note = 2'-fluorocytosine
  modified_base 61: mod_base = OTHER; note = 2'-Omethylcytosine phosphorothiorate
  modified_base 62: mod_base = OTHER; note = 2'-Omethylcytosine phosphorothiorate
  modified_base 63: mod_base = OTHER; note = 2'-fluorocytosine
  modified_base 64: mod_base = OTHER; note = Guanosine phosphorothiorate
  modified_base 67: mod_base = OTHER; note = 2'-Omethylguanosine phosphorothiorate
  modified_base 68: mod_base = OTHER; note = 2'-Omethylguanosine phosphorothiorate
  modified_base 69: mod_base = OTHER; note = 2'-Omethyladenosine
  modified_base 71: mod_base = OTHER; note = 2'-fluorouridine
  modified_base 73: mod_base = OTHER; note = 2'-fluoroguanosine
  modified_base 74: mod_base = OTHER; note = 2'-Omethylcytosine
  modified_base 76: mod_base = OTHER; note = 2'-Omethyladenosine

SEQ ID NO: 7856 - RNA, 76 nt, synthetic construct; identical to SEQ ID NO: 625
  source 1..76: mol_type = other RNA
  modified_base 1: mod_base = OTHER; note = 2'-Omethylguanosine
  modified_base 10: mod_base = OTHER; note = 2'-Omethylguanosine
  modified_base 13: mod_base = OTHER; note = 2'-Omethylcytosine
  modified_base 17: mod_base = OTHER; note = Guanosine phosphorothiorate
  modified_base 18: mod_base = OTHER; note = 2'-Omethylguanosine
  modified_base 19: mod_base = OTHER; note = Adenosine phosphorothiorate
  modified_base 20: mod_base = OTHER; note = 2'-Omethyluridine
  modified_base 25: mod_base = OTHER; note = 2'-Omethylcytosine
  modified_base 29: mod_base = OTHER; note = 2'-Omethylguanosine
  modified_base 33: mod_base = OTHER; note = 2'-fluorouridine
  modified_base 35: mod_base = OTHER; note = Cytosine phosphorothiorate
  modified_base 37: mod_base = OTHER; note = Adenosine phosphorothiorate
  modified_base 38: mod_base = OTHER; note = Adenosine phosphorothiorate
  modified_base 43: mod_base = OTHER; note = 2'-Omethyladenosine
  modified_base 44: mod_base = OTHER; note = 2'-fluoroadenosine
  modified_base 46: mod_base = OTHER; note = 2'-fluoroguanosine phosphorothiorate
  modified_base 50: mod_base = OTHER; note = 2'-Omethylcytosine
  modified_base 52: mod_base = OTHER; note = 2'-Omethylguanosine
  modified_base 54: mod_base = OTHER; note = Uridine phosphorothiorate
  modified_base 55: mod_base = OTHER; note = Uridine phosphorothiorate
  modified_base 56: mod_base = OTHER; note = 2'-Omethylcytosine
  modified_base 57: mod_base = OTHER; note = Guanosine phosphorothiorate
  modified_base 62: mod_base = OTHER; note = 2'-Omethylcytosine
  modified_base 63: mod_base = OTHER; note = 2'-fluorocytosine
  modified_base 65: mod_base = OTHER; note = 2'-Omethylguanosine
  modified_base 71: mod_base = OTHER; note = 2'-Omethyluridine
  modified_base 73: mod_base = OTHER; note = 2'-Omethylguanosine

SEQ ID NO: 7857 - RNA, 76 nt, synthetic construct; identical to SEQ ID NO: 625
  source 1..76: mol_type = other RNA
  modified_base 1: mod_base = OTHER; note = 2'-Omethylguanosine phosphorothiorate
  modified_base 2: mod_base = OTHER; note = 2'-Omethylguanosine phosphorothiorate
  modified_base 3: mod_base = OTHER; note = 2'-Omethylcytosine phosphorothiorate
  modified_base 4: mod_base = OTHER; note = 2'-Omethyluridine phosphorothiorate
  modified_base 5: mod_base = OTHER; note = 2'-Omethylcytosine phosphorothiorate
  modified_base 6: mod_base = OTHER; note = 2'-Omethylcytosine phosphorothiorate
  modified_base 40: mod_base = OTHER; note = 2'-fluorouridine
  modified_base 41: mod_base = OTHER; note = 2'-fluorocytosine
  modified_base 42: mod_base = OTHER; note = 2'-fluoroadenosine
  modified_base 43: mod_base = OTHER; note = 2'-fluoroadenosine

SEQ ID NO: 7858 - RNA, 75 nt, synthetic construct; identical to SEQ ID NO: 1045
  source 1..75: mol_type = other RNA
  modified_base 1: mod_base = OTHER; note = 2'-Omethylguanosine phosphorothiorate
  modified_base 16: mod_base = OTHER; note = Uridine phosphorothiorate
  modified_base 17: mod_base = OTHER; note = Guanosine phosphorothiorate
  modified_base 25: mod_base = OTHER; note = Cytosine phosphorothiorate
  modified_base 31: mod_base = OTHER; note = 2'-Omethyladenosine
  modified_base 38: mod_base = OTHER; note = Adenosine phosphorothiorate
  modified_base 40: mod_base = OTHER; note = 2'-fluorocytosine
  modified_base 42: mod_base = OTHER; note = 2'-fluoroadenosine
  modified_base 49: mod_base = OTHER; note = Cytosine phosphorothiorate
  modified_base 55: mod_base = OTHER; note = Cytosine phosphorothiorate
  modified_base 62: mod_base = OTHER; note = 2'-fluorocytosine
  modified_base 67: mod_base = OTHER; note = 2'-fluoroguanosine
  modified_base 74: mod_base = OTHER; note = Cytosine phosphorothiorate

SEQ ID NO: 7859 - RNA, 75 nt, synthetic construct; identical to SEQ ID NO: 1045
  source 1..75: mol_type = other RNA
  modified_base 1: mod_base = OTHER; note = 2'-Omethylguanosine
  modified_base 2: mod_base = OTHER; note = 2'-Omethylguanosine
  modified_base 3: mod_base = OTHER; note = 2'-Omethyluridine
  modified_base 4: mod_base = OTHER; note = 2'-Omethyluridine
  modified_base 5: mod_base = OTHER; note = 2'-Omethylcytosine
  modified_base 6: mod_base = OTHER; note = 2'-Omethylcytosine
  modified_base 14: mod_base = OTHER; note = 2'-Omethyladenosine
  modified_base 15: mod_base = OTHER; note = 2'-Omethyladenosine
  modified_base 16: mod_base = OTHER; note = 2'-Omethyluridine
  modified_base 17: mod_base = OTHER; note = 2'-Omethylguanosine
  modified_base 18: mod_base = OTHER; note = 2'-Omethylguanosine
  modified_base 20: mod_base = OTHER; note = 2'-Omethyladenosine
  modified_base 25: mod_base = OTHER; note = 2'-Omethylcytosine
  modified_base 41: mod_base = OTHER; note = 2'-Omethylcytosine
  modified_base 42: mod_base = OTHER; note = 2'-Omethyladenosine
  modified_base 43: mod_base = OTHER; note = 2'-Omethylguanosine
  modified_base 44: mod_base = OTHER; note = 2'-Omethylcytosine
  modified_base 48: mod_base = OTHER; note = 2'-Omethylcytosine
  modified_base 49: mod_base = OTHER; note = 2'-Omethylcytosine
  modified_base 51: mod_base = OTHER; note = 2'-Omethyladenosine
  modified_base 53: mod_base = OTHER; note = 2'-Omethyluridine
  modified_base 54: mod_base = OTHER; note = Uridine phosphorothiorate
  modified_base 55: mod_base = OTHER; note = 2'-Omethylcytosine
  modified_base 56: mod_base = OTHER; note = 2'-fluoroguanosine
  modified_base 58: mod_base = OTHER; note = 2'-Omethylguanosine
  modified_base 60: mod_base = OTHER; note = 2'-Omethylcytosine
  modified_base 61: mod_base = OTHER; note = 2'-Omethyluridine
  modified_base 62: mod_base = OTHER; note = 2'-fluorocytosine
  modified_base 63: mod_base = OTHER; note = 2'-Omethylguanosine
  modified_base 64: mod_base = OTHER; note = 2'-Omethylguanosine
  modified_base 72: mod_base = OTHER; note = 2'-Omethyluridine

SEQ ID NO: 7860 - RNA, 76 nt, synthetic construct
  source 1..76: mol_type = other RNA
ggctccgtggcgcaatggatagcgcatatgacttcaattcataaggttccgggttcgagtcccggcggagtcgcca

SEQ ID NO: 7861 - RNA, 76 nt, synthetic construct; identical to SEQ ID NO: 625
  source 1..76: mol_type = other RNA
  modified_base 3: mod_base = OTHER; note = 2'-Omethylcytosine
  modified_base 6: mod_base = OTHER; note = Cytosine phosphorothiorate
  modified_base 7: mod_base = OTHER; note = Guanosine phosphorothiorate
  modified_base 10: mod_base = OTHER; note = Guanosine phosphorothiorate
  modified_base 11: mod_base = OTHER; note = 2'-Omethylcytosine
  modified_base 13: mod_base = OTHER; note = 2'-fluorocytosine
  modified_base 14: mod_base = OTHER; note = Adenosine phosphorothiorate
  modified_base 16: mod_base = OTHER; note = 2'-fluorouridine phosphorothiorate
  modified_base 20: mod_base = OTHER; note = 2'-Omethyluridine
  modified_base 23: mod_base = OTHER; note = 2'-Omethylcytosine
  modified_base 25: mod_base = OTHER; note = 2'-Omethylcytosine
  modified_base 26: mod_base = OTHER; note = Adenosine phosphorothiorate
  modified_base 27: mod_base = OTHER; note = 2'-fluorouridine
  modified_base 28: mod_base = OTHER; note = Uridine phosphorothiorate
  modified_base 29: mod_base = OTHER; note = 2'-Omethylguanosine
  modified_base 30: mod_base = OTHER; note = 2'-fluoroguanosine
  modified_base 32: mod_base = OTHER; note = 2'-fluorocytosine
  modified_base 41: mod_base = OTHER; note = 2'-Omethylcytosine
  modified_base 42: mod_base = OTHER; note = 2'-fluoroadenosine
  modified_base 45: mod_base = OTHER; note = 2'-Omethylguanosine
  modified_base 46: mod_base = OTHER; note = 2'-fluoroguanosine
  modified_base 49: mod_base = OTHER; note = Cytosine phosphorothiorate
  modified_base 50: mod_base = OTHER; note = 2'-Omethylcytosine phosphorothiorate
  modified_base 53: mod_base = OTHER; note = Guanosine phosphorothiorate
  modified_base 55: mod_base = OTHER; note = Uridine phosphorothiorate
  modified_base 56: mod_base = OTHER; note = 2'-fluorocytosine
  modified_base 59: mod_base = OTHER; note = 2'-fluoroguanosine
  modified_base 61: mod_base = OTHER; note = Cytosine phosphorothiorate
  modified_base 62: mod_base = OTHER; note = 2'-fluorocytosine phosphorothiorate
  modified_base 63: mod_base = OTHER; note = 2'-Omethylcytosine phosphorothiorate
  modified_base 64: mod_base = OTHER; note = 2'-Omethylguanosine
  modified_base 67: mod_base = OTHER; note = Guanosine phosphorothiorate
  modified_base 68: mod_base = OTHER; note = Guanosine phosphorothiorate
  modified_base 69: mod_base = OTHER; note = 2'-Omethyladenosine
  modified_base 70: mod_base = OTHER; note = Guanosine phosphorothiorate
  modified_base 71: mod_base = OTHER; note = 2'-Omethyluridine
  modified_base 74: mod_base = OTHER; note = 2'-fluorocytosine
  modified_base 76: mod_base = OTHER; note = 2'-fluoroadenosine

SEQ ID NO: 7862 - RNA, 76 nt, synthetic construct; identical to SEQ ID NO: 3289
  source 1..76: mol_type = other RNA
  modified_base 13: mod_base = OTHER; note = 2'-Omethylcytosine
  modified_base 73: mod_base = OTHER; note = 2'-Omethylguanosine

SEQ ID NO: 7863 - RNA, 86 nt, synthetic construct; identical to SEQ ID NO: 3290
  source 1..86: mol_type = other RNA
  modified_base 1: mod_base = OTHER; note = 2'-Omethyladenosine
  modified_base 28: mod_base = OTHER; note = 2'-Omethyluridine
  modified_base 29: mod_base = OTHER; note = 2'-Omethylguanosine
  modified_base 30: mod_base = OTHER; note = 2'-Omethylguanosine
  modified_base 40: mod_base = OTHER; note = 2'-fluorocytosine
  modified_base 41: mod_base = OTHER; note = 2'-fluorocytosine
  modified_base 42: mod_base = OTHER; note = 2'-Omethyladenosine phosphorothiorate
  modified_base 43: mod_base = OTHER; note = 2'-Omethyladenosine
  modified_base 83: mod_base = OTHER; note = 2'-Omethyladenosine

SEQ ID NO: 7864 - RNA, 86 nt, synthetic construct; identical to SEQ ID NO: 3290
  source 1..86: mol_type = other RNA
  modified_base 1: mod_base = OTHER; note = 2'-Omethyladenosine phosphorothiorate
  modified_base 2: mod_base = OTHER; note = 2'-Omethylcytosine
  modified_base 3: mod_base = OTHER; note = 2'-Omethylcytosine
  modified_base 4: mod_base = OTHER; note = 2'-Omethyladenosine
  modified_base 5: mod_base = OTHER; note = 2'-Omethylguanosine
  modified_base 6: mod_base = OTHER; note = 2'-Omethylguanosine
  modified_base 16: mod_base = OTHER; note = 2'-Omethyluridine
  modified_base 17: mod_base = OTHER; note = 2'-Omethylguanosine
  modified_base 18: mod_base = OTHER; note = 2'-Omethylguanosine
  modified_base 33: mod_base = OTHER; note = 2'-fluorouridine
  modified_base 35: mod_base = OTHER; note = Cytosine phosphorothiorate
  modified_base 37: mod_base = OTHER; note = Guanosine phosphorothiorate
  modified_base 38: mod_base = OTHER; note = Adenosine phosphorothiorate
  modified_base 44: mod_base = OTHER; note = 2'-Omethyluridine
  modified_base 57: mod_base = OTHER; note = 2'-fluoroguanosine
  modified_base 58: mod_base = OTHER; note = 2'-fluorocytosine
  modified_base 59: mod_base = OTHER; note = 2'-Omethylguanosine
  modified_base 60: mod_base = OTHER; note = 2'-Omethyluridine
  modified_base 61: mod_base = OTHER; note = 2'-Omethylguanosine
  modified_base 62: mod_base = OTHER; note = 2'-Omethylguanosine
  modified_base 63: mod_base = OTHER; note = 2'-Omethylguanosine
  modified_base 64: mod_base = OTHER; note = 2'-Omethyluridine
  modified_base 66: mod_base = OTHER; note = 2'-Omethylcytosine
  modified_base 69: mod_base = OTHER; note = 2'-Omethyladenosine
  modified_base 71: mod_base = OTHER; note = 2'-Omethylcytosine
  modified_base 72: mod_base = OTHER; note = 2'-Omethylcytosine
  modified_base 73: mod_base = OTHER; note = 2'-fluorocytosine
  modified_base 74: mod_base = OTHER; note = 2'-Omethyladenosine
  modified_base 75: mod_base = OTHER; note = 2'-Omethylcytosine
  modified_base 76: mod_base = OTHER; note = 2'-Omethyluridine
  modified_base 77: mod_base = OTHER; note = 2'-Omethylcytosine
  modified_base 78: mod_base = OTHER; note = 2'-Omethylcytosine
  modified_base 83: mod_base = OTHER; note = 2'-Omethyladenosine

SEQ ID NO: 7865 - RNA, 75 nt, synthetic construct; identical to SEQ ID NO: 1045
  source 1..75: mol_type = other RNA
  modified_base 2: mod_base = OTHER; note = 2'-Omethylguanosine phosphorothiorate
  modified_base 3: mod_base = OTHER; note = 2'-Omethyluridine phosphorothiorate
  modified_base 6: mod_base = OTHER; note = 2'-Omethylcytosine
  modified_base 10: mod_base = OTHER; note = Guanosine phosphorothiorate
  modified_base 16: mod_base = OTHER; note = 2'-Omethyluridine phosphorothiorate
  modified_base 18: mod_base = OTHER; note = 2'-Omethylguanosine
  modified_base 26: mod_base = OTHER; note = Uridine phosphorothiorate
  modified_base 27: mod_base = OTHER; note = 2'-fluorocytosine phosphorothiorate
  modified_base 30: mod_base = OTHER; note = 2'-Omethylguanosine
  modified_base 45: mod_base = OTHER; note = 2'-Omethylguanosine
  modified_base 51: mod_base = OTHER; note = Adenosine phosphorothiorate
  modified_base 55: mod_base = OTHER; note = 2'-Omethylcytosine
  modified_base 65: mod_base = OTHER; note = 2'-Omethyluridine
  modified_base 66: mod_base = OTHER; note = 2'-Omethylguanosine
  modified_base 72: mod_base = OTHER; note = 2'-Omethyluridine
  modified_base 74: mod_base = OTHER; note = 2'-Omethylcytosine phosphorothiorate

SEQ ID NO: 7866 - RNA, 76 nt, synthetic construct
  source 1..76: mol_type = other RNA
gtctccgtggcgcaatggatagcgcataggacttcaaattctaaggttccgggttcgagtcccggcggagacgcca

SEQ ID NO: 7867 - RNA, 86 nt, synthetic construct; identical to SEQ ID NO: 3290
  source 1..86: mol_type = other RNA
  modified_base 1: mod_base = OTHER; note = 2'-Omethyladenosine
  modified_base 13: mod_base = OTHER; note = 2'-Omethylguanosine
  modified_base 14: mod_base = OTHER; note = 2'-Omethyladenosine
  modified_base 15: mod_base = OTHER; note = 2'-Omethylguanosine
  modified_base 16: mod_base = OTHER; note = 2'-Omethyluridine
  modified_base 17: mod_base = OTHER; note = 2'-Omethylguanosine
  modified_base 18: mod_base = OTHER; note = 2'-Omethylguanosine
  modified_base 19: mod_base = OTHER; note = Uridine phosphorothiorate
  modified_base 20: mod_base = OTHER; note = 2'-Omethyluridine
  modified_base 21: mod_base = OTHER; note = Adenosine phosphorothiorate
  modified_base 22: mod_base = OTHER; note = 2'-Omethyladenosine
  modified_base 23: mod_base = OTHER; note = 2'-Omethylguanosine
  modified_base 24: mod_base = OTHER; note = 2'-Omethylguanosine
  modified_base 25: mod_base = OTHER; note = 2'-Omethylcytosine
  modified_base 33: mod_base = OTHER; note = 2'-fluorouridine
  modified_base 34: mod_base = OTHER; note = 2'-Omethyluridine
  modified_base 35: mod_base = OTHER; note = Cytosine phosphorothiorate
  modified_base 37: mod_base = OTHER; note = Guanosine phosphorothiorate
  modified_base 38: mod_base = OTHER; note = Adenosine phosphorothiorate
  modified_base 59: mod_base = OTHER; note = 2'-Omethylguanosine
  modified_base 60: mod_base = OTHER; note = 2'-Omethyluridine
  modified_base 62: mod_base = OTHER; note = 2'-Omethylguanosine
  modified_base 64: mod_base = OTHER; note = Uridine phosphorothiorate
  modified_base 65: mod_base = OTHER; note = Uridine phosphorothiorate
  modified_base 71: mod_base = OTHER; note = 2'-Omethylcytosine
  modified_base 75: mod_base = OTHER; note = 2'-Omethylcytosine
  modified_base 83: mod_base = OTHER; note = 2'-Omethyladenosine

SEQ ID NO: 7868 - RNA, 75 nt, synthetic construct; identical to SEQ ID NO: 3306
  source 1..75: mol_type = other RNA
  modified_base 64: mod_base = OTHER; note = 2'-Omethyluridine
  modified_base 72: mod_base = OTHER; note = 2'-Omethyladenosine

SEQ ID NO: 7869 - RNA, 76 nt, synthetic construct; identical to SEQ ID NO: 3289
  source 1..76: mol_type = other RNA
  modified_base 1: mod_base = OTHER; note = 2'-Omethylguanosine
  modified_base 44: mod_base = OTHER; note = 2'-Omethylguanosine
  modified_base 45: mod_base = OTHER; note = 2'-Omethylguanosine
  modified_base 46: mod_base = OTHER; note = 2'-fluoroguanosine
  modified_base 47: mod_base = OTHER; note = 2'-fluorouridine
  modified_base 48: mod_base = OTHER; note = 2'-fluorocytosine
  modified_base 49: mod_base = OTHER; note = 2'-Omethylcytosine
  modified_base 50: mod_base = OTHER; note = 2'-Omethyladenosine
  modified_base 51: mod_base = OTHER; note = 2'-Omethylguanosine
  modified_base 52: mod_base = OTHER; note = 2'-Omethylguanosine
  modified_base 53: mod_base = OTHER; note = 2'-Omethylguanosine
  modified_base 61: mod_base = OTHER; note = 2'-Omethylcytosine
  modified_base 62: mod_base = OTHER; note = 2'-Omethylcytosine
  modified_base 63: mod_base = OTHER; note = 2'-fluorocytosine
  modified_base 64: mod_base = OTHER; note = 2'-Omethyluridine
  modified_base 65: mod_base = OTHER; note = 2'-Omethylguanosine
  modified_base 73: mod_base = OTHER; note = 2'-Omethylguanosine

SEQ ID NO: 7870 - DNA, 76 bp, synthetic construct; identical to SEQ ID NO: 1924
  source 1..76: mol_type = other DNA
  modified_base 1: mod_base = OTHER; note = 2'-Omethylguanosine phosphorothiorate
  modified_base 2: mod_base = OTHER; note = 2'-Omethylguanosine
  modified_base 3: mod_base = OTHER; note = 2'-Omethylcytosine phosphorothiorate
  modified_base 4: mod_base = OTHER; note = 2'-O-(2-Methoxyethyl) thymine
  modified_base 5: mod_base = OTHER; note = Cytosine phosphorothiorate
  modified_base 6: mod_base = OTHER; note = 2'-fluorocytosine
  modified_base 12: mod_base = OTHER; note = Guanosine phosphorothiorate
  modified_base 14: mod_base = OTHER; note = 2'-Omethyladenosine
  modified_base 15: mod_base = OTHER; note = Adenosine phosphorothiorate
  modified_base 17: mod_base = OTHER; note = Guanosine phosphorothiorate
  modified_base 18: mod_base = OTHER; note = 2'-O-(2-Methoxyethyl) guanosine
  modified_base 19: mod_base = OTHER; note = Adenosine phosphorothiorate
  modified_base 26: mod_base = OTHER; note = deoxyadenosine phosphorothiorate
  modified_base 29: mod_base = OTHER; note = Guanosine phosphorothiorate
  modified_base 31: mod_base = OTHER; note = Adenosine phosphorothiorate
  modified_base 32: mod_base = OTHER; note = 2'-fluorocytosine phosphorothiorate
  modified_base 36: mod_base = OTHER; note = Adenosine phosphorothiorate
  modified_base 38: mod_base = OTHER; note = Adenosine phosphorothiorate
  modified_base 39: mod_base = OTHER; note = 2'-O-(2-Methoxyethyl) thymine
  modified_base 40: mod_base = OTHER; note = 2'-O-(2-Methoxyethyl) thymine phosphorothiorate
  modified_base 44: mod_base = OTHER; note = 2'-fluoroadenosine
  modified_base 50: mod_base = OTHER; note = Cytosine phosphorothiorate
  modified_base 51: mod_base = OTHER; note = 2'-O-(2-Methoxyethyl) guanosine
  modified_base 52: mod_base = OTHER; note = Guanosine phosphorothiorate
  modified_base 64: mod_base = OTHER; note = Guanosine phosphorothiorate
  modified_base 65: mod_base = OTHER; note = 2'-fluoroguanosine phosphorothiorate
  modified_base 66: mod_base = OTHER; note = Cytosine phosphorothiorate
  modified_base 67: mod_base = OTHER; note = 2'-fluoroguanosine
  modified_base 70: mod_base = OTHER; note = Guanosine phosphorothiorate
  modified_base 71: mod_base = OTHER; note = 2'-Omethyluridine phosphorothiorate
  modified_base 72: mod_base = OTHER; note = 2'-Omethylcytosine phosphorothiorate
  modified_base 73: mod_base = OTHER; note = 2'-Omethylguanosine
  modified_base 75: mod_base = OTHER; note = 2'-Omethylcytosine phosphorothiorate
  modified_base 76: mod_base = OTHER; note = 2'-O-(2-Methoxyethyl) adenosine
  misc_feature 1..20: note = RNA
  misc_feature 21: note = DNA
  misc_feature 22..25: note = RNA
  misc_feature 26: note = DNA
  misc_feature 27..46: note = RNA
  misc_feature 47: note = DNA
  misc_feature 48..52: note = RNA
  misc_feature 53: note = DNA
  misc_feature 54..76: note = RNA

SEQ ID NO: 7871 - RNA, 85 nt, synthetic construct; identical to SEQ ID NO: 3297
  source 1..85: mol_type = other RNA
  modified_base 1: mod_base = OTHER; note = 2'-Omethylguanosine
  modified_base 16: mod_base = OTHER; note = 2'-Omethyluridine
  modified_base 17: mod_base = OTHER; note = 2'-Omethylguanosine
  modified_base 18: mod_base = OTHER; note = 2'-Omethylguanosine
  modified_base 63: mod_base = OTHER; note = 2'-Omethyluridine
  modified_base 64: mod_base = OTHER; note = Uridine phosphorothiorate
  modified_base 65: mod_base = OTHER; note = 2'-Omethylcytosine
  modified_base 68: mod_base = OTHER; note = 2'-Omethyladenosine
  modified_base 82: mod_base = OTHER; note = 2'-Omethylguanosine

SEQ ID NO: 7872 - RNA, 76 nt, synthetic construct; identical to SEQ ID NO: 625
  source 1..76: mol_type = other RNA
  modified_base 1: mod_base = OTHER; note = 2'-Omethylguanosine
  modified_base 2: mod_base = OTHER; note = 2'-Omethylguanosine
  modified_base 3: mod_base = OTHER; note = 2'-Omethylcytosine
  modified_base 4: mod_base = OTHER; note = 2'-Omethyluridine
  modified_base 5: mod_base = OTHER; note = 2'-Omethylcytosine
  modified_base 6: mod_base = OTHER; note = 2'-Omethylcytosine
  modified_base 10: mod_base = OTHER; note = 2'-Omethylguanosine
  modified_base 11: mod_base = OTHER; note = 2'-Omethylcytosine
  modified_base 12: mod_base = OTHER; note = 2'-Omethylguanosine phosphorothiorate
  modified_base 14: mod_base = OTHER; note = 2'-Omethyladenosine
  modified_base 15: mod_base = OTHER; note = 2'-Omethyladenosine
  modified_base 16: mod_base = OTHER; note = 2'-Omethyluridine
  modified_base 17: mod_base = OTHER; note = 2'-Omethylguanosine
  modified_base 18: mod_base = OTHER; note = 2'-Omethylguanosine
  modified_base 19: mod_base = OTHER; note = Adenosine phosphorothiorate
  modified_base 20: mod_base = OTHER; note = Uridine phosphorothiorate
  modified_base 21: mod_base = OTHER; note = 2'-fluoroadenosine phosphorothiorate
  modified_base 22: mod_base = OTHER; note = 2'-Omethylguanosine
  modified_base 23: mod_base = OTHER; note = 2'-Omethylcytosine
  modified_base 24: mod_base = OTHER; note = 2'-Omethylguanosine
  modified_base 25: mod_base = OTHER; note = 2'-Omethylcytosine
  modified_base 26: mod_base = OTHER; note = Adenosine phosphorothiorate
  modified_base 28: mod_base = OTHER; note = 2'-Omethyluridine phosphorothiorate
  modified_base 29: mod_base = OTHER; note = 2'-fluoroguanosine phosphorothiorate
  modified_base 30: mod_base = OTHER; note = 2'-fluoroguanosine phosphorothiorate
  modified_base 31: mod_base = OTHER; note = 2'-Omethyladenosine phosphorothiorate
  modified_base 32: mod_base = OTHER; note = 2'-Omethylcytosine phosphorothiorate
  modified_base 33: mod_base = OTHER; note = 2'-fluorouridine
  modified_base 35: mod_base = OTHER; note = Cytosine phosphorothiorate
  modified_base 36: mod_base = OTHER; note = 2'-Omethyladenosine phosphorothiorate
  modified_base 37: mod_base = OTHER; note = Adenosine phosphorothiorate
  modified_base 38: mod_base = OTHER; note = Adenosine phosphorothiorate
  modified_base 39: mod_base = OTHER; note = 2'-Omethyluridine phosphorothiorate
  modified_base 40: mod_base = OTHER; note = 2'-Omethyluridine
  modified_base 41: mod_base = OTHER; note = 2'-fluorocytosine
  modified_base 42: mod_base = OTHER; note = Adenosine phosphorothiorate
  modified_base 43: mod_base = OTHER; note = 2'-Omethyladenosine
  modified_base 44: mod_base = OTHER; note = 2'-Omethyladenosine
  modified_base 48: mod_base = OTHER; note = 2'-Omethyluridine phosphorothiorate
  modified_base 49: mod_base = OTHER; note = 2'-fluorocytosine phosphorothiorate
  modified_base 50: mod_base = OTHER; note = 2'-Omethylcytosine
  modified_base 51: mod_base = OTHER; note = 2'-Omethylguanosine
  modified_base 52: mod_base = OTHER; note = 2'-Omethylguanosine
  modified_base 53: mod_base = OTHER; note = 2'-Omethylguanosine phosphorothiorate
  modified_base 54: mod_base = OTHER; note = 2'-fluorouridine
  modified_base 55: mod_base = OTHER; note = Uridine phosphorothiorate
  modified_base 56: mod_base = OTHER; note = Cytosine phosphorothiorate
  modified_base 57: mod_base = OTHER; note = 2'-Omethylguanosine
  modified_base 59: mod_base = OTHER; note = 2'-Omethylguanosine
  modified_base 61: mod_base = OTHER; note = 2'-Omethylcytosine
  modified_base 62: mod_base = OTHER; note = 2'-Omethylcytosine
  modified_base 63: mod_base = OTHER; note = 2'-fluorocytosine
  modified_base 64: mod_base = OTHER; note = 2'-Omethylguanosine phosphorothiorate
  modified_base 65: mod_base = OTHER; note = 2'-Omethylguanosine
  modified_base 66: mod_base = OTHER; note = 2'-fluorocytosine phosphorothiorate
  modified_base 67: mod_base = OTHER; note = Guanosine phosphorothiorate
  modified_base 68: mod_base = OTHER; note = 2'-fluoroguanosine
  modified_base 69: mod_base = OTHER; note = 2'-fluoroadenosine
  modified_base 70: mod_base = OTHER; note = 2'-fluoroguanosine
  modified_base 71: mod_base = OTHER; note = 2'-Omethyluridine phosphorothiorate
  modified_base 72: mod_base = OTHER; note = 2'-fluorocytosine phosphorothiorate
  modified_base 73: mod_base = OTHER; note = 2'-Omethylguanosine
  modified_base 74: mod_base = OTHER; note = 2'-fluorocytosine phosphorothiorate
  modified_base 75: mod_base = OTHER; note = 2'-Omethylcytosine
  modified_base 76: mod_base = OTHER; note = 2'-fluoroadenosine

SEQ ID NO: 7873 - RNA, 76 nt, synthetic construct; identical to SEQ ID NO: 3675
  source 1..76: mol_type = other RNA

SEQ ID NO: 7874 - RNA, 76 nt, synthetic construct; identical to SEQ ID NO: 625
  source 1..76: mol_type = other RNA
  modified_base 1: mod_base = OTHER; note = 2'-Omethylguanosine
  modified_base 40: mod_base = OTHER; note = 2'-fluorouridine
  modified_base 41: mod_base = OTHER; note = 2'-O-(2-Methoxyethyl) 5-methylcytosine
  modified_base 42: mod_base = OTHER; note = 2'-Omethyladenosine
  modified_base 43: mod_base = OTHER; note = 2'-Omethyladenosine
  modified_base 73: mod_base = OTHER; note = 2'-Omethylguanosine

SEQ ID NO: 7875 - RNA, 76 nt, synthetic construct; identical to SEQ ID NO: 625
  source 1..76: mol_type = other RNA
  modified_base 2: mod_base = OTHER; note = Guanosine phosphorothiorate
  modified_base 3: mod_base = OTHER; note = 2'-fluorocytosine phosphorothiorate
  modified_base 5: mod_base = OTHER; note = 2'-Omethylcytosine
  modified_base 6: mod_base = OTHER; note = 2'-Omethylcytosine
  modified_base 8: mod_base = OTHER; note = Uridine phosphorothiorate
  modified_base 11: mod_base = OTHER; note = Cytosine phosphorothiorate
  modified_base 12: mod_base = OTHER; note = 2'-Omethylguanosine
  modified_base 13: mod_base = OTHER; note = 2'-Omethylcytosine
  modified_base 15: mod_base = OTHER; note = 2'-Omethyladenosine
  modified_base 18: mod_base = OTHER; note = 2'-Omethylguanosine
  modified_base 20: mod_base = OTHER; note = Uridine phosphorothiorate
  modified_base 25: mod_base = OTHER; note = Cytosine phosphorothiorate
  modified_base 29: mod_base = OTHER; note = 2'-Omethylguanosine
  modified_base 31: mod_base = OTHER; note = 2'-fluoroadenosine
  modified_base 42: mod_base = OTHER; note = Adenosine phosphorothiorate
  modified_base 43: mod_base = OTHER; note = 2'-fluoroadenosine phosphorothiorate
  modified_base 44: mod_base = OTHER; note = Adenosine phosphorothiorate
  modified_base 45: mod_base = OTHER; note = Guanosine phosphorothiorate
  modified_base 49: mod_base = OTHER; note = Cytosine phosphorothiorate
  modified_base 51: mod_base = OTHER; note = Guanosine phosphorothiorate
  modified_base 52: mod_base = OTHER; note = 2'-Omethylguanosine
  modified_base 53: mod_base = OTHER; note = Guanosine phosphorothiorate
  modified_base 54: mod_base = OTHER; note = 2'-fluorouridine
  modified_base 56: mod_base = OTHER; note = 2'-Omethylcytosine phosphorothiorate
  modified_base 57: mod_base = OTHER; note = Guanosine phosphorothiorate
  modified_base 60: mod_base = OTHER; note = Uridine phosphorothiorate
  modified_base 61: mod_base = OTHER; note = 2'-Omethylcytosine
  modified_base 66: mod_base = OTHER; note = 2'-Omethylcytosine
  modified_base 69: mod_base = OTHER; note = 2'-Omethyladenosine
  modified_base 71: mod_base = OTHER; note = 2'-fluorouridine
  modified_base 74: mod_base = OTHER; note = 2'-Omethylcytosine

SEQ ID NO: 7876 - RNA, 74 nt, synthetic construct; identical to SEQ ID NO: 3293
  source 1..74: mol_type = other RNA
  modified_base 1: mod_base = OTHER; note = 2'-fluoroadenosine phosphorothiorate
  modified_base 2: mod_base = OTHER; note = 2'-fluorocytosine phosphorothiorate
  modified_base 12: mod_base = OTHER; note = 2'-fluorocytosine
  modified_base 15: mod_base = OTHER; note = 2'-fluorocytosine
  modified_base 29: mod_base = OTHER; note = Adenosine phosphorothiorate
  modified_base 35: mod_base = OTHER; note = 2'-Omethylguanosine phosphorothiorate

SEQ ID NO: 7877 - RNA, 75 nt, synthetic construct; identical to SEQ ID NO: 1045
  source 1..75: mol_type = other RNA
  modified_base 1: mod_base = OTHER; note = 2'-Omethylguanosine phosphorothiorate
  modified_base 2: mod_base = OTHER; note = 2'-Omethylguanosine
  modified_base 3: mod_base = OTHER; note = 2'-Omethyluridine
  modified_base 4: mod_base = OTHER; note = 2'-Omethyluridine
  modified_base 5: mod_base = OTHER; note = 2'-Omethylcytosine
  modified_base 6: mod_base = OTHER; note = 2'-Omethylcytosine
  modified_base 53: mod_base = OTHER; note = 2'-Omethyluridine phosphorothiorate
  modified_base 54: mod_base = OTHER; note = Uridine phosphorothiorate
  modified_base 55: mod_base = OTHER; note = 2'-Omethylcytosine
  modified_base 56: mod_base = OTHER; note = 2'-fluoroguanosine
  modified_base 57: mod_base = OTHER; note = Adenosine phosphorothiorate
  modified_base 58: mod_base = OTHER; note = 2'-Omethylguanosine
  modified_base 59: mod_base = OTHER; note = 2'-fluorouridine
  modified_base 72: mod_base = OTHER; note = 2'-Omethyluridine

SEQ ID NO: 7878 - RNA, 85 nt, synthetic construct
  source 1..85: mol_type = other RNA
gctgtgatggccgagtggttaaggcgttggacttcaaatccaatggggtttccccgcgcaggttcgagccctgctcgcagcgcca

SEQ ID NO: 7879 - RNA, 76 nt, synthetic construct; identical to SEQ ID NO: 625
  source 1..76: mol_type = other RNA
  modified_base 1: mod_base = OTHER; note = 2'-Omethylguanosine phosphorothiorate
  modified_base 2: mod_base = OTHER; note = 2'-Omethylguanosine phosphorothiorate
  modified_base 3: mod_base = OTHER; note = 2'-Omethylcytosine
  modified_base 4: mod_base = OTHER; note = 2'-Omethyluridine
  modified_base 5: mod_base = OTHER; note = 2'-Omethylcytosine
  modified_base 6: mod_base = OTHER; note = 2'-Omethylcytosine
  modified_base 10: mod_base = OTHER; note = 2'-Omethylguanosine
  modified_base 11: mod_base = OTHER; note = 2'-Omethylcytosine
  modified_base 12: mod_base = OTHER; note = 2'-Omethylguanosine
  modified_base 13: mod_base = OTHER; note = 2'-Omethylcytosine
  modified_base 22: mod_base = OTHER; note = 2'-Omethylguanosine
  modified_base 23: mod_base = OTHER; note = 2'-Omethylcytosine
  modified_base 24: mod_base = OTHER; note = 2'-Omethylguanosine
  modified_base 25: mod_base = OTHER; note = 2'-Omethylcytosine
  modified_base 48: mod_base = OTHER; note = 2'-fluorouridine
  modified_base 49: mod_base = OTHER; note = 2'-Omethylcytosine
  modified_base 50: mod_base = OTHER; note = 2'-Omethylcytosine
  modified_base 51: mod_base = OTHER; note = 2'-Omethylguanosine
  modified_base 52: mod_base = OTHER; note = 2'-Omethylguanosine
  modified_base 53: mod_base = OTHER; note = 2'-Omethylguanosine
  modified_base 54: mod_base = OTHER; note = 2'-Omethyluridine
  modified_base 61: mod_base = OTHER; note = 2'-Omethylcytosine
  modified_base 62: mod_base = OTHER; note = 2'-Omethylcytosine
  modified_base 63: mod_base = OTHER; note = 2'-fluorocytosine
  modified_base 64: mod_base = OTHER; note = 2'-Omethylguanosine
  modified_base 65: mod_base = OTHER; note = 2'-Omethylguanosine
  modified_base 66: mod_base = OTHER; note = 2'-Omethylcytosine
  modified_base 67: mod_base = OTHER; note = 2'-Omethylguanosine
  modified_base 68: mod_base = OTHER; note = 2'-Omethylguanosine
  modified_base 73: mod_base = OTHER; note = 2'-Omethylguanosine

SEQ ID NO: 7880 - RNA, 76 nt, synthetic construct; identical to SEQ ID NO: 625
  source 1..76: mol_type = other RNA
  modified_base 1: mod_base = OTHER; note = 2'-Omethylguanosine phosphorothiorate
  modified_base 2: mod_base = OTHER; note = 2'-Omethylguanosine phosphorothiorate
  modified_base 3: mod_base = OTHER; note = 2'-Omethylcytosine
  modified_base 4: mod_base = OTHER; note = 2'-Omethyluridine
  modified_base 5: mod_base = OTHER; note = 2'-Omethylcytosine
  modified_base 6: mod_base = OTHER; note = 2'-Omethylcytosine
  modified_base 10: mod_base = OTHER; note = 2'-Omethylguanosine
  modified_base 11: mod_base = OTHER; note = 2'-Omethylcytosine
  modified_base 12: mod_base = OTHER; note = 2'-Omethylguanosine
  modified_base 13: mod_base = OTHER; note = 2'-Omethylcytosine
  modified_base 48: mod_base = OTHER; note = 2'-fluorouridine
  modified_base 49: mod_base = OTHER; note = 2'-Omethylcytosine
  modified_base 50: mod_base = OTHER; note = 2'-Omethylcytosine
  modified_base 51: mod_base = OTHER; note = 2'-Omethylguanosine
  modified_base 52: mod_base = OTHER; note = 2'-Omethylguanosine
  modified_base 53: mod_base = OTHER; note = 2'-Omethylguanosine
  modified_base 54: mod_base = OTHER; note = 2'-Omethyluridine
  modified_base 61: mod_base = OTHER; note = 2'-Omethylcytosine
  modified_base 62: mod_base = OTHER; note = 2'-Omethylcytosine
  modified_base 63: mod_base = OTHER; note = 2'-fluorocytosine
  modified_base 64: mod_base = OTHER; note = 2'-Omethylguanosine
  modified_base 65: mod_base = OTHER; note = 2'-Omethylguanosine
  modified_base 66: mod_base = OTHER; note = 2'-Omethylcytosine
  modified_base 67: mod_base = OTHER; note = 2'-Omethylguanosine
  modified_base 68: mod_base = OTHER; note = 2'-Omethylguanosine
  modified_base 73: mod_base = OTHER; note = 2'-Omethylguanosine

SEQ ID NO: 7881 - RNA, 76 nt, synthetic construct; identical to SEQ ID NO: 625
  source 1..76: mol_type = other RNA
  modified_base 1: mod_base = OTHER; note = 2'-Omethylguanosine phosphorothiorate
  modified_base 2: mod_base = OTHER; note = 2'-Omethylguanosine
  modified_base 3: mod_base = OTHER; note = 2'-Omethylcytosine
  modified_base 4: mod_base = OTHER; note = 2'-Omethyluridine
  modified_base 5: mod_base = OTHER; note = 2'-Omethylcytosine
  modified_base 6: mod_base = OTHER; note = 2'-Omethylcytosine
  modified_base 10: mod_base = OTHER; note = 2'-Omethylguanosine
  modified_base 11: mod_base = OTHER; note = 2'-Omethylcytosine
  modified_base 12: mod_base = OTHER; note = 2'-Omethylguanosine
  modified_base 13: mod_base = OTHER; note = 2'-Omethylcytosine
  modified_base 14: mod_base = OTHER; note = 2'-Omethyladenosine
  modified_base 15: mod_base = OTHER; note = 2'-Omethyladenosine
  modified_base 16: mod_base = OTHER; note = 2'-Omethyluridine
  modified_base 17: mod_base = OTHER; note = 2'-Omethylguanosine
  modified_base 18: mod_base = OTHER; note = 2'-Omethylguanosine
  modified_base 19: mod_base = OTHER; note = 2'-Omethyladenosine
  modified_base 20: mod_base = OTHER; note = 2'-Omethyluridine
  modified_base 22: mod_base = OTHER; note = 2'-Omethylguanosine
  modified_base 23: mod_base = OTHER; note = 2'-Omethylcytosine
  modified_base 24: mod_base = OTHER; note = 2'-Omethylguanosine
  modified_base 25: mod_base = OTHER; note = 2'-Omethylcytosine
  modified_base 49: mod_base = OTHER; note = 2'-Omethylcytosine
  modified_base 50: mod_base = OTHER; note = 2'-Omethylcytosine
  modified_base 51: mod_base = OTHER; note = 2'-Omethylguanosine
  modified_base 52: mod_base = OTHER; note = 2'-Omethylguanosine
  modified_base 53: mod_base = OTHER; note = 2'-Omethylguanosine
  modified_base 61: mod_base = OTHER; note = 2'-Omethylcytosine
  modified_base 62: mod_base = OTHER; note = 2'-Omethylcytosine
  modified_base 63: mod_base = OTHER; note = 2'-fluorocytosine
  modified_base 64: mod_base = OTHER; note = 2'-Omethylguanosine
  modified_base 65: mod_base = OTHER; note = 2'-Omethylguanosine
  modified_base 66: mod_base = OTHER; note = 2'-Omethylcytosine
  modified_base 67: mod_base = OTHER; note = 2'-Omethylguanosine
  modified_base 68: mod_base = OTHER; note = 2'-Omethylguanosine
  modified_base 69: mod_base = OTHER; note = 2'-fluoroadenosine
  modified_base 71: mod_base = OTHER; note = 2'-Omethyluridine

SEQ ID NO: 7882 - RNA, 75 nt, synthetic construct; identical to SEQ ID NO: 3306
  source 1..75: mol_type = other RNA
  modified_base 1: mod_base = OTHER; note = 2'-Omethylguanosine phosphorothiorate
  modified_base 2: mod_base = OTHER; note = 2'-Omethyladenosine phosphorothiorate
  modified_base 3: mod_base = OTHER; note = 2'-Omethylcytosine
  modified_base 4: mod_base = OTHER; note = 2'-Omethylcytosine
  modified_base 5: mod_base = OTHER; note = 2'-Omethyluridine
  modified_base 6: mod_base = OTHER; note = 2'-Omethylcytosine
  modified_base 16: mod_base = OTHER; note = 2'-Omethylcytosine
  modified_base 17: mod_base = OTHER; note = 2'-Omethylguanosine
  modified_base 18: mod_base = OTHER; note = 2'-Omethylguanosine
  modified_base 32: mod_base = OTHER; note = 2'-fluorouridine
  modified_base 34: mod_base = OTHER; note = Uridine phosphorothiorate
  modified_base 36: mod_base = OTHER; note = Guanosine phosphorothiorate
  modified_base 37: mod_base = OTHER; note = Adenosine phosphorothiorate
  modified_base 43: mod_base = OTHER; note = 2'-Omethyladenosine
  modified_base 44: mod_base = OTHER; note = 2'-Omethylguanosine
  modified_base 45: mod_base = OTHER; note = 2'-fluoroguanosine
  modified_base 46: mod_base = OTHER; note = 2'-fluorouridine
  modified_base 48: mod_base = OTHER; note = 2'-Omethylguanosine
  modified_base 49: mod_base = OTHER; note = 2'-Omethylcytosine
  modified_base 50: mod_base = OTHER; note = 2'-Omethylguanosine
  modified_base 51: mod_base = OTHER; note = 2'-Omethyluridine
  modified_base 52: mod_base = OTHER; note = 2'-Omethylguanosine
  modified_base 53: mod_base = OTHER; note = 2'-Omethyluridine
  modified_base 55: mod_base = OTHER; note = 2'-Omethylcytosine
  modified_base 58: mod_base = OTHER; note = 2'-Omethyladenosine
  modified_base 60: mod_base = OTHER; note = 2'-Omethylcytosine
  modified_base 61: mod_base = OTHER; note = 2'-Omethyladenosine
  modified_base 62: mod_base = OTHER; note = 2'-fluorocytosine
  modified_base 63: mod_base = OTHER; note = 2'-Omethylguanosine
  modified_base 64: mod_base = OTHER; note = 2'-Omethyluridine
  modified_base 65: mod_base = OTHER; note = 2'-Omethylcytosine
  modified_base 66: mod_base = OTHER; note = 2'-Omethylguanosine
  modified_base 67: mod_base = OTHER; note = 2'-Omethylguanosine
  modified_base 72: mod_base = OTHER; note = 2'-Omethyladenosine

SEQ ID NO: 7883 - RNA, 76 nt, synthetic construct; identical to SEQ ID NO: 625
  source 1..76: mol_type = other RNA
  modified_base 1: mod_base = OTHER; note = 2'-Omethylguanosine phosphorothiorate
  modified_base 2: mod_base = OTHER; note = 2'-Omethylguanosine
  modified_base 17: mod_base = OTHER; note = 2'-Omethylguanosine
  modified_base 33: mod_base = OTHER; note = 2'-fluorouridine
  modified_base 35: mod_base = OTHER; note = Cytosine phosphorothiorate
  modified_base 37: mod_base = OTHER; note = Adenosine phosphorothiorate
  modified_base 38: mod_base = OTHER; note = Adenosine phosphorothiorate
  modified_base 52: mod_base = OTHER; note = 2'-fluoroguanosine
  modified_base 62: mod_base = OTHER; note = 2'-Omethylcytosine
  modified_base 63: mod_base = OTHER; note = 2'-fluorocytosine
  modified_base 73: mod_base = OTHER; note = 2'-Omethylguanosine
  modified_base 75: mod_base = OTHER; note = 2'-fluorocytosine phosphorothiorate

SEQ ID NO: 7884 - RNA, 75 nt, synthetic construct; identical to SEQ ID NO: 3336
  source 1..75: mol_type = other RNA
  modified_base 11: mod_base = OTHER; note = 2'-fluorouridine phosphorothiorate
  modified_base 20: mod_base = OTHER; note = 2'-fluoroadenosine
  modified_base 21: mod_base = OTHER; note = 2'-fluoroguanosine
  modified_base 22: mod_base = OTHER; note = 2'-Omethyladenosine phosphorothiorate
  modified_base 27: mod_base = OTHER; note = Cytosine phosphorothiorate
  modified_base 35: mod_base = OTHER; note = 2'-fluoroadenosine phosphorothiorate
  modified_base 46: mod_base = OTHER; note = 2'-fluorouridine
  modified_base 47: mod_base = OTHER; note = 2'-fluorocytosine
  modified_base 49: mod_base = OTHER; note = 2'-fluoroadenosine
  modified_base 72: mod_base = OTHER; note = Guanosine phosphorothiorate
  modified_base 74: mod_base = OTHER; note = 2'-Omethylcytosine

SEQ ID NO: 7885 - RNA, 76 nt, synthetic construct; identical to SEQ ID NO: 625
  source 1..76: mol_type = other RNA
  modified_base 1: mod_base = OTHER; note = 2'-Omethylguanosine phosphorothiorate
  modified_base 2: mod_base = OTHER; note = 2'-Omethylguanosine
  modified_base 13: mod_base = OTHER; note = 2'-Omethylcytosine
  modified_base 33: mod_base = OTHER; note = 2'-fluorouridine
  modified_base 35: mod_base = OTHER; note = Cytosine phosphorothiorate
  modified_base 37: mod_base = OTHER; note = Adenosine phosphorothiorate
  modified_base 38: mod_base = OTHER; note = Adenosine phosphorothiorate
  modified_base 52: mod_base = OTHER; note = 2'-Omethylguanosine
  modified_base 73: mod_base = OTHER; note = 2'-Omethylguanosine
  modified_base 75: mod_base = OTHER; note = 2'-fluorocytosine phosphorothiorate

SEQ ID NO: 7886 - RNA, 85 nt, synthetic construct; identical to SEQ ID NO: 3286
  source 1..85: mol_type = other RNA
  modified_base 1: mod_base = OTHER; note = 2'-Omethylcytosine
  modified_base 3: mod_base = OTHER; note = 2'-fluoroadenosine
  modified_base 11: mod_base = OTHER; note = Cytosine phosphorothiorate
  modified_base 30: mod_base = OTHER; note = 2'-fluoroadenosine
  modified_base 52: mod_base = OTHER; note = Guanosine phosphorothiorate
  modified_base 56: mod_base = OTHER; note = 2'-Omethylguanosine
  modified_base 58: mod_base = OTHER; note = 2'-Omethylguanosine
  modified_base 73: mod_base = OTHER; note = 2'-fluoroadenosine
  modified_base 84: mod_base = OTHER; note = 2'-Omethylcytosine

SEQ ID NO: 7887 - RNA, 75 nt, synthetic construct; identical to SEQ ID NO: 3299
  source 1..75: mol_type = other RNA
  modified_base 14: mod_base = OTHER; note = Guanosine phosphorothiorate
  modified_base 18: mod_base = OTHER; note = 2'-fluoroguanosine
  modified_base 24: mod_base = OTHER; note = Cytosine phosphorothiorate
  modified_base 26: mod_base = OTHER; note = Uridine phosphorothiorate
  modified_base 46: mod_base = OTHER; note = 2'-fluorouridine
  modified_base 55: mod_base = OTHER; note = Cytosine phosphorothiorate
  modified_base 73: mod_base = OTHER; note = Cytosine phosphorothiorate
  modified_base 74: mod_base = OTHER; note = 2'-Omethylcytosine

SEQ ID NO: 7888 - RNA, 76 nt, synthetic construct; identical to SEQ ID NO: 3419
  source 1..76: mol_type = other RNA
  modified_base 1: mod_base = OTHER; note = 2'-Omethylguanosine
  modified_base 13: mod_base = OTHER; note = 2'-Omethylcytosine
  modified_base 14: mod_base = OTHER; note = 2'-Omethyladenosine
  modified_base 15: mod_base = OTHER; note = 2'-Omethyladenosine
  modified_base 16: mod_base = OTHER; note = 2'-Omethyluridine
  modified_base 17: mod_base = OTHER; note = 2'-Omethylguanosine
  modified_base 18: mod_base = OTHER; note = 2'-Omethylguanosine
  modified_base 19: mod_base = OTHER; note = Adenosine phosphorothiorate
  modified_base 20: mod_base = OTHER; note = 2'-Omethyluridine
  modified_base 21: mod_base = OTHER; note = Adenosine phosphorothiorate
  modified_base 25: mod_base = OTHER; note = 2'-Omethylcytosine
  modified_base 41: mod_base = OTHER; note = 2'-fluoroguanosine
  modified_base 42: mod_base = OTHER; note = 2'-Omethylguanosine
  modified_base 43: mod_base = OTHER; note = 2'-Omethyluridine
  modified_base 44: mod_base = OTHER; note = 2'-fluoroadenosine
  modified_base 49: mod_base = OTHER; note = 2'-Omethylcytosine
  modified_base 50: mod_base = OTHER; note = 2'-Omethylcytosine
  modified_base 51: mod_base = OTHER; note = 2'-Omethylguanosine
  modified_base 52: mod_base = OTHER; note = 2'-Omethylguanosine
  modified_base 53: mod_base = OTHER; note = 2'-Omethylguanosine
  modified_base 54: mod_base = OTHER; note = Uridine phosphorothiorate
  modified_base 55: mod_base = OTHER; note = Uridine phosphorothiorate
  modified_base 61: mod_base = OTHER; note = 2'-Omethylcytosine
  modified_base 65: mod_base = OTHER; note = 2'-Omethylguanosine
  modified_base 73: mod_base = OTHER; note = 2'-Omethylguanosine

SEQ ID NO: 7889 - RNA, 85 nt, synthetic construct; identical to SEQ ID NO: 3297
  source 1..85: mol_type = other RNA
  modified_base 1: mod_base = OTHER; note = 2'-Omethylguanosine phosphorothiorate
  modified_base 2: mod_base = OTHER; note = 2'-Omethylcytosine phosphorothiorate
  modified_base 18: mod_base = OTHER; note = 2'-Omethylguanosine
  modified_base 28: mod_base = OTHER; note = Uridine phosphorothiorate
  modified_base 39: mod_base = OTHER; note = 2'-fluorouridine
  modified_base 41: mod_base = OTHER; note = 2'-Omethylcytosine
  modified_base 60: mod_base = OTHER; note = Adenosine phosphorothiorate

SEQ ID NO: 7890 - RNA, 76 nt, synthetic construct; identical to SEQ ID NO: 3289
  source 1..76: mol_type = other RNA
  modified_base 1: mod_base = OTHER; note = 2'-Omethylguanosine
  modified_base 18: mod_base = OTHER; note = 2'-Omethylguanosine
  modified_base 19: mod_base = OTHER; note = 2'-Omethylguanosine
  modified_base 33: mod_base = OTHER; note = Uridine phosphorothiorate
  modified_base 34: mod_base = OTHER; note = 2'-Omethyluridine
  modified_base 35: mod_base = OTHER; note = Uridine phosphorothiorate
  modified_base 37: mod_base = OTHER; note = Adenosine phosphorothiorate
  modified_base 38: mod_base = OTHER; note = Adenosine phosphorothiorate
  modified_base 41: mod_base = OTHER; note = 2'-fluorouridine
  modified_base 42: mod_base = OTHER; note = 2'-Omethylguanosine
  modified_base 43: mod_base = OTHER; note = 2'-Omethyladenosine
  modified_base 44: mod_base = OTHER; note = 2'-fluoroguanosine
  modified_base 50: mod_base = OTHER; note = 2'-Omethyladenosine
  modified_base 52: mod_base = OTHER; note = 2'-Omethylguanosine
  modified_base 73: mod_base = OTHER; note = 2'-Omethylguanosine

SEQ ID NO: 7891 - RNA, 76 nt, synthetic construct; identical to SEQ ID NO: 3318
  source 1..76: mol_type = other RNA
  modified_base 1: mod_base = OTHER; note = 2'-Omethylcytosine
  modified_base 2: mod_base = OTHER; note = 2'-Omethylcytosine
  modified_base 3: mod_base = OTHER; note = 2'-Omethyluridine
  modified_base 4: mod_base = OTHER; note = 2'-Omethyluridine
  modified_base 5: mod_base = OTHER; note = 2'-Omethylcytosine
  modified_base 6: mod_base = OTHER; note = 2'-Omethylguanosine
  modified_base 10: mod_base = OTHER; note = 2'-Omethylguanosine
  modified_base 11: mod_base = OTHER; note = 2'-Omethylcytosine
  modified_base 12: mod_base = OTHER; note = 2'-Omethyluridine
  modified_base 13: mod_base = OTHER; note = 2'-Omethylcytosine
  modified_base 14: mod_base = OTHER; note = 2'-Omethyladenosine
  modified_base 15: mod_base = OTHER; note = 2'-Omethylguanosine
  modified_base 16: mod_base = OTHER; note = 2'-Omethyluridine
  modified_base 18: mod_base = OTHER; note = 2'-Omethylguanosine
  modified_base 19: mod_base = OTHER; note = 2'-Omethylguanosine
  modified_base 22: mod_base = OTHER; note = 2'-Omethylguanosine
  modified_base 23: mod_base = OTHER; note = 2'-Omethyladenosine
  modified_base 24: mod_base = OTHER; note = 2'-Omethylguanosine
  modified_base 25: mod_base = OTHER; note = 2'-Omethylcytosine
  modified_base 41: mod_base = OTHER; note = 2'-Omethylcytosine
  modified_base 42: mod_base = OTHER; note = 2'-Omethyluridine
  modified_base 43: mod_base = OTHER; note = 2'-Omethyluridine
  modified_base 44: mod_base = OTHER; note = 2'-Omethyladenosine
  modified_base 49: mod_base = OTHER; note = 2'-Omethylguanosine
  modified_base 50: mod_base = OTHER; note = 2'-Omethylcytosine
  modified_base 52: mod_base = OTHER; note = 2'-Omethylguanosine
  modified_base 54: mod_base = OTHER; note = 2'-Omethyluridine
  modified_base 55: mod_base = OTHER; note = Uridine phosphorothiorate
  modified_base 56: mod_base = OTHER; note = 2'-Omethylcytosine
  modified_base 57: mod_base = OTHER; note = 2'-fluoroguanosine
  modified_base 59: mod_base = OTHER; note = 2'-Omethyladenosine
  modified_base 61: mod_base = OTHER; note = 2'-Omethylcytosine
  modified_base 65: mod_base = OTHER; note = 2'-Omethylcytosine
  modified_base 73: mod_base = OTHER; note = 2'-Omethyladenosine

SEQ ID NO: 7892 - RNA, 76 nt, synthetic construct; identical to SEQ ID NO: 625
  source 1..76: mol_type = other RNA
  modified_base 14: mod_base = OTHER; note = 2'-Omethyladenosine
  modified_base 15: mod_base = OTHER; note = 2'-Omethyladenosine
  modified_base 16: mod_base = OTHER; note = 2'-Omethyluridine
  modified_base 17: mod_base = OTHER; note = 2'-Omethylguanosine
  modified_base 18: mod_base = OTHER; note = 2'-Omethylguanosine
  modified_base 19: mod_base = OTHER; note = 2'-Omethyladenosine
  modified_base 20: mod_base = OTHER; note = 2'-Omethyluridine
  modified_base 40: mod_base = OTHER; note = 2'-fluorouridine
  modified_base 41: mod_base = OTHER; note = 2'-fluorocytosine
  modified_base 42: mod_base = OTHER; note = 2'-fluoroadenosine
  modified_base 43: mod_base = OTHER; note = 2'-fluoroadenosine
  modified_base 44: mod_base = OTHER; note = 2'-Omethyladenosine
  modified_base 45: mod_base = OTHER; note = 2'-Omethylguanosine
  modified_base 46: mod_base = OTHER; note = 2'-Omethylguanosine
  modified_base 49: mod_base = OTHER; note = 2'-Omethylcytosine
  modified_base 50: mod_base = OTHER; note = 2'-Omethylcytosine
  modified_base 51: mod_base = OTHER; note = 2'-Omethylguanosine
  modified_base 52: mod_base = OTHER; note = 2'-Omethylguanosine
  modified_base 53: mod_base = OTHER; note = 2'-Omethylguanosine
  modified_base 54: mod_base = OTHER; note = Uridine phosphorothiorate
  modified_base 55: mod_base = OTHER; note = Uridine phosphorothiorate
  modified_base 56: mod_base = OTHER; note = Cytosine phosphorothiorate
  modified_base 57: mod_base = OTHER; note = Guanosine phosphorothiorate
  modified_base 61: mod_base = OTHER; note = 2'-Omethylcytosine
  modified_base 62: mod_base = OTHER; note = 2'-Omethylcytosine
  modified_base 63: mod_base = OTHER; note = 2'-Omethylcytosine
  modified_base 64: mod_base = OTHER; note = 2'-Omethylguanosine
  modified_base 65: mod_base = OTHER; note = 2'-Omethylguanosine
  modified_base 66: mod_base = OTHER; note = 2'-Omethylcytosine
  modified_base 67: mod_base = OTHER; note = 2'-Omethylguanosine
  modified_base 68: mod_base = OTHER; note = 2'-Omethylguanosine
  modified_base 69: mod_base = OTHER; note = 2'-Omethyladenosine

SEQ ID NO: 7893 - RNA, 75 nt, synthetic construct; identical to SEQ ID NO: 3311
  source 1..75: mol_type = other RNA
  modified_base 1: mod_base = OTHER; note = 2'-Omethylguanosine phosphorothiorate
  modified_base 4: mod_base = OTHER; note = 2'-Omethyluridine
  modified_base 11: mod_base = OTHER; note = 2'-Omethyluridine
  modified_base 12: mod_base = OTHER; note = Guanosine phosphorothiorate
  modified_base 14: mod_base = OTHER; note = Adenosine phosphorothiorate
  modified_base 26: mod_base = OTHER; note = Uridine phosphorothiorate
  modified_base 40: mod_base = OTHER; note = 2'-fluorocytosine phosphorothiorate
  modified_base 47: mod_base = OTHER; note = 2'-fluorouridine phosphorothiorate
  modified_base 56: mod_base = OTHER; note = Guanosine phosphorothiorate
  modified_base 67: mod_base = OTHER; note = 2'-fluoroguanosine
  modified_base 70: mod_base = OTHER; note = Cytosine phosphorothiorate
  modified_base 71: mod_base = OTHER; note = Cytosine phosphorothiorate
  modified_base 72: mod_base = OTHER; note = 2'-fluorouridine

SEQ ID NO: 7894 - RNA, 76 nt, synthetic construct; identical to SEQ ID NO: 625
  source 1..76: mol_type = other RNA
  modified_base 1: mod_base = OTHER; note = 2'-Omethylguanosine phosphorothiorate
  modified_base 2: mod_base = OTHER; note = 2'-Omethylguanosine
  modified_base 3: mod_base = OTHER; note = 2'-Omethylcytosine
  modified_base 10: mod_base = OTHER; note = 2'-Omethylguanosine
  modified_base 11: mod_base = OTHER; note = 2'-Omethylcytosine
  modified_base 12: mod_base = OTHER; note = 2'-Omethylguanosine
  modified_base 13: mod_base = OTHER; note = 2'-Omethylcytosine
  modified_base 14: mod_base = OTHER; note = 2'-Omethyladenosine
  modified_base 15: mod_base = OTHER; note = 2'-fluoroadenosine
  modified_base 16: mod_base = OTHER; note = 2'-Omethyluridine
  modified_base 17: mod_base = OTHER; note = 2'-Omethylguanosine
  modified_base 18: mod_base = OTHER; note = 2'-Omethylguanosine
  modified_base 19: mod_base = OTHER; note = 2'-fluoroadenosine
  modified_base 20: mod_base = OTHER; note = 2'-Omethyluridine
  modified_base 21: mod_base = OTHER; note = 2'-fluoroadenosine
  modified_base 22: mod_base = OTHER; note = 2'-Omethylguanosine
  modified_base 23: mod_base = OTHER; note = 2'-Omethylcytosine
  modified_base 24: mod_base = OTHER; note = 2'-Omethylguanosine
  modified_base 25: mod_base = OTHER; note = 2'-Omethylcytosine
  modified_base 38: mod_base = OTHER; note = Adenosine phosphorothiorate
  modified_base 39: mod_base = OTHER; note = Uridine phosphorothiorate
  modified_base 40: mod_base = OTHER; note = 2'-fluorouridine
  modified_base 43: mod_base = OTHER; note = 2'-Omethyladenosine
  modified_base 44: mod_base = OTHER; note = 2'-Omethyladenosine
  modified_base 45: mod_base = OTHER; note = 2'-Omethylguanosine
  modified_base 46: mod_base = OTHER; note = 2'-fluoroguanosine
  modified_base 48: mod_base = OTHER; note = 2'-fluorouridine
  modified_base 49: mod_base = OTHER; note = 2'-Omethylcytosine
  modified_base 50: mod_base = OTHER; note = 2'-Omethylcytosine
  modified_base 54: mod_base = OTHER; note = Uridine phosphorothiorate
  modified_base 55: mod_base = OTHER; note = Uridine phosphorothiorate
  modified_base 56: mod_base = OTHER; note = 2'-Omethylcytosine
  modified_base 57: mod_base = OTHER; note = Guanosine phosphorothiorate
  modified_base 61: mod_base = OTHER; note = 2'-Omethylcytosine
  modified_base 62: mod_base = OTHER; note = 2'-Omethylcytosine
  modified_base 63: mod_base = OTHER; note = 2'-fluorocytosine
  modified_base 64: mod_base = OTHER; note = 2'-Omethylguanosine
  modified_base 65: mod_base = OTHER; note = 2'-Omethylguanosine
  modified_base 66: mod_base = OTHER; note = 2'-Omethylcytosine
  modified_base 67: mod_base = OTHER; note = 2'-Omethylguanosine
  modified_base 68: mod_base = OTHER; note = 2'-Omethylguanosine
  modified_base 69: mod_base = OTHER; note = 2'-fluoroadenosine
  modified_base 70: mod_base = OTHER; note = 2'-fluoroguanosine

SEQ ID NO: 7895 - RNA, 86 nt, synthetic construct; identical to SEQ ID NO: 3290
  source 1..86: mol_type = other RNA
  modified_base 1: mod_base = OTHER; note = 2'-Omethyladenosine phosphorothiorate
  modified_base 2: mod_base = OTHER; note = 2'-Omethylcytosine phosphorothiorate
  modified_base 3: mod_base = OTHER; note = 2'-Omethylcytosine
  modified_base 4: mod_base = OTHER; note = 2'-Omethyladenosine
  modified_base 5: mod_base = OTHER; note = 2'-Omethylguanosine
  modified_base 6: mod_base = OTHER; note = 2'-Omethylguanosine
  modified_base 16: mod_base = OTHER; note = 2'-Omethyluridine
  modified_base 17: mod_base = OTHER; note = 2'-Omethylguanosine
  modified_base 18: mod_base = OTHER; note = 2'-Omethylguanosine
  modified_base 33: mod_base = OTHER; note = 2'-fluorouridine
  modified_base 35: mod_base = OTHER; note = Cytosine phosphorothiorate
  modified_base 37: mod_base = OTHER; note = Guanosine phosphorothiorate
  modified_base 38: mod_base = OTHER; note = Adenosine phosphorothiorate
  modified_base 44: mod_base = OTHER; note = 2'-Omethyluridine
  modified_base 57: mod_base = OTHER; note = 2'-fluoroguanosine
  modified_base 58: mod_base = OTHER; note = 2'-fluorocytosine
  modified_base 64: mod_base = OTHER; note = 2'-Omethyluridine
  modified_base 66: mod_base = OTHER; note = 2'-Omethylcytosine
  modified_base 69: mod_base = OTHER; note = 2'-Omethyladenosine
  modified_base 71: mod_base = OTHER; note = 2'-Omethylcytosine
  modified_base 72: mod_base = OTHER; note = 2'-Omethylcytosine
  modified_base 73: mod_base = OTHER; note = 2'-fluorocytosine
  modified_base 74: mod_base = OTHER; note = 2'-Omethyladenosine
  modified_base 75: mod_base = OTHER; note = 2'-Omethylcytosine
  modified_base 76: mod_base = OTHER; note = 2'-Omethyluridine
  modified_base 77: mod_base = OTHER; note = 2'-Omethylcytosine
  modified_base 78: mod_base = OTHER; note = 2'-Omethylcytosine
  modified_base 83: mod_base = OTHER; note = 2'-Omethyladenosine

SEQ ID NO: 7896 - RNA, 76 nt, synthetic construct
  source 1..76: mol_type = other RNA
ggctccctggcgcaatggatagcgcattggacttcaaattcaaaggttccgggttcgagtcccgggggggtcgcca

SEQ ID NO: 7897 - RNA, 75 nt, synthetic construct; identical to SEQ ID NO: 3299
  source 1..75: mol_type = other RNA
  modified_base 2: mod_base = OTHER; note = 2'-Omethylcytosine phosphorothiorate
  modified_base 16: mod_base = OTHER; note = Cytosine phosphorothiorate
  modified_base 26: mod_base = OTHER; note = 2'-fluorouridine
  modified_base 27: mod_base = OTHER; note = 2'-fluorocytosine
  modified_base 46: mod_base = OTHER; note = 2'-fluorouridine
  modified_base 47: mod_base = OTHER; note = Cytosine phosphorothiorate
  modified_base 53: mod_base = OTHER; note = 2'-fluorouridine
  modified_base 71: mod_base = OTHER; note = Cytosine phosphorothiorate
  modified_base 73: mod_base = OTHER; note = Cytosine phosphorothiorate

SEQ ID NO: 7898 - RNA, 86 nt, synthetic construct; identical to SEQ ID NO: 3290
  source 1..86: mol_type = other RNA
  modified_base 21: mod_base = OTHER; note = 2'-fluoroadenosine

SEQ ID NO: 7899 - RNA, 76 nt, synthetic construct; identical to SEQ ID NO: 625
  source 1..76: mol_type = other RNA
  modified_base 3: mod_base = OTHER; note = 2'-Omethylcytosine phosphorothiorate
  modified_base 4: mod_base = OTHER; note = 2'-Omethyluridine
  modified_base 14: mod_base = OTHER; note = 2'-fluoroadenosine
  modified_base 15: mod_base = OTHER; note = 2'-fluoroadenosine
  modified_base 17: mod_base = OTHER; note = Guanosine phosphorothiorate
  modified_base 18: mod_base = OTHER; note = 2'-fluoroguanosine phosphorothiorate
  modified_base 20: mod_base = OTHER; note = 2'-Omethyluridine
  modified_base 22: mod_base = OTHER; note = 2'-fluoroguanosine
  modified_base 24: mod_base = OTHER; note = Guanosine phosphorothiorate
  modified_base 25: mod_base = OTHER; note = 2'-Omethylcytosine phosphorothiorate
  modified_base 26: mod_base = OTHER; note = 2'-Omethyladenosine
  modified_base 27: mod_base = OTHER; note = 2'-fluorouridine
  modified_base 28: mod_base = OTHER; note = Uridine phosphorothiorate
  modified_base 29: mod_base = OTHER; note = 2'-Omethylguanosine phosphorothiorate
  modified_base 30: mod_base = OTHER; note = Guanosine phosphorothiorate
  modified_base 31: mod_base = OTHER; note = 2'-fluoroadenosine
  modified_base 34: mod_base = OTHER; note = 2'-fluorouridine
  modified_base 39: mod_base = OTHER; note = 2'-Omethyluridine phosphorothiorate
  modified_base 40: mod_base = OTHER; note = 2'-fluorouridine
  modified_base 45: mod_base = OTHER; note = 2'-Omethylguanosine
  modified_base 47: mod_base = OTHER; note = 2'-Omethyluridine
  modified_base 48: mod_base = OTHER; note = 2'-Omethyluridine phosphorothiorate
  modified_base 51: mod_base = OTHER; note = 2'-Omethylguanosine
  modified_base 53: mod_base = OTHER; note = Guanosine phosphorothiorate
  modified_base 54: mod_base = OTHER; note = 2'-fluorouridine phosphorothiorate
  modified_base 56: mod_base = OTHER; note = 2'-Omethylcytosine
  modified_base 59: mod_base = OTHER; note = Guanosine phosphorothiorate
  modified_base 61: mod_base = OTHER; note = 2'-fluorocytosine
  modified_base 62: mod_base = OTHER; note = 2'-Omethylcytosine phosphorothiorate
  modified_base 63: mod_base = OTHER; note = 2'-Omethylcytosine
  modified_base 64: mod_base = OTHER; note = Guanosine phosphorothiorate
  modified_base 65: mod_base = OTHER; note = 2'-Omethylguanosine
  modified_base 69: mod_base = OTHER; note = 2'-Omethyladenosine
  modified_base 76: mod_base = OTHER; note = 2'-fluoroadenosine

SEQ ID NO: 7900 - RNA, 76 nt, synthetic construct; identical to SEQ ID NO: 625
  source 1..76: mol_type = other RNA
  modified_base 1: mod_base = OTHER; note = Guanosine phosphorothiorate
  modified_base 2: mod_base = OTHER; note = 2'-fluoroguanosine
  modified_base 3: mod_base = OTHER; note = 2'-Omethylcytosine
  modified_base 4: mod_base = OTHER; note = Uridine phosphorothiorate
  modified_base 5: mod_base = OTHER; note = 2'-Omethylcytosine
  modified_base 11: mod_base = OTHER; note = Cytosine phosphorothiorate
  modified_base 12: mod_base = OTHER; note = 2'-Omethylguanosine
  modified_base 13: mod_base = OTHER; note = 2'-Omethylcytosine phosphorothiorate
  modified_base 14: mod_base = OTHER; note = 2'-fluoroadenosine
  modified_base 15: mod_base = OTHER; note = Adenosine phosphorothiorate
  modified_base 16: mod_base = OTHER; note = 2'-fluorouridine
  modified_base 19: mod_base = OTHER; note = Adenosine phosphorothiorate
  modified_base 20: mod_base = OTHER; note = 2'-Omethyluridine phosphorothiorate
  modified_base 22: mod_base = OTHER; note = 2'-Omethylguanosine phosphorothiorate
  modified_base 25: mod_base = OTHER; note = 2'-Omethylcytosine
  modified_base 30: mod_base = OTHER; note = Guanosine phosphorothiorate
  modified_base 31: mod_base = OTHER; note = 2'-Omethyladenosine
  modified_base 32: mod_base = OTHER; note = 2'-fluorocytosine
  modified_base 39: mod_base = OTHER; note = 2'-fluorouridine
  modified_base 41: mod_base = OTHER; note = 2'-Omethylcytosine
  modified_base 44: mod_base = OTHER; note = 2'-Omethyladenosine
  modified_base 46: mod_base = OTHER; note = 2'-Omethylguanosine
  modified_base 48: mod_base = OTHER; note = 2'-fluorouridine
  modified_base 53: mod_base = OTHER; note = 2'-Omethylguanosine
  modified_base 55: mod_base = OTHER; note = Uridine phosphorothiorate
  modified_base 56: mod_base = OTHER; note = 2'-Omethylcytosine
  modified_base 58: mod_base = OTHER; note = 2'-fluoroadenosine
  modified_base 60: mod_base = OTHER; note = 2'-Omethyluridine
  modified_base 62: mod_base = OTHER; note = 2'-fluorocytosine
  modified_base 63: mod_base = OTHER; note = 2'-fluorocytosine
  modified_base 64: mod_base = OTHER; note = 2'-Omethylguanosine phosphorothiorate
  modified_base 65: mod_base = OTHER; note = 2'-Omethylguanosine
  modified_base 66: mod_base = OTHER; note = Cytosine phosphorothiorate
  modified_base 70: mod_base = OTHER; note = 2'-fluoroguanosine
  modified_base 72: mod_base = OTHER; note = 2'-fluorocytosine
  modified_base 75: mod_base = OTHER; note = 2'-Omethylcytosine

SEQ ID NO: 7901 - RNA, 75 nt, synthetic construct; identical to SEQ ID NO: 3306
  source 1..75: mol_type = other RNA
  modified_base 1: mod_base = OTHER; note = 2'-Omethylguanosine phosphorothiorate
  modified_base 2: mod_base = OTHER; note = 2'-Omethyladenosine phosphorothiorate
  modified_base 3: mod_base = OTHER; note = 2'-Omethylcytosine
  modified_base 4: mod_base = OTHER; note = 2'-Omethylcytosine
  modified_base 5: mod_base = OTHER; note = 2'-Omethyluridine
  modified_base 6: mod_base = OTHER; note = 2'-Omethylcytosine
  modified_base 10: mod_base = OTHER; note = 2'-Omethylguanosine
  modified_base 11: mod_base = OTHER; note = 2'-Omethylcytosine
  modified_base 12: mod_base = OTHER; note = 2'-Omethylguanosine
  modified_base 13: mod_base = OTHER; note = 2'-Omethylcytosine
  modified_base 14: mod_base = OTHER; note = 2'-Omethyladenosine
  modified_base 15: mod_base = OTHER; note = 2'-fluoroadenosine
  modified_base 16: mod_base = OTHER; note = 2'-Omethylcytosine
  modified_base 17: mod_base = OTHER; note = 2'-Omethylguanosine
  modified_base 18: mod_base = OTHER; note = 2'-Omethylguanosine
  modified_base 19: mod_base = OTHER; note = 2'-fluorouridine
  modified_base 21: mod_base = OTHER; note = 2'-Omethylguanosine
  modified_base 22: mod_base = OTHER; note = 2'-Omethylcytosine
  modified_base 23: mod_base = OTHER; note = 2'-Omethylguanosine
  modified_base 24: mod_base = OTHER; note = 2'-Omethylcytosine
  modified_base 32: mod_base = OTHER; note = 2'-fluorouridine
  modified_base 34: mod_base = OTHER; note = Uridine phosphorothiorate
  modified_base 36: mod_base = OTHER; note = Guanosine phosphorothiorate
  modified_base 37: mod_base = OTHER; note = Adenosine phosphorothiorate
  modified_base 48: mod_base = OTHER; note = 2'-Omethylguanosine
  modified_base 49: mod_base = OTHER; note = 2'-Omethylcytosine
  modified_base 50: mod_base = OTHER; note = 2'-Omethylguanosine
  modified_base 51: mod_base = OTHER; note = 2'-Omethyluridine
  modified_base 52: mod_base = OTHER; note = 2'-Omethylguanosine
  modified_base 53: mod_base = OTHER; note = 2'-Omethyluridine
  modified_base 55: mod_base = OTHER; note = 2'-Omethylcytosine
  modified_base 58: mod_base = OTHER; note = 2'-Omethyladenosine
  modified_base 60: mod_base = OTHER; note = 2'-Omethylcytosine
  modified_base 61: mod_base = OTHER; note = 2'-Omethyladenosine
  modified_base 62: mod_base = OTHER; note = 2'-fluorocytosine
  modified_base 63: mod_base = OTHER; note = 2'-Omethylguanosine
  modified_base 64: mod_base = OTHER; note = 2'-Omethyluridine
  modified_base 65: mod_base = OTHER; note = 2'-Omethylcytosine
  modified_base 66: mod_base = OTHER; note = 2'-Omethylguanosine
  modified_base 67: mod_base = OTHER; note = 2'-Omethylguanosine
  modified_base 72: mod_base = OTHER; note = 2'-Omethyladenosine

SEQ ID NO: 7902 - RNA, 75 nt, synthetic construct; identical to SEQ ID NO: 3299
  source 1..75: mol_type = other RNA

SEQ ID NO: 7903 - RNA, 75 nt, synthetic construct; identical to SEQ ID NO: 3299
  source 1..75: mol_type = other RNA
  modified_base 1: mod_base = OTHER; note = 2'-Omethylcytosine phosphorothiorate
  modified_base 4: mod_base = OTHER; note = Guanosine phosphorothiorate
  modified_base 6: mod_base = OTHER; note = 2'-Omethylguanosine
  modified_base 7: mod_base = OTHER; note = 2'-fluorouridine
  modified_base 11: mod_base = OTHER; note = 2'-fluorouridine
  modified_base 16: mod_base = OTHER; note = 2'-fluorocytosine
  modified_base 17: mod_base = OTHER; note = 2'-fluoroguanosine
  modified_base 20: mod_base = OTHER; note = 2'-fluoroadenosine
  modified_base 25: mod_base = OTHER; note = 2'-fluoroadenosine
  modified_base 26: mod_base = OTHER; note = 2'-fluorouridine phosphorothiorate
  modified_base 27: mod_base = OTHER; note = Cytosine phosphorothiorate
  modified_base 45: mod_base = OTHER; note = Guanosine phosphorothiorate
  modified_base 47: mod_base = OTHER; note = Cytosine phosphorothiorate
  modified_base 54: mod_base = OTHER; note = 2'-fluorouridine
  modified_base 55: mod_base = OTHER; note = 2'-Omethylcytosine phosphorothiorate
  modified_base 68: mod_base = OTHER; note = Adenosine phosphorothiorate
  modified_base 74: mod_base = OTHER; note = 2'-Omethylcytosine

SEQ ID NO: 7904 - RNA, 76 nt, synthetic construct; identical to SEQ ID NO: 625
  source 1..76: mol_type = other RNA
  modified_base 1: mod_base = OTHER; note = 2'-Omethylguanosine
  modified_base 33: mod_base = OTHER; note = 2'-O-(2-Methoxyethyl) thymine
  modified_base 50: mod_base = OTHER; note = 2'-Omethylcytosine

SEQ ID NO: 7905 - RNA, 76 nt, synthetic construct; identical to SEQ ID NO: 3615
  source 1..76: mol_type = other RNA
  modified_base 1: mod_base = OTHER; note = 2'-Omethylguanosine
  modified_base 2: mod_base = OTHER; note = 2'-Omethylguanosine
  modified_base 3: mod_base = OTHER; note = 2'-Omethylcytosine
  modified_base 4: mod_base = OTHER; note = 2'-Omethyluridine
  modified_base 5: mod_base = OTHER; note = 2'-Omethylcytosine
  modified_base 6: mod_base = OTHER; note = 2'-Omethylcytosine
  modified_base 16: mod_base = OTHER; note = 2'-Omethyluridine
  modified_base 17: mod_base = OTHER; note = 2'-Omethylguanosine
  modified_base 18: mod_base = OTHER; note = 2'-Omethylguanosine
  modified_base 20: mod_base = OTHER; note = 2'-Omethyluridine
  modified_base 22: mod_base = OTHER; note = 2'-Omethylguanosine
  modified_base 23: mod_base = OTHER; note = 2'-Omethylcytosine
  modified_base 24: mod_base = OTHER; note = 2'-Omethylguanosine
  modified_base 25: mod_base = OTHER; note = 2'-Omethylcytosine
  modified_base 33: mod_base = OTHER; note = 2'-fluorouridine
  modified_base 35: mod_base = OTHER; note = Cytosine phosphorothiorate
  modified_base 37: mod_base = OTHER; note = Adenosine phosphorothiorate
  modified_base 38: mod_base = OTHER; note = Adenosine phosphorothiorate
  modified_base 41: mod_base = OTHER; note = 2'-Omethylcytosine
  modified_base 42: mod_base = OTHER; note = 2'-Omethyladenosine
  modified_base 43: mod_base = OTHER; note = 2'-Omethyladenosine
  modified_base 44: mod_base = OTHER; note = 2'-Omethylguanosine
  modified_base 45: mod_base = OTHER; note = 2'-Omethylguanosine
  modified_base 46: mod_base = OTHER; note = 2'-fluoroguanosine
  modified_base 48: mod_base = OTHER; note = 2'-fluorouridine
  modified_base 49: mod_base = OTHER; note = 2'-Omethylcytosine
  modified_base 50: mod_base = OTHER; note = 2'-Omethylcytosine
  modified_base 52: mod_base = OTHER; note = 2'-Omethylguanosine
  modified_base 54: mod_base = OTHER; note = 2'-Omethyluridine
  modified_base 55: mod_base = OTHER; note = Uridine phosphorothiorate
  modified_base 56: mod_base = OTHER; note = 2'-Omethylcytosine
  modified_base 57: mod_base = OTHER; note = 2'-fluoroguanosine
  modified_base 59: mod_base = OTHER; note = 2'-Omethylguanosine
  modified_base 61: mod_base = OTHER; note = 2'-Omethylcytosine
  modified_base 65: mod_base = OTHER; note = 2'-Omethylguanosine
  modified_base 73: mod_base = OTHER; note = 2'-Omethylguanosine

SEQ ID NO: 7906 - RNA, 75 nt, synthetic construct; identical to SEQ ID NO: 3306
  source 1..75: mol_type = other RNA
  modified_base 1: mod_base = OTHER; note = 2'-Omethylguanosine
  modified_base 2: mod_base = OTHER; note = 2'-Omethyladenosine
  modified_base 3: mod_base = OTHER; note = 2'-Omethylcytosine
  modified_base 4: mod_base = OTHER; note = 2'-Omethylcytosine
  modified_base 5: mod_base = OTHER; note = 2'-Omethyluridine
  modified_base 6: mod_base = OTHER; note = 2'-Omethylcytosine
  modified_base 14: mod_base = OTHER; note = 2'-Omethyladenosine
  modified_base 15: mod_base = OTHER; note = 2'-Omethyladenosine
  modified_base 16: mod_base = OTHER; note = 2'-Omethylcytosine
  modified_base 17: mod_base = OTHER; note = 2'-Omethylguanosine
  modified_base 18: mod_base = OTHER; note = 2'-Omethylguanosine
  modified_base 24: mod_base = OTHER; note = 2'-Omethylcytosine
  modified_base 40: mod_base = OTHER; note = 2'-fluoroadenosine
  modified_base 41: mod_base = OTHER; note = 2'-Omethylguanosine
  modified_base 42: mod_base = OTHER; note = 2'-Omethyladenosine
  modified_base 43: mod_base = OTHER; note = 2'-fluoroadenosine
  modified_base 48: mod_base = OTHER; note = 2'-Omethylguanosine
  modified_base 49: mod_base = OTHER; note = 2'-Omethylcytosine
  modified_base 51: mod_base = OTHER; note = 2'-Omethyluridine
  modified_base 53: mod_base = OTHER; note = 2'-Omethyluridine
  modified_base 54: mod_base = OTHER; note = Uridine phosphorothiorate
  modified_base 55: mod_base = OTHER; note = 2'-Omethylcytosine
  modified_base 56: mod_base = OTHER; note = 2'-fluoroadenosine
  modified_base 58: mod_base = OTHER; note = 2'-Omethyladenosine
  modified_base 60: mod_base = OTHER; note = 2'-Omethylcytosine
  modified_base 64: mod_base = OTHER; note = 2'-Omethyluridine
  modified_base 72: mod_base = OTHER; note = 2'-Omethyladenosine

SEQ ID NO: 7907 - RNA, 85 nt, synthetic construct; identical to SEQ ID NO: 3301
  source 1..85: mol_type = other RNA
  modified_base 1: mod_base = OTHER; note = 2'-Omethylguanosine phosphorothiorate
  modified_base 2: mod_base = OTHER; note = 2'-Omethylcytosine
  modified_base 3: mod_base = OTHER; note = 2'-Omethyluridine phosphorothiorate
  modified_base 5: mod_base = OTHER; note = 2'-Omethyluridine phosphorothiorate
  modified_base 13: mod_base = OTHER; note = 2'-fluoroguanosine
  modified_base 14: mod_base = OTHER; note = 2'-fluoroadenosine
  modified_base 23: mod_base = OTHER; note = 2'-fluoroguanosine
  modified_base 29: mod_base = OTHER; note = 2'-fluoroguanosine
  modified_base 34: mod_base = OTHER; note = 2'-fluorouridine
  modified_base 44: mod_base = OTHER; note = 2'-Omethyluridine
  modified_base 46: mod_base = OTHER; note = 2'-Omethylguanosine
  modified_base 52: mod_base = OTHER; note = 2'-fluorocytosine
  modified_base 55: mod_base = OTHER; note = 2'-Omethylcytosine
  modified_base 56: mod_base = OTHER; note = 2'-Omethylguanosine
  modified_base 66: mod_base = OTHER; note = Guanosine phosphorothiorate
  modified_base 71: mod_base = OTHER; note = Cytosine phosphorothiorate
  modified_base 72: mod_base = OTHER; note = 2'-fluorouridine
  modified_base 73: mod_base = OTHER; note = 2'-fluoroguanosine phosphorothiorate
  modified_base 80: mod_base = OTHER; note = 2'-fluoroguanosine phosphorothiorate
  modified_base 81: mod_base = OTHER; note = 2'-fluorocytosine
  modified_base 84: mod_base = OTHER; note = Cytosine phosphorothiorate

SEQ ID NO: 7908 - RNA, 86 nt, synthetic construct; identical to SEQ ID NO: 3290
  source 1..86: mol_type = other RNA
  modified_base 68: mod_base = OTHER; note = 2'-fluoroadenosine

SEQ ID NO: 7909 - RNA, 76 nt, synthetic construct; identical to SEQ ID NO: 3318
  source 1..76: mol_type = other RNA
  modified_base 1: mod_base = OTHER; note = 2'-Omethylcytosine
  modified_base 20: mod_base = OTHER; note = 2'-fluorouridine
  modified_base 21: mod_base = OTHER; note = 2'-Omethyladenosine
  modified_base 22: mod_base = OTHER; note = 2'-Omethylguanosine
  modified_base 73: mod_base = OTHER; note = 2'-Omethyladenosine

SEQ ID NO: 7910 - RNA, 75 nt, synthetic construct; identical to SEQ ID NO: 1045
  source 1..75: mol_type = other RNA
  modified_base 2: mod_base = OTHER; note = 2'-Omethylguanosine phosphorothiorate
  modified_base 5: mod_base = OTHER; note = 2'-fluorocytosine phosphorothiorate
  modified_base 6: mod_base = OTHER; note = 2'-fluorocytosine phosphorothiorate
  modified_base 13: mod_base = OTHER; note = Uridine phosphorothiorate
  modified_base 17: mod_base = OTHER; note = 2'-Omethylguanosine
  modified_base 28: mod_base = OTHER; note = 2'-Omethyluridine phosphorothiorate
  modified_base 41: mod_base = OTHER; note = 2'-Omethylcytosine
  modified_base 55: mod_base = OTHER; note = 2'-fluorocytosine phosphorothiorate
  modified_base 61: mod_base = OTHER; note = 2'-Omethyluridine
  modified_base 62: mod_base = OTHER; note = 2'-fluorocytosine phosphorothiorate
  modified_base 65: mod_base = OTHER; note = 2'-Omethyluridine
  modified_base 66: mod_base = OTHER; note = 2'-Omethylguanosine
  modified_base 72: mod_base = OTHER; note = 2'-Omethyluridine
  modified_base 73: mod_base = OTHER; note = Cytosine phosphorothiorate
  modified_base 74: mod_base = OTHER; note = 2'-Omethylcytosine phosphorothiorate
  modified_base 75: mod_base = OTHER; note = 2'-Omethyladenosine

SEQ ID NO: 7911 - RNA, 85 nt, synthetic construct; identical to SEQ ID NO: 3288
  source 1..85: mol_type = other RNA
  modified_base 1: mod_base = OTHER; note = 2'-Omethylcytosine phosphorothiorate
  modified_base 2: mod_base = OTHER; note = 2'-Omethylcytosine
  modified_base 6: mod_base = OTHER; note = 2'-fluoroadenosine
  modified_base 16: mod_base = OTHER; note = 2'-fluoroguanosine phosphorothiorate
  modified_base 28: mod_base = OTHER; note = 2'-fluoroguanosine
  modified_base 36: mod_base = OTHER; note = 2'-fluoroguanosine phosphorothiorate
  modified_base 43: mod_base = OTHER; note = 2'-Omethyluridine
  modified_base 45: mod_base = OTHER; note = 2'-Omethylguanosine
  modified_base 49: mod_base = OTHER; note = 2'-Omethyluridine
  modified_base 58: mod_base = OTHER; note = 2'-Omethylguanosine
  modified_base 69: mod_base = OTHER; note = 2'-fluorocytosine phosphorothiorate
  modified_base 80: mod_base = OTHER; note = 2'-fluoroguanosine
  modified_base 85: mod_base = OTHER; note = 2'-fluoroadenosine

SEQ ID NO: 7912 - RNA, 76 nt, synthetic construct; identical to SEQ ID NO: 625
  source 1..76: mol_type = other RNA
  modified_base 2: mod_base = OTHER; note = 2'-fluoroguanosine phosphorothiorate
  modified_base 3: mod_base = OTHER; note = 2'-Omethylcytosine
  modified_base 4: mod_base = OTHER; note = 2'-Omethyluridine
  modified_base 6: mod_base = OTHER; note = 2'-fluorocytosine
  modified_base 9: mod_base = OTHER; note = Guanosine phosphorothiorate
  modified_base 12: mod_base = OTHER; note = 2'-Omethylguanosine
  modified_base 13: mod_base = OTHER; note = 2'-Omethylcytosine phosphorothiorate
  modified_base 15: mod_base = OTHER; note = 2'-Omethyladenosine
  modified_base 16: mod_base = OTHER; note = 2'-Omethyluridine
  modified_base 18: mod_base = OTHER; note = 2'-fluoroguanosine phosphorothiorate
  modified_base 19: mod_base = OTHER; note = Adenosine phosphorothiorate
  modified_base 20: mod_base = OTHER; note = 2'-fluorouridine phosphorothiorate
  modified_base 22: mod_base = OTHER; note = 2'-Omethylguanosine
  modified_base 30: mod_base = OTHER; note = Guanosine phosphorothiorate
  modified_base 31: mod_base = OTHER; note = 2'-Omethyladenosine
  modified_base 32: mod_base = OTHER; note = 2'-fluorocytosine
  modified_base 43: mod_base = OTHER; note = 2'-Omethyladenosine
  modified_base 44: mod_base = OTHER; note = Adenosine phosphorothiorate
  modified_base 45: mod_base = OTHER; note = 2'-fluoroguanosine phosphorothiorate
  modified_base 46: mod_base = OTHER; note = 2'-Omethylguanosine
  modified_base 47: mod_base = OTHER; note = 2'-Omethyluridine phosphorothiorate
  modified_base 48: mod_base = OTHER; note = 2'-Omethyluridine
  modified_base 53: mod_base = OTHER; note = Guanosine phosphorothiorate
  modified_base 62: mod_base = OTHER; note = 2'-Omethylcytosine
  modified_base 64: mod_base = OTHER; note = 2'-fluoroguanosine
  modified_base 65: mod_base = OTHER; note = 2'-Omethylguanosine
  modified_base 66: mod_base = OTHER; note = 2'-fluorocytosine
  modified_base 70: mod_base = OTHER; note = 2'-fluoroguanosine
  modified_base 72: mod_base = OTHER; note = 2'-fluorocytosine phosphorothiorate
  modified_base 73: mod_base = OTHER; note = 2'-fluoroguanosine phosphorothiorate
  modified_base 76: mod_base = OTHER; note = 2'-fluoroadenosine

SEQ ID NO: 7913 - RNA, 86 nt, synthetic construct; identical to SEQ ID NO: 3290
  source 1..86: mol_type = other RNA
  modified_base 1: mod_base = OTHER; note = 2'-Omethyladenosine
  modified_base 2: mod_base = OTHER; note = 2'-Omethylcytosine
  modified_base 3: mod_base = OTHER; note = 2'-Omethylcytosine
  modified_base 4: mod_base = OTHER; note = 2'-Omethyladenosine
  modified_base 5: mod_base = OTHER; note = 2'-Omethylguanosine
  modified_base 6: mod_base = OTHER; note = 2'-Omethylguanosine
  modified_base 83: mod_base = OTHER; note = 2'-Omethyladenosine

SEQ ID NO: 7914 - RNA, 76 nt, synthetic construct; identical to SEQ ID NO: 625
  source 1..76: mol_type = other RNA
  modified_base 1: mod_base = OTHER; note = 2'-Omethylguanosine
  modified_base 10: mod_base = OTHER; note = 2'-Omethylguanosine
  modified_base 13: mod_base = OTHER; note = 2'-Omethylcytosine
  modified_base 17: mod_base = OTHER; note = Guanosine phosphorothiorate
  modified_base 18: mod_base = OTHER; note = 2'-Omethylguanosine
  modified_base 19: mod_base = OTHER; note = Adenosine phosphorothiorate
  modified_base 20: mod_base = OTHER; note = 2'-Omethyluridine
  modified_base 25: mod_base = OTHER; note = 2'-Omethylcytosine
  modified_base 29: mod_base = OTHER; note = 2'-Omethylguanosine
  modified_base 33: mod_base = OTHER; note = 2'-fluorouridine
  modified_base 35: mod_base = OTHER; note = Cytosine phosphorothiorate
  modified_base 37: mod_base = OTHER; note = Adenosine phosphorothiorate
  modified_base 38: mod_base = OTHER; note = Adenosine phosphorothiorate
  modified_base 41: mod_base = OTHER; note = 2'-fluorocytosine
  modified_base 43: mod_base = OTHER; note = 2'-Omethyladenosine
  modified_base 44: mod_base = OTHER; note = 2'-fluoroadenosine
  modified_base 46: mod_base = OTHER; note = Guanosine phosphorothiorate
  modified_base 50: mod_base = OTHER; note = 2'-Omethylcytosine
  modified_base 52: mod_base = OTHER; note = 2'-Omethylguanosine
  modified_base 54: mod_base = OTHER; note = Uridine phosphorothiorate
  modified_base 55: mod_base = OTHER; note = Uridine phosphorothiorate
  modified_base 56: mod_base = OTHER; note = 2'-Omethylcytosine
  modified_base 57: mod_base = OTHER; note = Guanosine phosphorothiorate
  modified_base 62: mod_base = OTHER; note = 2'-Omethylcytosine
  modified_base 63: mod_base = OTHER; note = 2'-fluorocytosine
  modified_base 65: mod_base = OTHER; note = 2'-Omethylguanosine
  modified_base 71: mod_base = OTHER; note = 2'-fluorouridine phosphorothiorate
  modified_base 73: mod_base = OTHER; note = 2'-Omethylguanosine

SEQ ID NO: 7915 - RNA, 86 nt, synthetic construct; identical to SEQ ID NO: 3290
  source 1..86: mol_type = other RNA
  modified_base 10: mod_base = OTHER; note = 2'-Omethylguanosine

SEQ ID NO: 7916 - RNA, 76 nt, synthetic construct; identical to SEQ ID NO: 3289
  source 1..76: mol_type = other RNA
  modified_base 1: mod_base = OTHER; note = 2'-Omethylguanosine phosphorothiorate
  modified_base 2: mod_base = OTHER; note = 2'-Omethylcytosine
  modified_base 42: mod_base = OTHER; note = 2'-fluoroguanosine
  modified_base 45: mod_base = OTHER; note = Guanosine phosphorothiorate
  modified_base 46: mod_base = OTHER; note = 2'-fluoroguanosine
  modified_base 52: mod_base = OTHER; note = Guanosine phosphorothiorate
  modified_base 74: mod_base = OTHER; note = Cytosine phosphorothiorate
  modified_base 75: mod_base = OTHER; note = 2'-Omethylcytosine

SEQ ID NO: 7917 - RNA, 76 nt, synthetic construct; identical to SEQ ID NO: 3289
  source 1..76: mol_type = other RNA
  modified_base 1: mod_base = OTHER; note = 2'-Omethylguanosine phosphorothiorate
  modified_base 2: mod_base = OTHER; note = 2'-Omethylcytosine phosphorothiorate
  modified_base 74: mod_base = OTHER; note = Cytosine phosphorothiorate
  modified_base 75: mod_base = OTHER; note = 2'-Omethylcytosine phosphorothiorate
  modified_base 76: mod_base = OTHER; note = 2'-Omethyladenosine

SEQ ID NO: 7918 - RNA, 76 nt, synthetic construct; identical to SEQ ID NO: 3318
  source 1..76: mol_type = other RNA
  modified_base 1: mod_base = OTHER; note = 2'-Omethylcytosine
  modified_base 10: mod_base = OTHER; note = 2'-Omethylguanosine
  modified_base 11: mod_base = OTHER; note = 2'-Omethylcytosine
  modified_base 12: mod_base = OTHER; note = 2'-Omethyluridine
  modified_base 13: mod_base = OTHER; note = 2'-Omethylcytosine
  modified_base 14: mod_base = OTHER; note = 2'-Omethyladenosine
  modified_base 15: mod_base = OTHER; note = 2'-Omethylguanosine
  modified_base 16: mod_base = OTHER; note = 2'-Omethyluridine
  modified_base 18: mod_base = OTHER; note = 2'-Omethylguanosine
  modified_base 19: mod_base = OTHER; note = 2'-Omethylguanosine
  modified_base 20: mod_base = OTHER; note = Uridine phosphorothiorate
  modified_base 21: mod_base = OTHER; note = Adenosine phosphorothiorate
  modified_base 25: mod_base = OTHER; note = 2'-Omethylcytosine
  modified_base 33: mod_base = OTHER; note = Uridine phosphorothiorate
  modified_base 34: mod_base = OTHER; note = 2'-Omethylcytosine
  modified_base 35: mod_base = OTHER; note = Uridine phosphorothiorate
  modified_base 37: mod_base = OTHER; note = Guanosine phosphorothiorate
  modified_base 38: mod_base = OTHER; note = Adenosine phosphorothiorate
  modified_base 49: mod_base = OTHER; note = 2'-Omethylguanosine
  modified_base 50: mod_base = OTHER; note = 2'-Omethylcytosine
  modified_base 52: mod_base = OTHER; note = 2'-Omethylguanosine
  modified_base 54: mod_base = OTHER; note = Uridine phosphorothiorate
  modified_base 55: mod_base = OTHER; note = Uridine phosphorothiorate
  modified_base 61: mod_base = OTHER; note = 2'-Omethylcytosine
  modified_base 65: mod_base = OTHER; note = 2'-Omethylcytosine
  modified_base 73: mod_base = OTHER; note = 2'-Omethyladenosine

SEQ ID NO: 7919 - RNA, 75 nt, synthetic construct; identical to SEQ ID NO: 3336
  source 1..75: mol_type = other RNA
  modified_base 1: mod_base = OTHER; note = 2'-Omethylcytosine phosphorothiorate
  modified_base 4: mod_base = OTHER; note = Guanosine phosphorothiorate
  modified_base 6: mod_base = OTHER; note = 2'-Omethylguanosine
  modified_base 7: mod_base = OTHER; note = 2'-fluorouridine
  modified_base 11: mod_base = OTHER; note = 2'-fluorouridine
  modified_base 16: mod_base = OTHER; note = 2'-fluorocytosine
  modified_base 17: mod_base = OTHER; note = 2'-fluoroguanosine
  modified_base 20: mod_base = OTHER; note = 2'-fluoroadenosine
  modified_base 25: mod_base = OTHER; note = 2'-fluoroadenosine
  modified_base 26: mod_base = OTHER; note = 2'-fluorouridine phosphorothiorate
  modified_base 27: mod_base = OTHER; note = Cytosine phosphorothiorate
  modified_base 45: mod_base = OTHER; note = Guanosine phosphorothiorate
  modified_base 47: mod_base = OTHER; note = Cytosine phosphorothiorate
  modified_base 54: mod_base = OTHER; note = 2'-fluorouridine
  modified_base 55: mod_base = OTHER; note = 2'-Omethylcytosine phosphorothiorate
  modified_base 68: mod_base = OTHER; note = Adenosine phosphorothiorate
  modified_base 74: mod_base = OTHER; note = 2'-Omethylcytosine

SEQ ID NO: 7920 - RNA, 76 nt, synthetic construct; identical to SEQ ID NO: 625
  source 1..76: mol_type = other RNA
  modified_base 1: mod_base = OTHER; note = 2'-Omethylguanosine
  modified_base 4: mod_base = OTHER; note = 2'-fluorouridine
  modified_base 8: mod_base = OTHER; note = Uridine phosphorothiorate
  modified_base 11: mod_base = OTHER; note = 2'-fluorocytosine
  modified_base 14: mod_base = OTHER; note = 2'-Omethyladenosine
  modified_base 20: mod_base = OTHER; note = 2'-Omethyluridine
  modified_base 24: mod_base = OTHER; note = Guanosine phosphorothiorate
  modified_base 25: mod_base = OTHER; note = 2'-Omethylcytosine
  modified_base 26: mod_base = OTHER; note = 2'-fluoroadenosine
  modified_base 28: mod_base = OTHER; note = 2'-fluorouridine
  modified_base 29: mod_base = OTHER; note = 2'-Omethylguanosine
  modified_base 30: mod_base = OTHER; note = 2'-Omethylguanosine
  modified_base 31: mod_base = OTHER; note = 2'-fluoroadenosine
  modified_base 34: mod_base = OTHER; note = 2'-fluorouridine phosphorothiorate
  modified_base 38: mod_base = OTHER; note = 2'-fluoroadenosine
  modified_base 39: mod_base = OTHER; note = Uridine phosphorothiorate
  modified_base 40: mod_base = OTHER; note = 2'-Omethyluridine
  modified_base 44: mod_base = OTHER; note = 2'-fluoroadenosine
  modified_base 47: mod_base = OTHER; note = 2'-Omethyluridine
  modified_base 51: mod_base = OTHER; note = Guanosine phosphorothiorate
  modified_base 52: mod_base = OTHER; note = 2'-Omethylguanosine phosphorothiorate
  modified_base 54: mod_base = OTHER; note = 2'-Omethyluridine
  modified_base 56: mod_base = OTHER; note = 2'-fluorocytosine
  modified_base 57: mod_base = OTHER; note = 2'-fluoroguanosine
  modified_base 59: mod_base = OTHER; note = 2'-fluoroguanosine phosphorothiorate
  modified_base 60: mod_base = OTHER; note = 2'-Omethyluridine
  modified_base 61: mod_base = OTHER; note = 2'-Omethylcytosine
  modified_base 63: mod_base = OTHER; note = 2'-fluorocytosine
  modified_base 64: mod_base = OTHER; note = 2'-Omethylguanosine
  modified_base 66: mod_base = OTHER; note = 2'-fluorocytosine
  modified_base 69: mod_base = OTHER; note = Adenosine phosphorothiorate
  modified_base 70: mod_base = OTHER; note = 2'-fluoroguanosine
  modified_base 71: mod_base = OTHER; note = 2'-Omethyluridine
  modified_base 73: mod_base = OTHER; note = 2'-Omethylguanosine phosphorothiorate
  modified_base 74: mod_base = OTHER; note = 2'-fluorocytosine

SEQ ID NO: 7921 - RNA, 75 nt, synthetic construct; identical to SEQ ID NO: 3306
  source 1..75: mol_type = other RNA
  modified_base 1: mod_base = OTHER; note = 2'-Omethylguanosine
  modified_base 27: mod_base = OTHER; note = 2'-Omethylcytosine
  modified_base 28: mod_base = OTHER; note = 2'-Omethyluridine
  modified_base 29: mod_base = OTHER; note = 2'-Omethylguanosine
  modified_base 39: mod_base = OTHER; note = 2'-fluorocytosine
  modified_base 40: mod_base = OTHER; note = 2'-fluoroadenosine
  modified_base 41: mod_base = OTHER; note = 2'-Omethylguanosine phosphorothiorate
  modified_base 42: mod_base = OTHER; note = 2'-Omethyladenosine
  modified_base 72: mod_base = OTHER; note = 2'-Omethyladenosine

SEQ ID NO: 7922 - RNA, 76 nt, synthetic construct; identical to SEQ ID NO: 625
  source 1..76: mol_type = other RNA
  modified_base 1: mod_base = OTHER; note = 2'-Omethylguanosine phosphorothiorate
  modified_base 2: mod_base = OTHER; note = 2'-Omethylguanosine
  modified_base 3: mod_base = OTHER; note = 2'-Omethylcytosine
  modified_base 4: mod_base = OTHER; note = 2'-Omethyluridine
  modified_base 5: mod_base = OTHER; note = 2'-Omethylcytosine
  modified_base 6: mod_base = OTHER; note = 2'-Omethylcytosine
  modified_base 10: mod_base = OTHER; note = 2'-Omethylguanosine
  modified_base 13: mod_base = OTHER; note = 2'-Omethylcytosine
  modified_base 14: mod_base = OTHER; note = 2'-Omethyladenosine
  modified_base 15: mod_base = OTHER; note = 2'-fluoroadenosine
  modified_base 16: mod_base = OTHER; note = 2'-Omethyluridine
  modified_base 17: mod_base = OTHER; note = 2'-Omethylguanosine
  modified_base 18: mod_base = OTHER; note = 2'-Omethylguanosine
  modified_base 19: mod_base = OTHER; note = Adenosine phosphorothiorate
  modified_base 20: mod_base = OTHER; note = 2'-Omethyluridine
  modified_base 25: mod_base = OTHER; note = 2'-Omethylcytosine
  modified_base 29: mod_base = OTHER; note = 2'-Omethylguanosine
  modified_base 33: mod_base = OTHER; note = 2'-fluorouridine
  modified_base 35: mod_base = OTHER; note = Cytosine phosphorothiorate
  modified_base 37: mod_base = OTHER; note = Adenosine phosphorothiorate
  modified_base 38: mod_base = OTHER; note = Adenosine phosphorothiorate
  modified_base 40: mod_base = OTHER; note = 2'-fluorouridine
  modified_base 41: mod_base = OTHER; note = 2'-Omethylcytosine
  modified_base 42: mod_base = OTHER; note = 2'-Omethyladenosine
  modified_base 43: mod_base = OTHER; note = 2'-Omethyladenosine
  modified_base 44: mod_base = OTHER; note = 2'-fluoroadenosine
  modified_base 46: mod_base = OTHER; note = Guanosine phosphorothiorate
  modified_base 49: mod_base = OTHER; note = 2'-Omethylcytosine
  modified_base 50: mod_base = OTHER; note = 2'-Omethylcytosine
  modified_base 51: mod_base = OTHER; note = 2'-Omethylguanosine
  modified_base 52: mod_base = OTHER; note = 2'-Omethylguanosine
  modified_base 53: mod_base = OTHER; note = 2'-Omethylguanosine
  modified_base 54: mod_base = OTHER; note = Uridine phosphorothiorate
  modified_base 55: mod_base = OTHER; note = Uridine phosphorothiorate
  modified_base 56: mod_base = OTHER; note = 2'-Omethylcytosine
  modified_base 57: mod_base = OTHER; note = Guanosine phosphorothiorate
  modified_base 61: mod_base = OTHER; note = 2'-Omethylcytosine
  modified_base 62: mod_base = OTHER; note = 2'-Omethylcytosine
  modified_base 63: mod_base = OTHER; note = 2'-fluorocytosine
  modified_base 64: mod_base = OTHER; note = 2'-Omethylguanosine
  modified_base 65: mod_base = OTHER; note = 2'-Omethylguanosine
  modified_base 66: mod_base = OTHER; note = 2'-Omethylcytosine
  modified_base 67: mod_base = OTHER; note = 2'-Omethylguanosine
  modified_base 68: mod_base = OTHER; note = 2'-Omethylguanosine
  modified_base 69: mod_base = OTHER; note = 2'-fluoroadenosine
  modified_base 70: mod_base = OTHER; note = 2'-fluoroguanosine
  modified_base 71: mod_base = OTHER; note = 2'-Omethyluridine
  modified_base 73: mod_base = OTHER; note = 2'-Omethylguanosine
  modified_base 75: mod_base = OTHER; note = 2'-fluorocytosine phosphorothiorate

SEQ ID NO: 7923 - RNA, 85 nt, synthetic construct; identical to SEQ ID NO: 3297
  source 1..85: mol_type = other RNA
  modified_base 1: mod_base = OTHER; note = 2'-Omethylguanosine phosphorothiorate
  modified_base 2: mod_base = OTHER; note = 2'-Omethylcytosine phosphorothiorate
  modified_base 9: mod_base = OTHER; note = Guanosine phosphorothiorate
  modified_base 10: mod_base = OTHER; note = 2'-fluoroguanosine
  modified_base 29: mod_base = OTHER; note = Guanosine phosphorothiorate
  modified_base 30: mod_base = OTHER; note = 2'-Omethylguanosine
  modified_base 73: mod_base = OTHER; note = Guanosine phosphorothiorate
  modified_base 83: mod_base = OTHER; note = Cytosine phosphorothiorate
  modified_base 84: mod_base = OTHER; note = 2'-Omethylcytosine

SEQ ID NO: 7924 - RNA, 76 nt, synthetic construct; identical to SEQ ID NO: 3295
  source 1..76: mol_type = other RNA
  modified_base 1: mod_base = OTHER; note = 2'-Omethylcytosine
  modified_base 2: mod_base = OTHER; note = 2'-Omethylcytosine
  modified_base 3: mod_base = OTHER; note = 2'-Omethyluridine phosphorothiorate
  modified_base 4: mod_base = OTHER; note = 2'-Omethyluridine phosphorothiorate
  modified_base 6: mod_base = OTHER; note = 2'-fluoroguanosine phosphorothiorate
  modified_base 9: mod_base = OTHER; note = 2'-Omethyladenosine
  modified_base 11: mod_base = OTHER; note = Cytosine phosphorothiorate
  modified_base 17: mod_base = OTHER; note = 2'-Omethyluridine
  modified_base 20: mod_base = OTHER; note = 2'-fluorouridine
  modified_base 26: mod_base = OTHER; note = Guanosine phosphorothiorate
  modified_base 31: mod_base = OTHER; note = 2'-fluoroadenosine phosphorothiorate
  modified_base 35: mod_base = OTHER; note = 2'-fluorouridine phosphorothiorate
  modified_base 38: mod_base = OTHER; note = Adenosine phosphorothiorate
  modified_base 39: mod_base = OTHER; note = 2'-Omethyluridine phosphorothiorate
  modified_base 48: mod_base = OTHER; note = 2'-Omethylcytosine
  modified_base 52: mod_base = OTHER; note = 2'-Omethylguanosine
  modified_base 53: mod_base = OTHER; note = 2'-fluoroguanosine phosphorothiorate
  modified_base 58: mod_base = OTHER; note = Adenosine phosphorothiorate
  modified_base 60: mod_base = OTHER; note = 2'-fluorouridine phosphorothiorate
  modified_base 67: mod_base = OTHER; note = 2'-fluorocytosine
  modified_base 74: mod_base = OTHER; note = Cytosine phosphorothiorate
  modified_base 75: mod_base = OTHER; note = 2'-fluorocytosine
  modified_base 76: mod_base = OTHER; note = 2'-Omethyladenosine

SEQ ID NO: 7925 - RNA, 75 nt, synthetic construct; identical to SEQ ID NO: 3299
  source 1..75: mol_type = other RNA
  modified_base 1: mod_base = OTHER; note = 2'-Omethylcytosine phosphorothiorate
  modified_base 11: mod_base = OTHER; note = Uridine phosphorothiorate
  modified_base 17: mod_base = OTHER; note = 2'-fluoroguanosine phosphorothiorate
  modified_base 18: mod_base = OTHER; note = 2'-fluoroguanosine
  modified_base 25: mod_base = OTHER; note = Adenosine phosphorothiorate
  modified_base 26: mod_base = OTHER; note = Uridine phosphorothiorate
  modified_base 28: mod_base = OTHER; note = 2'-fluoroadenosine
  modified_base 36: mod_base = OTHER; note = 2'-fluoroadenosine
  modified_base 46: mod_base = OTHER; note = 2'-fluorouridine
  modified_base 63: mod_base = OTHER; note = 2'-fluorouridine phosphorothiorate
  modified_base 74: mod_base = OTHER; note = 2'-Omethylcytosine phosphorothiorate

SEQ ID NO: 7926 - RNA, 76 nt, synthetic construct; identical to SEQ ID NO: 625
  source 1..76: mol_type = other RNA
  modified_base 4: mod_base = OTHER; note = 2'-Omethyluridine
  modified_base 5: mod_base = OTHER; note = 2'-Omethylcytosine phosphorothiorate
  modified_base 6: mod_base = OTHER; note = 2'-fluorocytosine
  modified_base 7: mod_base = OTHER; note = Guanosine phosphorothiorate
  modified_base 12: mod_base = OTHER; note = 2'-Omethylguanosine
  modified_base 14: mod_base = OTHER; note = 2'-Omethyladenosine
  modified_base 18: mod_base = OTHER; note = 2'-fluoroguanosine
  modified_base 19: mod_base = OTHER; note = Adenosine phosphorothiorate
  modified_base 20: mod_base = OTHER; note = 2'-fluorouridine
  modified_base 23: mod_base = OTHER; note = 2'-fluorocytosine
  modified_base 24: mod_base = OTHER; note = 2'-Omethylguanosine
  modified_base 28: mod_base = OTHER; note = 2'-fluorouridine
  modified_base 31: mod_base = OTHER; note = 2'-fluoroadenosine
  modified_base 33: mod_base = OTHER; note = 2'-fluorouridine phosphorothiorate
  modified_base 36: mod_base = OTHER; note = Adenosine phosphorothiorate
  modified_base 39: mod_base = OTHER; note = 2'-fluorouridine
  modified_base 42: mod_base = OTHER; note = 2'-Omethyladenosine
  modified_base 45: mod_base = OTHER; note = 2'-fluoroguanosine
  modified_base 46: mod_base = OTHER; note = 2'-Omethylguanosine
  modified_base 53: mod_base = OTHER; note = 2'-Omethylguanosine
  modified_base 54: mod_base = OTHER; note = 2'-fluorouridine
  modified_base 56: mod_base = OTHER; note = 2'-fluorocytosine
  modified_base 57: mod_base = OTHER; note = 2'-Omethylguanosine phosphorothiorate
  modified_base 59: mod_base = OTHER; note = Guanosine phosphorothiorate
  modified_base 64: mod_base = OTHER; note = 2'-Omethylguanosine
  modified_base 65: mod_base = OTHER; note = Guanosine phosphorothiorate
  modified_base 66: mod_base = OTHER; note = Cytosine phosphorothiorate
  modified_base 67: mod_base = OTHER; note = 2'-Omethylguanosine
  modified_base 72: mod_base = OTHER; note = 2'-fluorocytosine
  modified_base 74: mod_base = OTHER; note = 2'-fluorocytosine

SEQ ID NO: 7927 - RNA, 76 nt, synthetic construct; identical to SEQ ID NO: 625
  source 1..76: mol_type = other RNA
  modified_base 2: mod_base = OTHER; note = 2'-fluoroguanosine
  modified_base 4: mod_base = OTHER; note = 2'-Omethyluridine
  modified_base 5: mod_base = OTHER; note = Cytosine phosphorothiorate
  modified_base 12: mod_base = OTHER; note = 2'-fluoroguanosine
  modified_base 17: mod_base = OTHER; note = 2'-Omethylguanosine phosphorothiorate
  modified_base 18: mod_base = OTHER; note = Guanosine phosphorothiorate
  modified_base 20: mod_base = OTHER; note = 2'-fluorouridine phosphorothiorate
  modified_base 24: mod_base = OTHER; note = 2'-Omethylguanosine
  modified_base 25: mod_base = OTHER; note = 2'-Omethylcytosine
  modified_base 27: mod_base = OTHER; note = 2'-Omethyluridine phosphorothiorate
  modified_base 34: mod_base = OTHER; note = 2'-Omethyluridine
  modified_base 36: mod_base = OTHER; note = Adenosine phosphorothiorate
  modified_base 38: mod_base = OTHER; note = 2'-fluoroadenosine
  modified_base 41: mod_base = OTHER; note = 2'-Omethylcytosine
  modified_base 42: mod_base = OTHER; note = 2'-fluoroadenosine phosphorothiorate
  modified_base 48: mod_base = OTHER; note = 2'-fluorouridine
  modified_base 49: mod_base = OTHER; note = 2'-fluorocytosine
  modified_base 50: mod_base = OTHER; note = 2'-fluorocytosine
  modified_base 54: mod_base = OTHER; note = 2'-fluorouridine
  modified_base 55: mod_base = OTHER; note = Uridine phosphorothiorate
  modified_base 56: mod_base = OTHER; note = 2'-fluorocytosine phosphorothiorate
  modified_base 57: mod_base = OTHER; note = 2'-fluoroguanosine
  modified_base 63: mod_base = OTHER; note = 2'-fluorocytosine
  modified_base 64: mod_base = OTHER; note = Guanosine phosphorothiorate
  modified_base 65: mod_base = OTHER; note = 2'-Omethylguanosine
  modified_base 67: mod_base = OTHER; note = Guanosine phosphorothiorate
  modified_base 68: mod_base = OTHER; note = 2'-fluoroguanosine
  modified_base 70: mod_base = OTHER; note = 2'-Omethylguanosine
  modified_base 71: mod_base = OTHER; note = 2'-fluorouridine
  modified_base 72: mod_base = OTHER; note = 2'-fluorocytosine
  modified_base 76: mod_base = OTHER; note = 2'-fluoroadenosine

SEQ ID NO: 7928 - DNA, 76 bp, synthetic construct; identical to SEQ ID NO: 1924
  source 1..76: mol_type = other DNA
  modified_base 1: mod_base = OTHER; note = 2'-Omethylguanosine phosphorothiorate
  modified_base 2: mod_base = OTHER; note = 2'-Omethylguanosine phosphorothiorate
  modified_base 3: mod_base = OTHER; note = 2'-O-(2-Methoxyethyl) 5-methylcytosine
  modified_base 4: mod_base = OTHER; note = 2'-Omethyluridine
  modified_base 6: mod_base = OTHER; note = 2'-Omethylcytosine
  modified_base 10: mod_base = OTHER; note = 2'-Omethylguanosine
  modified_base 11: mod_base = OTHER; note = Cytosine phosphorothiorate
  modified_base 12: mod_base = OTHER; note = 2'-Omethylguanosine
  modified_base 14: mod_base = OTHER; note = 2'-Omethyladenosine
  modified_base 16: mod_base = OTHER; note = 2'-fluorouridine
  modified_base 18: mod_base = OTHER; note = Guanosine phosphorothiorate
  modified_base 23: mod_base = OTHER; note = Cytosine phosphorothiorate
  modified_base 30: mod_base = OTHER; note = 2'-O-(2-Methoxyethyl) guanosine
  modified_base 31: mod_base = OTHER; note = 2'-fluoroadenosine
  modified_base 32: mod_base = OTHER; note = Cytosine phosphorothiorate
  modified_base 33: mod_base = OTHER; note = 2'-Omethyluridine
  modified_base 35: mod_base = OTHER; note = Cytosine phosphorothiorate
  modified_base 41: mod_base = OTHER; note = 2'-fluorocytosine
  modified_base 43: mod_base = OTHER; note = deoxyadenosine phosphorothiorate
  modified_base 44: mod_base = OTHER; note = 2'-fluoroadenosine phosphorothiorate
  modified_base 45: mod_base = OTHER; note = 2'-Omethylguanosine
  modified_base 49: mod_base = OTHER; note = 2'-Omethylcytosine
  modified_base 50: mod_base = OTHER; note = Cytosine phosphorothiorate
  modified_base 55: mod_base = OTHER; note = Uridine phosphorothiorate
  modified_base 65: mod_base = OTHER; note = 2'-Omethylguanosine
  modified_base 67: mod_base = OTHER; note = Guanosine phosphorothiorate
  modified_base 68: mod_base = OTHER; note = 2'-fluoroguanosine phosphorothiorate
  modified_base 69: mod_base = OTHER; note = 2'-fluoroadenosine
  modified_base 72: mod_base = OTHER; note = Cytosine phosphorothiorate
  misc_feature 1..18: note = RNA
  misc_feature 19: note = DNA
  misc_feature 20..21: note = RNA
  misc_feature 22: note = DNA
  misc_feature 23: note = RNA
  misc_feature 24: note = DNA
  misc_feature 25..35: note = RNA
  misc_feature 36: note = DNA
  misc_feature 37..41: note = RNA
  misc_feature 42..43: note = DNA
  misc_feature 44..47: note = RNA
  misc_feature 48: note = DNA
  misc_feature 49..55: note = RNA
  misc_feature 56: note = DNA
  misc_feature 57..76: note = RNA

SEQ ID NO: 7929 - RNA, 85 nt, synthetic construct; identical to SEQ ID NO: 3297
  source 1..85: mol_type = other RNA
  modified_base 1: mod_base = OTHER; note = 2'-Omethylguanosine phosphorothiorate
  modified_base 2: mod_base = OTHER; note = 2'-Omethylcytosine phosphorothiorate
  modified_base 3: mod_base = OTHER; note = 2'-Omethyluridine
  modified_base 4: mod_base = OTHER; note = 2'-Omethylguanosine
  modified_base 5: mod_base = OTHER; note = 2'-Omethyluridine
  modified_base 6: mod_base = OTHER; note = 2'-Omethylguanosine
  modified_base 10: mod_base = OTHER; note = 2'-Omethylguanosine
  modified_base 11: mod_base = OTHER; note = 2'-Omethylcytosine
  modified_base 12: mod_base = OTHER; note = 2'-Omethylcytosine
  modified_base 13: mod_base = OTHER; note = 2'-Omethylguanosine
  modified_base 17: mod_base = OTHER; note = 2'-Omethylguanosine
  modified_base 18: mod_base = OTHER; note = 2'-Omethylguanosine
  modified_base 22: mod_base = OTHER; note = 2'-Omethyladenosine
  modified_base 23: mod_base = OTHER; note = 2'-Omethylguanosine
  modified_base 24: mod_base = OTHER; note = 2'-Omethylguanosine
  modified_base 25: mod_base = OTHER; note = 2'-Omethylcytosine
  modified_base 33: mod_base = OTHER; note = 2'-fluorouridine
  modified_base 34: mod_base = OTHER; note = 2'-Omethyluridine
  modified_base 35: mod_base = OTHER; note = Cytosine phosphorothiorate
  modified_base 37: mod_base = OTHER; note = Adenosine phosphorothiorate
  modified_base 38: mod_base = OTHER; note = Adenosine phosphorothiorate
  modified_base 41: mod_base = OTHER; note = 2'-fluorocytosine
  modified_base 42: mod_base = OTHER; note = 2'-Omethyladenosine
  modified_base 43: mod_base = OTHER; note = 2'-Omethyladenosine
  modified_base 44: mod_base = OTHER; note = 2'-fluorouridine
  modified_base 58: mod_base = OTHER; note = 2'-Omethylguanosine
  modified_base 59: mod_base = OTHER; note = 2'-Omethylcytosine
  modified_base 60: mod_base = OTHER; note = 2'-Omethyladenosine
  modified_base 61: mod_base = OTHER; note = 2'-Omethylguanosine
  modified_base 62: mod_base = OTHER; note = 2'-Omethylguanosine
  modified_base 63: mod_base = OTHER; note = Uridine phosphorothiorate
  modified_base 64: mod_base = OTHER; note = Uridine phosphorothiorate
  modified_base 70: mod_base = OTHER; note = 2'-Omethylcytosine
  modified_base 71: mod_base = OTHER; note = 2'-Omethylcytosine
  modified_base 72: mod_base = OTHER; note = 2'-fluorouridine
  modified_base 73: mod_base = OTHER; note = 2'-Omethylguanosine
  modified_base 74: mod_base = OTHER; note = 2'-Omethylcytosine
  modified_base 75: mod_base = OTHER; note = 2'-Omethyluridine
  modified_base 76: mod_base = OTHER; note = 2'-Omethylcytosine
  modified_base 77: mod_base = OTHER; note = 2'-Omethyladenosine
  modified_base 82: mod_base = OTHER; note = 2'-Omethylguanosine

SEQ ID NO: 7930 - DNA, 76 bp, synthetic construct; identical to SEQ ID NO: 1924
  source 1..76: mol_type = other DNA
  modified_base 1: mod_base = OTHER; note = 2'-Omethylguanosine
  modified_base 2: mod_base = OTHER; note = deoxyguanosine phosphorothiorate
  modified_base 3: mod_base = OTHER; note = 2'-O-(2-Methoxyethyl) 5-methylcytosine
  modified_base 10: mod_base = OTHER; note = Guanosine phosphorothiorate
  modified_base 11: mod_base = OTHER; note = 2'-O-(2-Methoxyethyl) 5-methylcytosine phosphorothiorate
  modified_base 16: mod_base = OTHER; note = 2'-O-(2-Methoxyethyl) thymine phosphorothiorate
  modified_base 18: mod_base = OTHER; note = 2'-Omethylguanosine
  modified_base 20: mod_base = OTHER; note = Uridine phosphorothiorate
  modified_base 21: mod_base = OTHER; note = 2'-fluoroadenosine
  modified_base 23: mod_base = OTHER; note = Cytosine phosphorothiorate
  modified_base 37: mod_base = OTHER; note = Adenosine phosphorothiorate
  modified_base 39: mod_base = OTHER; note = Uridine phosphorothiorate
  modified_base 41: mod_base = OTHER; note = 2'-fluorocytosine
  modified_base 42: mod_base = OTHER; note = Adenosine phosphorothiorate
  modified_base 44: mod_base = OTHER; note = 2'-Omethyladenosine
  modified_base 45: mod_base = OTHER; note = Guanosine phosphorothiorate
  modified_base 52: mod_base = OTHER; note = 2'-fluoroguanosine
  modified_base 53: mod_base = OTHER; note = 2'-fluoroguanosine
  modified_base 55: mod_base = OTHER; note = Uridine phosphorothiorate
  modified_base 56: mod_base = OTHER; note = 2'-O-(2-Methoxyethyl) 5-methylcytosine phosphorothiorate
  modified_base 57: mod_base = OTHER; note = 2'-Omethylguanosine
  modified_base 60: mod_base = OTHER; note = Uridine phosphorothiorate
  modified_base 61: mod_base = OTHER; note = 2'-Omethylcytosine phosphorothiorate
  modified_base 62: mod_base = OTHER; note = 2'-O-(2-Methoxyethyl) 5-methylcytosine
  modified_base 63: mod_base = OTHER; note = 2'-Omethylcytosine
  modified_base 64: mod_base = OTHER; note = 2'-Omethylguanosine
  modified_base 74: mod_base = OTHER; note = 2'-fluorocytosine phosphorothiorate
  modified_base 75: mod_base = OTHER; note = 2'-Omethylcytosine phosphorothiorate
  modified_base 76: mod_base = OTHER; note = 2'-Omethyladenosine
  misc_feature 1: note = RNA
  misc_feature 2: note = DNA
  misc_feature 3..14: note = RNA
  misc_feature 15: note = DNA
  misc_feature 16..21: note = RNA
  misc_feature 22: note = DNA
  misc_feature 23..24: note = RNA
  misc_feature 25: note = DNA
  misc_feature 26..42: note = RNA
  misc_feature 43: note = DNA
  misc_feature 44..65: note = RNA
  misc_feature 66: note = DNA
  misc_feature 67..76: note = RNA

SEQ ID NO: 7931 - RNA, 75 nt, synthetic construct; identical to SEQ ID NO: 1045
  source 1..75: mol_type = other RNA
  modified_base 1: mod_base = OTHER; note = 2'-Omethylguanosine
  modified_base 17: mod_base = OTHER; note = 2'-Omethylguanosine
  modified_base 18: mod_base = OTHER; note = 2'-Omethylguanosine
  modified_base 33: mod_base = OTHER; note = Uridine phosphorothiorate
  modified_base 34: mod_base = OTHER; note = 2'-Omethyluridine
  modified_base 35: mod_base = OTHER; note = Uridine phosphorothiorate
  modified_base 36: mod_base = OTHER; note = Adenosine phosphorothiorate
  modified_base 37: mod_base = OTHER; note = Adenosine phosphorothiorate
  modified_base 38: mod_base = OTHER; note = Adenosine phosphorothiorate
  modified_base 49: mod_base = OTHER; note = 2'-Omethylcytosine
  modified_base 51: mod_base = OTHER; note = 2'-Omethyladenosine
  modified_base 72: mod_base = OTHER; note = 2'-Omethyluridine

SEQ ID NO: 7932 - RNA, 76 nt, synthetic construct; identical to SEQ ID NO: 625
  source 1..76: mol_type = other RNA
  modified_base 3: mod_base = OTHER; note = 2'-fluorocytosine
  modified_base 4: mod_base = OTHER; note = 2'-Omethyluridine
  modified_base 5: mod_base = OTHER; note = 2'-fluorocytosine
  modified_base 6: mod_base = OTHER; note = Cytosine phosphorothiorate
  modified_base 7: mod_base = OTHER; note = Guanosine phosphorothiorate
  modified_base 11: mod_base = OTHER; note = Cytosine phosphorothiorate
  modified_base 12: mod_base = OTHER; note = 2'-Omethylguanosine
  modified_base 14: mod_base = OTHER; note = 2'-Omethyladenosine
  modified_base 17: mod_base = OTHER; note = Guanosine phosphorothiorate
  modified_base 18: mod_base = OTHER; note = 2'-Omethylguanosine
  modified_base 22: mod_base = OTHER; note = 2'-Omethylguanosine
  modified_base 24: mod_base = OTHER; note = 2'-fluoroguanosine
  modified_base 26: mod_base = OTHER; note = 2'-fluoroadenosine
  modified_base 29: mod_base = OTHER; note = 2'-Omethylguanosine
  modified_base 30: mod_base = OTHER; note = 2'-fluoroguanosine
  modified_base 33: mod_base = OTHER; note = 2'-fluorouridine
  modified_base 34: mod_base = OTHER; note = 2'-fluorouridine
  modified_base 36: mod_base = OTHER; note = Adenosine phosphorothiorate
  modified_base 37: mod_base = OTHER; note = Adenosine phosphorothiorate
  modified_base 39: mod_base = OTHER; note = 2'-fluorouridine
  modified_base 43: mod_base = OTHER; note = 2'-fluoroadenosine
  modified_base 44: mod_base = OTHER; note = 2'-fluoroadenosine
  modified_base 45: mod_base = OTHER; note = 2'-Omethylguanosine
  modified_base 48: mod_base = OTHER; note = 2'-fluorouridine
  modified_base 54: mod_base = OTHER; note = 2'-fluorouridine
  modified_base 56: mod_base = OTHER; note = 2'-Omethylcytosine
  modified_base 57: mod_base = OTHER; note = 2'-fluoroguanosine
  modified_base 58: mod_base = OTHER; note = Adenosine phosphorothiorate
  modified_base 59: mod_base = OTHER; note = 2'-fluoroguanosine
  modified_base 65: mod_base = OTHER; note = Guanosine phosphorothiorate
  modified_base 68: mod_base = OTHER; note = Guanosine phosphorothiorate
  modified_base 69: mod_base = OTHER; note = Adenosine phosphorothiorate
  modified_base 70: mod_base = OTHER; note = 2'-Omethylguanosine
  modified_base 71: mod_base = OTHER; note = 2'-Omethyluridine
  modified_base 72: mod_base = OTHER; note = 2'-Omethylcytosine
  modified_base 75: mod_base = OTHER; note = 2'-fluorocytosine

SEQ ID NO: 7933 - RNA, 86 nt, synthetic construct; identical to SEQ ID NO: 3290
  source 1..86: mol_type = other RNA
  modified_base 1: mod_base = OTHER; note = 2'-Omethyladenosine
  modified_base 57: mod_base = OTHER; note = 2'-fluoroguanosine
  modified_base 58: mod_base = OTHER; note = 2'-fluorocytosine
  modified_base 83: mod_base = OTHER; note = 2'-Omethyladenosine

SEQ ID NO: 7934 - RNA, 75 nt, synthetic construct; identical to SEQ ID NO: 1045
  source 1..75: mol_type = other RNA
  modified_base 1: mod_base = OTHER; note = 2'-Omethylguanosine
  modified_base 2: mod_base = OTHER; note = 2'-fluoroguanosine phosphorothiorate
  modified_base 6: mod_base = OTHER; note = 2'-Omethylcytosine
  modified_base 10: mod_base = OTHER; note = 2'-fluoroguanosine
  modified_base 11: mod_base = OTHER; note = Uridine phosphorothiorate
  modified_base 12: mod_base = OTHER; note = 2'-fluoroguanosine phosphorothiorate
  modified_base 16: mod_base = OTHER; note = 2'-fluorouridine phosphorothiorate
  modified_base 21: mod_base = OTHER; note = Adenosine phosphorothiorate
  modified_base 22: mod_base = OTHER; note = 2'-fluoroguanosine
  modified_base 24: mod_base = OTHER; note = 2'-fluoroadenosine
  modified_base 25: mod_base = OTHER; note = Cytosine phosphorothiorate
  modified_base 26: mod_base = OTHER; note = 2'-fluorouridine
  modified_base 27: mod_base = OTHER; note = 2'-fluorocytosine
  modified_base 44: mod_base = OTHER; note = 2'-fluorocytosine
  modified_base 56: mod_base = OTHER; note = 2'-Omethylguanosine
  modified_base 60: mod_base = OTHER; note = Cytosine phosphorothiorate
  modified_base 61: mod_base = OTHER; note = 2'-fluorouridine
  modified_base 67: mod_base = OTHER; note = Guanosine phosphorothiorate
  modified_base 68: mod_base = OTHER; note = 2'-fluoroadenosine
  modified_base 74: mod_base = OTHER; note = 2'-fluorocytosine

SEQ ID NO: 7935 - RNA, 76 nt, synthetic construct; identical to SEQ ID NO: 3419
  source 1..76: mol_type = other RNA
  modified_base 1: mod_base = OTHER; note = 2'-Omethylguanosine
  modified_base 2: mod_base = OTHER; note = 2'-Omethylguanosine
  modified_base 3: mod_base = OTHER; note = 2'-Omethylcytosine
  modified_base 4: mod_base = OTHER; note = 2'-Omethyluridine
  modified_base 5: mod_base = OTHER; note = 2'-Omethylcytosine
  modified_base 6: mod_base = OTHER; note = 2'-Omethylcytosine
  modified_base 14: mod_base = OTHER; note = 2'-Omethyladenosine
  modified_base 15: mod_base = OTHER; note = 2'-Omethyladenosine
  modified_base 16: mod_base = OTHER; note = 2'-Omethyluridine
  modified_base 17: mod_base = OTHER; note = 2'-Omethylguanosine
  modified_base 18: mod_base = OTHER; note = 2'-Omethylguanosine
  modified_base 20: mod_base = OTHER; note = 2'-Omethyluridine
  modified_base 25: mod_base = OTHER; note = 2'-Omethylcytosine
  modified_base 41: mod_base = OTHER; note = 2'-Omethylguanosine
  modified_base 42: mod_base = OTHER; note = 2'-Omethylguanosine
  modified_base 43: mod_base = OTHER; note = 2'-Omethyluridine
  modified_base 44: mod_base = OTHER; note = 2'-Omethyladenosine
  modified_base 49: mod_base = OTHER; note = 2'-Omethylcytosine
  modified_base 50: mod_base = OTHER; note = 2'-Omethylcytosine
  modified_base 52: mod_base = OTHER; note = 2'-Omethylguanosine
  modified_base 54: mod_base = OTHER; note = 2'-Omethyluridine
  modified_base 55: mod_base = OTHER; note = Uridine phosphorothiorate
  modified_base 56: mod_base = OTHER; note = 2'-Omethylcytosine
  modified_base 57: mod_base = OTHER; note = 2'-fluoroguanosine
  modified_base 59: mod_base = OTHER; note = 2'-Omethylguanosine
  modified_base 61: mod_base = OTHER; note = 2'-Omethylcytosine
  modified_base 62: mod_base = OTHER; note = 2'-Omethylcytosine
  modified_base 63: mod_base = OTHER; note = 2'-fluorocytosine
  modified_base 64: mod_base = OTHER; note = 2'-Omethylguanosine
  modified_base 65: mod_base = OTHER; note = 2'-Omethylguanosine
  modified_base 73: mod_base = OTHER; note = 2'-Omethylguanosine

SEQ ID NO: 7936 - RNA, 74 nt, synthetic construct; identical to SEQ ID NO: 766
  source 1..74: mol_type = other RNA
  modified_base 1: mod_base = OTHER; note = 2'-Omethylguanosine phosphorothiorate
  modified_base 2: mod_base = OTHER; note = 2'-Omethylguanosine
  modified_base 3: mod_base = OTHER; note = 2'-Omethylcytosine
  modified_base 4: mod_base = OTHER; note = 2'-Omethyluridine
  modified_base 5: mod_base = OTHER; note = 2'-Omethylcytosine
  modified_base 6: mod_base = OTHER; note = 2'-Omethylcytosine
  modified_base 10: mod_base = OTHER; note = 2'-Omethylguanosine
  modified_base 11: mod_base = OTHER; note = 2'-Omethylcytosine
  modified_base 12: mod_base = OTHER; note = 2'-Omethylguanosine
  modified_base 13: mod_base = OTHER; note = 2'-Omethylcytosine
  modified_base 16: mod_base = OTHER; note = 2'-Omethyluridine
  modified_base 17: mod_base = OTHER; note = 2'-Omethylguanosine
  modified_base 18: mod_base = OTHER; note = 2'-Omethylguanosine
  modified_base 20: mod_base = OTHER; note = 2'-Omethyluridine
  modified_base 22: mod_base = OTHER; note = 2'-Omethylguanosine
  modified_base 23: mod_base = OTHER; note = 2'-Omethylcytosine
  modified_base 24: mod_base = OTHER; note = 2'-Omethylguanosine
  modified_base 25: mod_base = OTHER; note = 2'-Omethylcytosine
  modified_base 33: mod_base = OTHER; note = 2'-fluorouridine
  modified_base 35: mod_base = OTHER; note = Cytosine phosphorothiorate
  modified_base 37: mod_base = OTHER; note = Adenosine phosphorothiorate
  modified_base 38: mod_base = OTHER; note = Adenosine phosphorothiorate
  modified_base 41: mod_base = OTHER; note = 2'-fluorocytosine
  modified_base 42: mod_base = OTHER; note = 2'-Omethyladenosine
  modified_base 43: mod_base = OTHER; note = 2'-Omethyladenosine
  modified_base 44: mod_base = OTHER; note = 2'-fluoroadenosine
  modified_base 49: mod_base = OTHER; note = 2'-Omethylcytosine
  modified_base 50: mod_base = OTHER; note = 2'-Omethylcytosine
  modified_base 52: mod_base = OTHER; note = 2'-Omethylguanosine
  modified_base 54: mod_base = OTHER; note = 2'-Omethyluridine
  modified_base 55: mod_base = OTHER; note = Uridine phosphorothiorate
  modified_base 56: mod_base = OTHER; note = 2'-Omethylcytosine
  modified_base 57: mod_base = OTHER; note = 2'-fluoroguanosine
  modified_base 59: mod_base = OTHER; note = 2'-Omethylguanosine
  modified_base 61: mod_base = OTHER; note = 2'-Omethylcytosine
  modified_base 65: mod_base = OTHER; note = 2'-Omethylguanosine
  modified_base 73: mod_base = OTHER; note = 2'-Omethylguanosine

SEQ ID NO: 7937 - RNA, 75 nt, synthetic construct; identical to SEQ ID NO: 3311
  source 1..75: mol_type = other RNA
  modified_base 1: mod_base = OTHER; note = 2'-Omethylguanosine phosphorothiorate
  modified_base 6: mod_base = OTHER; note = 2'-Omethylcytosine
  modified_base 13: mod_base = OTHER; note = 2'-Omethyluridine
  modified_base 19: mod_base = OTHER; note = 2'-fluorouridine phosphorothiorate
  modified_base 22: mod_base = OTHER; note = Guanosine phosphorothiorate
  modified_base 23: mod_base = OTHER; note = 2'-fluorocytosine
  modified_base 24: mod_base = OTHER; note = 2'-fluoroadenosine
  modified_base 33: mod_base = OTHER; note = 2'-fluorouridine
  modified_base 38: mod_base = OTHER; note = Adenosine phosphorothiorate
  modified_base 40: mod_base = OTHER; note = 2'-fluorocytosine phosphorothiorate
  modified_base 41: mod_base = OTHER; note = 2'-fluorocytosine
  modified_base 42: mod_base = OTHER; note = 2'-fluoroadenosine
  modified_base 49: mod_base = OTHER; note = Cytosine phosphorothiorate
  modified_base 52: mod_base = OTHER; note = 2'-fluoroguanosine
  modified_base 56: mod_base = OTHER; note = 2'-fluoroguanosine phosphorothiorate
  modified_base 57: mod_base = OTHER; note = 2'-Omethyladenosine
  modified_base 58: mod_base = OTHER; note = Guanosine phosphorothiorate
  modified_base 62: mod_base = OTHER; note = Cytosine phosphorothiorate
  modified_base 65: mod_base = OTHER; note = Uridine phosphorothiorate
  modified_base 68: mod_base = OTHER; note = 2'-fluoroadenosine
  modified_base 73: mod_base = OTHER; note = Cytosine phosphorothiorate
  modified_base 74: mod_base = OTHER; note = 2'-fluorocytosine phosphorothiorate

SEQ ID NO: 7938 - RNA, 76 nt, synthetic construct
  source 1..76: mol_type = other RNA
ggctccctggcgcaatggaaagcgcattggacttcaaattcaaaggttccgggttcgagtcccgggggagtcgcca

SEQ ID NO: 7939 - RNA, 85 nt, synthetic construct; identical to SEQ ID NO: 3288
  source 1..85: mol_type = other RNA
  modified_base 1: mod_base = OTHER; note = 2'-fluorocytosine phosphorothiorate
  modified_base 11: mod_base = OTHER; note = Cytosine phosphorothiorate
  modified_base 17: mod_base = OTHER; note = 2'-Omethylguanosine
  modified_base 26: mod_base = OTHER; note = 2'-Omethyluridine
  modified_base 47: mod_base = OTHER; note = 2'-Omethylcytosine
  modified_base 59: mod_base = OTHER; note = 2'-Omethyluridine
  modified_base 77: mod_base = OTHER; note = Cytosine phosphorothiorate
  modified_base 84: mod_base = OTHER; note = 2'-fluorocytosine

SEQ ID NO: 7940 - RNA, 76 nt, synthetic construct; identical to SEQ ID NO: 3289
  source 1..76: mol_type = other RNA
  modified_base 10: mod_base = OTHER; note = 2'-Omethylguanosine
  modified_base 11: mod_base = OTHER; note = 2'-Omethylcytosine
  modified_base 12: mod_base = OTHER; note = 2'-Omethyluridine
  modified_base 13: mod_base = OTHER; note = 2'-Omethylcytosine
  modified_base 22: mod_base = OTHER; note = 2'-Omethylguanosine
  modified_base 23: mod_base = OTHER; note = 2'-Omethyladenosine
  modified_base 24: mod_base = OTHER; note = 2'-Omethylguanosine
  modified_base 25: mod_base = OTHER; note = 2'-Omethylcytosine
  modified_base 49: mod_base = OTHER; note = 2'-Omethylcytosine
  modified_base 50: mod_base = OTHER; note = 2'-Omethyladenosine
  modified_base 51: mod_base = OTHER; note = 2'-Omethylguanosine
  modified_base 52: mod_base = OTHER; note = 2'-Omethylguanosine
  modified_base 53: mod_base = OTHER; note = 2'-Omethylguanosine

SEQ ID NO: 7941 - RNA, 75 nt, synthetic construct; identical to SEQ ID NO: 3311
  source 1..75: mol_type = other RNA
  modified_base 1: mod_base = OTHER; note = 2'-Omethylguanosine phosphorothiorate
  modified_base 9: mod_base = OTHER; note = Guanosine phosphorothiorate
  modified_base 10: mod_base = OTHER; note = Guanosine phosphorothiorate
  modified_base 29: mod_base = OTHER; note = 2'-Omethylguanosine
  modified_base 38: mod_base = OTHER; note = 2'-fluoroadenosine
  modified_base 49: mod_base = OTHER; note = 2'-fluorocytosine phosphorothiorate
  modified_base 55: mod_base = OTHER; note = 2'-fluorocytosine phosphorothiorate
  modified_base 67: mod_base = OTHER; note = Guanosine phosphorothiorate
  modified_base 73: mod_base = OTHER; note = Cytosine phosphorothiorate
  modified_base 74: mod_base = OTHER; note = 2'-Omethylcytosine

SEQ ID NO: 7942 - RNA, 75 nt, synthetic construct; identical to SEQ ID NO: 1045
  source 1..75: mol_type = other RNA
  modified_base 1: mod_base = OTHER; note = 2'-fluoroguanosine phosphorothiorate
  modified_base 11: mod_base = OTHER; note = Uridine phosphorothiorate
  modified_base 12: mod_base = OTHER; note = Guanosine phosphorothiorate
  modified_base 18: mod_base = OTHER; note = Guanosine phosphorothiorate
  modified_base 19: mod_base = OTHER; note = 2'-fluorouridine
  modified_base 24: mod_base = OTHER; note = 2'-fluoroadenosine
  modified_base 40: mod_base = OTHER; note = 2'-fluorocytosine
  modified_base 44: mod_base = OTHER; note = 2'-fluorocytosine
  modified_base 59: mod_base = OTHER; note = 2'-Omethyluridine
  modified_base 60: mod_base = OTHER; note = 2'-fluorocytosine
  modified_base 68: mod_base = OTHER; note = 2'-fluoroadenosine
  modified_base 73: mod_base = OTHER; note = Cytosine phosphorothiorate

SEQ ID NO: 7943 - RNA, 76 nt, synthetic construct; identical to SEQ ID NO: 625
  source 1..76: mol_type = other RNA
  modified_base 1: mod_base = OTHER; note = 2'-Omethylguanosine
  modified_base 3: mod_base = OTHER; note = 2'-Omethylcytosine
  modified_base 4: mod_base = OTHER; note = 2'-Omethyluridine
  modified_base 5: mod_base = OTHER; note = 2'-fluorocytosine
  modified_base 6: mod_base = OTHER; note = 2'-fluorocytosine
  modified_base 11: mod_base = OTHER; note = 2'-Omethylcytosine phosphorothiorate
  modified_base 12: mod_base = OTHER; note = 2'-Omethylguanosine
  modified_base 15: mod_base = OTHER; note = Adenosine phosphorothiorate
  modified_base 16: mod_base = OTHER; note = 2'-fluorouridine
  modified_base 25: mod_base = OTHER; note = 2'-fluorocytosine
  modified_base 27: mod_base = OTHER; note = 2'-Omethyluridine
  modified_base 30: mod_base = OTHER; note = 2'-Omethylguanosine
  modified_base 33: mod_base = OTHER; note = 2'-fluorouridine
  modified_base 34: mod_base = OTHER; note = 2'-fluorouridine phosphorothiorate
  modified_base 36: mod_base = OTHER; note = Adenosine phosphorothiorate
  modified_base 40: mod_base = OTHER; note = 2'-fluorouridine
  modified_base 41: mod_base = OTHER; note = 2'-fluorocytosine
  modified_base 42: mod_base = OTHER; note = 2'-fluoroadenosine
  modified_base 43: mod_base = OTHER; note = 2'-fluoroadenosine
  modified_base 45: mod_base = OTHER; note = 2'-fluoroguanosine
  modified_base 48: mod_base = OTHER; note = 2'-fluorouridine
  modified_base 51: mod_base = OTHER; note = 2'-Omethylguanosine
  modified_base 53: mod_base = OTHER; note = 2'-Omethylguanosine
  modified_base 54: mod_base = OTHER; note = 2'-Omethyluridine
  modified_base 56: mod_base = OTHER; note = 2'-Omethylcytosine
  modified_base 59: mod_base = OTHER; note = 2'-fluoroguanosine
  modified_base 60: mod_base = OTHER; note = 2'-fluorouridine phosphorothiorate
  modified_base 63: mod_base = OTHER; note = 2'-Omethylcytosine phosphorothiorate
  modified_base 64: mod_base = OTHER; note = 2'-Omethylguanosine phosphorothiorate
  modified_base 66: mod_base = OTHER; note = 2'-Omethylcytosine
  modified_base 68: mod_base = OTHER; note = Guanosine phosphorothiorate
  modified_base 69: mod_base = OTHER; note = 2'-Omethyladenosine
  modified_base 70: mod_base = OTHER; note = Guanosine phosphorothiorate
  modified_base 71: mod_base = OTHER; note = 2'-Omethyluridine
  modified_base 74: mod_base = OTHER; note = 2'-Omethylcytosine

SEQ ID NO: 7944 - DNA, 76 bp, synthetic construct; identical to SEQ ID NO: 1924
  source 1..76: mol_type = other DNA
  modified_base 1: mod_base = OTHER; note = 2'-Omethylguanosine phosphorothiorate
  modified_base 2: mod_base = OTHER; note = 2'-Omethylguanosine phosphorothiorate
  modified_base 38: mod_base = OTHER; note = Adenosine phosphorothiorate
  modified_base 62: mod_base = OTHER; note = Cytosine phosphorothiorate
  modified_base 63: mod_base = OTHER; note = 2'-O-(2-Methoxyethyl) 5-methylcytosine
  modified_base 74: mod_base = OTHER; note = Cytosine phosphorothiorate
  modified_base 75: mod_base = OTHER; note = 2'-Omethylcytosine phosphorothiorate
  modified_base 76: mod_base = OTHER; note = 2'-Omethyladenosine
  misc_feature 1..38: note = RNA
  misc_feature 39: note = DNA
  misc_feature 40..76: note = RNA

SEQ ID NO: 7945 - RNA, 75 nt, synthetic construct; identical to SEQ ID NO: 1045
  source 1..75: mol_type = other RNA
  modified_base 1: mod_base = OTHER; note = 2'-Omethylguanosine phosphorothiorate
  modified_base 2: mod_base = OTHER; note = 2'-fluoroguanosine phosphorothiorate
  modified_base 19: mod_base = OTHER; note = Uridine phosphorothiorate
  modified_base 25: mod_base = OTHER; note = 2'-fluorocytosine
  modified_base 30: mod_base = OTHER; note = 2'-fluoroguanosine
  modified_base 36: mod_base = OTHER; note = 2'-Omethyladenosine phosphorothiorate
  modified_base 40: mod_base = OTHER; note = 2'-fluorocytosine
  modified_base 44: mod_base = OTHER; note = 2'-fluorocytosine
  modified_base 48: mod_base = OTHER; note = 2'-fluorocytosine
  modified_base 58: mod_base = OTHER; note = 2'-Omethylguanosine
  modified_base 65: mod_base = OTHER; note = 2'-fluorouridine
  modified_base 69: mod_base = OTHER; note = Adenosine phosphorothiorate
  modified_base 72: mod_base = OTHER; note = 2'-fluorouridine

SEQ ID NO: 7946 - RNA, 76 nt, synthetic construct; identical to SEQ ID NO: 625
  source 1..76: mol_type = other RNA
  modified_base 1: mod_base = OTHER; note = 2'-Omethylguanosine
  modified_base 10: mod_base = OTHER; note = 2'-Omethylguanosine
  modified_base 13: mod_base = OTHER; note = 2'-Omethylcytosine
  modified_base 17: mod_base = OTHER; note = Guanosine phosphorothiorate
  modified_base 18: mod_base = OTHER; note = 2'-Omethylguanosine
  modified_base 19: mod_base = OTHER; note = Adenosine phosphorothiorate
  modified_base 20: mod_base = OTHER; note = 2'-Omethyluridine
  modified_base 25: mod_base = OTHER; note = 2'-Omethylcytosine
  modified_base 29: mod_base = OTHER; note = 2'-Omethylguanosine
  modified_base 33: mod_base = OTHER; note = 2'-fluorouridine
  modified_base 35: mod_base = OTHER; note = Cytosine phosphorothiorate
  modified_base 37: mod_base = OTHER; note = Adenosine phosphorothiorate
  modified_base 38: mod_base = OTHER; note = Adenosine phosphorothiorate
  modified_base 41: mod_base = OTHER; note = 2'-fluorocytosine
  modified_base 43: mod_base = OTHER; note = 2'-Omethyladenosine
  modified_base 44: mod_base = OTHER; note = 2'-fluoroadenosine
  modified_base 46: mod_base = OTHER; note = Guanosine phosphorothiorate
  modified_base 50: mod_base = OTHER; note = 2'-Omethylcytosine
  modified_base 52: mod_base = OTHER; note = 2'-Omethylguanosine
  modified_base 54: mod_base = OTHER; note = Uridine phosphorothiorate
  modified_base 55: mod_base = OTHER; note = Uridine phosphorothiorate
  modified_base 56: mod_base = OTHER; note = 2'-Omethylcytosine
  modified_base 57: mod_base = OTHER; note = Guanosine phosphorothiorate
  modified_base 62: mod_base = OTHER; note = 2'-Omethylcytosine
  modified_base 63: mod_base = OTHER; note = 2'-Omethylcytosine phosphorothiorate
  modified_base 65: mod_base = OTHER; note = 2'-Omethylguanosine
  modified_base 71: mod_base = OTHER; note = 2'-Omethyluridine
  modified_base 73: mod_base = OTHER; note = 2'-Omethylguanosine

SEQ ID NO: 7947 - RNA, 85 nt, synthetic construct; identical to SEQ ID NO: 3301
  source 1..85: mol_type = other RNA
  modified_base 1: mod_base = OTHER; note = 2'-Omethylguanosine phosphorothiorate
  modified_base 2: mod_base = OTHER; note = 2'-Omethylcytosine phosphorothiorate
  modified_base 13: mod_base = OTHER; note = 2'-Omethylguanosine phosphorothiorate
  modified_base 14: mod_base = OTHER; note = Adenosine phosphorothiorate
  modified_base 20: mod_base = OTHER; note = 2'-Omethyluridine phosphorothiorate
  modified_base 22: mod_base = OTHER; note = 2'-fluoroadenosine
  modified_base 24: mod_base = OTHER; note = 2'-fluoroguanosine
  modified_base 26: mod_base = OTHER; note = 2'-fluoroguanosine phosphorothiorate
  modified_base 31: mod_base = OTHER; note = Adenosine phosphorothiorate
  modified_base 34: mod_base = OTHER; note = 2'-fluorouridine
  modified_base 46: mod_base = OTHER; note = 2'-fluoroguanosine phosphorothiorate
  modified_base 47: mod_base = OTHER; note = 2'-fluoroguanosine phosphorothiorate
  modified_base 54: mod_base = OTHER; note = 2'-Omethylcytosine
  modified_base 56: mod_base = OTHER; note = 2'-Omethylguanosine
  modified_base 62: mod_base = OTHER; note = 2'-fluoroguanosine
  modified_base 81: mod_base = OTHER; note = 2'-fluorocytosine phosphorothiorate
  modified_base 83: mod_base = OTHER; note = Cytosine phosphorothiorate

SEQ ID NO: 7948 - RNA, 74 nt, synthetic construct; identical to SEQ ID NO: 766
  source 1..74: mol_type = other RNA
  modified_base 1: mod_base = OTHER; note = 2'-Omethylguanosine phosphorothiorate
  modified_base 2: mod_base = OTHER; note = 2'-Omethylguanosine phosphorothiorate
  modified_base 3: mod_base = OTHER; note = 2'-Omethylcytosine
  modified_base 4: mod_base = OTHER; note = 2'-Omethyluridine
  modified_base 5: mod_base = OTHER; note = 2'-Omethylcytosine
  modified_base 6: mod_base = OTHER; note = 2'-Omethylcytosine
  modified_base 10: mod_base = OTHER; note = 2'-Omethylguanosine
  modified_base 11: mod_base = OTHER; note = 2'-Omethylcytosine
  modified_base 12: mod_base = OTHER; note = 2'-Omethylguanosine
  modified_base 13: mod_base = OTHER; note = 2'-Omethylcytosine
  modified_base 14: mod_base = OTHER; note = 2'-Omethyladenosine
  modified_base 15: mod_base = OTHER; note = 2'-Omethyladenosine
  modified_base 16: mod_base = OTHER; note = 2'-Omethyluridine
  modified_base 17: mod_base = OTHER; note = 2'-Omethylguanosine
  modified_base 18: mod_base = OTHER; note = 2'-Omethylguanosine
  modified_base 20: mod_base = OTHER; note = 2'-Omethyluridine
  modified_base 22: mod_base = OTHER; note = 2'-Omethylguanosine
  modified_base 23: mod_base = OTHER; note = 2'-Omethylcytosine
  modified_base 24: mod_base = OTHER; note = 2'-Omethylguanosine
  modified_base 25: mod_base = OTHER; note = 2'-Omethylcytosine
  modified_base 33: mod_base = OTHER; note = 2'-fluorouridine
  modified_base 35: mod_base = OTHER; note = Cytosine phosphorothiorate
  modified_base 37: mod_base = OTHER; note = Adenosine phosphorothiorate
  modified_base 38: mod_base = OTHER; note = Adenosine phosphorothiorate
  modified_base 49: mod_base = OTHER; note = 2'-Omethylcytosine
  modified_base 50: mod_base = OTHER; note = 2'-Omethylcytosine
  modified_base 52: mod_base = OTHER; note = 2'-Omethylguanosine
  modified_base 54: mod_base = OTHER; note = 2'-Omethyluridine
  modified_base 55: mod_base = OTHER; note = Uridine phosphorothiorate
  modified_base 56: mod_base = OTHER; note = 2'-Omethylcytosine
  modified_base 57: mod_base = OTHER; note = 2'-fluoroguanosine
  modified_base 59: mod_base = OTHER; note = 2'-Omethylguanosine
  modified_base 61: mod_base = OTHER; note = 2'-Omethylcytosine
  modified_base 65: mod_base = OTHER; note = 2'-Omethylguanosine
  modified_base 73: mod_base = OTHER; note = 2'-Omethylguanosine

SEQ ID NO: 7949 - RNA, 75 nt, synthetic construct; identical to SEQ ID NO: 3306
  source 1..75: mol_type = other RNA
  modified_base 1: mod_base = OTHER; note = 2'-Omethylguanosine
  modified_base 10: mod_base = OTHER; note = 2'-Omethylguanosine
  modified_base 11: mod_base = OTHER; note = 2'-Omethylcytosine
  modified_base 12: mod_base = OTHER; note = 2'-Omethylguanosine
  modified_base 13: mod_base = OTHER; note = 2'-Omethylcytosine
  modified_base 14: mod_base = OTHER; note = 2'-Omethyladenosine
  modified_base 15: mod_base = OTHER; note = 2'-Omethyladenosine
  modified_base 16: mod_base = OTHER; note = 2'-Omethylcytosine
  modified_base 17: mod_base = OTHER; note = 2'-Omethylguanosine
  modified_base 18: mod_base = OTHER; note = 2'-Omethylguanosine
  modified_base 19: mod_base = OTHER; note = Uridine phosphorothiorate
  modified_base 20: mod_base = OTHER; note = Adenosine phosphorothiorate
  modified_base 21: mod_base = OTHER; note = 2'-Omethylguanosine
  modified_base 22: mod_base = OTHER; note = 2'-Omethylcytosine
  modified_base 23: mod_base = OTHER; note = 2'-Omethylguanosine
  modified_base 24: mod_base = OTHER; note = 2'-Omethylcytosine
  modified_base 32: mod_base = OTHER; note = 2'-fluorouridine
  modified_base 33: mod_base = OTHER; note = 2'-Omethylcytosine
  modified_base 34: mod_base = OTHER; note = Uridine phosphorothiorate
  modified_base 36: mod_base = OTHER; note = Guanosine phosphorothiorate
  modified_base 37: mod_base = OTHER; note = Adenosine phosphorothiorate
  modified_base 48: mod_base = OTHER; note = 2'-Omethylguanosine
  modified_base 49: mod_base = OTHER; note = 2'-Omethylcytosine
  modified_base 51: mod_base = OTHER; note = 2'-Omethyluridine
  modified_base 53: mod_base = OTHER; note = Uridine phosphorothiorate
  modified_base 54: mod_base = OTHER; note = Uridine phosphorothiorate
  modified_base 60: mod_base = OTHER; note = 2'-Omethylcytosine
  modified_base 64: mod_base = OTHER; note = 2'-Omethyluridine
  modified_base 72: mod_base = OTHER; note = 2'-Omethyladenosine

SEQ ID NO: 7950 - RNA, 76 nt, synthetic construct; identical to SEQ ID NO: 3447
  source 1..76: mol_type = other RNA
  modified_base 1: mod_base = OTHER; note = 2'-Omethylguanosine
  modified_base 14: mod_base = OTHER; note = 2'-Omethyladenosine
  modified_base 15: mod_base = OTHER; note = 2'-fluoroadenosine
  modified_base 16: mod_base = OTHER; note = 2'-Omethyluridine
  modified_base 17: mod_base = OTHER; note = 2'-Omethylguanosine
  modified_base 18: mod_base = OTHER; note = 2'-Omethylguanosine
  modified_base 19: mod_base = OTHER; note = 2'-fluoroadenosine
  modified_base 20: mod_base = OTHER; note = 2'-Omethyluridine
  modified_base 33: mod_base = OTHER; note = 2'-fluorouridine
  modified_base 35: mod_base = OTHER; note = Cytosine phosphorothiorate
  modified_base 37: mod_base = OTHER; note = Adenosine phosphorothiorate
  modified_base 38: mod_base = OTHER; note = Adenosine phosphorothiorate
  modified_base 41: mod_base = OTHER; note = 2'-Omethylcytosine
  modified_base 42: mod_base = OTHER; note = 2'-Omethyladenosine
  modified_base 43: mod_base = OTHER; note = 2'-Omethyladenosine
  modified_base 44: mod_base = OTHER; note = 2'-Omethyladenosine
  modified_base 50: mod_base = OTHER; note = 2'-Omethylcytosine
  modified_base 52: mod_base = OTHER; note = 2'-Omethylguanosine
  modified_base 73: mod_base = OTHER; note = 2'-Omethylguanosine

SEQ ID NO: 7951 - RNA, 86 nt, synthetic construct; identical to SEQ ID NO: 3290
  source 1..86: mol_type = other RNA
  modified_base 57: mod_base = OTHER; note = Guanosine phosphorothiorate

SEQ ID NO: 7952 - RNA, 76 nt, synthetic construct; identical to SEQ ID NO: 625
  source 1..76: mol_type = other RNA
  modified_base 3: mod_base = OTHER; note = 2'-Omethylcytosine
  modified_base 4: mod_base = OTHER; note = 2'-Omethyluridine
  modified_base 5: mod_base = OTHER; note = Cytosine phosphorothiorate
  modified_base 6: mod_base = OTHER; note = 2'-Omethylcytosine phosphorothiorate
  modified_base 10: mod_base = OTHER; note = 2'-fluoroguanosine
  modified_base 11: mod_base = OTHER; note = 2'-fluorocytosine
  modified_base 12: mod_base = OTHER; note = 2'-fluoroguanosine phosphorothiorate
  modified_base 14: mod_base = OTHER; note = Adenosine phosphorothiorate
  modified_base 15: mod_base = OTHER; note = 2'-Omethyladenosine
  modified_base 22: mod_base = OTHER; note = Guanosine phosphorothiorate
  modified_base 23: mod_base = OTHER; note = 2'-fluorocytosine
  modified_base 27: mod_base = OTHER; note = Uridine phosphorothiorate
  modified_base 28: mod_base = OTHER; note = 2'-fluorouridine
  modified_base 33: mod_base = OTHER; note = 2'-fluorouridine
  modified_base 34: mod_base = OTHER; note = 2'-fluorouridine
  modified_base 39: mod_base = OTHER; note = Uridine phosphorothiorate
  modified_base 40: mod_base = OTHER; note = 2'-Omethyluridine
  modified_base 42: mod_base = OTHER; note = Adenosine phosphorothiorate
  modified_base 43: mod_base = OTHER; note = 2'-Omethyladenosine
  modified_base 44: mod_base = OTHER; note = 2'-Omethyladenosine
  modified_base 45: mod_base = OTHER; note = 2'-fluoroguanosine
  modified_base 46: mod_base = OTHER; note = 2'-fluoroguanosine
  modified_base 49: mod_base = OTHER; note = 2'-Omethylcytosine
  modified_base 53: mod_base = OTHER; note = 2'-Omethylguanosine
  modified_base 54: mod_base = OTHER; note = 2'-fluorouridine
  modified_base 58: mod_base = OTHER; note = 2'-fluoroadenosine
  modified_base 61: mod_base = OTHER; note = Cytosine phosphorothiorate
  modified_base 62: mod_base = OTHER; note = Cytosine phosphorothiorate
  modified_base 63: mod_base = OTHER; note = 2'-fluorocytosine phosphorothiorate
  modified_base 64: mod_base = OTHER; note = 2'-fluoroguanosine
  modified_base 65: mod_base = OTHER; note = 2'-fluoroguanosine
  modified_base 66: mod_base = OTHER; note = 2'-Omethylcytosine phosphorothiorate
  modified_base 67: mod_base = OTHER; note = 2'-fluoroguanosine
  modified_base 70: mod_base = OTHER; note = 2'-fluoroguanosine
  modified_base 71: mod_base = OTHER; note = 2'-Omethyluridine phosphorothiorate
  modified_base 72: mod_base = OTHER; note = 2'-fluorocytosine
  modified_base 75: mod_base = OTHER; note = 2'-Omethylcytosine
  modified_base 76: mod_base = OTHER; note = 2'-Omethyladenosine

SEQ ID NO: 7953 - RNA, 75 nt, synthetic construct; identical to SEQ ID NO: 3336
  source 1..75: mol_type = other RNA
  modified_base 5: mod_base = OTHER; note = 2'-Omethylguanosine phosphorothiorate
  modified_base 21: mod_base = OTHER; note = 2'-fluoroguanosine
  modified_base 23: mod_base = OTHER; note = 2'-fluoroguanosine
  modified_base 27: mod_base = OTHER; note = 2'-Omethylcytosine phosphorothiorate
  modified_base 39: mod_base = OTHER; note = 2'-Omethylcytosine phosphorothiorate
  modified_base 46: mod_base = OTHER; note = 2'-fluorouridine
  modified_base 47: mod_base = OTHER; note = 2'-Omethylcytosine phosphorothiorate
  modified_base 53: mod_base = OTHER; note = 2'-fluorouridine
  modified_base 63: mod_base = OTHER; note = 2'-Omethyluridine phosphorothiorate
  modified_base 73: mod_base = OTHER; note = Cytosine phosphorothiorate
  modified_base 74: mod_base = OTHER; note = Cytosine phosphorothiorate

SEQ ID NO: 7954 - RNA, 75 nt, synthetic construct; identical to SEQ ID NO: 1045
  source 1..75: mol_type = other RNA
  modified_base 1: mod_base = OTHER; note = 2'-Omethylguanosine phosphorothiorate
  modified_base 14: mod_base = OTHER; note = 2'-Omethyladenosine
  modified_base 19: mod_base = OTHER; note = 2'-fluorouridine
  modified_base 23: mod_base = OTHER; note = 2'-fluorocytosine
  modified_base 30: mod_base = OTHER; note = 2'-Omethylguanosine
  modified_base 41: mod_base = OTHER; note = 2'-fluorocytosine
  modified_base 55: mod_base = OTHER; note = 2'-Omethylcytosine
  modified_base 63: mod_base = OTHER; note = 2'-fluoroguanosine
  modified_base 64: mod_base = OTHER; note = Guanosine phosphorothiorate
  modified_base 65: mod_base = OTHER; note = 2'-fluorouridine
  modified_base 73: mod_base = OTHER; note = Cytosine phosphorothiorate

SEQ ID NO: 7955 - RNA, 75 nt, synthetic construct; identical to SEQ ID NO: 3306
  source 1..75: mol_type = other RNA
  modified_base 1: mod_base = OTHER; note = 2'-Omethylguanosine phosphorothiorate
  modified_base 2: mod_base = OTHER; note = 2'-Omethyladenosine phosphorothiorate
  modified_base 10: mod_base = OTHER; note = 2'-Omethylguanosine
  modified_base 13: mod_base = OTHER; note = 2'-Omethylcytosine
  modified_base 16: mod_base = OTHER; note = Cytosine phosphorothiorate
  modified_base 17: mod_base = OTHER; note = Guanosine phosphorothiorate
  modified_base 18: mod_base = OTHER; note = 2'-Omethylguanosine phosphorothiorate
  modified_base 19: mod_base = OTHER; note = Uridine phosphorothiorate
  modified_base 24: mod_base = OTHER; note = 2'-Omethylcytosine
  modified_base 28: mod_base = OTHER; note = 2'-Omethyluridine
  modified_base 32: mod_base = OTHER; note = 2'-fluorouridine
  modified_base 34: mod_base = OTHER; note = Uridine phosphorothiorate
  modified_base 36: mod_base = OTHER; note = Guanosine phosphorothiorate
  modified_base 37: mod_base = OTHER; note = Adenosine phosphorothiorate
  modified_base 40: mod_base = OTHER; note = 2'-fluoroadenosine
  modified_base 41: mod_base = OTHER; note = Guanosine phosphorothiorate
  modified_base 42: mod_base = OTHER; note = 2'-Omethyladenosine
  modified_base 43: mod_base = OTHER; note = 2'-fluoroadenosine
  modified_base 45: mod_base = OTHER; note = Guanosine phosphorothiorate
  modified_base 49: mod_base = OTHER; note = 2'-Omethylcytosine
  modified_base 51: mod_base = OTHER; note = 2'-Omethyluridine
  modified_base 53: mod_base = OTHER; note = Uridine phosphorothiorate
  modified_base 54: mod_base = OTHER; note = Uridine phosphorothiorate
  modified_base 55: mod_base = OTHER; note = 2'-Omethylcytosine
  modified_base 56: mod_base = OTHER; note = Adenosine phosphorothiorate
  modified_base 61: mod_base = OTHER; note = 2'-Omethyladenosine
  modified_base 62: mod_base = OTHER; note = 2'-fluorocytosine
  modified_base 64: mod_base = OTHER; note = 2'-Omethyluridine
  modified_base 70: mod_base = OTHER; note = 2'-Omethyluridine
  modified_base 72: mod_base = OTHER; note = 2'-Omethyladenosine

SEQ ID NO: 7956 - RNA, 85 nt, synthetic construct; identical to SEQ ID NO: 3297
  source 1..85: mol_type = other RNA
  modified_base 1: mod_base = OTHER; note = 2'-Omethylguanosine
  modified_base 13: mod_base = OTHER; note = 2'-Omethylguanosine
  modified_base 17: mod_base = OTHER; note = 2'-Omethylguanosine
  modified_base 18: mod_base = OTHER; note = 2'-Omethylguanosine
  modified_base 25: mod_base = OTHER; note = 2'-Omethylcytosine
  modified_base 33: mod_base = OTHER; note = Uridine phosphorothiorate
  modified_base 34: mod_base = OTHER; note = 2'-Omethyluridine
  modified_base 35: mod_base = OTHER; note = Cytosine phosphorothiorate
  modified_base 37: mod_base = OTHER; note = Adenosine phosphorothiorate
  modified_base 38: mod_base = OTHER; note = Adenosine phosphorothiorate
  modified_base 41: mod_base = OTHER; note = 2'-Omethylcytosine
  modified_base 42: mod_base = OTHER; note = 2'-Omethyladenosine
  modified_base 43: mod_base = OTHER; note = 2'-Omethyladenosine
  modified_base 44: mod_base = OTHER; note = 2'-Omethyluridine
  modified_base 58: mod_base = OTHER; note = 2'-Omethylguanosine
  modified_base 59: mod_base = OTHER; note = 2'-Omethylcytosine
  modified_base 61: mod_base = OTHER; note = 2'-Omethylguanosine
  modified_base 63: mod_base = OTHER; note = Uridine phosphorothiorate
  modified_base 64: mod_base = OTHER; note = Uridine phosphorothiorate
  modified_base 65: mod_base = OTHER; note = 2'-Omethylcytosine
  modified_base 66: mod_base = OTHER; note = Guanosine phosphorothiorate
  modified_base 67: mod_base = OTHER; note = Adenosine phosphorothiorate
  modified_base 68: mod_base = OTHER; note = 2'-Omethyladenosine
  modified_base 70: mod_base = OTHER; note = 2'-Omethylcytosine
  modified_base 74: mod_base = OTHER; note = 2'-Omethylcytosine
  modified_base 82: mod_base = OTHER; note = 2'-Omethylguanosine

SEQ ID NO: 7957 - RNA, 85 nt, synthetic construct; identical to SEQ ID NO: 3286
  source 1..85: mol_type = other RNA
  modified_base 1: mod_base = OTHER; note = 2'-Omethylcytosine phosphorothiorate
  modified_base 14: mod_base = OTHER; note = Guanosine phosphorothiorate
  modified_base 17: mod_base = OTHER; note = 2'-Omethylguanosine
  modified_base 19: mod_base = OTHER; note = 2'-fluorouridine phosphorothiorate
  modified_base 35: mod_base = OTHER; note = Adenosine phosphorothiorate
  modified_base 46: mod_base = OTHER; note = 2'-Omethyladenosine
  modified_base 54: mod_base = OTHER; note = 2'-fluorocytosine
  modified_base 56: mod_base = OTHER; note = Guanosine phosphorothiorate
  modified_base 58: mod_base = OTHER; note = 2'-fluoroguanosine phosphorothiorate
  modified_base 84: mod_base = OTHER; note = 2'-fluorocytosine phosphorothiorate

SEQ ID NO: 7958 - RNA, 85 nt, synthetic construct; identical to SEQ ID NO: 3297
  source 1..85: mol_type = other RNA
  modified_base 1: mod_base = OTHER; note = 2'-Omethylguanosine
  modified_base 57: mod_base = OTHER; note = 2'-fluorocytosine
  modified_base 82: mod_base = OTHER; note = 2'-Omethylguanosine

SEQ ID NO: 7959 - RNA, 76 nt, synthetic construct; identical to SEQ ID NO: 3289
  source 1..76: mol_type = other RNA
  modified_base 1: mod_base = OTHER; note = 2'-Omethylguanosine phosphorothiorate
  modified_base 2: mod_base = OTHER; note = 2'-Omethylcytosine
  modified_base 3: mod_base = OTHER; note = 2'-Omethylcytosine
  modified_base 4: mod_base = OTHER; note = 2'-Omethyluridine
  modified_base 5: mod_base = OTHER; note = 2'-Omethylguanosine
  modified_base 6: mod_base = OTHER; note = 2'-Omethylguanosine
  modified_base 27: mod_base = OTHER; note = 2'-Omethyluridine
  modified_base 28: mod_base = OTHER; note = 2'-Omethylcytosine
  modified_base 29: mod_base = OTHER; note = 2'-fluoroadenosine
  modified_base 30: mod_base = OTHER; note = 2'-Omethylguanosine
  modified_base 40: mod_base = OTHER; note = 2'-fluorocytosine
  modified_base 41: mod_base = OTHER; note = 2'-Omethyluridine
  modified_base 42: mod_base = OTHER; note = 2'-Omethylguanosine
  modified_base 43: mod_base = OTHER; note = 2'-Omethyladenosine
  modified_base 73: mod_base = OTHER; note = 2'-Omethylguanosine

SEQ ID NO: 7960 - RNA, 76 nt, synthetic construct; identical to SEQ ID NO: 625
  source 1..76: mol_type = other RNA
  modified_base 1: mod_base = OTHER; note = 2'-Omethylguanosine phosphorothiorate
  modified_base 2: mod_base = OTHER; note = 2'-Omethylguanosine
  modified_base 17: mod_base = OTHER; note = 2'-Omethylguanosine
  modified_base 33: mod_base = OTHER; note = 2'-fluorouridine
  modified_base 35: mod_base = OTHER; note = Cytosine phosphorothiorate
  modified_base 37: mod_base = OTHER; note = Adenosine phosphorothiorate
  modified_base 38: mod_base = OTHER; note = Adenosine phosphorothiorate
  modified_base 52: mod_base = OTHER; note = 2'-fluoroguanosine
  modified_base 54: mod_base = OTHER; note = 2'-Omethyluridine
  modified_base 62: mod_base = OTHER; note = 2'-Omethylcytosine
  modified_base 63: mod_base = OTHER; note = 2'-fluorocytosine
  modified_base 65: mod_base = OTHER; note = 2'-Omethylguanosine
  modified_base 73: mod_base = OTHER; note = 2'-Omethylguanosine
  modified_base 75: mod_base = OTHER; note = 2'-fluorocytosine phosphorothiorate

SEQ ID NO: 7961 - DNA, 76 bp, synthetic construct; identical to SEQ ID NO: 1924
  source 1..76: mol_type = other DNA
  modified_base 1: mod_base = OTHER; note = 2'-Omethylguanosine phosphorothiorate
  modified_base 2: mod_base = OTHER; note = 2'-O-(2-Methoxyethyl) guanosine phosphorothiorate
  modified_base 7: mod_base = OTHER; note = Guanosine phosphorothiorate
  modified_base 8: mod_base = OTHER; note = 2'-fluorouridine
  modified_base 12: mod_base = OTHER; note = 2'-O-(2-Methoxyethyl) guanosine phosphorothiorate
  modified_base 13: mod_base = OTHER; note = 2'-O-(2-Methoxyethyl) 5-methylcytosine
  modified_base 14: mod_base = OTHER; note = Adenosine phosphorothiorate
  modified_base 15: mod_base = OTHER; note = 2'-Omethyladenosine
  modified_base 18: mod_base = OTHER; note = 2'-Omethylguanosine
  modified_base 21: mod_base = OTHER; note = Adenosine phosphorothiorate
  modified_base 22: mod_base = OTHER; note = 2'-O-(2-Methoxyethyl) guanosine phosphorothiorate
  modified_base 23: mod_base = OTHER; note = 2'-fluorocytosine phosphorothiorate
  modified_base 24: mod_base = OTHER; note = 2'-Omethylguanosine phosphorothiorate
  modified_base 25: mod_base = OTHER; note = 2'-fluorocytosine phosphorothiorate
  modified_base 26: mod_base = OTHER; note = 2'-O-(2-Methoxyethyl) adenosine
  modified_base 27: mod_base = OTHER; note = Uridine phosphorothiorate
  modified_base 28: mod_base = OTHER; note = 2'-O-(2-Methoxyethyl) thymine
  modified_base 31: mod_base = OTHER; note = Adenosine phosphorothiorate
  modified_base 37: mod_base = OTHER; note = Adenosine phosphorothiorate
  modified_base 42: mod_base = OTHER; note = Adenosine phosphorothiorate
  modified_base 46: mod_base = OTHER; note = Guanosine phosphorothiorate
  modified_base 54: mod_base = OTHER; note = 2'-O-(2-Methoxyethyl) thymine
  modified_base 60: mod_base = OTHER; note = Uridine phosphorothiorate
  modified_base 64: mod_base = OTHER; note = Guanosine phosphorothiorate
  modified_base 65: mod_base = OTHER; note = 2'-fluoroguanosine
  modified_base 66: mod_base = OTHER; note = 2'-O-(2-Methoxyethyl) 5-methylcytosine
  modified_base 67: mod_base = OTHER; note = 2'-O-(2-Methoxyethyl) guanosine
  modified_base 70: mod_base = OTHER; note = Guanosine phosphorothiorate
  misc_feature 1..4: note = RNA
  misc_feature 5: note = DNA
  misc_feature 6..15: note = RNA
  misc_feature 16: note = DNA
  misc_feature 17..34: note = RNA
  misc_feature 35: note = DNA
  misc_feature 36..46: note = RNA
  misc_feature 47: note = DNA
  misc_feature 48..58: note = RNA
  misc_feature 59: note = DNA
  misc_feature 60: note = RNA
  misc_feature 61: note = DNA
  misc_feature 62..76: note = RNA

SEQ ID NO: 7962 - RNA, 86 nt, synthetic construct; identical to SEQ ID NO: 3290
  source 1..86: mol_type = other RNA
  modified_base 41: mod_base = OTHER; note = 2'-Omethylcytosine

SEQ ID NO: 7963 - RNA, 85 nt, synthetic construct; identical to SEQ ID NO: 3297
  source 1..85: mol_type = other RNA
  modified_base 1: mod_base = OTHER; note = 2'-Omethylguanosine
  modified_base 2: mod_base = OTHER; note = 2'-Omethylcytosine
  modified_base 3: mod_base = OTHER; note = 2'-Omethyluridine
  modified_base 4: mod_base = OTHER; note = 2'-Omethylguanosine
  modified_base 5: mod_base = OTHER; note = 2'-Omethyluridine
  modified_base 6: mod_base = OTHER; note = 2'-Omethylguanosine
  modified_base 58: mod_base = OTHER; note = 2'-Omethylguanosine
  modified_base 59: mod_base = OTHER; note = 2'-Omethylcytosine
  modified_base 60: mod_base = OTHER; note = 2'-Omethyladenosine
  modified_base 61: mod_base = OTHER; note = 2'-Omethylguanosine
  modified_base 62: mod_base = OTHER; note = 2'-Omethylguanosine
  modified_base 63: mod_base = OTHER; note = 2'-Omethyluridine
  modified_base 70: mod_base = OTHER; note = 2'-Omethylcytosine
  modified_base 71: mod_base = OTHER; note = 2'-Omethylcytosine
  modified_base 72: mod_base = OTHER; note = 2'-fluorouridine
  modified_base 73: mod_base = OTHER; note = 2'-Omethylguanosine
  modified_base 74: mod_base = OTHER; note = 2'-Omethylcytosine
  modified_base 75: mod_base = OTHER; note = 2'-Omethyluridine
  modified_base 76: mod_base = OTHER; note = 2'-Omethylcytosine
  modified_base 77: mod_base = OTHER; note = 2'-Omethyladenosine
  modified_base 82: mod_base = OTHER; note = 2'-Omethylguanosine

SEQ ID NO: 7964 - RNA, 85 nt, synthetic construct; identical to SEQ ID NO: 3317
  source 1..85: mol_type = other RNA
  modified_base 1: mod_base = OTHER; note = 2'-Omethylguanosine
  modified_base 3: mod_base = OTHER; note = 2'-Omethyluridine
  modified_base 5: mod_base = OTHER; note = 2'-Omethyluridine phosphorothiorate
  modified_base 17: mod_base = OTHER; note = 2'-fluoroguanosine
  modified_base 18: mod_base = OTHER; note = 2'-fluoroguanosine
  modified_base 20: mod_base = OTHER; note = Uridine phosphorothiorate
  modified_base 24: mod_base = OTHER; note = Guanosine phosphorothiorate
  modified_base 30: mod_base = OTHER; note = Guanosine phosphorothiorate
  modified_base 47: mod_base = OTHER; note = 2'-fluoroguanosine
  modified_base 51: mod_base = OTHER; note = 2'-Omethyluridine phosphorothiorate
  modified_base 55: mod_base = OTHER; note = Cytosine phosphorothiorate
  modified_base 59: mod_base = OTHER; note = 2'-Omethylcytosine
  modified_base 62: mod_base = OTHER; note = 2'-fluoroguanosine phosphorothiorate
  modified_base 81: mod_base = OTHER; note = 2'-fluorocytosine phosphorothiorate
  modified_base 82: mod_base = OTHER; note = 2'-Omethylguanosine

SEQ ID NO: 7965 - RNA, 85 nt, synthetic construct; identical to SEQ ID NO: 3286
  source 1..85: mol_type = other RNA
  modified_base 1: mod_base = OTHER; note = 2'-Omethylcytosine
  modified_base 11: mod_base = OTHER; note = Cytosine phosphorothiorate
  modified_base 26: mod_base = OTHER; note = 2'-fluorouridine
  modified_base 30: mod_base = OTHER; note = 2'-fluoroadenosine
  modified_base 36: mod_base = OTHER; note = Guanosine phosphorothiorate
  modified_base 44: mod_base = OTHER; note = Guanosine phosphorothiorate
  modified_base 46: mod_base = OTHER; note = 2'-Omethyladenosine
  modified_base 55: mod_base = OTHER; note = 2'-Omethylcytosine
  modified_base 58: mod_base = OTHER; note = Guanosine phosphorothiorate
  modified_base 76: mod_base = OTHER; note = 2'-fluorocytosine
  modified_base 84: mod_base = OTHER; note = 2'-Omethylcytosine
  modified_base 85: mod_base = OTHER; note = 2'-Omethyladenosine

SEQ ID NO: 7966 - RNA, 85 nt, synthetic construct; identical to SEQ ID NO: 3286
  source 1..85: mol_type = other RNA
  modified_base 1: mod_base = OTHER; note = 2'-Omethylcytosine phosphorothiorate
  modified_base 2: mod_base = OTHER; note = 2'-Omethylcytosine
  modified_base 22: mod_base = OTHER; note = 2'-fluoroguanosine
  modified_base 28: mod_base = OTHER; note = 2'-fluoroguanosine
  modified_base 32: mod_base = OTHER; note = 2'-fluorouridine
  modified_base 36: mod_base = OTHER; note = Guanosine phosphorothiorate
  modified_base 58: mod_base = OTHER; note = Guanosine phosphorothiorate
  modified_base 84: mod_base = OTHER; note = Cytosine phosphorothiorate

SEQ ID NO: 7967 - RNA, 76 nt, synthetic construct; identical to SEQ ID NO: 625
  source 1..76: mol_type = other RNA
  modified_base 1: mod_base = OTHER; note = 2'-Omethylguanosine
  modified_base 2: mod_base = OTHER; note = 2'-Omethylguanosine
  modified_base 10: mod_base = OTHER; note = 2'-Omethylguanosine
  modified_base 13: mod_base = OTHER; note = 2'-Omethylcytosine
  modified_base 17: mod_base = OTHER; note = Guanosine phosphorothiorate
  modified_base 18: mod_base = OTHER; note = 2'-Omethylguanosine
  modified_base 19: mod_base = OTHER; note = Adenosine phosphorothiorate
  modified_base 20: mod_base = OTHER; note = 2'-Omethyluridine
  modified_base 25: mod_base = OTHER; note = 2'-Omethylcytosine
  modified_base 29: mod_base = OTHER; note = 2'-Omethylguanosine
  modified_base 33: mod_base = OTHER; note = 2'-fluorouridine
  modified_base 35: mod_base = OTHER; note = Cytosine phosphorothiorate
  modified_base 37: mod_base = OTHER; note = Adenosine phosphorothiorate
  modified_base 38: mod_base = OTHER; note = Adenosine phosphorothiorate
  modified_base 41: mod_base = OTHER; note = 2'-fluorocytosine phosphorothiorate
  modified_base 43: mod_base = OTHER; note = 2'-Omethyladenosine
  modified_base 44: mod_base = OTHER; note = 2'-fluoroadenosine
  modified_base 46: mod_base = OTHER; note = Guanosine phosphorothiorate
  modified_base 50: mod_base = OTHER; note = 2'-Omethylcytosine
  modified_base 52: mod_base = OTHER; note = 2'-Omethylguanosine
  modified_base 54: mod_base = OTHER; note = Uridine phosphorothiorate
  modified_base 55: mod_base = OTHER; note = Uridine phosphorothiorate
  modified_base 56: mod_base = OTHER; note = 2'-Omethylcytosine
  modified_base 57: mod_base = OTHER; note = Guanosine phosphorothiorate
  modified_base 62: mod_base = OTHER; note = 2'-Omethylcytosine
  modified_base 63: mod_base = OTHER; note = 2'-fluorocytosine
  modified_base 65: mod_base = OTHER; note = 2'-Omethylguanosine
  modified_base 71: mod_base = OTHER; note = 2'-Omethyluridine
  modified_base 73: mod_base = OTHER; note = 2'-Omethylguanosine

SEQ ID NO: 7968 - RNA, 85 nt, synthetic construct; identical to SEQ ID NO: 3288
  source 1..85: mol_type = other RNA
  modified_base 1: mod_base = OTHER; note = 2'-Omethylcytosine phosphorothiorate
  modified_base 30: mod_base = OTHER; note = 2'-fluoroadenosine
  modified_base 43: mod_base = OTHER; note = 2'-Omethyluridine
  modified_base 57: mod_base = OTHER; note = 2'-Omethylcytosine
  modified_base 66: mod_base = OTHER; note = Guanosine phosphorothiorate
  modified_base 72: mod_base = OTHER; note = Cytosine phosphorothiorate

SEQ ID NO: 7969 - RNA, 85 nt, synthetic construct; identical to SEQ ID NO: 3297
  source 1..85: mol_type = other RNA
  modified_base 1: mod_base = OTHER; note = 2'-Omethylguanosine
  modified_base 10: mod_base = OTHER; note = 2'-Omethylguanosine
  modified_base 11: mod_base = OTHER; note = 2'-Omethylcytosine
  modified_base 12: mod_base = OTHER; note = 2'-Omethylcytosine
  modified_base 13: mod_base = OTHER; note = 2'-Omethylguanosine
  modified_base 14: mod_base = OTHER; note = 2'-Omethyladenosine
  modified_base 15: mod_base = OTHER; note = 2'-Omethylguanosine
  modified_base 16: mod_base = OTHER; note = 2'-Omethyluridine
  modified_base 17: mod_base = OTHER; note = 2'-Omethylguanosine
  modified_base 18: mod_base = OTHER; note = 2'-Omethylguanosine
  modified_base 19: mod_base = OTHER; note = Uridine phosphorothiorate
  modified_base 20: mod_base = OTHER; note = 2'-Omethyluridine
  modified_base 21: mod_base = OTHER; note = Adenosine phosphorothiorate
  modified_base 22: mod_base = OTHER; note = 2'-Omethyladenosine
  modified_base 23: mod_base = OTHER; note = 2'-Omethylguanosine
  modified_base 24: mod_base = OTHER; note = 2'-Omethylguanosine
  modified_base 25: mod_base = OTHER; note = 2'-Omethylcytosine
  modified_base 33: mod_base = OTHER; note = Uridine phosphorothiorate
  modified_base 34: mod_base = OTHER; note = 2'-Omethyluridine
  modified_base 35: mod_base = OTHER; note = Cytosine phosphorothiorate
  modified_base 37: mod_base = OTHER; note = Adenosine phosphorothiorate
  modified_base 38: mod_base = OTHER; note = Adenosine phosphorothiorate
  modified_base 41: mod_base = OTHER; note = 2'-fluorocytosine
  modified_base 42: mod_base = OTHER; note = 2'-Omethyladenosine
  modified_base 43: mod_base = OTHER; note = 2'-Omethyladenosine
  modified_base 44: mod_base = OTHER; note = 2'-fluorouridine
  modified_base 58: mod_base = OTHER; note = 2'-Omethylguanosine
  modified_base 59: mod_base = OTHER; note = 2'-Omethylcytosine
  modified_base 61: mod_base = OTHER; note = 2'-Omethylguanosine
  modified_base 63: mod_base = OTHER; note = Uridine phosphorothiorate
  modified_base 64: mod_base = OTHER; note = Uridine phosphorothiorate
  modified_base 70: mod_base = OTHER; note = 2'-Omethylcytosine
  modified_base 74: mod_base = OTHER; note = 2'-Omethylcytosine
  modified_base 82: mod_base = OTHER; note = 2'-Omethylguanosine

SEQ ID NO: 7970 - RNA, 76 nt, synthetic construct; identical to SEQ ID NO: 625
  source 1..76: mol_type = other RNA
  modified_base 1: mod_base = OTHER; note = 2'-Omethylguanosine phosphorothiorate
  modified_base 2: mod_base = OTHER; note = 2'-Omethylguanosine phosphorothiorate
  modified_base 3: mod_base = OTHER; note = 2'-Omethylcytosine
  modified_base 4: mod_base = OTHER; note = 2'-Omethyluridine
  modified_base 5: mod_base = OTHER; note = 2'-Omethylcytosine
  modified_base 6: mod_base = OTHER; note = 2'-Omethylcytosine phosphorothiorate
  modified_base 12: mod_base = OTHER; note = 2'-Omethylguanosine phosphorothiorate
  modified_base 13: mod_base = OTHER; note = 2'-Omethylcytosine
  modified_base 14: mod_base = OTHER; note = 2'-Omethyladenosine
  modified_base 16: mod_base = OTHER; note = 2'-fluorouridine phosphorothiorate
  modified_base 18: mod_base = OTHER; note = 2'-Omethylguanosine
  modified_base 19: mod_base = OTHER; note = 2'-fluoroadenosine phosphorothiorate
  modified_base 21: mod_base = OTHER; note = 2'-fluoroadenosine phosphorothiorate
  modified_base 22: mod_base = OTHER; note = 2'-Omethylguanosine
  modified_base 24: mod_base = OTHER; note = 2'-Omethylguanosine phosphorothiorate
  modified_base 25: mod_base = OTHER; note = Cytosine phosphorothiorate
  modified_base 29: mod_base = OTHER; note = 2'-Omethylguanosine phosphorothiorate
  modified_base 30: mod_base = OTHER; note = 2'-fluoroguanosine phosphorothiorate
  modified_base 31: mod_base = OTHER; note = 2'-Omethyladenosine phosphorothiorate
  modified_base 33: mod_base = OTHER; note = 2'-fluorouridine
  modified_base 35: mod_base = OTHER; note = 2'-Omethylcytosine phosphorothiorate
  modified_base 37: mod_base = OTHER; note = Adenosine phosphorothiorate
  modified_base 40: mod_base = OTHER; note = 2'-Omethyluridine
  modified_base 41: mod_base = OTHER; note = 2'-Omethylcytosine
  modified_base 45: mod_base = OTHER; note = 2'-fluoroguanosine
  modified_base 47: mod_base = OTHER; note = 2'-Omethyluridine phosphorothiorate
  modified_base 50: mod_base = OTHER; note = 2'-Omethylcytosine
  modified_base 53: mod_base = OTHER; note = 2'-Omethylguanosine
  modified_base 54: mod_base = OTHER; note = Uridine phosphorothiorate
  modified_base 55: mod_base = OTHER; note = Uridine phosphorothiorate
  modified_base 57: mod_base = OTHER; note = 2'-fluoroguanosine phosphorothiorate
  modified_base 59: mod_base = OTHER; note = 2'-Omethylguanosine phosphorothiorate
  modified_base 61: mod_base = OTHER; note = 2'-Omethylcytosine
  modified_base 63: mod_base = OTHER; note = 2'-fluorocytosine
  modified_base 64: mod_base = OTHER; note = 2'-Omethylguanosine phosphorothiorate
  modified_base 65: mod_base = OTHER; note = 2'-Omethylguanosine phosphorothiorate
  modified_base 66: mod_base = OTHER; note = 2'-fluorocytosine
  modified_base 68: mod_base = OTHER; note = 2'-fluoroguanosine
  modified_base 70: mod_base = OTHER; note = 2'-fluoroguanosine
  modified_base 71: mod_base = OTHER; note = 2'-Omethyluridine
  modified_base 73: mod_base = OTHER; note = Guanosine phosphorothiorate
  modified_base 75: mod_base = OTHER; note = 2'-fluorocytosine
  modified_base 76: mod_base = OTHER; note = 2'-Omethyladenosine

SEQ ID NO: 7971 - RNA, 76 nt, synthetic construct; identical to SEQ ID NO: 625
  source 1..76: mol_type = other RNA
  modified_base 1: mod_base = OTHER; note = 2'-Omethylguanosine
  modified_base 2: mod_base = OTHER; note = Guanosine phosphorothiorate
  modified_base 5: mod_base = OTHER; note = 2'-fluorocytosine
  modified_base 6: mod_base = OTHER; note = 2'-fluorocytosine
  modified_base 7: mod_base = OTHER; note = Guanosine phosphorothiorate
  modified_base 12: mod_base = OTHER; note = 2'-fluoroguanosine
  modified_base 13: mod_base = OTHER; note = Cytosine phosphorothiorate
  modified_base 14: mod_base = OTHER; note = 2'-Omethyladenosine
  modified_base 17: mod_base = OTHER; note = Guanosine phosphorothiorate
  modified_base 18: mod_base = OTHER; note = Guanosine phosphorothiorate
  modified_base 20: mod_base = OTHER; note = 2'-Omethyluridine
  modified_base 22: mod_base = OTHER; note = 2'-Omethylguanosine
  modified_base 30: mod_base = OTHER; note = 2'-Omethylguanosine
  modified_base 34: mod_base = OTHER; note = 2'-fluorouridine phosphorothiorate
  modified_base 39: mod_base = OTHER; note = Uridine phosphorothiorate
  modified_base 42: mod_base = OTHER; note = Adenosine phosphorothiorate
  modified_base 43: mod_base = OTHER; note = 2'-fluoroadenosine
  modified_base 47: mod_base = OTHER; note = 2'-Omethyluridine
  modified_base 49: mod_base = OTHER; note = 2'-fluorocytosine
  modified_base 50: mod_base = OTHER; note = 2'-fluorocytosine
  modified_base 51: mod_base = OTHER; note = 2'-Omethylguanosine
  modified_base 52: mod_base = OTHER; note = 2'-fluoroguanosine
  modified_base 55: mod_base = OTHER; note = Uridine phosphorothiorate
  modified_base 56: mod_base = OTHER; note = 2'-Omethylcytosine phosphorothiorate
  modified_base 57: mod_base = OTHER; note = 2'-fluoroguanosine
  modified_base 58: mod_base = OTHER; note = 2'-fluoroadenosine
  modified_base 60: mod_base = OTHER; note = 2'-fluorouridine
  modified_base 61: mod_base = OTHER; note = 2'-Omethylcytosine phosphorothiorate
  modified_base 62: mod_base = OTHER; note = 2'-fluorocytosine
  modified_base 65: mod_base = OTHER; note = 2'-fluoroguanosine
  modified_base 67: mod_base = OTHER; note = 2'-fluoroguanosine
  modified_base 69: mod_base = OTHER; note = 2'-Omethyladenosine
  modified_base 70: mod_base = OTHER; note = 2'-fluoroguanosine
  modified_base 71: mod_base = OTHER; note = 2'-Omethyluridine
  modified_base 72: mod_base = OTHER; note = 2'-Omethylcytosine phosphorothiorate
  modified_base 73: mod_base = OTHER; note = 2'-Omethylguanosine
  modified_base 76: mod_base = OTHER; note = 2'-fluoroadenosine

SEQ ID NO: 7972 - RNA, 76 nt, synthetic construct; identical to SEQ ID NO: 625
  source 1..76: mol_type = other RNA
  modified_base 1: mod_base = OTHER; note = 2'-Omethylguanosine
  modified_base 4: mod_base = OTHER; note = Thymine
  modified_base 17: mod_base = OTHER; note = 2'-Omethylguanosine
  modified_base 18: mod_base = OTHER; note = 2'-Omethylguanosine
  modified_base 50: mod_base = OTHER; note = 2'-Omethylcytosine
  modified_base 52: mod_base = OTHER; note = 2'-Omethylguanosine
  modified_base 73: mod_base = OTHER; note = 2'-Omethylguanosine

SEQ ID NO: 7973 - RNA, 86 nt, synthetic construct; identical to SEQ ID NO: 3290
  source 1..86: mol_type = other RNA
  modified_base 1: mod_base = OTHER; note = 2'-Omethyladenosine
  modified_base 2: mod_base = OTHER; note = 2'-Omethylcytosine
  modified_base 3: mod_base = OTHER; note = 2'-Omethylcytosine
  modified_base 4: mod_base = OTHER; note = 2'-Omethyladenosine
  modified_base 5: mod_base = OTHER; note = 2'-Omethylguanosine
  modified_base 6: mod_base = OTHER; note = 2'-Omethylguanosine
  modified_base 14: mod_base = OTHER; note = 2'-Omethyladenosine
  modified_base 15: mod_base = OTHER; note = 2'-fluoroguanosine
  modified_base 16: mod_base = OTHER; note = 2'-Omethyluridine
  modified_base 17: mod_base = OTHER; note = 2'-Omethylguanosine
  modified_base 18: mod_base = OTHER; note = 2'-Omethylguanosine
  modified_base 19: mod_base = OTHER; note = 2'-fluorouridine
  modified_base 20: mod_base = OTHER; note = 2'-Omethyluridine
  modified_base 22: mod_base = OTHER; note = 2'-Omethyladenosine
  modified_base 23: mod_base = OTHER; note = 2'-Omethylguanosine
  modified_base 24: mod_base = OTHER; note = 2'-Omethylguanosine
  modified_base 25: mod_base = OTHER; note = 2'-Omethylcytosine
  modified_base 83: mod_base = OTHER; note = 2'-Omethyladenosine

SEQ ID NO: 7974 - RNA, 75 nt, synthetic construct; identical to SEQ ID NO: 3311
  source 1..75: mol_type = other RNA
  modified_base 1: mod_base = OTHER; note = 2'-Omethylguanosine phosphorothiorate
  modified_base 4: mod_base = OTHER; note = 2'-fluorouridine phosphorothiorate
  modified_base 28: mod_base = OTHER; note = 2'-Omethyluridine
  modified_base 43: mod_base = OTHER; note = 2'-fluoroguanosine
  modified_base 46: mod_base = OTHER; note = 2'-fluoroadenosine
  modified_base 55: mod_base = OTHER; note = 2'-fluorocytosine
  modified_base 60: mod_base = OTHER; note = 2'-fluorocytosine
  modified_base 61: mod_base = OTHER; note = 2'-fluorouridine
  modified_base 73: mod_base = OTHER; note = 2'-fluorocytosine phosphorothiorate

SEQ ID NO: 7975 - RNA, 75 nt, synthetic construct; identical to SEQ ID NO: 1045
  source 1..75: mol_type = other RNA
  modified_base 2: mod_base = OTHER; note = 2'-Omethylguanosine phosphorothiorate
  modified_base 3: mod_base = OTHER; note = 2'-Omethyluridine phosphorothiorate
  modified_base 4: mod_base = OTHER; note = 2'-Omethyluridine phosphorothiorate
  modified_base 7: mod_base = OTHER; note = 2'-Omethyladenosine
  modified_base 12: mod_base = OTHER; note = 2'-fluoroguanosine phosphorothiorate
  modified_base 23: mod_base = OTHER; note = 2'-Omethylcytosine phosphorothiorate
  modified_base 30: mod_base = OTHER; note = 2'-fluoroguanosine
  modified_base 31: mod_base = OTHER; note = 2'-Omethyladenosine phosphorothiorate
  modified_base 33: mod_base = OTHER; note = 2'-Omethyluridine phosphorothiorate
  modified_base 45: mod_base = OTHER; note = 2'-fluoroguanosine
  modified_base 50: mod_base = OTHER; note = 2'-Omethylguanosine
  modified_base 53: mod_base = OTHER; note = 2'-Omethyluridine
  modified_base 58: mod_base = OTHER; note = 2'-Omethylguanosine
  modified_base 59: mod_base = OTHER; note = 2'-fluorouridine phosphorothiorate
  modified_base 60: mod_base = OTHER; note = 2'-Omethylcytosine
  modified_base 69: mod_base = OTHER; note = 2'-fluoroadenosine
  modified_base 72: mod_base = OTHER; note = 2'-Omethyluridine
  modified_base 74: mod_base = OTHER; note = 2'-Omethylcytosine phosphorothiorate
  modified_base 75: mod_base = OTHER; note = 2'-Omethyladenosine

SEQ ID NO: 7976 - RNA, 76 nt, synthetic construct; identical to SEQ ID NO: 625
  source 1..76: mol_type = other RNA
  modified_base 1: mod_base = OTHER; note = Guanosine phosphorothiorate
  modified_base 2: mod_base = OTHER; note = 2'-fluoroguanosine
  modified_base 3: mod_base = OTHER; note = 2'-fluorocytosine
  modified_base 4: mod_base = OTHER; note = 2'-Omethyluridine
  modified_base 5: mod_base = OTHER; note = 2'-fluorocytosine
  modified_base 10: mod_base = OTHER; note = 2'-Omethylguanosine
  modified_base 12: mod_base = OTHER; note = 2'-Omethylguanosine
  modified_base 15: mod_base = OTHER; note = 2'-fluoroadenosine
  modified_base 20: mod_base = OTHER; note = 2'-fluorouridine
  modified_base 23: mod_base = OTHER; note = 2'-fluorocytosine phosphorothiorate
  modified_base 25: mod_base = OTHER; note = 2'-fluorocytosine
  modified_base 28: mod_base = OTHER; note = 2'-fluorouridine phosphorothiorate
  modified_base 29: mod_base = OTHER; note = 2'-Omethylguanosine
  modified_base 39: mod_base = OTHER; note = 2'-Omethyluridine
  modified_base 42: mod_base = OTHER; note = Adenosine phosphorothiorate
  modified_base 43: mod_base = OTHER; note = 2'-fluoroadenosine
  modified_base 47: mod_base = OTHER; note = Uridine phosphorothiorate
  modified_base 49: mod_base = OTHER; note = Cytosine phosphorothiorate
  modified_base 50: mod_base = OTHER; note = 2'-Omethylcytosine
  modified_base 53: mod_base = OTHER; note = 2'-Omethylguanosine
  modified_base 56: mod_base = OTHER; note = 2'-fluorocytosine
  modified_base 57: mod_base = OTHER; note = 2'-fluoroguanosine
  modified_base 58: mod_base = OTHER; note = 2'-fluoroadenosine phosphorothiorate
  modified_base 59: mod_base = OTHER; note = 2'-Omethylguanosine
  modified_base 60: mod_base = OTHER; note = 2'-Omethyluridine
  modified_base 65: mod_base = OTHER; note = 2'-Omethylguanosine
  modified_base 66: mod_base = OTHER; note = Cytosine phosphorothiorate
  modified_base 67: mod_base = OTHER; note = 2'-fluoroguanosine
  modified_base 68: mod_base = OTHER; note = 2'-Omethylguanosine
  modified_base 69: mod_base = OTHER; note = Adenosine phosphorothiorate
  modified_base 71: mod_base = OTHER; note = Uridine phosphorothiorate
  modified_base 72: mod_base = OTHER; note = 2'-fluorocytosine phosphorothiorate
  modified_base 73: mod_base = OTHER; note = 2'-Omethylguanosine
  modified_base 74: mod_base = OTHER; note = 2'-Omethylcytosine
  modified_base 75: mod_base = OTHER; note = Cytosine phosphorothiorate

SEQ ID NO: 7977 - RNA, 76 nt, synthetic construct; identical to SEQ ID NO: 3419
  source 1..76: mol_type = other RNA
  modified_base 1: mod_base = OTHER; note = 2'-Omethylguanosine
  modified_base 13: mod_base = OTHER; note = 2'-Omethylcytosine
  modified_base 17: mod_base = OTHER; note = 2'-Omethylguanosine
  modified_base 18: mod_base = OTHER; note = 2'-Omethylguanosine
  modified_base 25: mod_base = OTHER; note = 2'-Omethylcytosine
  modified_base 33: mod_base = OTHER; note = Uridine phosphorothiorate
  modified_base 34: mod_base = OTHER; note = 2'-Omethyluridine
  modified_base 35: mod_base = OTHER; note = Cytosine phosphorothiorate
  modified_base 37: mod_base = OTHER; note = Adenosine phosphorothiorate
  modified_base 38: mod_base = OTHER; note = Adenosine phosphorothiorate
  modified_base 41: mod_base = OTHER; note = 2'-fluoroguanosine
  modified_base 42: mod_base = OTHER; note = 2'-Omethylguanosine
  modified_base 43: mod_base = OTHER; note = 2'-Omethyluridine
  modified_base 44: mod_base = OTHER; note = 2'-fluoroadenosine
  modified_base 49: mod_base = OTHER; note = 2'-Omethylcytosine
  modified_base 50: mod_base = OTHER; note = 2'-Omethylcytosine
  modified_base 52: mod_base = OTHER; note = 2'-Omethylguanosine
  modified_base 54: mod_base = OTHER; note = Uridine phosphorothiorate
  modified_base 55: mod_base = OTHER; note = Uridine phosphorothiorate
  modified_base 56: mod_base = OTHER; note = 2'-Omethylcytosine
  modified_base 57: mod_base = OTHER; note = Guanosine phosphorothiorate
  modified_base 58: mod_base = OTHER; note = Adenosine phosphorothiorate
  modified_base 59: mod_base = OTHER; note = 2'-Omethylguanosine
  modified_base 61: mod_base = OTHER; note = 2'-Omethylcytosine
  modified_base 65: mod_base = OTHER; note = 2'-Omethylguanosine
  modified_base 73: mod_base = OTHER; note = 2'-Omethylguanosine

SEQ ID NO: 7978 - RNA, 74 nt, synthetic construct; identical to SEQ ID NO: 3293
  source 1..74: mol_type = other RNA
  modified_base 1: mod_base = OTHER; note = 2'-Omethyladenosine phosphorothiorate
  modified_base 2: mod_base = OTHER; note = Cytosine phosphorothiorate
  modified_base 3: mod_base = OTHER; note = Cytosine phosphorothiorate
  modified_base 6: mod_base = OTHER; note = Guanosine phosphorothiorate
  modified_base 8: mod_base = OTHER; note = Guanosine phosphorothiorate
  modified_base 9: mod_base = OTHER; note = 2'-fluoroguanosine
  modified_base 11: mod_base = OTHER; note = 2'-fluoroguanosine
  modified_base 25: mod_base = OTHER; note = 2'-fluorouridine phosphorothiorate
  modified_base 27: mod_base = OTHER; note = 2'-fluorouridine phosphorothiorate
  modified_base 41: mod_base = OTHER; note = 2'-fluoroadenosine phosphorothiorate
  modified_base 42: mod_base = OTHER; note = Adenosine phosphorothiorate
  modified_base 43: mod_base = OTHER; note = 2'-fluoroguanosine
  modified_base 46: mod_base = OTHER; note = Uridine phosphorothiorate
  modified_base 48: mod_base = OTHER; note = 2'-fluorocytosine
  modified_base 62: mod_base = OTHER; note = Guanosine phosphorothiorate
  modified_base 73: mod_base = OTHER; note = 2'-Omethylcytosine phosphorothiorate
  modified_base 74: mod_base = OTHER; note = 2'-Omethyladenosine

SEQ ID NO: 7979 - RNA, 76 nt, synthetic construct; identical to SEQ ID NO: 3289
  source 1..76: mol_type = other RNA
  modified_base 1: mod_base = OTHER; note = 2'-Omethylguanosine
  modified_base 50: mod_base = OTHER; note = 2'-Omethyladenosine
  modified_base 52: mod_base = OTHER; note = 2'-Omethylguanosine
  modified_base 73: mod_base = OTHER; note = 2'-Omethylguanosine

SEQ ID NO: 7980 - RNA, 76 nt, synthetic construct; identical to SEQ ID NO: 3318
  source 1..76: mol_type = other RNA
  modified_base 1: mod_base = OTHER; note = 2'-Omethylcytosine
  modified_base 14: mod_base = OTHER; note = 2'-Omethyladenosine
  modified_base 15: mod_base = OTHER; note = 2'-Omethylguanosine
  modified_base 16: mod_base = OTHER; note = 2'-Omethyluridine
  modified_base 18: mod_base = OTHER; note = 2'-Omethylguanosine
  modified_base 19: mod_base = OTHER; note = 2'-Omethylguanosine
  modified_base 20: mod_base = OTHER; note = Uridine phosphorothiorate
  modified_base 21: mod_base = OTHER; note = Adenosine phosphorothiorate
  modified_base 33: mod_base = OTHER; note = 2'-fluorouridine
  modified_base 34: mod_base = OTHER; note = 2'-Omethylcytosine
  modified_base 35: mod_base = OTHER; note = Uridine phosphorothiorate
  modified_base 37: mod_base = OTHER; note = Guanosine phosphorothiorate
  modified_base 38: mod_base = OTHER; note = Adenosine phosphorothiorate
  modified_base 50: mod_base = OTHER; note = 2'-Omethylcytosine
  modified_base 52: mod_base = OTHER; note = 2'-Omethylguanosine
  modified_base 73: mod_base = OTHER; note = 2'-Omethyladenosine

SEQ ID NO: 7981 - RNA, 74 nt, synthetic construct; identical to SEQ ID NO: 3293
  source 1..74: mol_type = other RNA
  modified_base 1: mod_base = OTHER; note = Adenosine phosphorothiorate
  modified_base 2: mod_base = OTHER; note = 2'-Omethylcytosine phosphorothiorate
  modified_base 4: mod_base = OTHER; note = Uridine phosphorothiorate
  modified_base 6: mod_base = OTHER; note = 2'-fluoroguanosine
  modified_base 8: mod_base = OTHER; note = Guanosine phosphorothiorate
  modified_base 9: mod_base = OTHER; note = 2'-fluoroguanosine phosphorothiorate
  modified_base 24: mod_base = OTHER; note = 2'-fluoroguanosine
  modified_base 25: mod_base = OTHER; note = 2'-fluorouridine phosphorothiorate
  modified_base 27: mod_base = OTHER; note = 2'-fluorouridine
  modified_base 42: mod_base = OTHER; note = Adenosine phosphorothiorate
  modified_base 44: mod_base = OTHER; note = Guanosine phosphorothiorate
  modified_base 48: mod_base = OTHER; note = 2'-fluorocytosine
  modified_base 50: mod_base = OTHER; note = Uridine phosphorothiorate
  modified_base 51: mod_base = OTHER; note = 2'-fluoroguanosine
  modified_base 62: mod_base = OTHER; note = Guanosine phosphorothiorate
  modified_base 73: mod_base = OTHER; note = 2'-Omethylcytosine phosphorothiorate
  modified_base 74: mod_base = OTHER; note = 2'-Omethyladenosine

SEQ ID NO: 7982 - RNA, 76 nt, synthetic construct; identical to SEQ ID NO: 625
  source 1..76: mol_type = other RNA
  modified_base 2: mod_base = OTHER; note = 2'-Omethylguanosine
  modified_base 6: mod_base = OTHER; note = 2'-Omethylcytosine
  modified_base 8: mod_base = OTHER; note = Uridine phosphorothiorate
  modified_base 10: mod_base = OTHER; note = 2'-Omethylguanosine
  modified_base 12: mod_base = OTHER; note = 2'-fluoroguanosine
  modified_base 13: mod_base = OTHER; note = Cytosine phosphorothiorate
  modified_base 14: mod_base = OTHER; note = 2'-Omethyladenosine phosphorothiorate
  modified_base 15: mod_base = OTHER; note = 2'-Omethyladenosine
  modified_base 20: mod_base = OTHER; note = 2'-Omethyluridine phosphorothiorate
  modified_base 24: mod_base = OTHER; note = 2'-Omethylguanosine
  modified_base 29: mod_base = OTHER; note = 2'-Omethylguanosine phosphorothiorate
  modified_base 30: mod_base = OTHER; note = 2'-Omethylguanosine
  modified_base 32: mod_base = OTHER; note = 2'-fluorocytosine
  modified_base 34: mod_base = OTHER; note = Uridine phosphorothiorate
  modified_base 37: mod_base = OTHER; note = Adenosine phosphorothiorate
  modified_base 38: mod_base = OTHER; note = 2'-Omethyladenosine
  modified_base 39: mod_base = OTHER; note = 2'-Omethyluridine
  modified_base 46: mod_base = OTHER; note = 2'-fluoroguanosine
  modified_base 47: mod_base = OTHER; note = Uridine phosphorothiorate
  modified_base 51: mod_base = OTHER; note = 2'-Omethylguanosine phosphorothiorate
  modified_base 56: mod_base = OTHER; note = 2'-Omethylcytosine
  modified_base 57: mod_base = OTHER; note = 2'-Omethylguanosine
  modified_base 61: mod_base = OTHER; note = Cytosine phosphorothiorate
  modified_base 62: mod_base = OTHER; note = 2'-fluorocytosine
  modified_base 63: mod_base = OTHER; note = Cytosine phosphorothiorate
  modified_base 64: mod_base = OTHER; note = 2'-Omethylguanosine
  modified_base 66: mod_base = OTHER; note = 2'-fluorocytosine
  modified_base 67: mod_base = OTHER; note = 2'-Omethylguanosine
  modified_base 72: mod_base = OTHER; note = 2'-fluorocytosine
  modified_base 73: mod_base = OTHER; note = 2'-Omethylguanosine
  modified_base 75: mod_base = OTHER; note = 2'-Omethylcytosine phosphorothiorate

SEQ ID NO: 7983 - RNA, 75 nt, synthetic construct; identical to SEQ ID NO: 1045
  source 1..75: mol_type = other RNA
  modified_base 1: mod_base = OTHER; note = 2'-Omethylguanosine
  modified_base 2: mod_base = OTHER; note = 2'-fluoroguanosine phosphorothiorate
  modified_base 3: mod_base = OTHER; note = 2'-fluorouridine phosphorothiorate
  modified_base 11: mod_base = OTHER; note = 2'-fluorouridine
  modified_base 16: mod_base = OTHER; note = 2'-fluorouridine phosphorothiorate
  modified_base 21: mod_base = OTHER; note = Adenosine phosphorothiorate
  modified_base 22: mod_base = OTHER; note = 2'-fluoroguanosine
  modified_base 24: mod_base = OTHER; note = 2'-fluoroadenosine
  modified_base 25: mod_base = OTHER; note = 2'-fluorocytosine
  modified_base 26: mod_base = OTHER; note = 2'-fluorouridine phosphorothiorate
  modified_base 28: mod_base = OTHER; note = 2'-Omethyluridine
  modified_base 32: mod_base = OTHER; note = 2'-fluorocytosine
  modified_base 36: mod_base = OTHER; note = 2'-fluoroadenosine
  modified_base 38: mod_base = OTHER; note = 2'-fluoroadenosine phosphorothiorate
  modified_base 49: mod_base = OTHER; note = 2'-fluorocytosine phosphorothiorate
  modified_base 56: mod_base = OTHER; note = 2'-Omethylguanosine
  modified_base 61: mod_base = OTHER; note = Uridine phosphorothiorate
  modified_base 62: mod_base = OTHER; note = 2'-fluorocytosine
  modified_base 64: mod_base = OTHER; note = 2'-fluoroguanosine
  modified_base 67: mod_base = OTHER; note = Guanosine phosphorothiorate
  modified_base 68: mod_base = OTHER; note = 2'-fluoroadenosine
  modified_base 74: mod_base = OTHER; note = Cytosine phosphorothiorate
  modified_base 75: mod_base = OTHER; note = 2'-Omethyladenosine

SEQ ID NO: 7984 - RNA, 76 nt, synthetic construct; identical to SEQ ID NO: 3289
  source 1..76: mol_type = other RNA
  modified_base 1: mod_base = OTHER; note = 2'-Omethylguanosine
  modified_base 14: mod_base = OTHER; note = 2'-Omethyladenosine
  modified_base 15: mod_base = OTHER; note = 2'-Omethylguanosine
  modified_base 16: mod_base = OTHER; note = 2'-Omethyluridine
  modified_base 18: mod_base = OTHER; note = 2'-Omethylguanosine
  modified_base 19: mod_base = OTHER; note = 2'-Omethylguanosine
  modified_base 20: mod_base = OTHER; note = Uridine phosphorothiorate
  modified_base 21: mod_base = OTHER; note = Adenosine phosphorothiorate
  modified_base 33: mod_base = OTHER; note = Uridine phosphorothiorate
  modified_base 34: mod_base = OTHER; note = 2'-Omethyluridine
  modified_base 35: mod_base = OTHER; note = Uridine phosphorothiorate
  modified_base 37: mod_base = OTHER; note = Adenosine phosphorothiorate
  modified_base 38: mod_base = OTHER; note = Adenosine phosphorothiorate
  modified_base 41: mod_base = OTHER; note = 2'-fluorouridine
  modified_base 42: mod_base = OTHER; note = 2'-Omethylguanosine
  modified_base 43: mod_base = OTHER; note = 2'-Omethyladenosine
  modified_base 44: mod_base = OTHER; note = 2'-fluoroguanosine
  modified_base 50: mod_base = OTHER; note = 2'-Omethyladenosine
  modified_base 52: mod_base = OTHER; note = 2'-Omethylguanosine
  modified_base 73: mod_base = OTHER; note = 2'-Omethylguanosine

SEQ ID NO: 7985 - RNA, 76 nt, synthetic construct; identical to SEQ ID NO: 3295
  source 1..76: mol_type = other RNA
  modified_base 1: mod_base = OTHER; note = Cytosine phosphorothiorate
  modified_base 2: mod_base = OTHER; note = 2'-fluorocytosine phosphorothiorate
  modified_base 3: mod_base = OTHER; note = 2'-fluorouridine
  modified_base 4: mod_base = OTHER; note = Uridine phosphorothiorate
  modified_base 5: mod_base = OTHER; note = 2'-Omethylcytosine
  modified_base 7: mod_base = OTHER; note = 2'-Omethyladenosine
  modified_base 8: mod_base = OTHER; note = Uridine phosphorothiorate
  modified_base 12: mod_base = OTHER; note = 2'-fluorouridine phosphorothiorate
  modified_base 17: mod_base = OTHER; note = 2'-fluorouridine phosphorothiorate
  modified_base 23: mod_base = OTHER; note = Adenosine phosphorothiorate
  modified_base 25: mod_base = OTHER; note = 2'-fluorocytosine phosphorothiorate
  modified_base 30: mod_base = OTHER; note = 2'-Omethylguanosine
  modified_base 36: mod_base = OTHER; note = 2'-Omethyladenosine phosphorothiorate
  modified_base 43: mod_base = OTHER; note = 2'-fluorouridine phosphorothiorate
  modified_base 45: mod_base = OTHER; note = 2'-fluoroguanosine
  modified_base 49: mod_base = OTHER; note = 2'-fluoroguanosine phosphorothiorate
  modified_base 53: mod_base = OTHER; note = 2'-Omethylguanosine
  modified_base 75: mod_base = OTHER; note = 2'-fluorocytosine phosphorothiorate

SEQ ID NO: 7986 - RNA, 85 nt, synthetic construct; identical to SEQ ID NO: 3297
  source 1..85: mol_type = other RNA
  modified_base 1: mod_base = OTHER; note = 2'-Omethylguanosine phosphorothiorate
  modified_base 2: mod_base = OTHER; note = 2'-Omethylcytosine phosphorothiorate
  modified_base 84: mod_base = OTHER; note = Cytosine phosphorothiorate
  modified_base 85: mod_base = OTHER; note = 2'-Omethyladenosine

SEQ ID NO: 7987 - RNA, 85 nt, synthetic construct; identical to SEQ ID NO: 3286
  source 1..85: mol_type = other RNA
  modified_base 1: mod_base = OTHER; note = 2'-Omethylcytosine
  modified_base 3: mod_base = OTHER; note = 2'-fluoroadenosine
  modified_base 8: mod_base = OTHER; note = Guanosine phosphorothiorate
  modified_base 20: mod_base = OTHER; note = 2'-fluoroadenosine
  modified_base 27: mod_base = OTHER; note = 2'-fluorouridine
  modified_base 29: mod_base = OTHER; note = 2'-fluoroguanosine
  modified_base 32: mod_base = OTHER; note = 2'-fluorouridine
  modified_base 35: mod_base = OTHER; note = 2'-Omethyladenosine phosphorothiorate
  modified_base 38: mod_base = OTHER; note = Uridine phosphorothiorate
  modified_base 39: mod_base = OTHER; note = Cytosine phosphorothiorate
  modified_base 43: mod_base = OTHER; note = 2'-Omethyluridine
  modified_base 46: mod_base = OTHER; note = 2'-Omethyladenosine
  modified_base 50: mod_base = OTHER; note = Adenosine phosphorothiorate
  modified_base 54: mod_base = OTHER; note = 2'-Omethylcytosine
  modified_base 58: mod_base = OTHER; note = Guanosine phosphorothiorate
  modified_base 60: mod_base = OTHER; note = 2'-fluoroguanosine
  modified_base 73: mod_base = OTHER; note = 2'-fluoroadenosine
  modified_base 84: mod_base = OTHER; note = 2'-fluorocytosine

SEQ ID NO: 7988 - RNA, 75 nt, synthetic construct; identical to SEQ ID NO: 1045
  source 1..75: mol_type = other RNA
  modified_base 1: mod_base = OTHER; note = 2'-Omethylguanosine phosphorothiorate
  modified_base 2: mod_base = OTHER; note = 2'-Omethylguanosine phosphorothiorate
  modified_base 14: mod_base = OTHER; note = 2'-Omethyladenosine
  modified_base 17: mod_base = OTHER; note = 2'-Omethylguanosine
  modified_base 18: mod_base = OTHER; note = 2'-Omethylguanosine
  modified_base 20: mod_base = OTHER; note = 2'-Omethyladenosine phosphorothiorate
  modified_base 22: mod_base = OTHER; note = 2'-Omethylguanosine
  modified_base 25: mod_base = OTHER; note = 2'-Omethylcytosine
  modified_base 27: mod_base = OTHER; note = 2'-Omethylcytosine
  modified_base 33: mod_base = OTHER; note = 2'-fluorouridine
  modified_base 41: mod_base = OTHER; note = 2'-Omethylcytosine phosphorothiorate
  modified_base 44: mod_base = OTHER; note = 2'-Omethylcytosine
  modified_base 45: mod_base = OTHER; note = 2'-Omethylguanosine
  modified_base 46: mod_base = OTHER; note = 2'-fluoroadenosine
  modified_base 47: mod_base = OTHER; note = 2'-fluorouridine
  modified_base 51: mod_base = OTHER; note = 2'-Omethyladenosine
  modified_base 54: mod_base = OTHER; note = Uridine phosphorothiorate
  modified_base 70: mod_base = OTHER; note = 2'-Omethylcytosine
  modified_base 72: mod_base = OTHER; note = 2'-Omethyluridine

SEQ ID NO: 7989 - RNA, 76 nt, synthetic construct
  source 1..76: mol_type = other RNA
gggggtatagctcagtgggcagagcgtccgacttcagatcggatggtctcgggttcgatccccgatgcctccacca

SEQ ID NO: 7990 - RNA, 75 nt, synthetic construct; identical to SEQ ID NO: 3306
  source 1..75: mol_type = other RNA
  modified_base 1: mod_base = OTHER; note = 2'-Omethylguanosine
  modified_base 10: mod_base = OTHER; note = 2'-Omethylguanosine
  modified_base 11: mod_base = OTHER; note = 2'-Omethylcytosine
  modified_base 12: mod_base = OTHER; note = 2'-Omethylguanosine
  modified_base 13: mod_base = OTHER; note = 2'-Omethylcytosine
  modified_base 14: mod_base = OTHER; note = 2'-Omethyladenosine
  modified_base 15: mod_base = OTHER; note = 2'-Omethyladenosine
  modified_base 16: mod_base = OTHER; note = 2'-Omethylcytosine
  modified_base 17: mod_base = OTHER; note = 2'-Omethylguanosine
  modified_base 18: mod_base = OTHER; note = 2'-Omethylguanosine
  modified_base 19: mod_base = OTHER; note = Uridine phosphorothiorate
  modified_base 20: mod_base = OTHER; note = Adenosine phosphorothiorate
  modified_base 21: mod_base = OTHER; note = 2'-Omethylguanosine
  modified_base 22: mod_base = OTHER; note = 2'-Omethylcytosine
  modified_base 23: mod_base = OTHER; note = 2'-Omethylguanosine
  modified_base 24: mod_base = OTHER; note = 2'-Omethylcytosine
  modified_base 32: mod_base = OTHER; note = Uridine phosphorothiorate
  modified_base 33: mod_base = OTHER; note = 2'-Omethylcytosine
  modified_base 34: mod_base = OTHER; note = Uridine phosphorothiorate
  modified_base 36: mod_base = OTHER; note = Guanosine phosphorothiorate
  modified_base 37: mod_base = OTHER; note = Adenosine phosphorothiorate
  modified_base 48: mod_base = OTHER; note = 2'-Omethylguanosine
  modified_base 49: mod_base = OTHER; note = 2'-Omethylcytosine
  modified_base 51: mod_base = OTHER; note = 2'-Omethyluridine
  modified_base 53: mod_base = OTHER; note = Uridine phosphorothiorate
  modified_base 54: mod_base = OTHER; note = Uridine phosphorothiorate
  modified_base 60: mod_base = OTHER; note = 2'-Omethylcytosine
  modified_base 64: mod_base = OTHER; note = 2'-Omethyluridine
  modified_base 72: mod_base = OTHER; note = 2'-Omethyladenosine

SEQ ID NO: 7991 - RNA, 75 nt, synthetic construct; identical to SEQ ID NO: 3336
  source 1..75: mol_type = other RNA
  modified_base 14: mod_base = OTHER; note = 2'-fluoroguanosine
  modified_base 19: mod_base = OTHER; note = 2'-fluorouridine
  modified_base 20: mod_base = OTHER; note = 2'-fluoroadenosine
  modified_base 40: mod_base = OTHER; note = 2'-fluorouridine phosphorothiorate
  modified_base 47: mod_base = OTHER; note = 2'-fluorocytosine
  modified_base 48: mod_base = OTHER; note = 2'-fluorocytosine
  modified_base 62: mod_base = OTHER; note = 2'-fluorocytosine
  modified_base 72: mod_base = OTHER; note = Guanosine phosphorothiorate
  modified_base 74: mod_base = OTHER; note = 2'-Omethylcytosine

SEQ ID NO: 7992 - RNA, 76 nt, synthetic construct; identical to SEQ ID NO: 625
  source 1..76: mol_type = other RNA
  modified_base 1: mod_base = OTHER; note = 2'-Omethylguanosine
  modified_base 10: mod_base = OTHER; note = 2'-Omethylguanosine
  modified_base 13: mod_base = OTHER; note = 2'-Omethylcytosine
  modified_base 17: mod_base = OTHER; note = Guanosine phosphorothiorate
  modified_base 18: mod_base = OTHER; note = 2'-Omethylguanosine
  modified_base 19: mod_base = OTHER; note = Adenosine phosphorothiorate
  modified_base 25: mod_base = OTHER; note = 2'-Omethylcytosine
  modified_base 29: mod_base = OTHER; note = 2'-Omethylguanosine
  modified_base 33: mod_base = OTHER; note = 2'-fluorouridine
  modified_base 35: mod_base = OTHER; note = Cytosine phosphorothiorate
  modified_base 37: mod_base = OTHER; note = Adenosine phosphorothiorate
  modified_base 38: mod_base = OTHER; note = Adenosine phosphorothiorate
  modified_base 41: mod_base = OTHER; note = 2'-fluorocytosine
  modified_base 43: mod_base = OTHER; note = 2'-Omethyladenosine
  modified_base 44: mod_base = OTHER; note = 2'-fluoroadenosine
  modified_base 46: mod_base = OTHER; note = Guanosine phosphorothiorate
  modified_base 50: mod_base = OTHER; note = 2'-Omethylcytosine
  modified_base 52: mod_base = OTHER; note = 2'-Omethylguanosine
  modified_base 54: mod_base = OTHER; note = Uridine phosphorothiorate
  modified_base 55: mod_base = OTHER; note = Uridine phosphorothiorate
  modified_base 56: mod_base = OTHER; note = 2'-Omethylcytosine
  modified_base 57: mod_base = OTHER; note = Guanosine phosphorothiorate
  modified_base 62: mod_base = OTHER; note = 2'-Omethylcytosine
  modified_base 63: mod_base = OTHER; note = 2'-fluorocytosine
  modified_base 65: mod_base = OTHER; note = 2'-Omethylguanosine
  modified_base 71: mod_base = OTHER; note = 2'-Omethyluridine
  modified_base 73: mod_base = OTHER; note = 2'-Omethylguanosine

SEQ ID NO: 7993 - RNA, 75 nt, synthetic construct; identical to SEQ ID NO: 3311
  source 1..75: mol_type = other RNA
  modified_base 1: mod_base = OTHER; note = 2'-Omethylguanosine phosphorothiorate
  modified_base 2: mod_base = OTHER; note = 2'-Omethylguanosine
  modified_base 6: mod_base = OTHER; note = 2'-fluorocytosine phosphorothiorate
  modified_base 16: mod_base = OTHER; note = 2'-fluorouridine
  modified_base 18: mod_base = OTHER; note = 2'-fluoroguanosine
  modified_base 19: mod_base = OTHER; note = Uridine phosphorothiorate
  modified_base 21: mod_base = OTHER; note = 2'-Omethyladenosine
  modified_base 22: mod_base = OTHER; note = Guanosine phosphorothiorate
  modified_base 23: mod_base = OTHER; note = 2'-fluorocytosine
  modified_base 25: mod_base = OTHER; note = 2'-fluorocytosine phosphorothiorate
  modified_base 29: mod_base = OTHER; note = 2'-fluoroguanosine
  modified_base 30: mod_base = OTHER; note = 2'-fluoroguanosine
  modified_base 38: mod_base = OTHER; note = 2'-fluoroadenosine
  modified_base 44: mod_base = OTHER; note = 2'-fluorocytosine
  modified_base 50: mod_base = OTHER; note = 2'-fluoroguanosine
  modified_base 61: mod_base = OTHER; note = Uridine phosphorothiorate
  modified_base 63: mod_base = OTHER; note = 2'-fluoroguanosine
  modified_base 65: mod_base = OTHER; note = Uridine phosphorothiorate
  modified_base 66: mod_base = OTHER; note = 2'-fluoroguanosine
  modified_base 67: mod_base = OTHER; note = Guanosine phosphorothiorate
  modified_base 69: mod_base = OTHER; note = Adenosine phosphorothiorate
  modified_base 73: mod_base = OTHER; note = Cytosine phosphorothiorate

SEQ ID NO: 7994 - RNA, 74 nt, synthetic construct; identical to SEQ ID NO: 3293
  source 1..74: mol_type = other RNA
  modified_base 1: mod_base = OTHER; note = 2'-fluoroadenosine phosphorothiorate
  modified_base 8: mod_base = OTHER; note = Guanosine phosphorothiorate
  modified_base 12: mod_base = OTHER; note = 2'-fluorocytosine
  modified_base 24: mod_base = OTHER; note = 2'-fluoroguanosine
  modified_base 27: mod_base = OTHER; note = 2'-fluorouridine
  modified_base 43: mod_base = OTHER; note = 2'-Omethylguanosine phosphorothiorate
  modified_base 49: mod_base = OTHER; note = 2'-fluoroguanosine
  modified_base 73: mod_base = OTHER; note = 2'-Omethylcytosine phosphorothiorate

SEQ ID NO: 7995 - RNA, 85 nt, synthetic construct; identical to SEQ ID NO: 3297
  source 1..85: mol_type = other RNA
  modified_base 1: mod_base = OTHER; note = 2'-Omethylguanosine phosphorothiorate
  modified_base 2: mod_base = OTHER; note = 2'-Omethylcytosine
  modified_base 83: mod_base = OTHER; note = Cytosine phosphorothiorate
  modified_base 84: mod_base = OTHER; note = 2'-Omethylcytosine

SEQ ID NO: 7996 - RNA, 76 nt, synthetic construct; identical to SEQ ID NO: 3325
  source 1..76: mol_type = other RNA
  modified_base 1: mod_base = OTHER; note = 2'-Omethyluridine phosphorothiorate
  modified_base 2: mod_base = OTHER; note = 2'-Omethyladenosine phosphorothiorate
  modified_base 3: mod_base = OTHER; note = 2'-Omethylcytosine
  modified_base 4: mod_base = OTHER; note = 2'-Omethyladenosine
  modified_base 5: mod_base = OTHER; note = 2'-Omethylcytosine
  modified_base 6: mod_base = OTHER; note = 2'-Omethylcytosine
  modified_base 10: mod_base = OTHER; note = 2'-Omethylguanosine
  modified_base 11: mod_base = OTHER; note = 2'-Omethylcytosine
  modified_base 12: mod_base = OTHER; note = 2'-Omethylguanosine
  modified_base 13: mod_base = OTHER; note = 2'-Omethylcytosine
  modified_base 14: mod_base = OTHER; note = 2'-Omethyladenosine
  modified_base 15: mod_base = OTHER; note = 2'-fluoroadenosine
  modified_base 16: mod_base = OTHER; note = 2'-Omethyluridine
  modified_base 17: mod_base = OTHER; note = 2'-Omethylguanosine
  modified_base 18: mod_base = OTHER; note = 2'-Omethylguanosine
  modified_base 19: mod_base = OTHER; note = 2'-fluoroadenosine
  modified_base 20: mod_base = OTHER; note = 2'-Omethyluridine
  modified_base 22: mod_base = OTHER; note = 2'-Omethylguanosine
  modified_base 23: mod_base = OTHER; note = 2'-Omethylcytosine
  modified_base 24: mod_base = OTHER; note = 2'-Omethylguanosine
  modified_base 25: mod_base = OTHER; note = 2'-Omethylcytosine
  modified_base 33: mod_base = OTHER; note = 2'-fluorouridine
  modified_base 35: mod_base = OTHER; note = Cytosine phosphorothiorate
  modified_base 37: mod_base = OTHER; note = Adenosine phosphorothiorate
  modified_base 38: mod_base = OTHER; note = Adenosine phosphorothiorate
  modified_base 44: mod_base = OTHER; note = 2'-Omethyladenosine
  modified_base 45: mod_base = OTHER; note = 2'-Omethylguanosine
  modified_base 46: mod_base = OTHER; note = 2'-fluoroguanosine
  modified_base 47: mod_base = OTHER; note = 2'-fluorouridine
  modified_base 48: mod_base = OTHER; note = 2'-fluorouridine
  modified_base 56: mod_base = OTHER; note = 2'-Omethylcytosine
  modified_base 59: mod_base = OTHER; note = 2'-Omethylguanosine
  modified_base 61: mod_base = OTHER; note = 2'-Omethylcytosine
  modified_base 62: mod_base = OTHER; note = 2'-Omethylcytosine
  modified_base 63: mod_base = OTHER; note = 2'-fluorocytosine
  modified_base 64: mod_base = OTHER; note = 2'-Omethylguanosine
  modified_base 65: mod_base = OTHER; note = 2'-Omethylguanosine
  modified_base 66: mod_base = OTHER; note = 2'-Omethylcytosine
  modified_base 67: mod_base = OTHER; note = 2'-Omethylguanosine
  modified_base 68: mod_base = OTHER; note = 2'-Omethylguanosine
  modified_base 73: mod_base = OTHER; note = 2'-Omethylguanosine

SEQ ID NO: 7997 - RNA, 85 nt, synthetic construct; identical to SEQ ID NO: 3297
  source 1..85: mol_type = other RNA
  modified_base 1: mod_base = OTHER; note = 2'-Omethylguanosine
  modified_base 13: mod_base = OTHER; note = 2'-Omethylguanosine
  modified_base 14: mod_base = OTHER; note = 2'-Omethyladenosine
  modified_base 15: mod_base = OTHER; note = 2'-Omethylguanosine
  modified_base 16: mod_base = OTHER; note = 2'-Omethyluridine
  modified_base 17: mod_base = OTHER; note = 2'-Omethylguanosine
  modified_base 18: mod_base = OTHER; note = 2'-Omethylguanosine
  modified_base 19: mod_base = OTHER; note = Uridine phosphorothiorate
  modified_base 20: mod_base = OTHER; note = 2'-Omethyluridine
  modified_base 21: mod_base = OTHER; note = Adenosine phosphorothiorate
  modified_base 25: mod_base = OTHER; note = 2'-Omethylcytosine
  modified_base 41: mod_base = OTHER; note = 2'-fluorocytosine
  modified_base 42: mod_base = OTHER; note = 2'-Omethyladenosine
  modified_base 43: mod_base = OTHER; note = 2'-Omethyladenosine
  modified_base 44: mod_base = OTHER; note = 2'-fluorouridine
  modified_base 58: mod_base = OTHER; note = 2'-Omethylguanosine
  modified_base 59: mod_base = OTHER; note = 2'-Omethylcytosine
  modified_base 60: mod_base = OTHER; note = 2'-Omethyladenosine
  modified_base 61: mod_base = OTHER; note = 2'-Omethylguanosine
  modified_base 62: mod_base = OTHER; note = 2'-Omethylguanosine
  modified_base 63: mod_base = OTHER; note = Uridine phosphorothiorate
  modified_base 64: mod_base = OTHER; note = Uridine phosphorothiorate
  modified_base 70: mod_base = OTHER; note = 2'-Omethylcytosine
  modified_base 74: mod_base = OTHER; note = 2'-Omethylcytosine
  modified_base 82: mod_base = OTHER; note = 2'-Omethylguanosine

SEQ ID NO: 7998 - RNA, 76 nt, synthetic construct; identical to SEQ ID NO: 3295
  source 1..76: mol_type = other RNA
  modified_base 1: mod_base = OTHER; note = 2'-Omethylcytosine
  modified_base 2: mod_base = OTHER; note = 2'-Omethylcytosine
  modified_base 5: mod_base = OTHER; note = 2'-Omethylcytosine phosphorothiorate
  modified_base 9: mod_base = OTHER; note = 2'-fluoroadenosine
  modified_base 16: mod_base = OTHER; note = 2'-Omethyluridine phosphorothiorate
  modified_base 17: mod_base = OTHER; note = 2'-Omethyluridine
  modified_base 25: mod_base = OTHER; note = 2'-Omethylcytosine
  modified_base 27: mod_base = OTHER; note = Guanosine phosphorothiorate
  modified_base 35: mod_base = OTHER; note = 2'-fluorouridine phosphorothiorate
  modified_base 38: mod_base = OTHER; note = Adenosine phosphorothiorate
  modified_base 39: mod_base = OTHER; note = 2'-fluorouridine
  modified_base 48: mod_base = OTHER; note = 2'-Omethylcytosine
  modified_base 50: mod_base = OTHER; note = 2'-fluorocytosine phosphorothiorate
  modified_base 54: mod_base = OTHER; note = Uridine phosphorothiorate
  modified_base 57: mod_base = OTHER; note = Guanosine phosphorothiorate
  modified_base 76: mod_base = OTHER; note = 2'-fluoroadenosine

SEQ ID NO: 7999 - RNA, 75 nt, synthetic construct; identical to SEQ ID NO: 3299
  source 1..75: mol_type = other RNA
  modified_base 1: mod_base = OTHER; note = Cytosine phosphorothiorate
  modified_base 10: mod_base = OTHER; note = 2'-fluorocytosine
  modified_base 13: mod_base = OTHER; note = 2'-Omethyladenosine
  modified_base 21: mod_base = OTHER; note = Guanosine phosphorothiorate
  modified_base 23: mod_base = OTHER; note = 2'-fluoroguanosine
  modified_base 26: mod_base = OTHER; note = 2'-fluorouridine phosphorothiorate
  modified_base 37: mod_base = OTHER; note = 2'-fluoroadenosine
  modified_base 38: mod_base = OTHER; note = 2'-fluorouridine
  modified_base 42: mod_base = OTHER; note = 2'-Omethyladenosine phosphorothiorate
  modified_base 50: mod_base = OTHER; note = 2'-fluoroguanosine
  modified_base 51: mod_base = OTHER; note = Guanosine phosphorothiorate
  modified_base 57: mod_base = OTHER; note = 2'-Omethyladenosine phosphorothiorate
  modified_base 58: mod_base = OTHER; note = Guanosine phosphorothiorate
  modified_base 62: mod_base = OTHER; note = Cytosine phosphorothiorate
  modified_base 64: mod_base = OTHER; note = 2'-fluoroguanosine phosphorothiorate
  modified_base 72: mod_base = OTHER; note = 2'-Omethylguanosine
  modified_base 74: mod_base = OTHER; note = 2'-fluorocytosine

SEQ ID NO: 8000 - RNA, 76 nt, synthetic construct; identical to SEQ ID NO: 3318
  source 1..76: mol_type = other RNA
  modified_base 19: mod_base = OTHER; note = 2'-Omethylguanosine
  modified_base 39: mod_base = OTHER; note = 2'-Omethyluridine

SEQ ID NO: 8001 - RNA, 74 nt, synthetic construct; identical to SEQ ID NO: 3293
  source 1..74: mol_type = other RNA
  modified_base 1: mod_base = OTHER; note = 2'-fluoroadenosine
  modified_base 2: mod_base = OTHER; note = Cytosine phosphorothiorate
  modified_base 3: mod_base = OTHER; note = 2'-Omethylcytosine
  modified_base 4: mod_base = OTHER; note = Uridine phosphorothiorate
  modified_base 6: mod_base = OTHER; note = 2'-fluoroguanosine
  modified_base 8: mod_base = OTHER; note = Guanosine phosphorothiorate
  modified_base 9: mod_base = OTHER; note = 2'-fluoroguanosine
  modified_base 15: mod_base = OTHER; note = 2'-fluorocytosine
  modified_base 24: mod_base = OTHER; note = 2'-fluoroguanosine
  modified_base 25: mod_base = OTHER; note = 2'-fluorouridine phosphorothiorate
  modified_base 35: mod_base = OTHER; note = 2'-fluoroguanosine
  modified_base 42: mod_base = OTHER; note = Adenosine phosphorothiorate
  modified_base 43: mod_base = OTHER; note = 2'-fluoroguanosine
  modified_base 46: mod_base = OTHER; note = Uridine phosphorothiorate
  modified_base 48: mod_base = OTHER; note = 2'-fluorocytosine
  modified_base 51: mod_base = OTHER; note = 2'-fluoroguanosine
  modified_base 62: mod_base = OTHER; note = Guanosine phosphorothiorate
  modified_base 73: mod_base = OTHER; note = Cytosine phosphorothiorate
  modified_base 74: mod_base = OTHER; note = 2'-Omethyladenosine

SEQ ID NO: 8002 - RNA, 86 nt, synthetic construct; identical to SEQ ID NO: 3290
  source 1..86: mol_type = other RNA
  modified_base 1: mod_base = OTHER; note = 2'-Omethyladenosine phosphorothiorate
  modified_base 2: mod_base = OTHER; note = 2'-Omethylcytosine phosphorothiorate
  modified_base 3: mod_base = OTHER; note = 2'-Omethylcytosine
  modified_base 4: mod_base = OTHER; note = 2'-Omethyladenosine
  modified_base 5: mod_base = OTHER; note = 2'-Omethylguanosine
  modified_base 6: mod_base = OTHER; note = 2'-Omethylguanosine
  modified_base 14: mod_base = OTHER; note = 2'-Omethyladenosine
  modified_base 17: mod_base = OTHER; note = 2'-Omethylguanosine
  modified_base 18: mod_base = OTHER; note = 2'-Omethylguanosine
  modified_base 20: mod_base = OTHER; note = 2'-Omethyluridine
  modified_base 22: mod_base = OTHER; note = 2'-Omethyladenosine
  modified_base 25: mod_base = OTHER; note = 2'-Omethylcytosine
  modified_base 27: mod_base = OTHER; note = 2'-Omethyluridine
  modified_base 33: mod_base = OTHER; note = 2'-fluorouridine
  modified_base 41: mod_base = OTHER; note = 2'-Omethylcytosine
  modified_base 44: mod_base = OTHER; note = 2'-Omethyluridine
  modified_base 57: mod_base = OTHER; note = 2'-fluoroguanosine
  modified_base 58: mod_base = OTHER; note = 2'-fluorocytosine
  modified_base 62: mod_base = OTHER; note = 2'-Omethylguanosine
  modified_base 65: mod_base = OTHER; note = Uridine phosphorothiorate
  modified_base 81: mod_base = OTHER; note = 2'-Omethylguanosine
  modified_base 83: mod_base = OTHER; note = 2'-Omethyladenosine

SEQ ID NO: 8003 - RNA, 76 nt, synthetic construct; identical to SEQ ID NO: 3318
  source 1..76: mol_type = other RNA
  modified_base 1: mod_base = OTHER; note = 2'-Omethylcytosine phosphorothiorate
  modified_base 2: mod_base = OTHER; note = 2'-Omethylcytosine phosphorothiorate
  modified_base 14: mod_base = OTHER; note = 2'-Omethyladenosine
  modified_base 18: mod_base = OTHER; note = 2'-Omethylguanosine
  modified_base 19: mod_base = OTHER; note = 2'-Omethylguanosine
  modified_base 22: mod_base = OTHER; note = 2'-Omethylguanosine
  modified_base 25: mod_base = OTHER; note = 2'-Omethylcytosine
  modified_base 27: mod_base = OTHER; note = 2'-Omethylguanosine
  modified_base 33: mod_base = OTHER; note = 2'-fluorouridine
  modified_base 41: mod_base = OTHER; note = 2'-Omethylcytosine
  modified_base 44: mod_base = OTHER; note = 2'-Omethyladenosine
  modified_base 45: mod_base = OTHER; note = 2'-Omethylguanosine
  modified_base 46: mod_base = OTHER; note = 2'-fluoroguanosine
  modified_base 47: mod_base = OTHER; note = 2'-fluorouridine
  modified_base 48: mod_base = OTHER; note = 2'-fluorocytosine
  modified_base 52: mod_base = OTHER; note = 2'-Omethylguanosine
  modified_base 55: mod_base = OTHER; note = Uridine phosphorothiorate
  modified_base 71: mod_base = OTHER; note = 2'-Omethylguanosine
  modified_base 73: mod_base = OTHER; note = 2'-Omethyladenosine

SEQ ID NO: 8004 - RNA, 85 nt, synthetic construct; identical to SEQ ID NO: 3288
  source 1..85: mol_type = other RNA
  modified_base 1: mod_base = OTHER; note = 2'-Omethylcytosine
  modified_base 3: mod_base = OTHER; note = 2'-Omethyladenosine
  modified_base 5: mod_base = OTHER; note = 2'-fluoroguanosine
  modified_base 16: mod_base = OTHER; note = Guanosine phosphorothiorate
  modified_base 25: mod_base = OTHER; note = 2'-fluoroguanosine
  modified_base 26: mod_base = OTHER; note = 2'-fluorouridine phosphorothiorate
  modified_base 27: mod_base = OTHER; note = 2'-fluorouridine
  modified_base 30: mod_base = OTHER; note = 2'-fluoroadenosine
  modified_base 33: mod_base = OTHER; note = 2'-fluorouridine phosphorothiorate
  modified_base 34: mod_base = OTHER; note = 2'-fluorocytosine
  modified_base 35: mod_base = OTHER; note = 2'-fluoroadenosine phosphorothiorate
  modified_base 43: mod_base = OTHER; note = 2'-Omethyluridine
  modified_base 46: mod_base = OTHER; note = 2'-Omethyladenosine
  modified_base 53: mod_base = OTHER; note = 2'-fluorouridine
  modified_base 54: mod_base = OTHER; note = 2'-Omethylcytosine
  modified_base 57: mod_base = OTHER; note = 2'-Omethylcytosine
  modified_base 58: mod_base = OTHER; note = 2'-Omethylguanosine phosphorothiorate
  modified_base 60: mod_base = OTHER; note = 2'-fluoroguanosine phosphorothiorate
  modified_base 62: mod_base = OTHER; note = 2'-fluoroguanosine phosphorothiorate
  modified_base 73: mod_base = OTHER; note = 2'-fluoroadenosine phosphorothiorate
  modified_base 84: mod_base = OTHER; note = Cytosine phosphorothiorate

SEQ ID NO: 8005 - RNA, 76 nt, synthetic construct; identical to SEQ ID NO: 625
  source 1..76: mol_type = other RNA
  modified_base 2: mod_base = OTHER; note = 2'-fluoroguanosine
  modified_base 3: mod_base = OTHER; note = 2'-Omethylcytosine
  modified_base 4: mod_base = OTHER; note = 2'-fluorouridine
  modified_base 5: mod_base = OTHER; note = Cytosine phosphorothiorate
  modified_base 6: mod_base = OTHER; note = 2'-Omethylcytosine
  modified_base 11: mod_base = OTHER; note = Cytosine phosphorothiorate
  modified_base 13: mod_base = OTHER; note = 2'-fluorocytosine phosphorothiorate
  modified_base 14: mod_base = OTHER; note = 2'-Omethyladenosine
  modified_base 16: mod_base = OTHER; note = Uridine phosphorothiorate
  modified_base 17: mod_base = OTHER; note = 2'-Omethylguanosine
  modified_base 19: mod_base = OTHER; note = Adenosine phosphorothiorate
  modified_base 20: mod_base = OTHER; note = 2'-Omethyluridine
  modified_base 28: mod_base = OTHER; note = 2'-fluorouridine
  modified_base 30: mod_base = OTHER; note = 2'-Omethylguanosine
  modified_base 32: mod_base = OTHER; note = 2'-fluorocytosine
  modified_base 33: mod_base = OTHER; note = 2'-fluorouridine
  modified_base 37: mod_base = OTHER; note = Adenosine phosphorothiorate
  modified_base 38: mod_base = OTHER; note = 2'-fluoroadenosine
  modified_base 40: mod_base = OTHER; note = Uridine phosphorothiorate
  modified_base 41: mod_base = OTHER; note = 2'-Omethylcytosine
  modified_base 44: mod_base = OTHER; note = Adenosine phosphorothiorate
  modified_base 45: mod_base = OTHER; note = 2'-Omethylguanosine
  modified_base 46: mod_base = OTHER; note = 2'-fluoroguanosine
  modified_base 48: mod_base = OTHER; note = 2'-fluorouridine phosphorothiorate
  modified_base 49: mod_base = OTHER; note = 2'-fluorocytosine
  modified_base 51: mod_base = OTHER; note = 2'-Omethylguanosine
  modified_base 52: mod_base = OTHER; note = 2'-fluoroguanosine
  modified_base 53: mod_base = OTHER; note = 2'-Omethylguanosine
  modified_base 56: mod_base = OTHER; note = 2'-fluorocytosine
  modified_base 59: mod_base = OTHER; note = 2'-fluoroguanosine
  modified_base 61: mod_base = OTHER; note = 2'-fluorocytosine
  modified_base 62: mod_base = OTHER; note = 2'-Omethylcytosine
  modified_base 64: mod_base = OTHER; note = 2'-fluoroguanosine
  modified_base 65: mod_base = OTHER; note = Guanosine phosphorothiorate
  modified_base 66: mod_base = OTHER; note = 2'-fluorocytosine
  modified_base 67: mod_base = OTHER; note = Guanosine phosphorothiorate
  modified_base 68: mod_base = OTHER; note = 2'-fluoroguanosine
  modified_base 69: mod_base = OTHER; note = 2'-Omethyladenosine
  modified_base 71: mod_base = OTHER; note = 2'-Omethyluridine
  modified_base 73: mod_base = OTHER; note = Guanosine phosphorothiorate
  modified_base 74: mod_base = OTHER; note = 2'-Omethylcytosine
  modified_base 75: mod_base = OTHER; note = 2'-Omethylcytosine
  modified_base 76: mod_base = OTHER; note = 2'-fluoroadenosine

SEQ ID NO: 8006 - RNA, 76 nt, synthetic construct; identical to SEQ ID NO: 3289
  source 1..76: mol_type = other RNA
  modified_base 1: mod_base = OTHER; note = 2'-Omethylguanosine
  modified_base 54: mod_base = OTHER; note = 2'-Omethyluridine
  modified_base 56: mod_base = OTHER; note = 2'-Omethylcytosine
  modified_base 57: mod_base = OTHER; note = 2'-fluoroadenosine
  modified_base 58: mod_base = OTHER; note = 2'-fluoroadenosine
  modified_base 59: mod_base = OTHER; note = 2'-Omethylguanosine
  modified_base 60: mod_base = OTHER; note = 2'-fluorouridine
  modified_base 73: mod_base = OTHER; note = 2'-Omethylguanosine

SEQ ID NO: 8007 - RNA, 76 nt, synthetic construct; identical to SEQ ID NO: 625
  source 1..76: mol_type = other RNA
  modified_base 1: mod_base = OTHER; note = 2'-Omethylguanosine phosphorothiorate
  modified_base 2: mod_base = OTHER; note = 2'-Omethylguanosine
  modified_base 3: mod_base = OTHER; note = 2'-Omethylcytosine
  modified_base 4: mod_base = OTHER; note = 2'-Omethyluridine
  modified_base 5: mod_base = OTHER; note = 2'-Omethylcytosine
  modified_base 6: mod_base = OTHER; note = 2'-Omethylcytosine
  modified_base 10: mod_base = OTHER; note = 2'-Omethylguanosine
  modified_base 11: mod_base = OTHER; note = 2'-Omethylcytosine
  modified_base 12: mod_base = OTHER; note = 2'-Omethylguanosine
  modified_base 13: mod_base = OTHER; note = 2'-Omethylcytosine
  modified_base 14: mod_base = OTHER; note = 2'-Omethyladenosine
  modified_base 15: mod_base = OTHER; note = 2'-Omethyladenosine
  modified_base 16: mod_base = OTHER; note = 2'-Omethyluridine
  modified_base 17: mod_base = OTHER; note = 2'-Omethylguanosine
  modified_base 18: mod_base = OTHER; note = 2'-Omethylguanosine
  modified_base 19: mod_base = OTHER; note = 2'-Omethyladenosine
  modified_base 20: mod_base = OTHER; note = 2'-Omethyluridine
  modified_base 22: mod_base = OTHER; note = 2'-Omethylguanosine
  modified_base 23: mod_base = OTHER; note = 2'-Omethylcytosine
  modified_base 24: mod_base = OTHER; note = 2'-Omethylguanosine
  modified_base 25: mod_base = OTHER; note = 2'-Omethylcytosine
  modified_base 49: mod_base = OTHER; note = 2'-Omethylcytosine
  modified_base 50: mod_base = OTHER; note = 2'-Omethylcytosine
  modified_base 51: mod_base = OTHER; note = 2'-Omethylguanosine
  modified_base 52: mod_base = OTHER; note = 2'-Omethylguanosine
  modified_base 53: mod_base = OTHER; note = 2'-Omethylguanosine
  modified_base 54: mod_base = OTHER; note = Uridine phosphorothiorate
  modified_base 55: mod_base = OTHER; note = Uridine phosphorothiorate
  modified_base 56: mod_base = OTHER; note = Cytosine phosphorothiorate
  modified_base 57: mod_base = OTHER; note = Guanosine phosphorothiorate
  modified_base 61: mod_base = OTHER; note = 2'-Omethylcytosine
  modified_base 62: mod_base = OTHER; note = 2'-Omethylcytosine
  modified_base 63: mod_base = OTHER; note = 2'-fluorocytosine
  modified_base 64: mod_base = OTHER; note = 2'-Omethylguanosine
  modified_base 65: mod_base = OTHER; note = 2'-Omethylguanosine
  modified_base 66: mod_base = OTHER; note = 2'-Omethylcytosine
  modified_base 67: mod_base = OTHER; note = 2'-Omethylguanosine
  modified_base 68: mod_base = OTHER; note = 2'-Omethylguanosine
  modified_base 69: mod_base = OTHER; note = 2'-fluoroadenosine
  modified_base 71: mod_base = OTHER; note = 2'-Omethyluridine

SEQ ID NO: 8008 - RNA, 85 nt, synthetic construct; identical to SEQ ID NO: 3297
  source 1..85: mol_type = other RNA
  modified_base 2: mod_base = OTHER; note = Cytosine phosphorothiorate
  modified_base 10: mod_base = OTHER; note = 2'-Omethylguanosine
  modified_base 29: mod_base = OTHER; note = 2'-fluoroguanosine
  modified_base 55: mod_base = OTHER; note = 2'-Omethylcytosine phosphorothiorate
  modified_base 67: mod_base = OTHER; note = Adenosine phosphorothiorate
  modified_base 82: mod_base = OTHER; note = 2'-Omethylguanosine

SEQ ID NO: 8009 - RNA, 75 nt, synthetic construct; identical to SEQ ID NO: 1045
  source 1..75: mol_type = other RNA
  modified_base 1: mod_base = OTHER; note = 2'-Omethylguanosine phosphorothiorate
  modified_base 6: mod_base = OTHER; note = 2'-Omethylcytosine
  modified_base 13: mod_base = OTHER; note = 2'-Omethyluridine
  modified_base 19: mod_base = OTHER; note = 2'-fluorouridine phosphorothiorate
  modified_base 22: mod_base = OTHER; note = Guanosine phosphorothiorate
  modified_base 23: mod_base = OTHER; note = 2'-fluorocytosine
  modified_base 24: mod_base = OTHER; note = 2'-fluoroadenosine
  modified_base 33: mod_base = OTHER; note = 2'-fluorouridine
  modified_base 38: mod_base = OTHER; note = Adenosine phosphorothiorate
  modified_base 40: mod_base = OTHER; note = 2'-fluorocytosine phosphorothiorate
  modified_base 41: mod_base = OTHER; note = 2'-fluorocytosine
  modified_base 42: mod_base = OTHER; note = 2'-fluoroadenosine
  modified_base 49: mod_base = OTHER; note = Cytosine phosphorothiorate
  modified_base 52: mod_base = OTHER; note = 2'-fluoroguanosine
  modified_base 56: mod_base = OTHER; note = 2'-fluoroguanosine phosphorothiorate
  modified_base 57: mod_base = OTHER; note = 2'-Omethyladenosine
  modified_base 58: mod_base = OTHER; note = Guanosine phosphorothiorate
  modified_base 62: mod_base = OTHER; note = Cytosine phosphorothiorate
  modified_base 65: mod_base = OTHER; note = Uridine phosphorothiorate
  modified_base 68: mod_base = OTHER; note = 2'-fluoroadenosine
  modified_base 73: mod_base = OTHER; note = Cytosine phosphorothiorate
  modified_base 74: mod_base = OTHER; note = 2'-fluorocytosine phosphorothiorate

SEQ ID NO: 8010 - RNA, 75 nt, synthetic construct; identical to SEQ ID NO: 3299
  source 1..75: mol_type = other RNA
  modified_base 1: mod_base = OTHER; note = 2'-fluorocytosine phosphorothiorate
  modified_base 3: mod_base = OTHER; note = 2'-Omethyluridine
  modified_base 14: mod_base = OTHER; note = 2'-fluoroguanosine
  modified_base 21: mod_base = OTHER; note = 2'-fluoroguanosine phosphorothiorate
  modified_base 25: mod_base = OTHER; note = 2'-fluoroadenosine
  modified_base 26: mod_base = OTHER; note = 2'-fluorouridine
  modified_base 42: mod_base = OTHER; note = 2'-fluoroadenosine phosphorothiorate
  modified_base 46: mod_base = OTHER; note = 2'-fluorouridine
  modified_base 48: mod_base = OTHER; note = Cytosine phosphorothiorate
  modified_base 52: mod_base = OTHER; note = Guanosine phosphorothiorate
  modified_base 58: mod_base = OTHER; note = 2'-fluoroguanosine phosphorothiorate
  modified_base 59: mod_base = OTHER; note = 2'-fluorouridine phosphorothiorate
  modified_base 60: mod_base = OTHER; note = 2'-fluorocytosine phosphorothiorate
  modified_base 68: mod_base = OTHER; note = 2'-fluoroadenosine phosphorothiorate
  modified_base 71: mod_base = OTHER; note = Cytosine phosphorothiorate
  modified_base 74: mod_base = OTHER; note = Cytosine phosphorothiorate

SEQ ID NO: 8011 - RNA, 85 nt, synthetic construct; identical to SEQ ID NO: 3310
  source 1..85: mol_type = other RNA
  modified_base 1: mod_base = OTHER; note = 2'-Omethylcytosine
  modified_base 12: mod_base = OTHER; note = Guanosine phosphorothiorate
  modified_base 26: mod_base = OTHER; note = 2'-fluorouridine
  modified_base 30: mod_base = OTHER; note = 2'-fluoroadenosine
  modified_base 44: mod_base = OTHER; note = 2'-Omethylguanosine
  modified_base 46: mod_base = OTHER; note = 2'-Omethyladenosine
  modified_base 54: mod_base = OTHER; note = 2'-fluorocytosine
  modified_base 56: mod_base = OTHER; note = 2'-Omethylguanosine
  modified_base 58: mod_base = OTHER; note = 2'-Omethylguanosine
  modified_base 84: mod_base = OTHER; note = 2'-fluorocytosine

SEQ ID NO: 8012 - RNA, 85 nt, synthetic construct; identical to SEQ ID NO: 3310
  source 1..85: mol_type = other RNA
  modified_base 1: mod_base = OTHER; note = 2'-Omethylcytosine phosphorothiorate
  modified_base 25: mod_base = OTHER; note = 2'-fluoroguanosine
  modified_base 44: mod_base = OTHER; note = Guanosine phosphorothiorate
  modified_base 51: mod_base = OTHER; note = 2'-Omethyluridine
  modified_base 58: mod_base = OTHER; note = 2'-Omethylguanosine
  modified_base 83: mod_base = OTHER; note = 2'-fluorocytosine

SEQ ID NO: 8013 - RNA, 86 nt, synthetic construct; identical to SEQ ID NO: 3290
  source 1..86: mol_type = other RNA
  modified_base 1: mod_base = OTHER; note = 2'-Omethyladenosine
  modified_base 2: mod_base = OTHER; note = 2'-Omethylcytosine
  modified_base 3: mod_base = OTHER; note = 2'-Omethylcytosine
  modified_base 4: mod_base = OTHER; note = 2'-Omethyladenosine
  modified_base 5: mod_base = OTHER; note = 2'-Omethylguanosine
  modified_base 6: mod_base = OTHER; note = 2'-Omethylguanosine
  modified_base 13: mod_base = OTHER; note = 2'-Omethylguanosine
  modified_base 14: mod_base = OTHER; note = 2'-Omethyladenosine
  modified_base 15: mod_base = OTHER; note = 2'-Omethylguanosine
  modified_base 16: mod_base = OTHER; note = 2'-Omethyluridine
  modified_base 17: mod_base = OTHER; note = 2'-Omethylguanosine
  modified_base 18: mod_base = OTHER; note = 2'-Omethylguanosine
  modified_base 19: mod_base = OTHER; note = Uridine phosphorothiorate
  modified_base 20: mod_base = OTHER; note = 2'-Omethyluridine
  modified_base 21: mod_base = OTHER; note = Adenosine phosphorothiorate
  modified_base 25: mod_base = OTHER; note = 2'-Omethylcytosine
  modified_base 33: mod_base = OTHER; note = 2'-fluorouridine
  modified_base 34: mod_base = OTHER; note = 2'-Omethyluridine
  modified_base 35: mod_base = OTHER; note = Cytosine phosphorothiorate
  modified_base 37: mod_base = OTHER; note = Guanosine phosphorothiorate
  modified_base 38: mod_base = OTHER; note = Adenosine phosphorothiorate
  modified_base 59: mod_base = OTHER; note = 2'-Omethylguanosine
  modified_base 60: mod_base = OTHER; note = 2'-Omethyluridine
  modified_base 62: mod_base = OTHER; note = 2'-Omethylguanosine
  modified_base 64: mod_base = OTHER; note = Uridine phosphorothiorate
  modified_base 65: mod_base = OTHER; note = Uridine phosphorothiorate
  modified_base 71: mod_base = OTHER; note = 2'-Omethylcytosine
  modified_base 75: mod_base = OTHER; note = 2'-Omethylcytosine
  modified_base 83: mod_base = OTHER; note = 2'-Omethyladenosine

SEQ ID NO: 8014 - RNA, 76 nt, synthetic construct; identical to SEQ ID NO: 3289
  source 1..76: mol_type = other RNA
  modified_base 1: mod_base = OTHER; note = 2'-Omethylguanosine phosphorothiorate
  modified_base 2: mod_base = OTHER; note = 2'-Omethylcytosine phosphorothiorate
  modified_base 10: mod_base = OTHER; note = 2'-Omethylguanosine
  modified_base 13: mod_base = OTHER; note = 2'-Omethylcytosine
  modified_base 16: mod_base = OTHER; note = Uridine phosphorothiorate
  modified_base 18: mod_base = OTHER; note = Guanosine phosphorothiorate
  modified_base 19: mod_base = OTHER; note = 2'-Omethylguanosine phosphorothiorate
  modified_base 20: mod_base = OTHER; note = Uridine phosphorothiorate
  modified_base 25: mod_base = OTHER; note = 2'-Omethylcytosine
  modified_base 29: mod_base = OTHER; note = 2'-Omethyladenosine
  modified_base 33: mod_base = OTHER; note = 2'-fluorouridine
  modified_base 35: mod_base = OTHER; note = Uridine phosphorothiorate
  modified_base 37: mod_base = OTHER; note = Adenosine phosphorothiorate
  modified_base 38: mod_base = OTHER; note = Adenosine phosphorothiorate
  modified_base 41: mod_base = OTHER; note = 2'-fluorouridine
  modified_base 42: mod_base = OTHER; note = Guanosine phosphorothiorate
  modified_base 43: mod_base = OTHER; note = 2'-Omethyladenosine
  modified_base 44: mod_base = OTHER; note = 2'-fluoroguanosine
  modified_base 46: mod_base = OTHER; note = Guanosine phosphorothiorate
  modified_base 50: mod_base = OTHER; note = 2'-Omethyladenosine
  modified_base 52: mod_base = OTHER; note = 2'-Omethylguanosine
  modified_base 54: mod_base = OTHER; note = Uridine phosphorothiorate
  modified_base 55: mod_base = OTHER; note = Uridine phosphorothiorate
  modified_base 56: mod_base = OTHER; note = 2'-Omethylcytosine
  modified_base 57: mod_base = OTHER; note = Adenosine phosphorothiorate
  modified_base 62: mod_base = OTHER; note = 2'-Omethylcytosine
  modified_base 63: mod_base = OTHER; note = 2'-fluorocytosine
  modified_base 65: mod_base = OTHER; note = 2'-Omethylguanosine
  modified_base 71: mod_base = OTHER; note = 2'-Omethylguanosine
  modified_base 73: mod_base = OTHER; note = 2'-Omethylguanosine

SEQ ID NO: 8015 - RNA, 85 nt, synthetic construct; identical to SEQ ID NO: 3297
  source 1..85: mol_type = other RNA
  modified_base 43: mod_base = OTHER; note = 2'-Omethyladenosine
  modified_base 61: mod_base = OTHER; note = 2'-Omethylguanosine

SEQ ID NO: 8016 - RNA, 76 nt, synthetic construct; identical to SEQ ID NO: 3289
  source 1..76: mol_type = other RNA
  modified_base 1: mod_base = OTHER; note = 2'-Omethylguanosine
  modified_base 2: mod_base = OTHER; note = 2'-Omethylcytosine
  modified_base 3: mod_base = OTHER; note = 2'-Omethylcytosine
  modified_base 4: mod_base = OTHER; note = 2'-Omethyluridine
  modified_base 5: mod_base = OTHER; note = 2'-Omethylguanosine
  modified_base 6: mod_base = OTHER; note = 2'-Omethylguanosine
  modified_base 13: mod_base = OTHER; note = 2'-Omethylcytosine
  modified_base 14: mod_base = OTHER; note = 2'-Omethyladenosine
  modified_base 15: mod_base = OTHER; note = 2'-Omethylguanosine
  modified_base 16: mod_base = OTHER; note = 2'-Omethyluridine
  modified_base 18: mod_base = OTHER; note = 2'-Omethylguanosine
  modified_base 19: mod_base = OTHER; note = 2'-Omethylguanosine
  modified_base 20: mod_base = OTHER; note = Uridine phosphorothiorate
  modified_base 21: mod_base = OTHER; note = Adenosine phosphorothiorate
  modified_base 25: mod_base = OTHER; note = 2'-Omethylcytosine
  modified_base 33: mod_base = OTHER; note = Uridine phosphorothiorate
  modified_base 34: mod_base = OTHER; note = 2'-Omethyluridine
  modified_base 35: mod_base = OTHER; note = Uridine phosphorothiorate
  modified_base 37: mod_base = OTHER; note = Adenosine phosphorothiorate
  modified_base 38: mod_base = OTHER; note = Adenosine phosphorothiorate
  modified_base 49: mod_base = OTHER; note = 2'-Omethylcytosine
  modified_base 50: mod_base = OTHER; note = 2'-Omethyladenosine
  modified_base 52: mod_base = OTHER; note = 2'-Omethylguanosine
  modified_base 54: mod_base = OTHER; note = Uridine phosphorothiorate
  modified_base 55: mod_base = OTHER; note = Uridine phosphorothiorate
  modified_base 61: mod_base = OTHER; note = 2'-Omethylcytosine
  modified_base 65: mod_base = OTHER; note = 2'-Omethylguanosine
  modified_base 73: mod_base = OTHER; note = 2'-Omethylguanosine

SEQ ID NO: 8017 - RNA, 85 nt, synthetic construct; identical to SEQ ID NO: 3297
  source 1..85: mol_type = other RNA
  modified_base 1: mod_base = OTHER; note = 2'-Omethylguanosine phosphorothiorate
  modified_base 2: mod_base = OTHER; note = 2'-Omethylcytosine
  modified_base 3: mod_base = OTHER; note = 2'-Omethyluridine
  modified_base 4: mod_base = OTHER; note = 2'-Omethylguanosine
  modified_base 5: mod_base = OTHER; note = 2'-Omethyluridine
  modified_base 6: mod_base = OTHER; note = 2'-Omethylguanosine
  modified_base 27: mod_base = OTHER; note = 2'-Omethyluridine
  modified_base 28: mod_base = OTHER; note = 2'-Omethyluridine
  modified_base 29: mod_base = OTHER; note = 2'-fluoroguanosine
  modified_base 30: mod_base = OTHER; note = 2'-Omethylguanosine
  modified_base 40: mod_base = OTHER; note = 2'-fluorocytosine
  modified_base 41: mod_base = OTHER; note = 2'-Omethylcytosine
  modified_base 42: mod_base = OTHER; note = 2'-Omethyladenosine
  modified_base 43: mod_base = OTHER; note = 2'-Omethyladenosine
  modified_base 82: mod_base = OTHER; note = 2'-Omethylguanosine

SEQ ID NO: 8018 - RNA, 85 nt, synthetic construct; identical to SEQ ID NO: 3288
  source 1..85: mol_type = other RNA
  modified_base 1: mod_base = OTHER; note = 2'-Omethylcytosine
  modified_base 30: mod_base = OTHER; note = 2'-fluoroadenosine
  modified_base 34: mod_base = OTHER; note = 2'-fluorocytosine
  modified_base 38: mod_base = OTHER; note = Uridine phosphorothiorate
  modified_base 54: mod_base = OTHER; note = 2'-fluorocytosine
  modified_base 62: mod_base = OTHER; note = Guanosine phosphorothiorate
  modified_base 76: mod_base = OTHER; note = 2'-fluorocytosine
  modified_base 84: mod_base = OTHER; note = 2'-Omethylcytosine

SEQ ID NO: 8019 - RNA, 85 nt, synthetic construct; identical to SEQ ID NO: 3317
  source 1..85: mol_type = other RNA
  modified_base 1: mod_base = OTHER; note = 2'-Omethylguanosine phosphorothiorate
  modified_base 2: mod_base = OTHER; note = 2'-Omethylcytosine
  modified_base 14: mod_base = OTHER; note = Adenosine phosphorothiorate
  modified_base 16: mod_base = OTHER; note = 2'-Omethyluridine
  modified_base 25: mod_base = OTHER; note = 2'-Omethylcytosine
  modified_base 26: mod_base = OTHER; note = 2'-Omethylguanosine
  modified_base 33: mod_base = OTHER; note = 2'-fluorouridine
  modified_base 44: mod_base = OTHER; note = 2'-fluorouridine
  modified_base 45: mod_base = OTHER; note = 2'-Omethylguanosine
  modified_base 47: mod_base = OTHER; note = 2'-Omethylguanosine
  modified_base 54: mod_base = OTHER; note = Cytosine phosphorothiorate
  modified_base 60: mod_base = OTHER; note = 2'-Omethyladenosine phosphorothiorate
  modified_base 72: mod_base = OTHER; note = 2'-Omethyluridine phosphorothiorate
  modified_base 74: mod_base = OTHER; note = 2'-fluorocytosine
  modified_base 76: mod_base = OTHER; note = 2'-fluorocytosine
  modified_base 80: mod_base = OTHER; note = 2'-Omethylguanosine
  modified_base 82: mod_base = OTHER; note = 2'-Omethylguanosine

SEQ ID NO: 8020 - RNA, 85 nt, synthetic construct; identical to SEQ ID NO: 3317
  source 1..85: mol_type = other RNA
  modified_base 1: mod_base = OTHER; note = 2'-Omethylguanosine phosphorothiorate
  modified_base 2: mod_base = OTHER; note = Cytosine phosphorothiorate
  modified_base 7: mod_base = OTHER; note = Adenosine phosphorothiorate
  modified_base 15: mod_base = OTHER; note = 2'-Omethylguanosine
  modified_base 16: mod_base = OTHER; note = 2'-fluorouridine
  modified_base 18: mod_base = OTHER; note = Guanosine phosphorothiorate
  modified_base 24: mod_base = OTHER; note = 2'-Omethylguanosine
  modified_base 29: mod_base = OTHER; note = 2'-fluoroguanosine phosphorothiorate
  modified_base 38: mod_base = OTHER; note = 2'-fluoroadenosine
  modified_base 46: mod_base = OTHER; note = 2'-Omethylguanosine
  modified_base 51: mod_base = OTHER; note = 2'-Omethyluridine phosphorothiorate
  modified_base 56: mod_base = OTHER; note = 2'-Omethylguanosine
  modified_base 58: mod_base = OTHER; note = Guanosine phosphorothiorate
  modified_base 60: mod_base = OTHER; note = Adenosine phosphorothiorate
  modified_base 81: mod_base = OTHER; note = 2'-fluorocytosine phosphorothiorate
  modified_base 82: mod_base = OTHER; note = 2'-fluoroguanosine
  modified_base 84: mod_base = OTHER; note = 2'-Omethylcytosine

SEQ ID NO: 8021 - RNA, 74 nt, synthetic construct; identical to SEQ ID NO: 3293
  source 1..74: mol_type = other RNA
  modified_base 1: mod_base = OTHER; note = 2'-fluoroadenosine phosphorothiorate
  modified_base 2: mod_base = OTHER; note = Cytosine phosphorothiorate
  modified_base 3: mod_base = OTHER; note = Cytosine phosphorothiorate
  modified_base 10: mod_base = OTHER; note = 2'-fluorocytosine
  modified_base 22: mod_base = OTHER; note = 2'-Omethylguanosine
  modified_base 46: mod_base = OTHER; note = 2'-fluorouridine
  modified_base 60: mod_base = OTHER; note = 2'-fluoroadenosine
  modified_base 73: mod_base = OTHER; note = 2'-Omethylcytosine phosphorothiorate

SEQ ID NO: 8022 - RNA, 85 nt, synthetic construct; identical to SEQ ID NO: 3297
  source 1..85: mol_type = other RNA
  modified_base 1: mod_base = OTHER; note = 2'-Omethylguanosine phosphorothiorate
  modified_base 5: mod_base = OTHER; note = 2'-Omethyluridine phosphorothiorate
  modified_base 44: mod_base = OTHER; note = 2'-Omethyluridine phosphorothiorate
  modified_base 58: mod_base = OTHER; note = 2'-fluoroguanosine
  modified_base 61: mod_base = OTHER; note = 2'-Omethylguanosine
  modified_base 63: mod_base = OTHER; note = 2'-Omethyluridine
  modified_base 83: mod_base = OTHER; note = Cytosine phosphorothiorate

SEQ ID NO: 8023 - RNA, 86 nt, synthetic construct; identical to SEQ ID NO: 3290
  source 1..86: mol_type = other RNA
  modified_base 1: mod_base = OTHER; note = 2'-Omethyladenosine
  modified_base 2: mod_base = OTHER; note = 2'-Omethylcytosine
  modified_base 3: mod_base = OTHER; note = 2'-Omethylcytosine
  modified_base 4: mod_base = OTHER; note = 2'-Omethyladenosine
  modified_base 5: mod_base = OTHER; note = 2'-Omethylguanosine
  modified_base 6: mod_base = OTHER; note = 2'-Omethylguanosine
  modified_base 22: mod_base = OTHER; note = 2'-Omethyladenosine
  modified_base 23: mod_base = OTHER; note = 2'-Omethylguanosine
  modified_base 24: mod_base = OTHER; note = 2'-Omethylguanosine
  modified_base 25: mod_base = OTHER; note = 2'-Omethylcytosine
  modified_base 59: mod_base = OTHER; note = 2'-Omethylguanosine
  modified_base 60: mod_base = OTHER; note = 2'-Omethyluridine
  modified_base 61: mod_base = OTHER; note = 2'-Omethylguanosine
  modified_base 62: mod_base = OTHER; note = 2'-Omethylguanosine
  modified_base 63: mod_base = OTHER; note = 2'-Omethylguanosine

SEQ ID NO: 8024 - RNA, 76 nt, synthetic construct; identical to SEQ ID NO: 625
  source 1..76: mol_type = other RNA
  modified_base 1: mod_base = OTHER; note = 2'-fluoroguanosine
  modified_base 5: mod_base = OTHER; note = Cytosine phosphorothiorate
  modified_base 6: mod_base = OTHER; note = 2'-Omethylcytosine
  modified_base 11: mod_base = OTHER; note = 2'-fluorocytosine
  modified_base 14: mod_base = OTHER; note = 2'-Omethyladenosine
  modified_base 16: mod_base = OTHER; note = Uridine phosphorothiorate
  modified_base 18: mod_base = OTHER; note = Guanosine phosphorothiorate
  modified_base 20: mod_base = OTHER; note = Uridine phosphorothiorate
  modified_base 23: mod_base = OTHER; note = Cytosine phosphorothiorate
  modified_base 29: mod_base = OTHER; note = 2'-Omethylguanosine phosphorothiorate
  modified_base 30: mod_base = OTHER; note = 2'-Omethylguanosine
  modified_base 32: mod_base = OTHER; note = 2'-fluorocytosine
  modified_base 41: mod_base = OTHER; note = 2'-fluorocytosine
  modified_base 46: mod_base = OTHER; note = 2'-Omethylguanosine
  modified_base 50: mod_base = OTHER; note = Cytosine phosphorothiorate
  modified_base 51: mod_base = OTHER; note = 2'-Omethylguanosine phosphorothiorate
  modified_base 52: mod_base = OTHER; note = Guanosine phosphorothiorate
  modified_base 53: mod_base = OTHER; note = 2'-Omethylguanosine
  modified_base 57: mod_base = OTHER; note = Guanosine phosphorothiorate
  modified_base 58: mod_base = OTHER; note = Adenosine phosphorothiorate
  modified_base 59: mod_base = OTHER; note = 2'-Omethylguanosine phosphorothiorate
  modified_base 60: mod_base = OTHER; note = 2'-fluorouridine
  modified_base 61: mod_base = OTHER; note = Cytosine phosphorothiorate
  modified_base 62: mod_base = OTHER; note = 2'-Omethylcytosine
  modified_base 63: mod_base = OTHER; note = Cytosine phosphorothiorate
  modified_base 64: mod_base = OTHER; note = 2'-fluoroguanosine
  modified_base 66: mod_base = OTHER; note = 2'-Omethylcytosine
  modified_base 68: mod_base = OTHER; note = 2'-fluoroguanosine
  modified_base 70: mod_base = OTHER; note = 2'-fluoroguanosine
  modified_base 71: mod_base = OTHER; note = 2'-fluorouridine phosphorothiorate
  modified_base 72: mod_base = OTHER; note = 2'-fluorocytosine phosphorothiorate
  modified_base 73: mod_base = OTHER; note = 2'-fluoroguanosine phosphorothiorate
  modified_base 75: mod_base = OTHER; note = Cytosine phosphorothiorate

SEQ ID NO: 8025 - RNA, 85 nt, synthetic construct; identical to SEQ ID NO: 3297
  source 1..85: mol_type = other RNA
  modified_base 1: mod_base = OTHER; note = 2'-Omethylguanosine
  modified_base 16: mod_base = OTHER; note = 2'-Omethyluridine
  modified_base 17: mod_base = OTHER; note = 2'-Omethylguanosine
  modified_base 18: mod_base = OTHER; note = 2'-Omethylguanosine
  modified_base 63: mod_base = OTHER; note = 2'-Omethyluridine phosphorothiorate
  modified_base 64: mod_base = OTHER; note = Uridine phosphorothiorate
  modified_base 65: mod_base = OTHER; note = 2'-Omethylcytosine
  modified_base 68: mod_base = OTHER; note = 2'-Omethyladenosine
  modified_base 82: mod_base = OTHER; note = 2'-Omethylguanosine

SEQ ID NO: 8026 - RNA, 73 nt, synthetic construct; identical to SEQ ID NO: 935
  source 1..73: mol_type = other RNA
  modified_base 43: mod_base = OTHER; note = 2'-Omethyladenosine
  modified_base 65: mod_base = OTHER; note = 2'-Omethylguanosine
  modified_base 73: mod_base = OTHER; note = 2'-Omethylguanosine

SEQ ID NO: 8027 - RNA, 75 nt, synthetic construct; identical to SEQ ID NO: 3306
  source 1..75: mol_type = other RNA
  modified_base 1: mod_base = OTHER; note = 2'-Omethylguanosine phosphorothiorate
  modified_base 2: mod_base = OTHER; note = 2'-Omethyladenosine phosphorothiorate
  modified_base 14: mod_base = OTHER; note = Adenosine phosphorothiorate
  modified_base 20: mod_base = OTHER; note = 2'-fluoroadenosine
  modified_base 73: mod_base = OTHER; note = Cytosine phosphorothiorate
  modified_base 74: mod_base = OTHER; note = 2'-Omethylcytosine phosphorothiorate
  modified_base 75: mod_base = OTHER; note = 2'-Omethyladenosine

SEQ ID NO: 8028 - RNA, 85 nt, synthetic construct; identical to SEQ ID NO: 3297
  source 1..85: mol_type = other RNA
  modified_base 1: mod_base = OTHER; note = 2'-Omethylguanosine
  modified_base 44: mod_base = OTHER; note = 2'-Omethyluridine
  modified_base 56: mod_base = OTHER; note = 2'-fluoroguanosine
  modified_base 57: mod_base = OTHER; note = 2'-fluorocytosine
  modified_base 58: mod_base = OTHER; note = 2'-Omethylguanosine
  modified_base 59: mod_base = OTHER; note = 2'-Omethylcytosine
  modified_base 60: mod_base = OTHER; note = 2'-Omethyladenosine
  modified_base 61: mod_base = OTHER; note = 2'-Omethylguanosine
  modified_base 62: mod_base = OTHER; note = 2'-Omethylguanosine
  modified_base 70: mod_base = OTHER; note = 2'-Omethylcytosine
  modified_base 71: mod_base = OTHER; note = 2'-Omethylcytosine
  modified_base 72: mod_base = OTHER; note = 2'-fluorouridine
  modified_base 73: mod_base = OTHER; note = 2'-Omethylguanosine
  modified_base 74: mod_base = OTHER; note = 2'-Omethylcytosine
  modified_base 82: mod_base = OTHER; note = 2'-Omethylguanosine

SEQ ID NO: 8029 - RNA, 76 nt, synthetic construct; identical to SEQ ID NO: 625
  source 1..76: mol_type = other RNA
  modified_base 1: mod_base = OTHER; note = 2'-Omethylguanosine phosphorothiorate
  modified_base 2: mod_base = OTHER; note = 2'-fluoroguanosine phosphorothiorate
  modified_base 6: mod_base = OTHER; note = 2'-Omethylcytosine
  modified_base 10: mod_base = OTHER; note = Guanosine phosphorothiorate
  modified_base 12: mod_base = OTHER; note = 2'-Omethylguanosine
  modified_base 14: mod_base = OTHER; note = 2'-Omethyladenosine phosphorothiorate
  modified_base 15: mod_base = OTHER; note = 2'-Omethyladenosine
  modified_base 20: mod_base = OTHER; note = Uridine phosphorothiorate
  modified_base 22: mod_base = OTHER; note = 2'-Omethylguanosine
  modified_base 26: mod_base = OTHER; note = Adenosine phosphorothiorate
  modified_base 27: mod_base = OTHER; note = 2'-fluorouridine
  modified_base 28: mod_base = OTHER; note = 2'-fluorouridine
  modified_base 29: mod_base = OTHER; note = 2'-Omethylguanosine
  modified_base 31: mod_base = OTHER; note = 2'-fluoroadenosine
  modified_base 34: mod_base = OTHER; note = 2'-Omethyluridine
  modified_base 38: mod_base = OTHER; note = Adenosine phosphorothiorate
  modified_base 39: mod_base = OTHER; note = 2'-fluorouridine
  modified_base 41: mod_base = OTHER; note = Cytosine phosphorothiorate
  modified_base 43: mod_base = OTHER; note = 2'-Omethyladenosine
  modified_base 44: mod_base = OTHER; note = Adenosine phosphorothiorate
  modified_base 45: mod_base = OTHER; note = 2'-fluoroguanosine
  modified_base 46: mod_base = OTHER; note = 2'-fluoroguanosine
  modified_base 47: mod_base = OTHER; note = 2'-Omethyluridine
  modified_base 51: mod_base = OTHER; note = Guanosine phosphorothiorate
  modified_base 53: mod_base = OTHER; note = 2'-fluoroguanosine
  modified_base 54: mod_base = OTHER; note = Uridine phosphorothiorate
  modified_base 55: mod_base = OTHER; note = Uridine phosphorothiorate
  modified_base 62: mod_base = OTHER; note = 2'-fluorocytosine
  modified_base 63: mod_base = OTHER; note = 2'-fluorocytosine phosphorothiorate
  modified_base 64: mod_base = OTHER; note = Guanosine phosphorothiorate
  modified_base 65: mod_base = OTHER; note = 2'-fluoroguanosine
  modified_base 67: mod_base = OTHER; note = 2'-Omethylguanosine
  modified_base 69: mod_base = OTHER; note = 2'-Omethyladenosine
  modified_base 70: mod_base = OTHER; note = 2'-fluoroguanosine
  modified_base 71: mod_base = OTHER; note = 2'-Omethyluridine

SEQ ID NO: 8030 - RNA, 74 nt, synthetic construct; identical to SEQ ID NO: 3293
  source 1..74: mol_type = other RNA
  modified_base 1: mod_base = OTHER; note = Adenosine phosphorothiorate
  modified_base 7: mod_base = OTHER; note = Uridine phosphorothiorate
  modified_base 9: mod_base = OTHER; note = 2'-Omethylguanosine phosphorothiorate
  modified_base 17: mod_base = OTHER; note = 2'-Omethylguanosine phosphorothiorate
  modified_base 25: mod_base = OTHER; note = Uridine phosphorothiorate
  modified_base 46: mod_base = OTHER; note = 2'-fluorouridine
  modified_base 51: mod_base = OTHER; note = Guanosine phosphorothiorate
  modified_base 73: mod_base = OTHER; note = 2'-Omethylcytosine phosphorothiorate

SEQ ID NO: 8031 - RNA, 76 nt, synthetic construct; identical to SEQ ID NO: 3289
  source 1..76: mol_type = other RNA
  modified_base 1: mod_base = OTHER; note = 2'-Omethylguanosine
  modified_base 13: mod_base = OTHER; note = 2'-Omethylcytosine
  modified_base 18: mod_base = OTHER; note = 2'-Omethylguanosine
  modified_base 19: mod_base = OTHER; note = 2'-Omethylguanosine
  modified_base 25: mod_base = OTHER; note = 2'-Omethylcytosine
  modified_base 33: mod_base = OTHER; note = Uridine phosphorothiorate
  modified_base 34: mod_base = OTHER; note = 2'-Omethyluridine
  modified_base 35: mod_base = OTHER; note = Uridine phosphorothiorate
  modified_base 37: mod_base = OTHER; note = Adenosine phosphorothiorate
  modified_base 38: mod_base = OTHER; note = Adenosine phosphorothiorate
  modified_base 41: mod_base = OTHER; note = 2'-Omethyluridine
  modified_base 42: mod_base = OTHER; note = 2'-Omethylguanosine
  modified_base 43: mod_base = OTHER; note = 2'-Omethyladenosine
  modified_base 44: mod_base = OTHER; note = 2'-Omethylguanosine
  modified_base 49: mod_base = OTHER; note = 2'-Omethylcytosine
  modified_base 50: mod_base = OTHER; note = 2'-Omethyladenosine
  modified_base 52: mod_base = OTHER; note = 2'-Omethylguanosine
  modified_base 54: mod_base = OTHER; note = Uridine phosphorothiorate
  modified_base 55: mod_base = OTHER; note = Uridine phosphorothiorate
  modified_base 56: mod_base = OTHER; note = 2'-Omethylcytosine
  modified_base 57: mod_base = OTHER; note = Adenosine phosphorothiorate
  modified_base 58: mod_base = OTHER; note = Adenosine phosphorothiorate
  modified_base 59: mod_base = OTHER; note = 2'-Omethylguanosine
  modified_base 61: mod_base = OTHER; note = 2'-Omethylcytosine
  modified_base 65: mod_base = OTHER; note = 2'-Omethylguanosine
  modified_base 73: mod_base = OTHER; note = 2'-Omethylguanosine

SEQ ID NO: 8032 - RNA, 85 nt, synthetic construct; identical to SEQ ID NO: 3288
  source 1..85: mol_type = other RNA
  modified_base 1: mod_base = OTHER; note = 2'-Omethylcytosine
  modified_base 2: mod_base = OTHER; note = 2'-fluorocytosine phosphorothiorate
  modified_base 8: mod_base = OTHER; note = Guanosine phosphorothiorate
  modified_base 12: mod_base = OTHER; note = Guanosine phosphorothiorate
  modified_base 19: mod_base = OTHER; note = 2'-fluorouridine
  modified_base 22: mod_base = OTHER; note = 2'-Omethylguanosine
  modified_base 26: mod_base = OTHER; note = 2'-fluorouridine
  modified_base 30: mod_base = OTHER; note = 2'-Omethyladenosine phosphorothiorate
  modified_base 34: mod_base = OTHER; note = 2'-fluorocytosine phosphorothiorate
  modified_base 36: mod_base = OTHER; note = Guanosine phosphorothiorate
  modified_base 49: mod_base = OTHER; note = 2'-Omethyluridine
  modified_base 52: mod_base = OTHER; note = 2'-fluoroguanosine phosphorothiorate
  modified_base 53: mod_base = OTHER; note = 2'-Omethyluridine
  modified_base 56: mod_base = OTHER; note = 2'-Omethylguanosine
  modified_base 58: mod_base = OTHER; note = 2'-fluoroguanosine
  modified_base 60: mod_base = OTHER; note = 2'-Omethylguanosine
  modified_base 62: mod_base = OTHER; note = 2'-fluoroguanosine phosphorothiorate
  modified_base 66: mod_base = OTHER; note = Guanosine phosphorothiorate
  modified_base 77: mod_base = OTHER; note = 2'-fluorocytosine phosphorothiorate
  modified_base 83: mod_base = OTHER; note = Cytosine phosphorothiorate
  modified_base 84: mod_base = OTHER; note = 2'-fluorocytosine phosphorothiorate

SEQ ID NO: 8033 - RNA, 76 nt, synthetic construct; identical to SEQ ID NO: 625
  source 1..76: mol_type = other RNA
  modified_base 1: mod_base = OTHER; note = 2'-Omethylguanosine phosphorothiorate
  modified_base 2: mod_base = OTHER; note = 2'-Omethylguanosine
  modified_base 3: mod_base = OTHER; note = 2'-Omethylcytosine
  modified_base 4: mod_base = OTHER; note = 2'-Omethyluridine
  modified_base 5: mod_base = OTHER; note = 2'-Omethylcytosine
  modified_base 6: mod_base = OTHER; note = 2'-Omethylcytosine
  modified_base 10: mod_base = OTHER; note = 2'-Omethylguanosine
  modified_base 11: mod_base = OTHER; note = 2'-Omethylcytosine
  modified_base 12: mod_base = OTHER; note = 2'-Omethylguanosine
  modified_base 13: mod_base = OTHER; note = 2'-Omethylcytosine
  modified_base 14: mod_base = OTHER; note = 2'-Omethyladenosine
  modified_base 15: mod_base = OTHER; note = 2'-Omethyladenosine
  modified_base 16: mod_base = OTHER; note = 2'-Omethyluridine
  modified_base 17: mod_base = OTHER; note = 2'-Omethylguanosine
  modified_base 18: mod_base = OTHER; note = 2'-Omethylguanosine
  modified_base 19: mod_base = OTHER; note = 2'-Omethyladenosine
  modified_base 20: mod_base = OTHER; note = 2'-Omethyluridine
  modified_base 49: mod_base = OTHER; note = 2'-Omethylcytosine
  modified_base 50: mod_base = OTHER; note = 2'-Omethylcytosine
  modified_base 51: mod_base = OTHER; note = 2'-Omethylguanosine
  modified_base 52: mod_base = OTHER; note = 2'-Omethylguanosine
  modified_base 53: mod_base = OTHER; note = 2'-Omethylguanosine
  modified_base 61: mod_base = OTHER; note = 2'-Omethylcytosine
  modified_base 62: mod_base = OTHER; note = 2'-Omethylcytosine
  modified_base 63: mod_base = OTHER; note = 2'-fluorocytosine
  modified_base 64: mod_base = OTHER; note = 2'-Omethylguanosine
  modified_base 65: mod_base = OTHER; note = 2'-Omethylguanosine
  modified_base 66: mod_base = OTHER; note = 2'-Omethylcytosine
  modified_base 67: mod_base = OTHER; note = 2'-Omethylguanosine
  modified_base 68: mod_base = OTHER; note = 2'-Omethylguanosine
  modified_base 69: mod_base = OTHER; note = 2'-fluoroadenosine
  modified_base 71: mod_base = OTHER; note = 2'-Omethyluridine

SEQ ID NO: 8034 - RNA, 76 nt, synthetic construct; identical to SEQ ID NO: 625
  source 1..76: mol_type = other RNA
  modified_base 1: mod_base = OTHER; note = 2'-Omethylguanosine
  modified_base 2: mod_base = OTHER; note = 2'-Omethylguanosine
  modified_base 3: mod_base = OTHER; note = 2'-Omethylcytosine
  modified_base 4: mod_base = OTHER; note = 2'-Omethyluridine
  modified_base 5: mod_base = OTHER; note = 2'-Omethylcytosine
  modified_base 6: mod_base = OTHER; note = 2'-Omethylcytosine
  modified_base 10: mod_base = OTHER; note = 2'-Omethylguanosine
  modified_base 11: mod_base = OTHER; note = 2'-Omethylcytosine
  modified_base 12: mod_base = OTHER; note = 2'-Omethylguanosine
  modified_base 13: mod_base = OTHER; note = 2'-Omethylcytosine
  modified_base 14: mod_base = OTHER; note = 2'-Omethyladenosine
  modified_base 15: mod_base = OTHER; note = 2'-fluoroadenosine
  modified_base 16: mod_base = OTHER; note = 2'-Omethyluridine
  modified_base 17: mod_base = OTHER; note = 2'-Omethylguanosine
  modified_base 18: mod_base = OTHER; note = 2'-Omethylguanosine
  modified_base 19: mod_base = OTHER; note = 2'-fluoroadenosine
  modified_base 20: mod_base = OTHER; note = 2'-Omethyluridine
  modified_base 21: mod_base = OTHER; note = 2'-fluoroadenosine
  modified_base 22: mod_base = OTHER; note = 2'-Omethylguanosine
  modified_base 23: mod_base = OTHER; note = 2'-Omethylcytosine
  modified_base 24: mod_base = OTHER; note = 2'-Omethylguanosine
  modified_base 25: mod_base = OTHER; note = 2'-Omethylcytosine
  modified_base 38: mod_base = OTHER; note = Adenosine phosphorothiorate
  modified_base 39: mod_base = OTHER; note = Uridine phosphorothiorate
  modified_base 40: mod_base = OTHER; note = 2'-fluorouridine
  modified_base 43: mod_base = OTHER; note = 2'-Omethyladenosine
  modified_base 44: mod_base = OTHER; note = 2'-Omethyladenosine
  modified_base 45: mod_base = OTHER; note = 2'-Omethylguanosine
  modified_base 46: mod_base = OTHER; note = 2'-fluoroguanosine
  modified_base 48: mod_base = OTHER; note = 2'-fluorouridine
  modified_base 49: mod_base = OTHER; note = 2'-Omethylcytosine
  modified_base 50: mod_base = OTHER; note = 2'-Omethylcytosine
  modified_base 54: mod_base = OTHER; note = 2'-Omethyluridine phosphorothiorate
  modified_base 55: mod_base = OTHER; note = Uridine phosphorothiorate
  modified_base 56: mod_base = OTHER; note = 2'-Omethylcytosine
  modified_base 57: mod_base = OTHER; note = 2'-fluoroguanosine
  modified_base 61: mod_base = OTHER; note = 2'-Omethylcytosine
  modified_base 62: mod_base = OTHER; note = 2'-Omethylcytosine
  modified_base 63: mod_base = OTHER; note = 2'-fluorocytosine
  modified_base 64: mod_base = OTHER; note = 2'-Omethylguanosine
  modified_base 65: mod_base = OTHER; note = 2'-Omethylguanosine
  modified_base 66: mod_base = OTHER; note = 2'-Omethylcytosine
  modified_base 67: mod_base = OTHER; note = 2'-Omethylguanosine
  modified_base 68: mod_base = OTHER; note = 2'-Omethylguanosine

SEQ ID NO: 8035 - RNA, 76 nt, synthetic construct; identical to SEQ ID NO: 3289
  source 1..76: mol_type = other RNA
  modified_base 1: mod_base = OTHER; note = 2'-Omethylguanosine phosphorothiorate
  modified_base 2: mod_base = OTHER; note = 2'-Omethylcytosine phosphorothiorate
  modified_base 3: mod_base = OTHER; note = 2'-Omethylcytosine
  modified_base 4: mod_base = OTHER; note = 2'-Omethyluridine
  modified_base 5: mod_base = OTHER; note = 2'-Omethylguanosine
  modified_base 6: mod_base = OTHER; note = 2'-Omethylguanosine
  modified_base 16: mod_base = OTHER; note = 2'-Omethyluridine
  modified_base 18: mod_base = OTHER; note = 2'-Omethylguanosine
  modified_base 19: mod_base = OTHER; note = 2'-Omethylguanosine
  modified_base 33: mod_base = OTHER; note = 2'-fluorouridine
  modified_base 35: mod_base = OTHER; note = Uridine phosphorothiorate
  modified_base 37: mod_base = OTHER; note = Adenosine phosphorothiorate
  modified_base 38: mod_base = OTHER; note = Adenosine phosphorothiorate
  modified_base 44: mod_base = OTHER; note = 2'-Omethylguanosine
  modified_base 45: mod_base = OTHER; note = 2'-Omethylguanosine
  modified_base 46: mod_base = OTHER; note = 2'-fluoroguanosine
  modified_base 47: mod_base = OTHER; note = 2'-fluorouridine
  modified_base 48: mod_base = OTHER; note = 2'-fluorocytosine
  modified_base 49: mod_base = OTHER; note = 2'-Omethylcytosine
  modified_base 50: mod_base = OTHER; note = 2'-Omethyladenosine
  modified_base 51: mod_base = OTHER; note = 2'-Omethylguanosine
  modified_base 54: mod_base = OTHER; note = 2'-Omethyluridine
  modified_base 56: mod_base = OTHER; note = 2'-Omethylcytosine
  modified_base 59: mod_base = OTHER; note = 2'-Omethylguanosine
  modified_base 61: mod_base = OTHER; note = 2'-Omethylcytosine
  modified_base 62: mod_base = OTHER; note = 2'-Omethylcytosine
  modified_base 63: mod_base = OTHER; note = 2'-fluorocytosine
  modified_base 64: mod_base = OTHER; note = 2'-Omethyluridine
  modified_base 65: mod_base = OTHER; note = 2'-Omethylguanosine
  modified_base 66: mod_base = OTHER; note = 2'-Omethyluridine
  modified_base 67: mod_base = OTHER; note = 2'-Omethylcytosine
  modified_base 68: mod_base = OTHER; note = 2'-Omethylcytosine
  modified_base 73: mod_base = OTHER; note = 2'-Omethylguanosine

SEQ ID NO: 8036 - RNA, 76 nt, synthetic construct; identical to SEQ ID NO: 3289
  source 1..76: mol_type = other RNA
  modified_base 1: mod_base = OTHER; note = 2'-Omethylguanosine
  modified_base 2: mod_base = OTHER; note = 2'-Omethylcytosine
  modified_base 3: mod_base = OTHER; note = 2'-Omethylcytosine
  modified_base 4: mod_base = OTHER; note = 2'-Omethyluridine
  modified_base 5: mod_base = OTHER; note = 2'-Omethylguanosine
  modified_base 6: mod_base = OTHER; note = 2'-Omethylguanosine
  modified_base 14: mod_base = OTHER; note = 2'-Omethyladenosine
  modified_base 15: mod_base = OTHER; note = 2'-Omethylguanosine
  modified_base 16: mod_base = OTHER; note = 2'-Omethyluridine
  modified_base 18: mod_base = OTHER; note = 2'-Omethylguanosine
  modified_base 19: mod_base = OTHER; note = 2'-Omethylguanosine
  modified_base 25: mod_base = OTHER; note = 2'-Omethylcytosine
  modified_base 41: mod_base = OTHER; note = 2'-Omethyluridine
  modified_base 42: mod_base = OTHER; note = 2'-Omethylguanosine
  modified_base 43: mod_base = OTHER; note = 2'-Omethyladenosine
  modified_base 44: mod_base = OTHER; note = 2'-Omethylguanosine
  modified_base 49: mod_base = OTHER; note = 2'-Omethylcytosine
  modified_base 50: mod_base = OTHER; note = 2'-Omethyladenosine
  modified_base 52: mod_base = OTHER; note = 2'-Omethylguanosine
  modified_base 54: mod_base = OTHER; note = 2'-Omethyluridine
  modified_base 55: mod_base = OTHER; note = Uridine phosphorothiorate
  modified_base 56: mod_base = OTHER; note = 2'-Omethylcytosine
  modified_base 57: mod_base = OTHER; note = 2'-fluoroadenosine
  modified_base 59: mod_base = OTHER; note = 2'-Omethylguanosine
  modified_base 61: mod_base = OTHER; note = 2'-Omethylcytosine
  modified_base 62: mod_base = OTHER; note = 2'-Omethylcytosine
  modified_base 63: mod_base = OTHER; note = 2'-fluorocytosine
  modified_base 64: mod_base = OTHER; note = 2'-Omethyluridine
  modified_base 65: mod_base = OTHER; note = 2'-Omethylguanosine
  modified_base 73: mod_base = OTHER; note = 2'-Omethylguanosine

SEQ ID NO: 8037 - RNA, 76 nt, synthetic construct; identical to SEQ ID NO: 625
  source 1..76: mol_type = other RNA
  modified_base 33: mod_base = OTHER; note = 2'-O-(2-Methoxyethyl) thymine
  modified_base 43: mod_base = OTHER; note = 2'-Omethyladenosine
  modified_base 49: mod_base = OTHER; note = 2'-Omethylcytosine

SEQ ID NO: 8038 - RNA, 76 nt, synthetic construct; identical to SEQ ID NO: 625
  source 1..76: mol_type = other RNA
  modified_base 1: mod_base = OTHER; note = 2'-fluoroguanosine phosphorothiorate
  modified_base 2: mod_base = OTHER; note = 2'-Omethylguanosine
  modified_base 4: mod_base = OTHER; note = 2'-fluorouridine phosphorothiorate
  modified_base 5: mod_base = OTHER; note = 2'-Omethylcytosine
  modified_base 10: mod_base = OTHER; note = 2'-Omethylguanosine
  modified_base 11: mod_base = OTHER; note = 2'-fluorocytosine
  modified_base 12: mod_base = OTHER; note = 2'-fluoroguanosine
  modified_base 14: mod_base = OTHER; note = 2'-fluoroadenosine
  modified_base 20: mod_base = OTHER; note = 2'-fluorouridine
  modified_base 26: mod_base = OTHER; note = 2'-fluoroadenosine
  modified_base 27: mod_base = OTHER; note = Uridine phosphorothiorate
  modified_base 28: mod_base = OTHER; note = 2'-fluorouridine phosphorothiorate
  modified_base 29: mod_base = OTHER; note = 2'-fluoroguanosine
  modified_base 39: mod_base = OTHER; note = Uridine phosphorothiorate
  modified_base 42: mod_base = OTHER; note = 2'-fluoroadenosine
  modified_base 43: mod_base = OTHER; note = 2'-Omethyladenosine
  modified_base 44: mod_base = OTHER; note = 2'-Omethyladenosine phosphorothiorate
  modified_base 45: mod_base = OTHER; note = 2'-fluoroguanosine
  modified_base 46: mod_base = OTHER; note = 2'-Omethylguanosine
  modified_base 48: mod_base = OTHER; note = Uridine phosphorothiorate
  modified_base 49: mod_base = OTHER; note = 2'-Omethylcytosine
  modified_base 52: mod_base = OTHER; note = 2'-Omethylguanosine
  modified_base 53: mod_base = OTHER; note = 2'-Omethylguanosine
  modified_base 56: mod_base = OTHER; note = 2'-Omethylcytosine phosphorothiorate
  modified_base 57: mod_base = OTHER; note = 2'-fluoroguanosine
  modified_base 58: mod_base = OTHER; note = Adenosine phosphorothiorate
  modified_base 59: mod_base = OTHER; note = 2'-fluoroguanosine
  modified_base 63: mod_base = OTHER; note = 2'-fluorocytosine
  modified_base 64: mod_base = OTHER; note = 2'-Omethylguanosine phosphorothiorate
  modified_base 65: mod_base = OTHER; note = 2'-Omethylguanosine
  modified_base 66: mod_base = OTHER; note = Cytosine phosphorothiorate
  modified_base 68: mod_base = OTHER; note = 2'-Omethylguanosine
  modified_base 71: mod_base = OTHER; note = 2'-Omethyluridine
  modified_base 72: mod_base = OTHER; note = 2'-fluorocytosine
  modified_base 74: mod_base = OTHER; note = 2'-fluorocytosine phosphorothiorate

SEQ ID NO: 8039 - RNA, 76 nt, synthetic construct; identical to SEQ ID NO: 625
  source 1..76: mol_type = other RNA
  modified_base 1: mod_base = OTHER; note = 2'-Omethylguanosine phosphorothiorate
  modified_base 2: mod_base = OTHER; note = 2'-Omethylguanosine phosphorothiorate
  modified_base 3: mod_base = OTHER; note = 2'-Omethylcytosine
  modified_base 4: mod_base = OTHER; note = 2'-Omethyluridine
  modified_base 5: mod_base = OTHER; note = 2'-Omethylcytosine
  modified_base 6: mod_base = OTHER; note = 2'-Omethylcytosine
  modified_base 14: mod_base = OTHER; note = 2'-Omethyladenosine
  modified_base 15: mod_base = OTHER; note = 2'-Omethyladenosine
  modified_base 16: mod_base = OTHER; note = 2'-Omethyluridine
  modified_base 17: mod_base = OTHER; note = 2'-Omethylguanosine
  modified_base 18: mod_base = OTHER; note = 2'-Omethylguanosine
  modified_base 20: mod_base = OTHER; note = 2'-Omethyluridine
  modified_base 25: mod_base = OTHER; note = 2'-Omethylcytosine
  modified_base 33: mod_base = OTHER; note = 2'-fluorouridine
  modified_base 35: mod_base = OTHER; note = Cytosine phosphorothiorate
  modified_base 37: mod_base = OTHER; note = Adenosine phosphorothiorate
  modified_base 38: mod_base = OTHER; note = Adenosine phosphorothiorate
  modified_base 49: mod_base = OTHER; note = 2'-Omethylcytosine
  modified_base 50: mod_base = OTHER; note = 2'-Omethylcytosine
  modified_base 52: mod_base = OTHER; note = 2'-Omethylguanosine
  modified_base 54: mod_base = OTHER; note = 2'-Omethyluridine
  modified_base 55: mod_base = OTHER; note = Uridine phosphorothiorate
  modified_base 56: mod_base = OTHER; note = 2'-Omethylcytosine
  modified_base 57: mod_base = OTHER; note = 2'-fluoroguanosine
  modified_base 59: mod_base = OTHER; note = 2'-Omethylguanosine
  modified_base 61: mod_base = OTHER; note = 2'-Omethylcytosine
  modified_base 62: mod_base = OTHER; note = 2'-Omethylcytosine
  modified_base 63: mod_base = OTHER; note = 2'-fluorocytosine
  modified_base 64: mod_base = OTHER; note = 2'-Omethylguanosine
  modified_base 65: mod_base = OTHER; note = 2'-Omethylguanosine
  modified_base 74: mod_base = OTHER; note = Cytosine phosphorothiorate
  modified_base 75: mod_base = OTHER; note = 2'-Omethylcytosine

SEQ ID NO: 8040 - RNA, 76 nt, synthetic construct; identical to SEQ ID NO: 625
  source 1..76: mol_type = other RNA
  modified_base 1: mod_base = OTHER; note = 2'-Omethylguanosine
  modified_base 2: mod_base = OTHER; note = 2'-Omethylguanosine
  modified_base 3: mod_base = OTHER; note = 2'-Omethylcytosine
  modified_base 4: mod_base = OTHER; note = 2'-Omethyluridine
  modified_base 5: mod_base = OTHER; note = 2'-Omethylcytosine
  modified_base 6: mod_base = OTHER; note = 2'-Omethylcytosine
  modified_base 7: mod_base = OTHER; note = 2'-Omethylguanosine phosphorothiorate
  modified_base 10: mod_base = OTHER; note = 2'-Omethylguanosine
  modified_base 11: mod_base = OTHER; note = 2'-Omethylcytosine
  modified_base 12: mod_base = OTHER; note = 2'-Omethylguanosine
  modified_base 13: mod_base = OTHER; note = 2'-Omethylcytosine
  modified_base 14: mod_base = OTHER; note = 2'-Omethyladenosine
  modified_base 15: mod_base = OTHER; note = 2'-Omethyladenosine
  modified_base 16: mod_base = OTHER; note = 2'-Omethyluridine
  modified_base 17: mod_base = OTHER; note = 2'-Omethylguanosine
  modified_base 18: mod_base = OTHER; note = 2'-fluoroguanosine phosphorothiorate
  modified_base 19: mod_base = OTHER; note = 2'-Omethyladenosine
  modified_base 21: mod_base = OTHER; note = 2'-fluoroadenosine phosphorothiorate
  modified_base 22: mod_base = OTHER; note = 2'-Omethylguanosine
  modified_base 23: mod_base = OTHER; note = 2'-Omethylcytosine
  modified_base 24: mod_base = OTHER; note = 2'-Omethylguanosine
  modified_base 25: mod_base = OTHER; note = 2'-Omethylcytosine
  modified_base 29: mod_base = OTHER; note = 2'-fluoroguanosine phosphorothiorate
  modified_base 30: mod_base = OTHER; note = 2'-Omethylguanosine phosphorothiorate
  modified_base 31: mod_base = OTHER; note = 2'-Omethyladenosine phosphorothiorate
  modified_base 32: mod_base = OTHER; note = 2'-Omethylcytosine phosphorothiorate
  modified_base 33: mod_base = OTHER; note = 2'-fluorouridine
  modified_base 34: mod_base = OTHER; note = 2'-Omethyluridine phosphorothiorate
  modified_base 35: mod_base = OTHER; note = 2'-Omethylcytosine phosphorothiorate
  modified_base 37: mod_base = OTHER; note = 2'-Omethyladenosine phosphorothiorate
  modified_base 38: mod_base = OTHER; note = Adenosine phosphorothiorate
  modified_base 39: mod_base = OTHER; note = 2'-Omethyluridine phosphorothiorate
  modified_base 40: mod_base = OTHER; note = 2'-Omethyluridine
  modified_base 41: mod_base = OTHER; note = 2'-fluorocytosine
  modified_base 42: mod_base = OTHER; note = Adenosine phosphorothiorate
  modified_base 43: mod_base = OTHER; note = Adenosine phosphorothiorate
  modified_base 44: mod_base = OTHER; note = 2'-Omethyladenosine
  modified_base 45: mod_base = OTHER; note = 2'-Omethylguanosine phosphorothiorate
  modified_base 49: mod_base = OTHER; note = 2'-Omethylcytosine
  modified_base 51: mod_base = OTHER; note = 2'-Omethylguanosine phosphorothiorate
  modified_base 52: mod_base = OTHER; note = 2'-Omethylguanosine
  modified_base 53: mod_base = OTHER; note = 2'-Omethylguanosine
  modified_base 54: mod_base = OTHER; note = 2'-Omethyluridine phosphorothiorate
  modified_base 55: mod_base = OTHER; note = Uridine phosphorothiorate
  modified_base 56: mod_base = OTHER; note = 2'-Omethylcytosine
  modified_base 57: mod_base = OTHER; note = 2'-Omethylguanosine
  modified_base 59: mod_base = OTHER; note = 2'-Omethylguanosine
  modified_base 61: mod_base = OTHER; note = 2'-Omethylcytosine
  modified_base 62: mod_base = OTHER; note = 2'-Omethylcytosine
  modified_base 63: mod_base = OTHER; note = 2'-fluorocytosine
  modified_base 64: mod_base = OTHER; note = 2'-Omethylguanosine
  modified_base 65: mod_base = OTHER; note = 2'-Omethylguanosine
  modified_base 66: mod_base = OTHER; note = 2'-fluorocytosine
  modified_base 67: mod_base = OTHER; note = 2'-Omethylguanosine phosphorothiorate
  modified_base 68: mod_base = OTHER; note = 2'-fluoroguanosine
  modified_base 69: mod_base = OTHER; note = 2'-fluoroadenosine
  modified_base 71: mod_base = OTHER; note = 2'-Omethyluridine phosphorothiorate
  modified_base 72: mod_base = OTHER; note = Cytosine phosphorothiorate
  modified_base 73: mod_base = OTHER; note = 2'-Omethylguanosine
  modified_base 74: mod_base = OTHER; note = 2'-fluorocytosine phosphorothiorate
  modified_base 75: mod_base = OTHER; note = 2'-fluorocytosine
  modified_base 76: mod_base = OTHER; note = 2'-Omethyladenosine

SEQ ID NO: 8041 - RNA, 76 nt, synthetic construct; identical to SEQ ID NO: 625
  source 1..76: mol_type = other RNA
  modified_base 1: mod_base = OTHER; note = 2'-Omethylguanosine phosphorothiorate
  modified_base 2: mod_base = OTHER; note = 2'-Omethylguanosine
  modified_base 3: mod_base = OTHER; note = 2'-Omethylcytosine
  modified_base 4: mod_base = OTHER; note = 2'-Omethyluridine
  modified_base 5: mod_base = OTHER; note = 2'-Omethylcytosine
  modified_base 6: mod_base = OTHER; note = 2'-Omethylcytosine
  modified_base 16: mod_base = OTHER; note = 2'-Omethyluridine
  modified_base 17: mod_base = OTHER; note = 2'-Omethylguanosine
  modified_base 18: mod_base = OTHER; note = 2'-Omethylguanosine
  modified_base 22: mod_base = OTHER; note = 2'-Omethylguanosine
  modified_base 23: mod_base = OTHER; note = 2'-Omethylcytosine
  modified_base 24: mod_base = OTHER; note = 2'-Omethylguanosine
  modified_base 25: mod_base = OTHER; note = 2'-Omethylcytosine
  modified_base 49: mod_base = OTHER; note = 2'-Omethylcytosine
  modified_base 50: mod_base = OTHER; note = 2'-Omethylcytosine
  modified_base 51: mod_base = OTHER; note = 2'-Omethylguanosine
  modified_base 52: mod_base = OTHER; note = 2'-Omethylguanosine
  modified_base 53: mod_base = OTHER; note = 2'-Omethylguanosine
  modified_base 54: mod_base = OTHER; note = 2'-Omethyluridine phosphorothiorate
  modified_base 55: mod_base = OTHER; note = Uridine phosphorothiorate
  modified_base 56: mod_base = OTHER; note = 2'-Omethylcytosine
  modified_base 57: mod_base = OTHER; note = 2'-fluoroguanosine
  modified_base 59: mod_base = OTHER; note = 2'-Omethylguanosine
  modified_base 73: mod_base = OTHER; note = 2'-Omethylguanosine

SEQ ID NO: 8042 - RNA, 75 nt, synthetic construct; identical to SEQ ID NO: 3306
  source 1..75: mol_type = other RNA
  modified_base 1: mod_base = OTHER; note = 2'-Omethylguanosine
  modified_base 14: mod_base = OTHER; note = 2'-Omethyladenosine
  modified_base 15: mod_base = OTHER; note = 2'-fluoroadenosine
  modified_base 16: mod_base = OTHER; note = 2'-Omethylcytosine
  modified_base 17: mod_base = OTHER; note = 2'-Omethylguanosine
  modified_base 18: mod_base = OTHER; note = 2'-Omethylguanosine
  modified_base 19: mod_base = OTHER; note = 2'-fluorouridine
  modified_base 53: mod_base = OTHER; note = 2'-Omethyluridine phosphorothiorate
  modified_base 54: mod_base = OTHER; note = Uridine phosphorothiorate
  modified_base 55: mod_base = OTHER; note = 2'-Omethylcytosine
  modified_base 56: mod_base = OTHER; note = 2'-Omethyladenosine
  modified_base 58: mod_base = OTHER; note = 2'-Omethyladenosine
  modified_base 72: mod_base = OTHER; note = 2'-Omethyladenosine

SEQ ID NO: 8043 - RNA, 85 nt, synthetic construct; identical to SEQ ID NO: 3286
  source 1..85: mol_type = other RNA
  modified_base 1: mod_base = OTHER; note = 2'-Omethylcytosine
  modified_base 11: mod_base = OTHER; note = Cytosine phosphorothiorate
  modified_base 25: mod_base = OTHER; note = 2'-fluoroguanosine
  modified_base 30: mod_base = OTHER; note = 2'-fluoroadenosine
  modified_base 34: mod_base = OTHER; note = 2'-fluorouridine
  modified_base 51: mod_base = OTHER; note = 2'-Omethyluridine
  modified_base 54: mod_base = OTHER; note = Cytosine phosphorothiorate
  modified_base 57: mod_base = OTHER; note = 2'-Omethylcytosine
  modified_base 60: mod_base = OTHER; note = Guanosine phosphorothiorate
  modified_base 68: mod_base = OTHER; note = Adenosine phosphorothiorate
  modified_base 84: mod_base = OTHER; note = Cytosine phosphorothiorate

SEQ ID NO: 8044 - RNA, 85 nt, synthetic construct; identical to SEQ ID NO: 3288
  source 1..85: mol_type = other RNA
  modified_base 1: mod_base = OTHER; note = 2'-Omethylcytosine phosphorothiorate
  modified_base 8: mod_base = OTHER; note = Guanosine phosphorothiorate
  modified_base 11: mod_base = OTHER; note = Cytosine phosphorothiorate
  modified_base 30: mod_base = OTHER; note = 2'-fluoroadenosine
  modified_base 44: mod_base = OTHER; note = Guanosine phosphorothiorate
  modified_base 50: mod_base = OTHER; note = Adenosine phosphorothiorate
  modified_base 59: mod_base = OTHER; note = 2'-Omethyluridine
  modified_base 75: mod_base = OTHER; note = 2'-fluorouridine
  modified_base 84: mod_base = OTHER; note = 2'-fluorocytosine

SEQ ID NO: 8045 - RNA, 86 nt, synthetic construct; identical to SEQ ID NO: 3290
  source 1..86: mol_type = other RNA
  modified_base 41: mod_base = OTHER; note = Cytosine phosphorothiorate

SEQ ID NO: 8046 - DNA, 76 bp, synthetic construct; identical to SEQ ID NO: 1924
  source 1..76: mol_type = other DNA
  modified_base 1: mod_base = OTHER; note = 2'-Omethylguanosine phosphorothiorate
  modified_base 2: mod_base = OTHER; note = 2'-Omethylguanosine phosphorothiorate
  modified_base 12: mod_base = OTHER; note = Guanosine phosphorothiorate
  modified_base 13: mod_base = OTHER; note = 2'-Omethylcytosine
  modified_base 20: mod_base = OTHER; note = Uridine phosphorothiorate
  modified_base 21: mod_base = OTHER; note = 2'-fluoroadenosine
  modified_base 24: mod_base = OTHER; note = Guanosine phosphorothiorate
  modified_base 25: mod_base = OTHER; note = 2'-O-(2-Methoxyethyl) 5-methylcytosine
  modified_base 37: mod_base = OTHER; note = Adenosine phosphorothiorate
  modified_base 38: mod_base = OTHER; note = 2'-fluoroadenosine
  modified_base 44: mod_base = OTHER; note = Adenosine phosphorothiorate
  modified_base 45: mod_base = OTHER; note = 2'-O-(2-Methoxyethyl) guanosine
  modified_base 61: mod_base = OTHER; note = deoxycytosine phosphorothiorate
  modified_base 74: mod_base = OTHER; note = Cytosine phosphorothiorate
  modified_base 75: mod_base = OTHER; note = 2'-Omethylcytosine
  misc_feature 1..60: note = RNA
  misc_feature 61: note = DNA
  misc_feature 62..76: note = RNA

SEQ ID NO: 8047 - RNA, 76 nt, synthetic construct
  source 1..76: mol_type = other RNA
acctccgtggcgcaatggatagcgcattggacttcaaattcaaaggttccgggttcgagtcccggcggaggtgcca

SEQ ID NO: 8048 - RNA, 85 nt, synthetic construct; identical to SEQ ID NO: 3286
  source 1..85: mol_type = other RNA
  modified_base 1: mod_base = OTHER; note = 2'-Omethylcytosine
  modified_base 5: mod_base = OTHER; note = 2'-fluoroguanosine
  modified_base 33: mod_base = OTHER; note = 2'-fluorouridine
  modified_base 43: mod_base = OTHER; note = 2'-Omethyluridine
  modified_base 46: mod_base = OTHER; note = Adenosine phosphorothiorate
  modified_base 65: mod_base = OTHER; note = Cytosine phosphorothiorate
  modified_base 72: mod_base = OTHER; note = 2'-fluorocytosine
  modified_base 85: mod_base = OTHER; note = 2'-fluoroadenosine

SEQ ID NO: 8049 - RNA, 73 nt, synthetic construct; identical to SEQ ID NO: 935
  source 1..73: mol_type = other RNA
  modified_base 1: mod_base = OTHER; note = 2'-Omethylguanosine phosphorothiorate
  modified_base 2: mod_base = OTHER; note = 2'-Omethylguanosine phosphorothiorate
  modified_base 71: mod_base = OTHER; note = Uridine phosphorothiorate
  modified_base 72: mod_base = OTHER; note = 2'-Omethylcytosine

SEQ ID NO: 8050 - RNA, 76 nt, synthetic construct; identical to SEQ ID NO: 625
  source 1..76: mol_type = other RNA
  modified_base 1: mod_base = OTHER; note = 2'-Omethylguanosine phosphorothiorate
  modified_base 2: mod_base = OTHER; note = 2'-Omethylguanosine
  modified_base 3: mod_base = OTHER; note = 2'-Omethylcytosine
  modified_base 4: mod_base = OTHER; note = 2'-Omethyluridine
  modified_base 5: mod_base = OTHER; note = 2'-Omethylcytosine
  modified_base 6: mod_base = OTHER; note = 2'-Omethylcytosine
  modified_base 10: mod_base = OTHER; note = 2'-Omethylguanosine
  modified_base 11: mod_base = OTHER; note = 2'-Omethylcytosine
  modified_base 12: mod_base = OTHER; note = 2'-Omethylguanosine
  modified_base 13: mod_base = OTHER; note = 2'-Omethylcytosine
  modified_base 14: mod_base = OTHER; note = 2'-Omethyladenosine
  modified_base 15: mod_base = OTHER; note = 2'-fluoroadenosine
  modified_base 16: mod_base = OTHER; note = 2'-Omethyluridine
  modified_base 17: mod_base = OTHER; note = 2'-Omethylguanosine
  modified_base 18: mod_base = OTHER; note = 2'-Omethylguanosine
  modified_base 19: mod_base = OTHER; note = 2'-fluoroadenosine
  modified_base 20: mod_base = OTHER; note = 2'-Omethyluridine
  modified_base 21: mod_base = OTHER; note = 2'-fluoroadenosine
  modified_base 22: mod_base = OTHER; note = 2'-Omethylguanosine
  modified_base 23: mod_base = OTHER; note = 2'-Omethylcytosine
  modified_base 24: mod_base = OTHER; note = 2'-Omethylguanosine
  modified_base 25: mod_base = OTHER; note = 2'-Omethylcytosine
  modified_base 38: mod_base = OTHER; note = Adenosine phosphorothiorate
  modified_base 39: mod_base = OTHER; note = Uridine phosphorothiorate
  modified_base 40: mod_base = OTHER; note = 2'-fluorouridine
  modified_base 43: mod_base = OTHER; note = 2'-Omethyladenosine
  modified_base 44: mod_base = OTHER; note = 2'-Omethyladenosine
  modified_base 45: mod_base = OTHER; note = 2'-Omethylguanosine
  modified_base 46: mod_base = OTHER; note = 2'-fluoroguanosine
  modified_base 48: mod_base = OTHER; note = 2'-fluorouridine
  modified_base 49: mod_base = OTHER; note = 2'-Omethylcytosine
  modified_base 50: mod_base = OTHER; note = 2'-Omethylcytosine
  modified_base 54: mod_base = OTHER; note = 2'-Omethyluridine phosphorothiorate
  modified_base 55: mod_base = OTHER; note = Uridine phosphorothiorate
  modified_base 56: mod_base = OTHER; note = 2'-Omethylcytosine
  modified_base 57: mod_base = OTHER; note = 2'-fluoroguanosine
  modified_base 61: mod_base = OTHER; note = 2'-Omethylcytosine
  modified_base 62: mod_base = OTHER; note = 2'-Omethylcytosine
  modified_base 63: mod_base = OTHER; note = 2'-fluorocytosine
  modified_base 64: mod_base = OTHER; note = 2'-Omethylguanosine
  modified_base 65: mod_base = OTHER; note = 2'-Omethylguanosine
  modified_base 66: mod_base = OTHER; note = 2'-Omethylcytosine
  modified_base 67: mod_base = OTHER; note = 2'-Omethylguanosine
  modified_base 68: mod_base = OTHER; note = 2'-Omethylguanosine

SEQ ID NO: 8051 - RNA, 75 nt, synthetic construct; identical to SEQ ID NO: 3306
  source 1..75: mol_type = other RNA

SEQ ID NO: 8052 - RNA, 76 nt, synthetic construct; identical to SEQ ID NO: 3675
  source 1..76: mol_type = other RNA
  modified_base 1: mod_base = OTHER; note = 2'-Omethylguanosine
  modified_base 2: mod_base = OTHER; note = 2'-Omethylcytosine
  modified_base 3: mod_base = OTHER; note = 2'-Omethylcytosine
  modified_base 4: mod_base = OTHER; note = 2'-Omethyluridine
  modified_base 5: mod_base = OTHER; note = 2'-Omethylcytosine
  modified_base 6: mod_base = OTHER; note = 2'-Omethylcytosine
  modified_base 14: mod_base = OTHER; note = 2'-Omethyladenosine
  modified_base 15: mod_base = OTHER; note = 2'-Omethyladenosine
  modified_base 16: mod_base = OTHER; note = 2'-Omethyluridine
  modified_base 17: mod_base = OTHER; note = 2'-Omethylguanosine
  modified_base 18: mod_base = OTHER; note = 2'-Omethylguanosine
  modified_base 20: mod_base = OTHER; note = 2'-Omethyluridine
  modified_base 25: mod_base = OTHER; note = 2'-Omethylcytosine
  modified_base 41: mod_base = OTHER; note = 2'-Omethylcytosine
  modified_base 42: mod_base = OTHER; note = 2'-Omethyladenosine
  modified_base 43: mod_base = OTHER; note = 2'-Omethylcytosine
  modified_base 44: mod_base = OTHER; note = 2'-Omethyladenosine
  modified_base 49: mod_base = OTHER; note = 2'-Omethylcytosine
  modified_base 50: mod_base = OTHER; note = 2'-Omethylcytosine
  modified_base 52: mod_base = OTHER; note = 2'-Omethylguanosine
  modified_base 54: mod_base = OTHER; note = 2'-Omethyluridine
  modified_base 55: mod_base = OTHER; note = Uridine phosphorothiorate
  modified_base 56: mod_base = OTHER; note = 2'-Omethylcytosine
  modified_base 57: mod_base = OTHER; note = 2'-fluoroguanosine
  modified_base 59: mod_base = OTHER; note = 2'-Omethylguanosine
  modified_base 61: mod_base = OTHER; note = 2'-Omethylcytosine
  modified_base 62: mod_base = OTHER; note = 2'-Omethylcytosine
  modified_base 63: mod_base = OTHER; note = 2'-fluorocytosine
  modified_base 64: mod_base = OTHER; note = 2'-Omethylguanosine
  modified_base 65: mod_base = OTHER; note = 2'-Omethylguanosine
  modified_base 73: mod_base = OTHER; note = 2'-Omethylguanosine

SEQ ID NO: 8053 - RNA, 75 nt, synthetic construct; identical to SEQ ID NO: 3306
  source 1..75: mol_type = other RNA
  modified_base 1: mod_base = OTHER; note = 2'-Omethylguanosine phosphorothiorate
  modified_base 2: mod_base = OTHER; note = 2'-Omethyladenosine
  modified_base 41: mod_base = OTHER; note = 2'-fluoroguanosine
  modified_base 44: mod_base = OTHER; note = Guanosine phosphorothiorate
  modified_base 45: mod_base = OTHER; note = 2'-fluoroguanosine
  modified_base 51: mod_base = OTHER; note = Uridine phosphorothiorate
  modified_base 73: mod_base = OTHER; note = Cytosine phosphorothiorate
  modified_base 74: mod_base = OTHER; note = 2'-Omethylcytosine

SEQ ID NO: 8054 - RNA, 85 nt, synthetic construct; identical to SEQ ID NO: 3288
  source 1..85: mol_type = other RNA
  modified_base 1: mod_base = OTHER; note = 2'-Omethylcytosine
  modified_base 11: mod_base = OTHER; note = Cytosine phosphorothiorate
  modified_base 14: mod_base = OTHER; note = Guanosine phosphorothiorate
  modified_base 26: mod_base = OTHER; note = 2'-fluorouridine
  modified_base 28: mod_base = OTHER; note = 2'-fluoroguanosine
  modified_base 30: mod_base = OTHER; note = 2'-fluoroadenosine
  modified_base 34: mod_base = OTHER; note = Cytosine phosphorothiorate
  modified_base 35: mod_base = OTHER; note = Adenosine phosphorothiorate
  modified_base 43: mod_base = OTHER; note = 2'-Omethyluridine
  modified_base 54: mod_base = OTHER; note = 2'-fluorocytosine
  modified_base 57: mod_base = OTHER; note = 2'-Omethylcytosine
  modified_base 59: mod_base = OTHER; note = 2'-fluorouridine
  modified_base 72: mod_base = OTHER; note = 2'-fluorocytosine
  modified_base 76: mod_base = OTHER; note = 2'-fluorocytosine
  modified_base 84: mod_base = OTHER; note = Cytosine phosphorothiorate
  modified_base 85: mod_base = OTHER; note = 2'-fluoroadenosine

SEQ ID NO: 8055 - RNA, 85 nt, synthetic construct; identical to SEQ ID NO: 3288
  source 1..85: mol_type = other RNA
  modified_base 1: mod_base = OTHER; note = 2'-Omethylcytosine
  modified_base 3: mod_base = OTHER; note = Adenosine phosphorothiorate
  modified_base 17: mod_base = OTHER; note = 2'-fluoroguanosine
  modified_base 19: mod_base = OTHER; note = Uridine phosphorothiorate
  modified_base 25: mod_base = OTHER; note = 2'-fluoroguanosine
  modified_base 26: mod_base = OTHER; note = Uridine phosphorothiorate
  modified_base 29: mod_base = OTHER; note = 2'-Omethylguanosine
  modified_base 30: mod_base = OTHER; note = 2'-fluoroadenosine
  modified_base 33: mod_base = OTHER; note = 2'-fluorouridine
  modified_base 34: mod_base = OTHER; note = 2'-fluorocytosine
  modified_base 38: mod_base = OTHER; note = 2'-Omethyluridine
  modified_base 39: mod_base = OTHER; note = Cytosine phosphorothiorate
  modified_base 43: mod_base = OTHER; note = Uridine phosphorothiorate
  modified_base 46: mod_base = OTHER; note = 2'-Omethyladenosine
  modified_base 51: mod_base = OTHER; note = 2'-Omethyluridine
  modified_base 54: mod_base = OTHER; note = 2'-Omethylcytosine
  modified_base 56: mod_base = OTHER; note = 2'-fluoroguanosine
  modified_base 57: mod_base = OTHER; note = 2'-Omethylcytosine
  modified_base 58: mod_base = OTHER; note = 2'-Omethylguanosine
  modified_base 64: mod_base = OTHER; note = 2'-fluorouridine
  modified_base 68: mod_base = OTHER; note = Adenosine phosphorothiorate
  modified_base 75: mod_base = OTHER; note = 2'-fluorouridine
  modified_base 76: mod_base = OTHER; note = Cytosine phosphorothiorate
  modified_base 83: mod_base = OTHER; note = 2'-fluorocytosine
  modified_base 84: mod_base = OTHER; note = Cytosine phosphorothiorate

SEQ ID NO: 8056 - RNA, 75 nt, synthetic construct; identical to SEQ ID NO: 3311
  source 1..75: mol_type = other RNA
  modified_base 1: mod_base = OTHER; note = 2'-Omethylguanosine phosphorothiorate
  modified_base 2: mod_base = OTHER; note = 2'-Omethylguanosine phosphorothiorate
  modified_base 22: mod_base = OTHER; note = 2'-fluoroguanosine
  modified_base 23: mod_base = OTHER; note = 2'-fluorocytosine phosphorothiorate
  modified_base 35: mod_base = OTHER; note = 2'-fluorouridine
  modified_base 44: mod_base = OTHER; note = 2'-fluorocytosine
  modified_base 63: mod_base = OTHER; note = Guanosine phosphorothiorate
  modified_base 64: mod_base = OTHER; note = Guanosine phosphorothiorate
  modified_base 67: mod_base = OTHER; note = 2'-fluoroguanosine
  modified_base 68: mod_base = OTHER; note = Adenosine phosphorothiorate

SEQ ID NO: 8057 - RNA, 75 nt, synthetic construct; identical to SEQ ID NO: 1045
  source 1..75: mol_type = other RNA
  modified_base 1: mod_base = OTHER; note = 2'-Omethylguanosine phosphorothiorate
  modified_base 2: mod_base = OTHER; note = 2'-Omethylguanosine
  modified_base 13: mod_base = OTHER; note = Uridine phosphorothiorate
  modified_base 20: mod_base = OTHER; note = 2'-fluoroadenosine
  modified_base 21: mod_base = OTHER; note = Adenosine phosphorothiorate
  modified_base 22: mod_base = OTHER; note = 2'-fluoroguanosine
  modified_base 23: mod_base = OTHER; note = 2'-fluorocytosine
  modified_base 29: mod_base = OTHER; note = 2'-Omethylguanosine
  modified_base 39: mod_base = OTHER; note = 2'-Omethyluridine
  modified_base 40: mod_base = OTHER; note = 2'-fluorocytosine
  modified_base 56: mod_base = OTHER; note = 2'-Omethylguanosine
  modified_base 62: mod_base = OTHER; note = 2'-fluorocytosine
  modified_base 64: mod_base = OTHER; note = 2'-fluoroguanosine
  modified_base 67: mod_base = OTHER; note = Guanosine phosphorothiorate
  modified_base 68: mod_base = OTHER; note = 2'-fluoroadenosine
  modified_base 74: mod_base = OTHER; note = Cytosine phosphorothiorate
  modified_base 75: mod_base = OTHER; note = 2'-Omethyladenosine

SEQ ID NO: 8058 - RNA, 74 nt, synthetic construct; identical to SEQ ID NO: 766
  source 1..74: mol_type = other RNA
  modified_base 1: mod_base = OTHER; note = 2'-Omethylguanosine phosphorothiorate
  modified_base 2: mod_base = OTHER; note = 2'-Omethylguanosine phosphorothiorate
  modified_base 3: mod_base = OTHER; note = 2'-Omethylcytosine
  modified_base 4: mod_base = OTHER; note = 2'-Omethyluridine
  modified_base 5: mod_base = OTHER; note = 2'-Omethylcytosine
  modified_base 6: mod_base = OTHER; note = 2'-Omethylcytosine
  modified_base 16: mod_base = OTHER; note = 2'-Omethyluridine
  modified_base 17: mod_base = OTHER; note = 2'-Omethylguanosine
  modified_base 18: mod_base = OTHER; note = 2'-Omethylguanosine
  modified_base 20: mod_base = OTHER; note = 2'-Omethyluridine
  modified_base 25: mod_base = OTHER; note = 2'-Omethylcytosine
  modified_base 33: mod_base = OTHER; note = 2'-fluorouridine
  modified_base 35: mod_base = OTHER; note = Cytosine phosphorothiorate
  modified_base 37: mod_base = OTHER; note = Adenosine phosphorothiorate
  modified_base 38: mod_base = OTHER; note = Adenosine phosphorothiorate
  modified_base 41: mod_base = OTHER; note = 2'-fluorocytosine
  modified_base 42: mod_base = OTHER; note = 2'-Omethyladenosine
  modified_base 43: mod_base = OTHER; note = 2'-Omethyladenosine
  modified_base 44: mod_base = OTHER; note = 2'-fluoroadenosine
  modified_base 49: mod_base = OTHER; note = 2'-Omethylcytosine
  modified_base 50: mod_base = OTHER; note = 2'-Omethylcytosine
  modified_base 52: mod_base = OTHER; note = 2'-Omethylguanosine
  modified_base 54: mod_base = OTHER; note = 2'-Omethyluridine
  modified_base 55: mod_base = OTHER; note = Uridine phosphorothiorate
  modified_base 56: mod_base = OTHER; note = 2'-Omethylcytosine
  modified_base 57: mod_base = OTHER; note = 2'-fluoroguanosine
  modified_base 59: mod_base = OTHER; note = 2'-Omethylguanosine
  modified_base 61: mod_base = OTHER; note = 2'-Omethylcytosine
  modified_base 62: mod_base = OTHER; note = 2'-Omethylcytosine
  modified_base 63: mod_base = OTHER; note = 2'-fluorocytosine
  modified_base 64: mod_base = OTHER; note = 2'-Omethylguanosine
  modified_base 65: mod_base = OTHER; note = 2'-Omethylguanosine
  modified_base 72: mod_base = OTHER; note = 2'-Omethylcytosine
  modified_base 73: mod_base = OTHER; note = 2'-Omethylguanosine phosphorothiorate

SEQ ID NO: 8059 - RNA, 76 nt, synthetic construct; identical to SEQ ID NO: 3289
  source 1..76: mol_type = other RNA
  modified_base 1: mod_base = OTHER; note = 2'-Omethylguanosine phosphorothiorate
  modified_base 2: mod_base = OTHER; note = 2'-Omethylcytosine phosphorothiorate
  modified_base 3: mod_base = OTHER; note = 2'-Omethylcytosine
  modified_base 4: mod_base = OTHER; note = 2'-Omethyluridine
  modified_base 5: mod_base = OTHER; note = 2'-Omethylguanosine
  modified_base 6: mod_base = OTHER; note = 2'-Omethylguanosine
  modified_base 10: mod_base = OTHER; note = 2'-Omethylguanosine
  modified_base 11: mod_base = OTHER; note = 2'-Omethylcytosine
  modified_base 12: mod_base = OTHER; note = 2'-Omethyluridine
  modified_base 13: mod_base = OTHER; note = 2'-Omethylcytosine
  modified_base 18: mod_base = OTHER; note = 2'-Omethylguanosine
  modified_base 19: mod_base = OTHER; note = 2'-Omethylguanosine
  modified_base 22: mod_base = OTHER; note = 2'-Omethylguanosine
  modified_base 23: mod_base = OTHER; note = 2'-Omethyladenosine
  modified_base 24: mod_base = OTHER; note = 2'-Omethylguanosine
  modified_base 25: mod_base = OTHER; note = 2'-Omethylcytosine
  modified_base 33: mod_base = OTHER; note = 2'-fluorouridine
  modified_base 34: mod_base = OTHER; note = 2'-Omethyluridine
  modified_base 35: mod_base = OTHER; note = Uridine phosphorothiorate
  modified_base 37: mod_base = OTHER; note = Adenosine phosphorothiorate
  modified_base 38: mod_base = OTHER; note = Adenosine phosphorothiorate
  modified_base 41: mod_base = OTHER; note = 2'-fluorouridine
  modified_base 42: mod_base = OTHER; note = 2'-Omethylguanosine
  modified_base 43: mod_base = OTHER; note = 2'-Omethyladenosine
  modified_base 44: mod_base = OTHER; note = 2'-fluoroguanosine
  modified_base 49: mod_base = OTHER; note = 2'-Omethylcytosine
  modified_base 50: mod_base = OTHER; note = 2'-Omethyladenosine
  modified_base 51: mod_base = OTHER; note = 2'-Omethylguanosine
  modified_base 52: mod_base = OTHER; note = 2'-Omethylguanosine
  modified_base 53: mod_base = OTHER; note = 2'-Omethylguanosine
  modified_base 54: mod_base = OTHER; note = Uridine phosphorothiorate
  modified_base 55: mod_base = OTHER; note = Uridine phosphorothiorate
  modified_base 61: mod_base = OTHER; note = 2'-Omethylcytosine
  modified_base 62: mod_base = OTHER; note = 2'-Omethylcytosine
  modified_base 63: mod_base = OTHER; note = 2'-fluorocytosine
  modified_base 64: mod_base = OTHER; note = 2'-Omethyluridine
  modified_base 65: mod_base = OTHER; note = 2'-Omethylguanosine
  modified_base 66: mod_base = OTHER; note = 2'-Omethyluridine
  modified_base 67: mod_base = OTHER; note = 2'-Omethylcytosine
  modified_base 68: mod_base = OTHER; note = 2'-Omethylcytosine
  modified_base 73: mod_base = OTHER; note = 2'-Omethylguanosine

SEQ ID NO: 8060 - RNA, 85 nt, synthetic construct; identical to SEQ ID NO: 3297
  source 1..85: mol_type = other RNA
  modified_base 1: mod_base = OTHER; note = 2'-Omethylguanosine phosphorothiorate
  modified_base 3: mod_base = OTHER; note = 2'-Omethyluridine
  modified_base 11: mod_base = OTHER; note = Cytosine phosphorothiorate
  modified_base 23: mod_base = OTHER; note = 2'-fluoroguanosine
  modified_base 24: mod_base = OTHER; note = Guanosine phosphorothiorate
  modified_base 47: mod_base = OTHER; note = 2'-Omethylguanosine
  modified_base 62: mod_base = OTHER; note = 2'-Omethylguanosine
  modified_base 80: mod_base = OTHER; note = 2'-fluoroguanosine phosphorothiorate

SEQ ID NO: 8061 - RNA, 75 nt, synthetic construct; identical to SEQ ID NO: 1045
  source 1..75: mol_type = other RNA
  modified_base 2: mod_base = OTHER; note = 2'-Omethylguanosine phosphorothiorate
  modified_base 3: mod_base = OTHER; note = 2'-Omethyluridine phosphorothiorate
  modified_base 4: mod_base = OTHER; note = 2'-Omethyluridine
  modified_base 5: mod_base = OTHER; note = 2'-Omethylcytosine phosphorothiorate
  modified_base 6: mod_base = OTHER; note = 2'-Omethylcytosine
  modified_base 10: mod_base = OTHER; note = 2'-Omethylguanosine phosphorothiorate
  modified_base 11: mod_base = OTHER; note = 2'-Omethyluridine
  modified_base 16: mod_base = OTHER; note = 2'-Omethyluridine phosphorothiorate
  modified_base 51: mod_base = OTHER; note = 2'-Omethyladenosine phosphorothiorate
  modified_base 52: mod_base = OTHER; note = 2'-Omethylguanosine phosphorothiorate
  modified_base 58: mod_base = OTHER; note = 2'-Omethylguanosine
  modified_base 59: mod_base = OTHER; note = 2'-fluorouridine phosphorothiorate
  modified_base 63: mod_base = OTHER; note = 2'-Omethylguanosine
  modified_base 68: mod_base = OTHER; note = Adenosine phosphorothiorate
  modified_base 72: mod_base = OTHER; note = 2'-Omethyluridine

SEQ ID NO: 8062 - RNA, 75 nt, synthetic construct; identical to SEQ ID NO: 3306
  source 1..75: mol_type = other RNA
  modified_base 1: mod_base = OTHER; note = 2'-Omethylguanosine
  modified_base 4: mod_base = OTHER; note = 2'-Omethylcytosine
  modified_base 13: mod_base = OTHER; note = 2'-Omethylcytosine
  modified_base 17: mod_base = OTHER; note = 2'-Omethylguanosine
  modified_base 18: mod_base = OTHER; note = 2'-Omethylguanosine
  modified_base 24: mod_base = OTHER; note = 2'-Omethylcytosine
  modified_base 28: mod_base = OTHER; note = 2'-Omethyluridine
  modified_base 29: mod_base = OTHER; note = 2'-Omethylguanosine
  modified_base 48: mod_base = OTHER; note = 2'-Omethylguanosine
  modified_base 49: mod_base = OTHER; note = 2'-Omethylcytosine
  modified_base 51: mod_base = OTHER; note = 2'-Omethyluridine
  modified_base 55: mod_base = OTHER; note = 2'-Omethylcytosine
  modified_base 58: mod_base = OTHER; note = 2'-Omethyladenosine
  modified_base 64: mod_base = OTHER; note = 2'-Omethyluridine
  modified_base 68: mod_base = OTHER; note = 2'-Omethylguanosine
  modified_base 70: mod_base = OTHER; note = 2'-Omethyluridine
  modified_base 71: mod_base = OTHER; note = 2'-Omethylcytosine
  modified_base 72: mod_base = OTHER; note = 2'-Omethyladenosine

SEQ ID NO: 8063 - RNA, 86 nt, synthetic construct; identical to SEQ ID NO: 3290
  source 1..86: mol_type = other RNA
  modified_base 1: mod_base = OTHER; note = 2'-Omethyladenosine phosphorothiorate
  modified_base 2: mod_base = OTHER; note = 2'-Omethylcytosine phosphorothiorate
  modified_base 26: mod_base = OTHER; note = 2'-Omethylguanosine
  modified_base 42: mod_base = OTHER; note = Adenosine phosphorothiorate
  modified_base 43: mod_base = OTHER; note = 2'-fluoroadenosine
  modified_base 76: mod_base = OTHER; note = Uridine phosphorothiorate
  modified_base 77: mod_base = OTHER; note = 2'-fluorocytosine
  modified_base 80: mod_base = OTHER; note = 2'-fluoroguanosine
  modified_base 84: mod_base = OTHER; note = Cytosine phosphorothiorate
  modified_base 85: mod_base = OTHER; note = 2'-Omethylcytosine phosphorothiorate
  modified_base 86: mod_base = OTHER; note = 2'-Omethyladenosine

SEQ ID NO: 8064 - RNA, 75 nt, synthetic construct; identical to SEQ ID NO: 1045
  source 1..75: mol_type = other RNA
  modified_base 1: mod_base = OTHER; note = 2'-Omethylguanosine phosphorothiorate
  modified_base 2: mod_base = OTHER; note = 2'-Omethylguanosine
  modified_base 12: mod_base = OTHER; note = 2'-Omethylguanosine
  modified_base 13: mod_base = OTHER; note = Uridine phosphorothiorate
  modified_base 22: mod_base = OTHER; note = 2'-fluoroguanosine
  modified_base 23: mod_base = OTHER; note = 2'-fluorocytosine
  modified_base 28: mod_base = OTHER; note = 2'-fluorouridine
  modified_base 43: mod_base = OTHER; note = 2'-fluoroguanosine
  modified_base 50: mod_base = OTHER; note = 2'-fluoroguanosine phosphorothiorate
  modified_base 59: mod_base = OTHER; note = 2'-fluorouridine
  modified_base 65: mod_base = OTHER; note = Uridine phosphorothiorate
  modified_base 73: mod_base = OTHER; note = Cytosine phosphorothiorate
  modified_base 74: mod_base = OTHER; note = 2'-Omethylcytosine

SEQ ID NO: 8065 - DNA, 73 bp, synthetic construct; identical to SEQ ID NO: 3380
  source 1..73: mol_type = other DNA
  modified_base 1: mod_base = OTHER; note = 2'-Omethylguanosine phosphorothiorate
  modified_base 2: mod_base = OTHER; note = 2'-Omethylguanosine
  modified_base 13: mod_base = OTHER; note = 2'-fluorocytosine
  modified_base 22: mod_base = OTHER; note = Guanosine phosphorothiorate
  modified_base 68: mod_base = OTHER; note = 2'-fluoroguanosine
  misc_feature 1..22: note = RNA
  misc_feature 23: note = DNA
  misc_feature 24..73: note = RNA

SEQ ID NO: 8066 - RNA, 76 nt, synthetic construct; identical to SEQ ID NO: 3289
  source 1..76: mol_type = other RNA
  modified_base 1: mod_base = OTHER; note = 2'-Omethylguanosine phosphorothiorate
  modified_base 2: mod_base = OTHER; note = 2'-Omethylcytosine phosphorothiorate
  modified_base 24: mod_base = OTHER; note = 2'-Omethylguanosine
  modified_base 38: mod_base = OTHER; note = Adenosine phosphorothiorate
  modified_base 44: mod_base = OTHER; note = 2'-fluoroguanosine phosphorothiorate
  modified_base 45: mod_base = OTHER; note = 2'-fluoroguanosine
  modified_base 56: mod_base = OTHER; note = Cytosine phosphorothiorate
  modified_base 57: mod_base = OTHER; note = 2'-Omethyladenosine
  modified_base 61: mod_base = OTHER; note = 2'-fluorocytosine
  modified_base 74: mod_base = OTHER; note = Cytosine phosphorothiorate
  modified_base 75: mod_base = OTHER; note = 2'-Omethylcytosine

SEQ ID NO: 8067 - RNA, 75 nt, synthetic construct; identical to SEQ ID NO: 1045
  source 1..75: mol_type = other RNA
  modified_base 1: mod_base = OTHER; note = 2'-Omethylguanosine phosphorothiorate
  modified_base 2: mod_base = OTHER; note = 2'-Omethylguanosine phosphorothiorate
  modified_base 11: mod_base = OTHER; note = 2'-fluorouridine
  modified_base 20: mod_base = OTHER; note = 2'-Omethyladenosine phosphorothiorate
  modified_base 21: mod_base = OTHER; note = 2'-fluoroadenosine
  modified_base 22: mod_base = OTHER; note = 2'-fluoroguanosine
  modified_base 25: mod_base = OTHER; note = 2'-fluorocytosine phosphorothiorate
  modified_base 36: mod_base = OTHER; note = 2'-Omethyladenosine
  modified_base 37: mod_base = OTHER; note = Adenosine phosphorothiorate
  modified_base 38: mod_base = OTHER; note = 2'-Omethyladenosine
  modified_base 41: mod_base = OTHER; note = 2'-fluorocytosine
  modified_base 52: mod_base = OTHER; note = 2'-fluoroguanosine phosphorothiorate
  modified_base 58: mod_base = OTHER; note = 2'-fluoroguanosine phosphorothiorate
  modified_base 60: mod_base = OTHER; note = 2'-fluorocytosine
  modified_base 61: mod_base = OTHER; note = 2'-fluorouridine phosphorothiorate
  modified_base 63: mod_base = OTHER; note = Guanosine phosphorothiorate
  modified_base 64: mod_base = OTHER; note = Guanosine phosphorothiorate
  modified_base 67: mod_base = OTHER; note = 2'-fluoroguanosine
  modified_base 73: mod_base = OTHER; note = Cytosine phosphorothiorate
  modified_base 74: mod_base = OTHER; note = Cytosine phosphorothiorate
  modified_base 75: mod_base = OTHER; note = 2'-Omethyladenosine

SEQ ID NO: 8068 - RNA, 85 nt, synthetic construct; identical to SEQ ID NO: 3297
  source 1..85: mol_type = other RNA
  modified_base 1: mod_base = OTHER; note = 2'-Omethylguanosine
  modified_base 19: mod_base = OTHER; note = 2'-fluorouridine
  modified_base 20: mod_base = OTHER; note = 2'-Omethyluridine
  modified_base 21: mod_base = OTHER; note = 2'-Omethyladenosine
  modified_base 22: mod_base = OTHER; note = 2'-Omethyladenosine
  modified_base 82: mod_base = OTHER; note = 2'-Omethylguanosine

SEQ ID NO: 8069 - RNA, 75 nt, synthetic construct; identical to SEQ ID NO: 1045
  source 1..75: mol_type = other RNA
  modified_base 1: mod_base = OTHER; note = Guanosine phosphorothiorate
  modified_base 2: mod_base = OTHER; note = 2'-Omethylguanosine phosphorothiorate
  modified_base 15: mod_base = OTHER; note = 2'-fluoroadenosine
  modified_base 16: mod_base = OTHER; note = 2'-fluorouridine phosphorothiorate
  modified_base 20: mod_base = OTHER; note = 2'-fluoroadenosine
  modified_base 21: mod_base = OTHER; note = Adenosine phosphorothiorate
  modified_base 28: mod_base = OTHER; note = 2'-fluorouridine
  modified_base 38: mod_base = OTHER; note = Adenosine phosphorothiorate
  modified_base 40: mod_base = OTHER; note = 2'-fluorocytosine
  modified_base 44: mod_base = OTHER; note = 2'-fluorocytosine
  modified_base 52: mod_base = OTHER; note = 2'-fluoroguanosine phosphorothiorate
  modified_base 53: mod_base = OTHER; note = 2'-fluorouridine
  modified_base 54: mod_base = OTHER; note = 2'-Omethyluridine
  modified_base 65: mod_base = OTHER; note = 2'-fluorouridine
  modified_base 70: mod_base = OTHER; note = Cytosine phosphorothiorate
  modified_base 71: mod_base = OTHER; note = Cytosine phosphorothiorate
  modified_base 74: mod_base = OTHER; note = 2'-fluorocytosine phosphorothiorate

SEQ ID NO: 8070 - RNA, 76 nt, synthetic construct; identical to SEQ ID NO: 3342
  source 1..76: mol_type = other RNA
  modified_base 1: mod_base = OTHER; note = 2'-Omethylguanosine
  modified_base 13: mod_base = OTHER; note = 2'-Omethylcytosine
  modified_base 17: mod_base = OTHER; note = 2'-Omethylguanosine
  modified_base 18: mod_base = OTHER; note = 2'-Omethylguanosine
  modified_base 25: mod_base = OTHER; note = 2'-Omethylcytosine
  modified_base 33: mod_base = OTHER; note = Uridine phosphorothiorate
  modified_base 34: mod_base = OTHER; note = 2'-Omethyluridine
  modified_base 35: mod_base = OTHER; note = Cytosine phosphorothiorate
  modified_base 37: mod_base = OTHER; note = Adenosine phosphorothiorate
  modified_base 38: mod_base = OTHER; note = Adenosine phosphorothiorate
  modified_base 41: mod_base = OTHER; note = 2'-fluorocytosine
  modified_base 42: mod_base = OTHER; note = 2'-Omethylguanosine
  modified_base 43: mod_base = OTHER; note = 2'-Omethyladenosine
  modified_base 44: mod_base = OTHER; note = 2'-fluoroadenosine
  modified_base 49: mod_base = OTHER; note = 2'-Omethylcytosine
  modified_base 50: mod_base = OTHER; note = 2'-Omethylcytosine
  modified_base 52: mod_base = OTHER; note = 2'-Omethylguanosine
  modified_base 54: mod_base = OTHER; note = Uridine phosphorothiorate
  modified_base 55: mod_base = OTHER; note = Uridine phosphorothiorate
  modified_base 56: mod_base = OTHER; note = 2'-Omethylcytosine
  modified_base 57: mod_base = OTHER; note = Guanosine phosphorothiorate
  modified_base 58: mod_base = OTHER; note = Adenosine phosphorothiorate
  modified_base 59: mod_base = OTHER; note = 2'-Omethylguanosine
  modified_base 61: mod_base = OTHER; note = 2'-Omethylcytosine
  modified_base 65: mod_base = OTHER; note = 2'-Omethylguanosine
  modified_base 73: mod_base = OTHER; note = 2'-Omethylguanosine

SEQ ID NO: 8071 - RNA, 76 nt, synthetic construct; identical to SEQ ID NO: 3289
  source 1..76: mol_type = other RNA
  modified_base 1: mod_base = OTHER; note = 2'-Omethylguanosine phosphorothiorate
  modified_base 2: mod_base = OTHER; note = 2'-Omethylcytosine phosphorothiorate
  modified_base 3: mod_base = OTHER; note = 2'-Omethylcytosine
  modified_base 4: mod_base = OTHER; note = 2'-Omethyluridine
  modified_base 5: mod_base = OTHER; note = 2'-Omethylguanosine
  modified_base 6: mod_base = OTHER; note = 2'-Omethylguanosine
  modified_base 16: mod_base = OTHER; note = 2'-Omethyluridine
  modified_base 18: mod_base = OTHER; note = 2'-Omethylguanosine
  modified_base 19: mod_base = OTHER; note = 2'-Omethylguanosine
  modified_base 22: mod_base = OTHER; note = 2'-Omethylguanosine
  modified_base 24: mod_base = OTHER; note = 2'-Omethylguanosine
  modified_base 25: mod_base = OTHER; note = 2'-Omethylcytosine
  modified_base 27: mod_base = OTHER; note = 2'-Omethyluridine
  modified_base 33: mod_base = OTHER; note = 2'-fluorouridine
  modified_base 35: mod_base = OTHER; note = Uridine phosphorothiorate
  modified_base 37: mod_base = OTHER; note = Adenosine phosphorothiorate
  modified_base 38: mod_base = OTHER; note = Adenosine phosphorothiorate
  modified_base 44: mod_base = OTHER; note = 2'-Omethylguanosine
  modified_base 45: mod_base = OTHER; note = 2'-Omethylguanosine
  modified_base 46: mod_base = OTHER; note = 2'-fluoroguanosine
  modified_base 47: mod_base = OTHER; note = 2'-fluorouridine
  modified_base 48: mod_base = OTHER; note = 2'-fluorocytosine
  modified_base 49: mod_base = OTHER; note = 2'-Omethylcytosine
  modified_base 50: mod_base = OTHER; note = 2'-Omethyladenosine
  modified_base 51: mod_base = OTHER; note = 2'-Omethylguanosine
  modified_base 52: mod_base = OTHER; note = 2'-Omethylguanosine
  modified_base 53: mod_base = OTHER; note = 2'-Omethylguanosine
  modified_base 54: mod_base = OTHER; note = 2'-Omethyluridine
  modified_base 56: mod_base = OTHER; note = 2'-Omethylcytosine
  modified_base 59: mod_base = OTHER; note = 2'-Omethylguanosine
  modified_base 61: mod_base = OTHER; note = 2'-Omethylcytosine
  modified_base 62: mod_base = OTHER; note = 2'-Omethylcytosine
  modified_base 63: mod_base = OTHER; note = 2'-fluorocytosine
  modified_base 64: mod_base = OTHER; note = 2'-Omethyluridine
  modified_base 65: mod_base = OTHER; note = 2'-Omethylguanosine
  modified_base 66: mod_base = OTHER; note = 2'-Omethyluridine
  modified_base 67: mod_base = OTHER; note = 2'-Omethylcytosine
  modified_base 68: mod_base = OTHER; note = 2'-Omethylcytosine
  modified_base 73: mod_base = OTHER; note = 2'-Omethylguanosine

SEQ ID NO: 8072 - RNA, 85 nt, synthetic construct; identical to SEQ ID NO: 3297
  source 1..85: mol_type = other RNA
  modified_base 1: mod_base = OTHER; note = 2'-Omethylguanosine phosphorothiorate
  modified_base 2: mod_base = OTHER; note = 2'-Omethylcytosine phosphorothiorate
  modified_base 41: mod_base = OTHER; note = Cytosine phosphorothiorate
  modified_base 42: mod_base = OTHER; note = 2'-fluoroadenosine
  modified_base 63: mod_base = OTHER; note = 2'-fluorouridine
  modified_base 78: mod_base = OTHER; note = 2'-fluorocytosine
  modified_base 83: mod_base = OTHER; note = Cytosine phosphorothiorate
  modified_base 84: mod_base = OTHER; note = 2'-Omethylcytosine

SEQ ID NO: 8073 - RNA, 76 nt, synthetic construct; identical to SEQ ID NO: 625
  source 1..76: mol_type = other RNA
  modified_base 1: mod_base = OTHER; note = 2'-Omethylguanosine phosphorothiorate
  modified_base 2: mod_base = OTHER; note = 2'-Omethylguanosine
  modified_base 3: mod_base = OTHER; note = 2'-Omethylcytosine
  modified_base 4: mod_base = OTHER; note = 2'-Omethyluridine
  modified_base 5: mod_base = OTHER; note = 2'-Omethylcytosine
  modified_base 6: mod_base = OTHER; note = 2'-Omethylcytosine
  modified_base 10: mod_base = OTHER; note = 2'-Omethylguanosine
  modified_base 11: mod_base = OTHER; note = 2'-Omethylcytosine
  modified_base 12: mod_base = OTHER; note = 2'-Omethylguanosine
  modified_base 13: mod_base = OTHER; note = 2'-Omethylcytosine
  modified_base 22: mod_base = OTHER; note = 2'-Omethylguanosine
  modified_base 23: mod_base = OTHER; note = 2'-Omethylcytosine
  modified_base 24: mod_base = OTHER; note = 2'-Omethylguanosine
  modified_base 25: mod_base = OTHER; note = 2'-Omethylcytosine
  modified_base 33: mod_base = OTHER; note = 2'-fluorouridine
  modified_base 35: mod_base = OTHER; note = Cytosine phosphorothiorate
  modified_base 37: mod_base = OTHER; note = Adenosine phosphorothiorate
  modified_base 38: mod_base = OTHER; note = Adenosine phosphorothiorate
  modified_base 49: mod_base = OTHER; note = 2'-Omethylcytosine
  modified_base 50: mod_base = OTHER; note = 2'-Omethylcytosine
  modified_base 51: mod_base = OTHER; note = 2'-Omethylguanosine
  modified_base 52: mod_base = OTHER; note = 2'-Omethylguanosine
  modified_base 53: mod_base = OTHER; note = 2'-Omethylguanosine
  modified_base 54: mod_base = OTHER; note = 2'-Omethyluridine
  modified_base 55: mod_base = OTHER; note = Uridine phosphorothiorate
  modified_base 56: mod_base = OTHER; note = 2'-Omethylcytosine
  modified_base 59: mod_base = OTHER; note = 2'-Omethylguanosine
  modified_base 61: mod_base = OTHER; note = 2'-Omethylcytosine
  modified_base 62: mod_base = OTHER; note = 2'-Omethylcytosine
  modified_base 63: mod_base = OTHER; note = 2'-fluorocytosine
  modified_base 64: mod_base = OTHER; note = 2'-Omethylguanosine
  modified_base 65: mod_base = OTHER; note = 2'-Omethylguanosine
  modified_base 66: mod_base = OTHER; note = 2'-Omethylcytosine
  modified_base 67: mod_base = OTHER; note = 2'-Omethylguanosine
  modified_base 68: mod_base = OTHER; note = 2'-Omethylguanosine
  modified_base 69: mod_base = OTHER; note = 2'-Omethyladenosine
  modified_base 70: mod_base = OTHER; note = 2'-fluoroguanosine
  modified_base 71: mod_base = OTHER; note = 2'-Omethyluridine
  modified_base 73: mod_base = OTHER; note = 2'-Omethylguanosine
  modified_base 75: mod_base = OTHER; note = 2'-fluorocytosine phosphorothiorate

SEQ ID NO: 8074 - RNA, 76 nt, synthetic construct; identical to SEQ ID NO: 625
  source 1..76: mol_type = other RNA
  modified_base 2: mod_base = OTHER; note = 2'-Omethylguanosine phosphorothiorate
  modified_base 4: mod_base = OTHER; note = Uridine phosphorothiorate
  modified_base 5: mod_base = OTHER; note = 2'-Omethylcytosine
  modified_base 6: mod_base = OTHER; note = 2'-fluorocytosine
  modified_base 10: mod_base = OTHER; note = 2'-fluoroguanosine
  modified_base 11: mod_base = OTHER; note = 2'-Omethylcytosine
  modified_base 13: mod_base = OTHER; note = Cytosine phosphorothiorate
  modified_base 14: mod_base = OTHER; note = 2'-Omethyladenosine
  modified_base 22: mod_base = OTHER; note = 2'-fluoroguanosine
  modified_base 23: mod_base = OTHER; note = 2'-fluorocytosine
  modified_base 24: mod_base = OTHER; note = 2'-Omethylguanosine
  modified_base 25: mod_base = OTHER; note = 2'-Omethylcytosine phosphorothiorate
  modified_base 29: mod_base = OTHER; note = 2'-Omethylguanosine phosphorothiorate
  modified_base 30: mod_base = OTHER; note = 2'-fluoroguanosine
  modified_base 31: mod_base = OTHER; note = 2'-Omethyladenosine
  modified_base 34: mod_base = OTHER; note = 2'-Omethyluridine
  modified_base 36: mod_base = OTHER; note = Adenosine phosphorothiorate
  modified_base 38: mod_base = OTHER; note = 2'-Omethyladenosine
  modified_base 41: mod_base = OTHER; note = 2'-fluorocytosine
  modified_base 45: mod_base = OTHER; note = 2'-Omethylguanosine
  modified_base 48: mod_base = OTHER; note = 2'-Omethyluridine
  modified_base 49: mod_base = OTHER; note = 2'-Omethylcytosine
  modified_base 51: mod_base = OTHER; note = Guanosine phosphorothiorate
  modified_base 52: mod_base = OTHER; note = 2'-fluoroguanosine
  modified_base 58: mod_base = OTHER; note = 2'-fluoroadenosine
  modified_base 60: mod_base = OTHER; note = Uridine phosphorothiorate
  modified_base 61: mod_base = OTHER; note = 2'-fluorocytosine
  modified_base 63: mod_base = OTHER; note = 2'-fluorocytosine phosphorothiorate
  modified_base 64: mod_base = OTHER; note = Guanosine phosphorothiorate
  modified_base 65: mod_base = OTHER; note = 2'-Omethylguanosine phosphorothiorate
  modified_base 66: mod_base = OTHER; note = 2'-Omethylcytosine
  modified_base 67: mod_base = OTHER; note = 2'-Omethylguanosine
  modified_base 70: mod_base = OTHER; note = Guanosine phosphorothiorate
  modified_base 71: mod_base = OTHER; note = 2'-Omethyluridine
  modified_base 73: mod_base = OTHER; note = 2'-fluoroguanosine
  modified_base 75: mod_base = OTHER; note = Cytosine phosphorothiorate

SEQ ID NO: 8075 - RNA, 76 nt, synthetic construct
  source 1..76: mol_type = other RNA
ggctccgtggcgcaatggatagcgcattggacttcaaattcaaagatcaagggttcgagtcccttcggagtcgcca

SEQ ID NO: 8076 - RNA, 76 nt, synthetic construct; identical to SEQ ID NO: 625
  source 1..76: mol_type = other RNA
  modified_base 1: mod_base = OTHER; note = 2'-Omethylguanosine
  modified_base 2: mod_base = OTHER; note = 2'-Omethylguanosine
  modified_base 3: mod_base = OTHER; note = 2'-Omethylcytosine
  modified_base 4: mod_base = OTHER; note = 2'-Omethyluridine
  modified_base 5: mod_base = OTHER; note = 2'-Omethylcytosine
  modified_base 6: mod_base = OTHER; note = 2'-Omethylcytosine phosphorothiorate
  modified_base 14: mod_base = OTHER; note = 2'-Omethyladenosine
  modified_base 16: mod_base = OTHER; note = 2'-Omethyluridine
  modified_base 17: mod_base = OTHER; note = 2'-Omethylguanosine
  modified_base 18: mod_base = OTHER; note = 2'-fluoroguanosine phosphorothiorate
  modified_base 19: mod_base = OTHER; note = Adenosine phosphorothiorate
  modified_base 20: mod_base = OTHER; note = Uridine phosphorothiorate
  modified_base 21: mod_base = OTHER; note = 2'-fluoroadenosine phosphorothiorate
  modified_base 22: mod_base = OTHER; note = 2'-Omethylguanosine
  modified_base 24: mod_base = OTHER; note = 2'-Omethylguanosine phosphorothiorate
  modified_base 25: mod_base = OTHER; note = 2'-Omethylcytosine
  modified_base 26: mod_base = OTHER; note = Adenosine phosphorothiorate
  modified_base 29: mod_base = OTHER; note = Guanosine phosphorothiorate
  modified_base 30: mod_base = OTHER; note = 2'-fluoroguanosine phosphorothiorate
  modified_base 31: mod_base = OTHER; note = 2'-Omethyladenosine phosphorothiorate
  modified_base 33: mod_base = OTHER; note = 2'-fluorouridine
  modified_base 35: mod_base = OTHER; note = 2'-Omethylcytosine phosphorothiorate
  modified_base 36: mod_base = OTHER; note = 2'-Omethyladenosine phosphorothiorate
  modified_base 37: mod_base = OTHER; note = Adenosine phosphorothiorate
  modified_base 39: mod_base = OTHER; note = 2'-Omethyluridine phosphorothiorate
  modified_base 41: mod_base = OTHER; note = 2'-fluorocytosine
  modified_base 42: mod_base = OTHER; note = Adenosine phosphorothiorate
  modified_base 43: mod_base = OTHER; note = Adenosine phosphorothiorate
  modified_base 44: mod_base = OTHER; note = 2'-Omethyladenosine
  modified_base 45: mod_base = OTHER; note = 2'-Omethylguanosine
  modified_base 49: mod_base = OTHER; note = 2'-Omethylcytosine
  modified_base 50: mod_base = OTHER; note = 2'-Omethylcytosine
  modified_base 52: mod_base = OTHER; note = 2'-Omethylguanosine
  modified_base 53: mod_base = OTHER; note = 2'-Omethylguanosine
  modified_base 55: mod_base = OTHER; note = Uridine phosphorothiorate
  modified_base 59: mod_base = OTHER; note = 2'-Omethylguanosine
  modified_base 61: mod_base = OTHER; note = 2'-Omethylcytosine
  modified_base 65: mod_base = OTHER; note = 2'-Omethylguanosine phosphorothiorate
  modified_base 66: mod_base = OTHER; note = 2'-Omethylcytosine phosphorothiorate
  modified_base 67: mod_base = OTHER; note = Guanosine phosphorothiorate
  modified_base 68: mod_base = OTHER; note = 2'-Omethylguanosine
  modified_base 71: mod_base = OTHER; note = 2'-Omethyluridine phosphorothiorate
  modified_base 72: mod_base = OTHER; note = 2'-Omethylcytosine
  modified_base 73: mod_base = OTHER; note = 2'-Omethylguanosine
  modified_base 74: mod_base = OTHER; note = 2'-fluorocytosine phosphorothiorate
  modified_base 75: mod_base = OTHER; note = 2'-fluorocytosine
  modified_base 76: mod_base = OTHER; note = 2'-Omethyladenosine

SEQ ID NO: 8077 - RNA, 75 nt, synthetic construct; identical to SEQ ID NO: 1045
  source 1..75: mol_type = other RNA
  modified_base 1: mod_base = OTHER; note = 2'-Omethylguanosine phosphorothiorate
  modified_base 2: mod_base = OTHER; note = 2'-Omethylguanosine
  modified_base 3: mod_base = OTHER; note = 2'-Omethyluridine
  modified_base 4: mod_base = OTHER; note = 2'-Omethyluridine
  modified_base 5: mod_base = OTHER; note = 2'-Omethylcytosine
  modified_base 6: mod_base = OTHER; note = 2'-Omethylcytosine
  modified_base 27: mod_base = OTHER; note = 2'-Omethylcytosine
  modified_base 28: mod_base = OTHER; note = 2'-Omethyluridine
  modified_base 29: mod_base = OTHER; note = 2'-Omethylguanosine
  modified_base 30: mod_base = OTHER; note = 2'-fluoroguanosine
  modified_base 40: mod_base = OTHER; note = 2'-fluorocytosine
  modified_base 41: mod_base = OTHER; note = 2'-Omethylcytosine
  modified_base 42: mod_base = OTHER; note = 2'-Omethyladenosine
  modified_base 43: mod_base = OTHER; note = 2'-Omethylguanosine
  modified_base 72: mod_base = OTHER; note = 2'-Omethyluridine

SEQ ID NO: 8078 - RNA, 76 nt, synthetic construct; identical to SEQ ID NO: 3316
  source 1..76: mol_type = other RNA
  modified_base 1: mod_base = OTHER; note = 2'-Omethyladenosine phosphorothiorate
  modified_base 2: mod_base = OTHER; note = 2'-Omethylcytosine phosphorothiorate
  modified_base 74: mod_base = OTHER; note = Cytosine phosphorothiorate
  modified_base 75: mod_base = OTHER; note = 2'-Omethylcytosine

SEQ ID NO: 8079 - RNA, 76 nt, synthetic construct; identical to SEQ ID NO: 625
  source 1..76: mol_type = other RNA
  modified_base 2: mod_base = OTHER; note = 2'-Omethylguanosine
  modified_base 3: mod_base = OTHER; note = 2'-Omethylcytosine
  modified_base 5: mod_base = OTHER; note = Cytosine phosphorothiorate
  modified_base 6: mod_base = OTHER; note = Cytosine phosphorothiorate
  modified_base 11: mod_base = OTHER; note = 2'-fluorocytosine
  modified_base 14: mod_base = OTHER; note = 2'-fluoroadenosine
  modified_base 15: mod_base = OTHER; note = 2'-fluoroadenosine
  modified_base 17: mod_base = OTHER; note = 2'-Omethylguanosine phosphorothiorate
  modified_base 18: mod_base = OTHER; note = 2'-Omethylguanosine phosphorothiorate
  modified_base 19: mod_base = OTHER; note = Adenosine phosphorothiorate
  modified_base 20: mod_base = OTHER; note = 2'-fluorouridine
  modified_base 21: mod_base = OTHER; note = Adenosine phosphorothiorate
  modified_base 22: mod_base = OTHER; note = Guanosine phosphorothiorate
  modified_base 23: mod_base = OTHER; note = 2'-fluorocytosine
  modified_base 25: mod_base = OTHER; note = 2'-Omethylcytosine
  modified_base 26: mod_base = OTHER; note = 2'-Omethyladenosine
  modified_base 31: mod_base = OTHER; note = 2'-fluoroadenosine
  modified_base 33: mod_base = OTHER; note = Uridine phosphorothiorate
  modified_base 39: mod_base = OTHER; note = 2'-fluorouridine
  modified_base 42: mod_base = OTHER; note = 2'-fluoroadenosine
  modified_base 45: mod_base = OTHER; note = 2'-Omethylguanosine
  modified_base 46: mod_base = OTHER; note = 2'-Omethylguanosine
  modified_base 47: mod_base = OTHER; note = 2'-Omethyluridine phosphorothiorate
  modified_base 48: mod_base = OTHER; note = 2'-Omethyluridine
  modified_base 49: mod_base = OTHER; note = 2'-fluorocytosine
  modified_base 54: mod_base = OTHER; note = 2'-fluorouridine
  modified_base 56: mod_base = OTHER; note = 2'-Omethylcytosine
  modified_base 57: mod_base = OTHER; note = Guanosine phosphorothiorate
  modified_base 64: mod_base = OTHER; note = 2'-fluoroguanosine phosphorothiorate
  modified_base 68: mod_base = OTHER; note = 2'-Omethylguanosine
  modified_base 69: mod_base = OTHER; note = 2'-fluoroadenosine
  modified_base 70: mod_base = OTHER; note = Guanosine phosphorothiorate
  modified_base 71: mod_base = OTHER; note = Uridine phosphorothiorate
  modified_base 72: mod_base = OTHER; note = 2'-Omethylcytosine
  modified_base 73: mod_base = OTHER; note = 2'-fluoroguanosine

SEQ ID NO: 8080 - RNA, 76 nt, synthetic construct
  source 1..76: mol_type = other RNA
ggctccgtggcgcaatggatagcgctttggacttcaaattcaaaggttccgggttcgagtcccggcggggtcgcca

SEQ ID NO: 8081 - RNA, 76 nt, synthetic construct
  source 1..76: mol_type = other RNA
ggctccgtggcgcaatggatagcgcattggacttcaaattcaaaggttccgtaaacgagttacggcggagtcgcca

SEQ ID NO: 8082 - RNA, 76 nt, synthetic construct; identical to SEQ ID NO: 3447
  source 1..76: mol_type = other RNA
  modified_base 1: mod_base = OTHER; note = 2'-Omethylguanosine
  modified_base 2: mod_base = OTHER; note = 2'-Omethylcytosine
  modified_base 3: mod_base = OTHER; note = 2'-Omethylcytosine
  modified_base 4: mod_base = OTHER; note = 2'-Omethylcytosine
  modified_base 5: mod_base = OTHER; note = 2'-Omethylguanosine
  modified_base 6: mod_base = OTHER; note = 2'-Omethyladenosine
  modified_base 10: mod_base = OTHER; note = 2'-Omethylguanosine
  modified_base 11: mod_base = OTHER; note = 2'-Omethylcytosine
  modified_base 12: mod_base = OTHER; note = 2'-Omethylguanosine
  modified_base 13: mod_base = OTHER; note = 2'-Omethylcytosine
  modified_base 14: mod_base = OTHER; note = 2'-Omethyladenosine
  modified_base 15: mod_base = OTHER; note = 2'-fluoroadenosine
  modified_base 16: mod_base = OTHER; note = 2'-Omethyluridine
  modified_base 17: mod_base = OTHER; note = 2'-Omethylguanosine
  modified_base 18: mod_base = OTHER; note = 2'-Omethylguanosine
  modified_base 19: mod_base = OTHER; note = 2'-fluoroadenosine
  modified_base 20: mod_base = OTHER; note = 2'-Omethyluridine
  modified_base 25: mod_base = OTHER; note = 2'-Omethylcytosine
  modified_base 33: mod_base = OTHER; note = 2'-fluorouridine
  modified_base 35: mod_base = OTHER; note = Cytosine phosphorothiorate
  modified_base 37: mod_base = OTHER; note = Adenosine phosphorothiorate
  modified_base 38: mod_base = OTHER; note = Adenosine phosphorothiorate
  modified_base 41: mod_base = OTHER; note = 2'-Omethylcytosine
  modified_base 42: mod_base = OTHER; note = 2'-Omethyladenosine
  modified_base 43: mod_base = OTHER; note = 2'-Omethyladenosine
  modified_base 44: mod_base = OTHER; note = 2'-Omethyladenosine
  modified_base 49: mod_base = OTHER; note = 2'-Omethylcytosine
  modified_base 50: mod_base = OTHER; note = 2'-Omethylcytosine
  modified_base 52: mod_base = OTHER; note = 2'-Omethylguanosine
  modified_base 54: mod_base = OTHER; note = 2'-Omethyluridine
  modified_base 55: mod_base = OTHER; note = Uridine phosphorothiorate
  modified_base 56: mod_base = OTHER; note = 2'-Omethylcytosine
  modified_base 57: mod_base = OTHER; note = 2'-fluoroguanosine
  modified_base 59: mod_base = OTHER; note = 2'-Omethylguanosine
  modified_base 61: mod_base = OTHER; note = 2'-Omethylcytosine
  modified_base 65: mod_base = OTHER; note = 2'-Omethylguanosine
  modified_base 73: mod_base = OTHER; note = 2'-Omethylguanosine

SEQ ID NO: 8083 - RNA, 76 nt, synthetic construct; identical to SEQ ID NO: 3289
  source 1..76: mol_type = other RNA
  modified_base 1: mod_base = OTHER; note = 2'-Omethylguanosine
  modified_base 16: mod_base = OTHER; note = 2'-Omethyluridine
  modified_base 18: mod_base = OTHER; note = 2'-Omethylguanosine
  modified_base 19: mod_base = OTHER; note = 2'-Omethylguanosine
  modified_base 54: mod_base = OTHER; note = 2'-Omethyluridine phosphorothiorate
  modified_base 55: mod_base = OTHER; note = Uridine phosphorothiorate
  modified_base 56: mod_base = OTHER; note = 2'-Omethylcytosine
  modified_base 57: mod_base = OTHER; note = 2'-fluoroadenosine
  modified_base 58: mod_base = OTHER; note = 2'-fluoroadenosine
  modified_base 59: mod_base = OTHER; note = 2'-Omethylguanosine
  modified_base 60: mod_base = OTHER; note = 2'-fluorouridine
  modified_base 73: mod_base = OTHER; note = 2'-Omethylguanosine

SEQ ID NO: 8084 - RNA, 85 nt, synthetic construct; identical to SEQ ID NO: 3286
  source 1..85: mol_type = other RNA
  modified_base 1: mod_base = OTHER; note = 2'-Omethylcytosine phosphorothiorate
  modified_base 16: mod_base = OTHER; note = Guanosine phosphorothiorate
  modified_base 22: mod_base = OTHER; note = 2'-fluoroguanosine
  modified_base 23: mod_base = OTHER; note = Guanosine phosphorothiorate
  modified_base 26: mod_base = OTHER; note = 2'-fluorouridine
  modified_base 27: mod_base = OTHER; note = 2'-Omethyluridine
  modified_base 28: mod_base = OTHER; note = 2'-fluoroguanosine
  modified_base 30: mod_base = OTHER; note = 2'-fluoroadenosine
  modified_base 34: mod_base = OTHER; note = 2'-fluorouridine
  modified_base 35: mod_base = OTHER; note = Adenosine phosphorothiorate
  modified_base 45: mod_base = OTHER; note = 2'-Omethylguanosine
  modified_base 47: mod_base = OTHER; note = 2'-fluorocytosine
  modified_base 48: mod_base = OTHER; note = 2'-Omethyladenosine
  modified_base 52: mod_base = OTHER; note = 2'-fluoroguanosine phosphorothiorate
  modified_base 53: mod_base = OTHER; note = Uridine phosphorothiorate
  modified_base 55: mod_base = OTHER; note = 2'-Omethylcytosine
  modified_base 57: mod_base = OTHER; note = 2'-Omethylcytosine
  modified_base 84: mod_base = OTHER; note = 2'-fluorocytosine

SEQ ID NO: 8085 - RNA, 76 nt, synthetic construct; identical to SEQ ID NO: 3490
  source 1..76: mol_type = other RNA
  modified_base 1: mod_base = OTHER; note = 2'-Omethylguanosine phosphorothiorate
  modified_base 2: mod_base = OTHER; note = 2'-Omethylguanosine phosphorothiorate
  modified_base 3: mod_base = OTHER; note = 2'-Omethylcytosine
  modified_base 4: mod_base = OTHER; note = 2'-Omethyluridine
  modified_base 5: mod_base = OTHER; note = 2'-Omethylcytosine
  modified_base 6: mod_base = OTHER; note = 2'-Omethylcytosine
  modified_base 10: mod_base = OTHER; note = 2'-Omethylguanosine
  modified_base 11: mod_base = OTHER; note = 2'-Omethylcytosine
  modified_base 12: mod_base = OTHER; note = 2'-Omethylguanosine
  modified_base 13: mod_base = OTHER; note = 2'-Omethylcytosine
  modified_base 14: mod_base = OTHER; note = 2'-Omethyladenosine
  modified_base 15: mod_base = OTHER; note = 2'-fluoroadenosine
  modified_base 16: mod_base = OTHER; note = 2'-Omethyluridine
  modified_base 17: mod_base = OTHER; note = 2'-Omethylguanosine
  modified_base 18: mod_base = OTHER; note = 2'-Omethylguanosine
  modified_base 19: mod_base = OTHER; note = 2'-fluoroadenosine
  modified_base 20: mod_base = OTHER; note = 2'-Omethyluridine
  modified_base 22: mod_base = OTHER; note = 2'-Omethylguanosine
  modified_base 23: mod_base = OTHER; note = 2'-Omethylcytosine
  modified_base 24: mod_base = OTHER; note = 2'-Omethylguanosine
  modified_base 25: mod_base = OTHER; note = 2'-Omethylcytosine
  modified_base 33: mod_base = OTHER; note = 2'-fluorouridine
  modified_base 35: mod_base = OTHER; note = Cytosine phosphorothiorate
  modified_base 37: mod_base = OTHER; note = Adenosine phosphorothiorate
  modified_base 38: mod_base = OTHER; note = Adenosine phosphorothiorate
  modified_base 44: mod_base = OTHER; note = 2'-Omethyladenosine
  modified_base 45: mod_base = OTHER; note = 2'-Omethylguanosine
  modified_base 46: mod_base = OTHER; note = 2'-fluoroguanosine
  modified_base 47: mod_base = OTHER; note = 2'-fluorouridine
  modified_base 48: mod_base = OTHER; note = 2'-fluorouridine
  modified_base 56: mod_base = OTHER; note = 2'-Omethylcytosine
  modified_base 59: mod_base = OTHER; note = 2'-Omethylguanosine
  modified_base 61: mod_base = OTHER; note = 2'-Omethylcytosine
  modified_base 62: mod_base = OTHER; note = 2'-Omethylcytosine
  modified_base 63: mod_base = OTHER; note = 2'-fluorocytosine
  modified_base 64: mod_base = OTHER; note = 2'-Omethylguanosine
  modified_base 65: mod_base = OTHER; note = 2'-Omethylcytosine
  modified_base 66: mod_base = OTHER; note = 2'-Omethylcytosine
  modified_base 67: mod_base = OTHER; note = 2'-Omethylguanosine
  modified_base 68: mod_base = OTHER; note = 2'-Omethylguanosine
  modified_base 73: mod_base = OTHER; note = 2'-Omethylguanosine

SEQ ID NO: 8086 - RNA, 76 nt, synthetic construct; identical to SEQ ID NO: 3318
  source 1..76: mol_type = other RNA
  modified_base 1: mod_base = OTHER; note = 2'-Omethylcytosine
  modified_base 2: mod_base = OTHER; note = 2'-Omethylcytosine
  modified_base 3: mod_base = OTHER; note = 2'-Omethyluridine
  modified_base 4: mod_base = OTHER; note = 2'-Omethyluridine
  modified_base 5: mod_base = OTHER; note = 2'-Omethylcytosine
  modified_base 6: mod_base = OTHER; note = 2'-Omethylguanosine
  modified_base 14: mod_base = OTHER; note = 2'-Omethyladenosine
  modified_base 15: mod_base = OTHER; note = 2'-Omethylguanosine
  modified_base 16: mod_base = OTHER; note = 2'-Omethyluridine
  modified_base 18: mod_base = OTHER; note = 2'-Omethylguanosine
  modified_base 19: mod_base = OTHER; note = 2'-Omethylguanosine
  modified_base 22: mod_base = OTHER; note = 2'-Omethylguanosine
  modified_base 23: mod_base = OTHER; note = 2'-Omethyladenosine
  modified_base 24: mod_base = OTHER; note = 2'-Omethylguanosine
  modified_base 25: mod_base = OTHER; note = 2'-Omethylcytosine
  modified_base 41: mod_base = OTHER; note = 2'-fluorocytosine
  modified_base 42: mod_base = OTHER; note = 2'-Omethyluridine
  modified_base 43: mod_base = OTHER; note = 2'-Omethyluridine
  modified_base 44: mod_base = OTHER; note = 2'-fluoroadenosine
  modified_base 49: mod_base = OTHER; note = 2'-Omethylguanosine
  modified_base 50: mod_base = OTHER; note = 2'-Omethylcytosine
  modified_base 52: mod_base = OTHER; note = 2'-Omethylguanosine
  modified_base 54: mod_base = OTHER; note = 2'-Omethyluridine
  modified_base 55: mod_base = OTHER; note = Uridine phosphorothiorate
  modified_base 56: mod_base = OTHER; note = 2'-Omethylcytosine
  modified_base 57: mod_base = OTHER; note = 2'-fluoroguanosine
  modified_base 59: mod_base = OTHER; note = 2'-Omethyladenosine
  modified_base 61: mod_base = OTHER; note = 2'-Omethylcytosine
  modified_base 65: mod_base = OTHER; note = 2'-Omethylcytosine
  modified_base 73: mod_base = OTHER; note = 2'-Omethyladenosine

SEQ ID NO: 8087 - RNA, 76 nt, synthetic construct; identical to SEQ ID NO: 3295
  source 1..76: mol_type = other RNA
  modified_base 1: mod_base = OTHER; note = 2'-Omethylcytosine
  modified_base 2: mod_base = OTHER; note = 2'-Omethylcytosine phosphorothiorate
  modified_base 3: mod_base = OTHER; note = 2'-fluorouridine
  modified_base 6: mod_base = OTHER; note = 2'-fluoroguanosine
  modified_base 16: mod_base = OTHER; note = 2'-fluorouridine phosphorothiorate
  modified_base 26: mod_base = OTHER; note = Guanosine phosphorothiorate
  modified_base 28: mod_base = OTHER; note = Adenosine phosphorothiorate
  modified_base 39: mod_base = OTHER; note = 2'-fluorouridine phosphorothiorate
  modified_base 45: mod_base = OTHER; note = 2'-Omethylguanosine phosphorothiorate
  modified_base 52: mod_base = OTHER; note = 2'-Omethylguanosine
  modified_base 74: mod_base = OTHER; note = 2'-Omethylcytosine phosphorothiorate

SEQ ID NO: 8088 - RNA, 73 nt, synthetic construct; identical to SEQ ID NO: 935
  source 1..73: mol_type = other RNA
  modified_base 1: mod_base = OTHER; note = 2'-Omethylguanosine phosphorothiorate
  modified_base 2: mod_base = OTHER; note = 2'-Omethylguanosine phosphorothiorate
  modified_base 41: mod_base = OTHER; note = Cytosine phosphorothiorate
  modified_base 42: mod_base = OTHER; note = 2'-fluoroadenosine
  modified_base 54: mod_base = OTHER; note = 2'-fluorouridine
  modified_base 69: mod_base = OTHER; note = 2'-fluoroadenosine
  modified_base 73: mod_base = OTHER; note = 2'-Omethylguanosine

SEQ ID NO: 8089 - RNA, 76 nt, synthetic construct; identical to SEQ ID NO: 625
  source 1..76: mol_type = other RNA
  modified_base 27: mod_base = OTHER; note = Thymine
  modified_base 28: mod_base = OTHER; note = Thymine
  modified_base 39: mod_base = OTHER; note = Thymine
  modified_base 40: mod_base = OTHER; note = Thymine
  modified_base 54: mod_base = OTHER; note = Thymine
  modified_base 55: mod_base = OTHER; note = Thymine

SEQ ID NO: 8090 - RNA, 76 nt, synthetic construct; identical to SEQ ID NO: 625
  source 1..76: mol_type = other RNA
  modified_base 1: mod_base = OTHER; note = 2'-Omethylguanosine phosphorothiorate
  modified_base 2: mod_base = OTHER; note = 2'-Omethylguanosine
  modified_base 17: mod_base = OTHER; note = 2'-Omethylguanosine
  modified_base 33: mod_base = OTHER; note = 2'-fluorouridine
  modified_base 35: mod_base = OTHER; note = Cytosine phosphorothiorate
  modified_base 37: mod_base = OTHER; note = Adenosine phosphorothiorate
  modified_base 38: mod_base = OTHER; note = Adenosine phosphorothiorate
  modified_base 52: mod_base = OTHER; note = 2'-fluoroguanosine
  modified_base 56: mod_base = OTHER; note = 2'-Omethylcytosine
  modified_base 65: mod_base = OTHER; note = 2'-Omethylguanosine
  modified_base 73: mod_base = OTHER; note = 2'-Omethylguanosine
  modified_base 75: mod_base = OTHER; note = 2'-fluorocytosine phosphorothiorate

SEQ ID NO: 8091 - RNA, 75 nt, synthetic construct; identical to SEQ ID NO: 3306
  source 1..75: mol_type = other RNA
  modified_base 1: mod_base = OTHER; note = 2'-Omethylguanosine
  modified_base 2: mod_base = OTHER; note = 2'-Omethyladenosine
  modified_base 3: mod_base = OTHER; note = 2'-Omethylcytosine
  modified_base 4: mod_base = OTHER; note = 2'-Omethylcytosine
  modified_base 5: mod_base = OTHER; note = 2'-Omethyluridine
  modified_base 6: mod_base = OTHER; note = 2'-Omethylcytosine
  modified_base 21: mod_base = OTHER; note = 2'-Omethylguanosine
  modified_base 22: mod_base = OTHER; note = 2'-Omethylcytosine
  modified_base 23: mod_base = OTHER; note = 2'-Omethylguanosine
  modified_base 24: mod_base = OTHER; note = 2'-Omethylcytosine
  modified_base 48: mod_base = OTHER; note = 2'-Omethylguanosine
  modified_base 49: mod_base = OTHER; note = 2'-Omethylcytosine
  modified_base 50: mod_base = OTHER; note = 2'-Omethylguanosine
  modified_base 51: mod_base = OTHER; note = 2'-Omethyluridine
  modified_base 52: mod_base = OTHER; note = 2'-Omethylguanosine

SEQ ID NO: 8092 - RNA, 76 nt, synthetic construct; identical to SEQ ID NO: 3295
  source 1..76: mol_type = other RNA
  modified_base 1: mod_base = OTHER; note = 2'-Omethylcytosine phosphorothiorate
  modified_base 2: mod_base = OTHER; note = 2'-Omethylcytosine phosphorothiorate
  modified_base 3: mod_base = OTHER; note = 2'-fluorouridine phosphorothiorate
  modified_base 15: mod_base = OTHER; note = 2'-fluoroguanosine phosphorothiorate
  modified_base 24: mod_base = OTHER; note = 2'-Omethylguanosine
  modified_base 26: mod_base = OTHER; note = 2'-fluoroguanosine phosphorothiorate
  modified_base 43: mod_base = OTHER; note = 2'-fluorouridine
  modified_base 51: mod_base = OTHER; note = 2'-fluorouridine phosphorothiorate
  modified_base 69: mod_base = OTHER; note = 2'-fluoroadenosine
  modified_base 76: mod_base = OTHER; note = 2'-fluoroadenosine

SEQ ID NO: 8093 - RNA, 85 nt, synthetic construct; identical to SEQ ID NO: 3297
  source 1..85: mol_type = other RNA
  modified_base 1: mod_base = OTHER; note = 2'-Omethylguanosine
  modified_base 13: mod_base = OTHER; note = 2'-Omethylguanosine
  modified_base 14: mod_base = OTHER; note = 2'-Omethyladenosine
  modified_base 15: mod_base = OTHER; note = 2'-Omethylguanosine
  modified_base 16: mod_base = OTHER; note = 2'-Omethyluridine
  modified_base 17: mod_base = OTHER; note = 2'-Omethylguanosine
  modified_base 18: mod_base = OTHER; note = 2'-Omethylguanosine
  modified_base 19: mod_base = OTHER; note = Uridine phosphorothiorate
  modified_base 20: mod_base = OTHER; note = 2'-Omethyluridine
  modified_base 21: mod_base = OTHER; note = Adenosine phosphorothiorate
  modified_base 25: mod_base = OTHER; note = 2'-Omethylcytosine
  modified_base 33: mod_base = OTHER; note = Uridine phosphorothiorate
  modified_base 34: mod_base = OTHER; note = 2'-Omethyluridine
  modified_base 35: mod_base = OTHER; note = Cytosine phosphorothiorate
  modified_base 37: mod_base = OTHER; note = Adenosine phosphorothiorate
  modified_base 38: mod_base = OTHER; note = Adenosine phosphorothiorate
  modified_base 41: mod_base = OTHER; note = 2'-fluorocytosine
  modified_base 42: mod_base = OTHER; note = 2'-Omethyladenosine
  modified_base 43: mod_base = OTHER; note = 2'-Omethyladenosine
  modified_base 44: mod_base = OTHER; note = 2'-fluorouridine
  modified_base 58: mod_base = OTHER; note = 2'-Omethylguanosine
  modified_base 59: mod_base = OTHER; note = 2'-Omethylcytosine
  modified_base 61: mod_base = OTHER; note = 2'-Omethylguanosine
  modified_base 63: mod_base = OTHER; note = Uridine phosphorothiorate
  modified_base 64: mod_base = OTHER; note = Uridine phosphorothiorate
  modified_base 70: mod_base = OTHER; note = 2'-Omethylcytosine
  modified_base 74: mod_base = OTHER; note = 2'-Omethylcytosine
  modified_base 82: mod_base = OTHER; note = 2'-Omethylguanosine

SEQ ID NO: 8094 - RNA, 75 nt, synthetic construct; identical to SEQ ID NO: 1045
  source 1..75: mol_type = other RNA
  modified_base 1: mod_base = OTHER; note = 2'-Omethylguanosine
  modified_base 2: mod_base = OTHER; note = 2'-Omethylguanosine
  modified_base 3: mod_base = OTHER; note = 2'-Omethyluridine
  modified_base 4: mod_base = OTHER; note = 2'-Omethyluridine
  modified_base 5: mod_base = OTHER; note = 2'-Omethylcytosine
  modified_base 6: mod_base = OTHER; note = 2'-Omethylcytosine
  modified_base 14: mod_base = OTHER; note = 2'-Omethyladenosine
  modified_base 15: mod_base = OTHER; note = 2'-fluoroadenosine
  modified_base 16: mod_base = OTHER; note = 2'-Omethyluridine
  modified_base 17: mod_base = OTHER; note = 2'-Omethylguanosine
  modified_base 18: mod_base = OTHER; note = 2'-Omethylguanosine
  modified_base 20: mod_base = OTHER; note = 2'-Omethyladenosine
  modified_base 25: mod_base = OTHER; note = 2'-Omethylcytosine
  modified_base 33: mod_base = OTHER; note = 2'-fluorouridine
  modified_base 35: mod_base = OTHER; note = Uridine phosphorothiorate
  modified_base 37: mod_base = OTHER; note = Adenosine phosphorothiorate
  modified_base 38: mod_base = OTHER; note = Adenosine phosphorothiorate
  modified_base 41: mod_base = OTHER; note = 2'-Omethylcytosine
  modified_base 42: mod_base = OTHER; note = 2'-Omethyladenosine
  modified_base 43: mod_base = OTHER; note = 2'-Omethylguanosine
  modified_base 44: mod_base = OTHER; note = 2'-Omethylcytosine
  modified_base 48: mod_base = OTHER; note = 2'-Omethylcytosine
  modified_base 49: mod_base = OTHER; note = 2'-Omethylcytosine
  modified_base 51: mod_base = OTHER; note = 2'-Omethyladenosine
  modified_base 53: mod_base = OTHER; note = 2'-Omethyluridine
  modified_base 54: mod_base = OTHER; note = Uridine phosphorothiorate
  modified_base 55: mod_base = OTHER; note = 2'-Omethylcytosine
  modified_base 56: mod_base = OTHER; note = 2'-fluoroguanosine
  modified_base 58: mod_base = OTHER; note = 2'-Omethylguanosine
  modified_base 60: mod_base = OTHER; note = 2'-Omethylcytosine
  modified_base 64: mod_base = OTHER; note = 2'-Omethylguanosine
  modified_base 72: mod_base = OTHER; note = 2'-Omethyluridine

SEQ ID NO: 8095 - RNA, 75 nt, synthetic construct; identical to SEQ ID NO: 3306
  source 1..75: mol_type = other RNA
  modified_base 1: mod_base = OTHER; note = 2'-Omethylguanosine phosphorothiorate
  modified_base 2: mod_base = OTHER; note = 2'-Omethyladenosine
  modified_base 3: mod_base = OTHER; note = 2'-Omethylcytosine
  modified_base 4: mod_base = OTHER; note = 2'-Omethylcytosine
  modified_base 5: mod_base = OTHER; note = 2'-Omethyluridine
  modified_base 6: mod_base = OTHER; note = 2'-Omethylcytosine
  modified_base 53: mod_base = OTHER; note = 2'-Omethyluridine phosphorothiorate
  modified_base 54: mod_base = OTHER; note = Uridine phosphorothiorate
  modified_base 55: mod_base = OTHER; note = 2'-Omethylcytosine
  modified_base 56: mod_base = OTHER; note = 2'-fluoroadenosine
  modified_base 57: mod_base = OTHER; note = Adenosine phosphorothiorate
  modified_base 58: mod_base = OTHER; note = 2'-Omethyladenosine
  modified_base 59: mod_base = OTHER; note = 2'-fluorouridine
  modified_base 72: mod_base = OTHER; note = 2'-Omethyladenosine

SEQ ID NO: 8096 - RNA, 86 nt, synthetic construct; identical to SEQ ID NO: 3290
  source 1..86: mol_type = other RNA
  modified_base 25: mod_base = OTHER; note = 2'-Omethylcytosine

SEQ ID NO: 8097 - RNA, 76 nt, synthetic construct; identical to SEQ ID NO: 3447
  source 1..76: mol_type = other RNA
  modified_base 1: mod_base = OTHER; note = 2'-Omethylguanosine
  modified_base 2: mod_base = OTHER; note = 2'-Omethylcytosine
  modified_base 3: mod_base = OTHER; note = 2'-Omethylcytosine
  modified_base 4: mod_base = OTHER; note = 2'-Omethylcytosine
  modified_base 5: mod_base = OTHER; note = 2'-Omethylguanosine
  modified_base 6: mod_base = OTHER; note = 2'-Omethyladenosine
  modified_base 16: mod_base = OTHER; note = 2'-Omethyluridine
  modified_base 17: mod_base = OTHER; note = 2'-Omethylguanosine
  modified_base 18: mod_base = OTHER; note = 2'-Omethylguanosine
  modified_base 20: mod_base = OTHER; note = 2'-Omethyluridine
  modified_base 25: mod_base = OTHER; note = 2'-Omethylcytosine
  modified_base 33: mod_base = OTHER; note = 2'-fluorouridine
  modified_base 35: mod_base = OTHER; note = Cytosine phosphorothiorate
  modified_base 37: mod_base = OTHER; note = Adenosine phosphorothiorate
  modified_base 38: mod_base = OTHER; note = Adenosine phosphorothiorate
  modified_base 41: mod_base = OTHER; note = 2'-fluorocytosine
  modified_base 42: mod_base = OTHER; note = 2'-Omethyladenosine
  modified_base 43: mod_base = OTHER; note = 2'-Omethyladenosine
  modified_base 44: mod_base = OTHER; note = 2'-fluoroadenosine
  modified_base 49: mod_base = OTHER; note = 2'-Omethylcytosine
  modified_base 50: mod_base = OTHER; note = 2'-Omethylcytosine
  modified_base 52: mod_base = OTHER; note = 2'-Omethylguanosine
  modified_base 54: mod_base = OTHER; note = 2'-Omethyluridine
  modified_base 55: mod_base = OTHER; note = Uridine phosphorothiorate
  modified_base 56: mod_base = OTHER; note = 2'-Omethylcytosine
  modified_base 57: mod_base = OTHER; note = 2'-fluoroguanosine
  modified_base 59: mod_base = OTHER; note = 2'-Omethylguanosine
  modified_base 61: mod_base = OTHER; note = 2'-Omethylcytosine
  modified_base 62: mod_base = OTHER; note = 2'-Omethylcytosine
  modified_base 63: mod_base = OTHER; note = 2'-fluorocytosine
  modified_base 64: mod_base = OTHER; note = 2'-Omethylguanosine
  modified_base 65: mod_base = OTHER; note = 2'-Omethylguanosine
  modified_base 73: mod_base = OTHER; note = 2'-Omethylguanosine

SEQ ID NO: 8098 - RNA, 75 nt, synthetic construct; identical to SEQ ID NO: 3306
  source 1..75: mol_type = other RNA
  modified_base 1: mod_base = OTHER; note = 2'-Omethylguanosine
  modified_base 10: mod_base = OTHER; note = 2'-Omethylguanosine
  modified_base 11: mod_base = OTHER; note = 2'-Omethylcytosine
  modified_base 12: mod_base = OTHER; note = 2'-Omethylguanosine
  modified_base 13: mod_base = OTHER; note = 2'-Omethylcytosine
  modified_base 16: mod_base = OTHER; note = 2'-Omethylcytosine
  modified_base 17: mod_base = OTHER; note = 2'-Omethylguanosine
  modified_base 18: mod_base = OTHER; note = 2'-Omethylguanosine
  modified_base 21: mod_base = OTHER; note = 2'-Omethylguanosine
  modified_base 22: mod_base = OTHER; note = 2'-Omethylcytosine
  modified_base 23: mod_base = OTHER; note = 2'-Omethylguanosine
  modified_base 24: mod_base = OTHER; note = 2'-Omethylcytosine
  modified_base 43: mod_base = OTHER; note = 2'-Omethyladenosine
  modified_base 44: mod_base = OTHER; note = 2'-Omethylguanosine
  modified_base 45: mod_base = OTHER; note = 2'-fluoroguanosine
  modified_base 46: mod_base = OTHER; note = 2'-fluorouridine
  modified_base 47: mod_base = OTHER; note = 2'-fluorouridine
  modified_base 72: mod_base = OTHER; note = 2'-Omethyladenosine

SEQ ID NO: 8099 - RNA, 85 nt, synthetic construct
  source 1..85: mol_type = other RNA
gcagtcgtggccgagtggttaaggcgtctgacttcaaatcagattccctttgggagcgtaggttcgaatcctaccggctgcgcca

SEQ ID NO: 8100 - RNA, 85 nt, synthetic construct; identical to SEQ ID NO: 3286
  source 1..85: mol_type = other RNA
  modified_base 1: mod_base = OTHER; note = 2'-fluorocytosine
  modified_base 3: mod_base = OTHER; note = 2'-fluoroadenosine phosphorothiorate
  modified_base 12: mod_base = OTHER; note = 2'-Omethylguanosine
  modified_base 13: mod_base = OTHER; note = Adenosine phosphorothiorate
  modified_base 26: mod_base = OTHER; note = 2'-fluorouridine
  modified_base 30: mod_base = OTHER; note = 2'-fluoroadenosine
  modified_base 32: mod_base = OTHER; note = 2'-fluorouridine
  modified_base 40: mod_base = OTHER; note = 2'-Omethylcytosine
  modified_base 43: mod_base = OTHER; note = Uridine phosphorothiorate
  modified_base 48: mod_base = OTHER; note = Adenosine phosphorothiorate
  modified_base 50: mod_base = OTHER; note = 2'-Omethyladenosine
  modified_base 55: mod_base = OTHER; note = Cytosine phosphorothiorate
  modified_base 57: mod_base = OTHER; note = 2'-Omethylcytosine
  modified_base 73: mod_base = OTHER; note = 2'-fluoroadenosine
  modified_base 85: mod_base = OTHER; note = 2'-Omethyladenosine

SEQ ID NO: 8101 - RNA, 76 nt, synthetic construct; identical to SEQ ID NO: 625
  source 1..76: mol_type = other RNA
  modified_base 1: mod_base = OTHER; note = 2'-Omethylguanosine phosphorothiorate
  modified_base 2: mod_base = OTHER; note = 2'-Omethylguanosine
  modified_base 40: mod_base = OTHER; note = Uridine phosphorothiorate
  modified_base 41: mod_base = OTHER; note = 2'-O-(2-Methoxyethyl) 5-methylcytosine
  modified_base 74: mod_base = OTHER; note = Cytosine phosphorothiorate
  modified_base 75: mod_base = OTHER; note = 2'-Omethylcytosine phosphorothiorate
  modified_base 76: mod_base = OTHER; note = 2'-Omethyladenosine

SEQ ID NO: 8102 - RNA, 85 nt, synthetic construct; identical to SEQ ID NO: 3288
  source 1..85: mol_type = other RNA
  modified_base 1: mod_base = OTHER; note = 2'-Omethylcytosine
  modified_base 11: mod_base = OTHER; note = Cytosine phosphorothiorate
  modified_base 26: mod_base = OTHER; note = 2'-fluorouridine
  modified_base 30: mod_base = OTHER; note = 2'-fluoroadenosine
  modified_base 34: mod_base = OTHER; note = 2'-fluorocytosine
  modified_base 43: mod_base = OTHER; note = 2'-Omethyluridine
  modified_base 45: mod_base = OTHER; note = 2'-Omethylguanosine
  modified_base 52: mod_base = OTHER; note = Guanosine phosphorothiorate
  modified_base 56: mod_base = OTHER; note = 2'-Omethylguanosine
  modified_base 58: mod_base = OTHER; note = 2'-Omethylguanosine
  modified_base 64: mod_base = OTHER; note = Uridine phosphorothiorate
  modified_base 73: mod_base = OTHER; note = 2'-fluoroadenosine
  modified_base 83: mod_base = OTHER; note = Cytosine phosphorothiorate
  modified_base 84: mod_base = OTHER; note = Cytosine phosphorothiorate

SEQ ID NO: 8103 - RNA, 85 nt, synthetic construct; identical to SEQ ID NO: 3297
  source 1..85: mol_type = other RNA
  modified_base 1: mod_base = OTHER; note = 2'-Omethylguanosine
  modified_base 16: mod_base = OTHER; note = 2'-Omethyluridine
  modified_base 17: mod_base = OTHER; note = 2'-Omethylguanosine
  modified_base 18: mod_base = OTHER; note = 2'-Omethylguanosine
  modified_base 82: mod_base = OTHER; note = 2'-Omethylguanosine

SEQ ID NO: 8104 - RNA, 76 nt, synthetic construct; identical to SEQ ID NO: 625
  source 1..76: mol_type = other RNA
  modified_base 4: mod_base = OTHER; note = 2'-Omethyluridine
  modified_base 5: mod_base = OTHER; note = 2'-fluorocytosine
  modified_base 7: mod_base = OTHER; note = Guanosine phosphorothiorate
  modified_base 10: mod_base = OTHER; note = Guanosine phosphorothiorate
  modified_base 11: mod_base = OTHER; note = 2'-fluorocytosine
  modified_base 14: mod_base = OTHER; note = 2'-fluoroadenosine
  modified_base 15: mod_base = OTHER; note = 2'-Omethyladenosine
  modified_base 17: mod_base = OTHER; note = Guanosine phosphorothiorate
  modified_base 24: mod_base = OTHER; note = 2'-Omethylguanosine
  modified_base 27: mod_base = OTHER; note = 2'-fluorouridine
  modified_base 28: mod_base = OTHER; note = 2'-Omethyluridine phosphorothiorate
  modified_base 30: mod_base = OTHER; note = 2'-Omethylguanosine
  modified_base 31: mod_base = OTHER; note = 2'-fluoroadenosine
  modified_base 39: mod_base = OTHER; note = 2'-Omethyluridine phosphorothiorate
  modified_base 41: mod_base = OTHER; note = 2'-fluorocytosine phosphorothiorate
  modified_base 42: mod_base = OTHER; note = 2'-Omethyladenosine
  modified_base 43: mod_base = OTHER; note = 2'-Omethyladenosine
  modified_base 44: mod_base = OTHER; note = 2'-Omethyladenosine
  modified_base 46: mod_base = OTHER; note = Guanosine phosphorothiorate
  modified_base 48: mod_base = OTHER; note = Uridine phosphorothiorate
  modified_base 52: mod_base = OTHER; note = 2'-fluoroguanosine
  modified_base 54: mod_base = OTHER; note = 2'-Omethyluridine phosphorothiorate
  modified_base 59: mod_base = OTHER; note = Guanosine phosphorothiorate
  modified_base 60: mod_base = OTHER; note = 2'-fluorouridine
  modified_base 62: mod_base = OTHER; note = 2'-fluorocytosine
  modified_base 65: mod_base = OTHER; note = Guanosine phosphorothiorate
  modified_base 66: mod_base = OTHER; note = 2'-fluorocytosine
  modified_base 72: mod_base = OTHER; note = 2'-Omethylcytosine
  modified_base 73: mod_base = OTHER; note = 2'-fluoroguanosine phosphorothiorate
  modified_base 74: mod_base = OTHER; note = 2'-fluorocytosine

SEQ ID NO: 8105 - RNA, 85 nt, synthetic construct; identical to SEQ ID NO: 3297
  source 1..85: mol_type = other RNA
  modified_base 13: mod_base = OTHER; note = 2'-Omethylguanosine
  modified_base 61: mod_base = OTHER; note = 2'-Omethylguanosine

SEQ ID NO: 8106 - RNA, 85 nt, synthetic construct; identical to SEQ ID NO: 3317
  source 1..85: mol_type = other RNA
  modified_base 1: mod_base = OTHER; note = 2'-Omethylguanosine phosphorothiorate
  modified_base 2: mod_base = OTHER; note = 2'-Omethylcytosine phosphorothiorate
  modified_base 3: mod_base = OTHER; note = Uridine phosphorothiorate
  modified_base 5: mod_base = OTHER; note = 2'-Omethyluridine
  modified_base 15: mod_base = OTHER; note = 2'-Omethylguanosine phosphorothiorate
  modified_base 18: mod_base = OTHER; note = 2'-Omethylguanosine phosphorothiorate
  modified_base 24: mod_base = OTHER; note = 2'-Omethylguanosine phosphorothiorate
  modified_base 27: mod_base = OTHER; note = 2'-fluorouridine
  modified_base 37: mod_base = OTHER; note = 2'-Omethyladenosine
  modified_base 44: mod_base = OTHER; note = 2'-fluorouridine phosphorothiorate
  modified_base 51: mod_base = OTHER; note = 2'-Omethyluridine
  modified_base 59: mod_base = OTHER; note = 2'-Omethylcytosine phosphorothiorate
  modified_base 61: mod_base = OTHER; note = 2'-Omethylguanosine
  modified_base 62: mod_base = OTHER; note = Guanosine phosphorothiorate
  modified_base 77: mod_base = OTHER; note = 2'-fluoroadenosine
  modified_base 78: mod_base = OTHER; note = 2'-fluorocytosine
  modified_base 82: mod_base = OTHER; note = 2'-Omethylguanosine
  modified_base 83: mod_base = OTHER; note = Cytosine phosphorothiorate

SEQ ID NO: 8107 - RNA, 76 nt, synthetic construct; identical to SEQ ID NO: 3329
  source 1..76: mol_type = other RNA
  modified_base 1: mod_base = OTHER; note = 2'-Omethylguanosine
  modified_base 2: mod_base = OTHER; note = 2'-Omethylguanosine
  modified_base 3: mod_base = OTHER; note = 2'-Omethylcytosine
  modified_base 4: mod_base = OTHER; note = 2'-Omethylcytosine
  modified_base 5: mod_base = OTHER; note = 2'-Omethylcytosine
  modified_base 6: mod_base = OTHER; note = 2'-Omethylcytosine
  modified_base 16: mod_base = OTHER; note = 2'-Omethyluridine
  modified_base 17: mod_base = OTHER; note = 2'-Omethylguanosine
  modified_base 18: mod_base = OTHER; note = 2'-Omethylguanosine
  modified_base 33: mod_base = OTHER; note = 2'-fluorouridine
  modified_base 35: mod_base = OTHER; note = Cytosine phosphorothiorate
  modified_base 37: mod_base = OTHER; note = Adenosine phosphorothiorate
  modified_base 38: mod_base = OTHER; note = Adenosine phosphorothiorate
  modified_base 44: mod_base = OTHER; note = 2'-Omethyladenosine
  modified_base 45: mod_base = OTHER; note = 2'-Omethylguanosine
  modified_base 46: mod_base = OTHER; note = 2'-fluoroguanosine
  modified_base 47: mod_base = OTHER; note = 2'-fluorouridine
  modified_base 48: mod_base = OTHER; note = 2'-fluorouridine
  modified_base 56: mod_base = OTHER; note = 2'-Omethylcytosine
  modified_base 59: mod_base = OTHER; note = 2'-Omethylguanosine
  modified_base 61: mod_base = OTHER; note = 2'-Omethylcytosine
  modified_base 62: mod_base = OTHER; note = 2'-Omethylcytosine
  modified_base 63: mod_base = OTHER; note = 2'-fluorocytosine
  modified_base 64: mod_base = OTHER; note = 2'-Omethylguanosine
  modified_base 65: mod_base = OTHER; note = 2'-Omethylguanosine
  modified_base 66: mod_base = OTHER; note = 2'-Omethyluridine
  modified_base 67: mod_base = OTHER; note = 2'-Omethylguanosine
  modified_base 68: mod_base = OTHER; note = 2'-Omethylguanosine
  modified_base 73: mod_base = OTHER; note = 2'-Omethylguanosine

SEQ ID NO: 8108 - RNA, 76 nt, synthetic construct; identical to SEQ ID NO: 3675
  source 1..76: mol_type = other RNA
  modified_base 1: mod_base = OTHER; note = 2'-Omethylguanosine phosphorothiorate
  modified_base 2: mod_base = OTHER; note = 2'-Omethylcytosine
  modified_base 3: mod_base = OTHER; note = 2'-Omethylcytosine
  modified_base 4: mod_base = OTHER; note = 2'-Omethyluridine
  modified_base 5: mod_base = OTHER; note = 2'-Omethylcytosine
  modified_base 6: mod_base = OTHER; note = 2'-Omethylcytosine
  modified_base 44: mod_base = OTHER; note = 2'-Omethyladenosine
  modified_base 45: mod_base = OTHER; note = 2'-Omethylguanosine
  modified_base 46: mod_base = OTHER; note = 2'-fluoroguanosine
  modified_base 47: mod_base = OTHER; note = 2'-fluorouridine
  modified_base 48: mod_base = OTHER; note = 2'-Omethyluridine
  modified_base 49: mod_base = OTHER; note = 2'-Omethylcytosine
  modified_base 73: mod_base = OTHER; note = 2'-Omethylguanosine

SEQ ID NO: 8109 - RNA, 76 nt, synthetic construct; identical to SEQ ID NO: 625
  source 1..76: mol_type = other RNA
  modified_base 2: mod_base = OTHER; note = 2'-fluoroguanosine
  modified_base 3: mod_base = OTHER; note = Cytosine phosphorothiorate
  modified_base 5: mod_base = OTHER; note = 2'-fluorocytosine
  modified_base 15: mod_base = OTHER; note = 2'-Omethyladenosine
  modified_base 21: mod_base = OTHER; note = Adenosine phosphorothiorate
  modified_base 22: mod_base = OTHER; note = 2'-fluoroguanosine phosphorothiorate
  modified_base 23: mod_base = OTHER; note = 2'-Omethylcytosine
  modified_base 24: mod_base = OTHER; note = 2'-fluoroguanosine phosphorothiorate
  modified_base 29: mod_base = OTHER; note = Guanosine phosphorothiorate
  modified_base 30: mod_base = OTHER; note = 2'-fluoroguanosine
  modified_base 34: mod_base = OTHER; note = 2'-Omethyluridine
  modified_base 37: mod_base = OTHER; note = Adenosine phosphorothiorate
  modified_base 38: mod_base = OTHER; note = 2'-fluoroadenosine
  modified_base 39: mod_base = OTHER; note = 2'-Omethyluridine phosphorothiorate
  modified_base 40: mod_base = OTHER; note = 2'-Omethyluridine
  modified_base 43: mod_base = OTHER; note = 2'-fluoroadenosine phosphorothiorate
  modified_base 44: mod_base = OTHER; note = 2'-Omethyladenosine
  modified_base 45: mod_base = OTHER; note = 2'-Omethylguanosine
  modified_base 46: mod_base = OTHER; note = 2'-Omethylguanosine
  modified_base 50: mod_base = OTHER; note = Cytosine phosphorothiorate
  modified_base 51: mod_base = OTHER; note = 2'-Omethylguanosine
  modified_base 53: mod_base = OTHER; note = 2'-Omethylguanosine
  modified_base 54: mod_base = OTHER; note = Uridine phosphorothiorate
  modified_base 60: mod_base = OTHER; note = 2'-fluorouridine phosphorothiorate
  modified_base 61: mod_base = OTHER; note = 2'-Omethylcytosine phosphorothiorate
  modified_base 62: mod_base = OTHER; note = Cytosine phosphorothiorate
  modified_base 63: mod_base = OTHER; note = 2'-fluorocytosine
  modified_base 64: mod_base = OTHER; note = 2'-fluoroguanosine
  modified_base 68: mod_base = OTHER; note = Guanosine phosphorothiorate
  modified_base 69: mod_base = OTHER; note = 2'-fluoroadenosine phosphorothiorate
  modified_base 71: mod_base = OTHER; note = 2'-Omethyluridine
  modified_base 72: mod_base = OTHER; note = 2'-fluorocytosine
  modified_base 73: mod_base = OTHER; note = 2'-fluoroguanosine
  modified_base 74: mod_base = OTHER; note = 2'-fluorocytosine
  modified_base 75: mod_base = OTHER; note = 2'-fluorocytosine phosphorothiorate

SEQ ID NO: 8110 - RNA, 85 nt, synthetic construct; identical to SEQ ID NO: 3297
  source 1..85: mol_type = other RNA
  modified_base 1: mod_base = OTHER; note = 2'-Omethylguanosine phosphorothiorate
  modified_base 2: mod_base = OTHER; note = 2'-Omethylcytosine phosphorothiorate
  modified_base 3: mod_base = OTHER; note = 2'-Omethyluridine
  modified_base 4: mod_base = OTHER; note = 2'-Omethylguanosine
  modified_base 5: mod_base = OTHER; note = 2'-Omethyluridine
  modified_base 6: mod_base = OTHER; note = 2'-Omethylguanosine
  modified_base 10: mod_base = OTHER; note = 2'-Omethylguanosine
  modified_base 11: mod_base = OTHER; note = 2'-Omethylcytosine
  modified_base 12: mod_base = OTHER; note = 2'-Omethylcytosine
  modified_base 13: mod_base = OTHER; note = 2'-Omethylguanosine
  modified_base 14: mod_base = OTHER; note = 2'-Omethyladenosine
  modified_base 15: mod_base = OTHER; note = 2'-fluoroguanosine
  modified_base 16: mod_base = OTHER; note = 2'-Omethyluridine
  modified_base 17: mod_base = OTHER; note = 2'-Omethylguanosine
  modified_base 18: mod_base = OTHER; note = 2'-Omethylguanosine
  modified_base 19: mod_base = OTHER; note = 2'-fluorouridine
  modified_base 20: mod_base = OTHER; note = 2'-Omethyluridine
  modified_base 22: mod_base = OTHER; note = 2'-Omethyladenosine
  modified_base 23: mod_base = OTHER; note = 2'-Omethylguanosine
  modified_base 24: mod_base = OTHER; note = 2'-Omethylguanosine
  modified_base 25: mod_base = OTHER; note = 2'-Omethylcytosine
  modified_base 33: mod_base = OTHER; note = 2'-fluorouridine
  modified_base 35: mod_base = OTHER; note = Cytosine phosphorothiorate
  modified_base 37: mod_base = OTHER; note = Adenosine phosphorothiorate
  modified_base 38: mod_base = OTHER; note = Adenosine phosphorothiorate
  modified_base 58: mod_base = OTHER; note = 2'-Omethylguanosine
  modified_base 59: mod_base = OTHER; note = 2'-Omethylcytosine
  modified_base 60: mod_base = OTHER; note = 2'-Omethyladenosine
  modified_base 61: mod_base = OTHER; note = 2'-Omethylguanosine
  modified_base 62: mod_base = OTHER; note = 2'-Omethylguanosine
  modified_base 63: mod_base = OTHER; note = 2'-Omethyluridine
  modified_base 65: mod_base = OTHER; note = 2'-Omethylcytosine
  modified_base 68: mod_base = OTHER; note = 2'-Omethyladenosine
  modified_base 70: mod_base = OTHER; note = 2'-Omethylcytosine
  modified_base 71: mod_base = OTHER; note = 2'-Omethylcytosine
  modified_base 72: mod_base = OTHER; note = 2'-fluorouridine
  modified_base 73: mod_base = OTHER; note = 2'-Omethylguanosine
  modified_base 74: mod_base = OTHER; note = 2'-Omethylcytosine
  modified_base 75: mod_base = OTHER; note = 2'-Omethyluridine
  modified_base 76: mod_base = OTHER; note = 2'-Omethylcytosine
  modified_base 77: mod_base = OTHER; note = 2'-Omethyladenosine
  modified_base 82: mod_base = OTHER; note = 2'-Omethylguanosine

SEQ ID NO: 8111 - RNA, 76 nt, synthetic construct; identical to SEQ ID NO: 3318
  source 1..76: mol_type = other RNA
  modified_base 1: mod_base = OTHER; note = 2'-Omethylcytosine
  modified_base 10: mod_base = OTHER; note = 2'-Omethylguanosine
  modified_base 11: mod_base = OTHER; note = 2'-Omethylcytosine
  modified_base 12: mod_base = OTHER; note = 2'-Omethyluridine
  modified_base 13: mod_base = OTHER; note = 2'-Omethylcytosine
  modified_base 14: mod_base = OTHER; note = 2'-Omethyladenosine
  modified_base 15: mod_base = OTHER; note = 2'-Omethylguanosine
  modified_base 16: mod_base = OTHER; note = 2'-Omethyluridine
  modified_base 18: mod_base = OTHER; note = 2'-Omethylguanosine
  modified_base 19: mod_base = OTHER; note = 2'-Omethylguanosine
  modified_base 20: mod_base = OTHER; note = Uridine phosphorothiorate
  modified_base 21: mod_base = OTHER; note = Adenosine phosphorothiorate
  modified_base 22: mod_base = OTHER; note = 2'-Omethylguanosine
  modified_base 23: mod_base = OTHER; note = 2'-Omethyladenosine
  modified_base 24: mod_base = OTHER; note = 2'-Omethylguanosine
  modified_base 25: mod_base = OTHER; note = 2'-Omethylcytosine
  modified_base 33: mod_base = OTHER; note = 2'-fluorouridine
  modified_base 34: mod_base = OTHER; note = 2'-Omethylcytosine
  modified_base 35: mod_base = OTHER; note = Uridine phosphorothiorate
  modified_base 37: mod_base = OTHER; note = Guanosine phosphorothiorate
  modified_base 38: mod_base = OTHER; note = Adenosine phosphorothiorate
  modified_base 49: mod_base = OTHER; note = 2'-Omethylguanosine
  modified_base 50: mod_base = OTHER; note = 2'-Omethylcytosine
  modified_base 52: mod_base = OTHER; note = 2'-Omethylguanosine
  modified_base 54: mod_base = OTHER; note = Uridine phosphorothiorate
  modified_base 55: mod_base = OTHER; note = Uridine phosphorothiorate
  modified_base 61: mod_base = OTHER; note = 2'-Omethylcytosine
  modified_base 65: mod_base = OTHER; note = 2'-Omethylcytosine
  modified_base 73: mod_base = OTHER; note = 2'-Omethyladenosine

SEQ ID NO: 8112 - RNA, 75 nt, synthetic construct; identical to SEQ ID NO: 3336
  source 1..75: mol_type = other RNA
  modified_base 2: mod_base = OTHER; note = 2'-Omethylcytosine phosphorothiorate
  modified_base 3: mod_base = OTHER; note = 2'-fluorouridine phosphorothiorate
  modified_base 8: mod_base = OTHER; note = 2'-Omethyladenosine phosphorothiorate
  modified_base 14: mod_base = OTHER; note = 2'-fluoroguanosine phosphorothiorate
  modified_base 25: mod_base = OTHER; note = Adenosine phosphorothiorate
  modified_base 35: mod_base = OTHER; note = 2'-Omethyladenosine phosphorothiorate
  modified_base 48: mod_base = OTHER; note = 2'-fluorocytosine phosphorothiorate
  modified_base 63: mod_base = OTHER; note = 2'-fluorouridine phosphorothiorate
  modified_base 72: mod_base = OTHER; note = Guanosine phosphorothiorate
  modified_base 74: mod_base = OTHER; note = Cytosine phosphorothiorate

SEQ ID NO: 8113 - RNA, 76 nt, synthetic construct; identical to SEQ ID NO: 625
  source 1..76: mol_type = other RNA
  modified_base 1: mod_base = OTHER; note = 2'-Omethylguanosine
  modified_base 2: mod_base = OTHER; note = 2'-Omethylguanosine
  modified_base 3: mod_base = OTHER; note = 2'-fluorocytosine
  modified_base 6: mod_base = OTHER; note = 2'-Omethylcytosine
  modified_base 7: mod_base = OTHER; note = Guanosine phosphorothiorate
  modified_base 9: mod_base = OTHER; note = Guanosine phosphorothiorate
  modified_base 10: mod_base = OTHER; note = 2'-fluoroguanosine
  modified_base 12: mod_base = OTHER; note = 2'-fluoroguanosine
  modified_base 14: mod_base = OTHER; note = Adenosine phosphorothiorate
  modified_base 16: mod_base = OTHER; note = 2'-fluorouridine
  modified_base 17: mod_base = OTHER; note = 2'-Omethylguanosine
  modified_base 18: mod_base = OTHER; note = 2'-fluoroguanosine
  modified_base 22: mod_base = OTHER; note = 2'-Omethylguanosine
  modified_base 23: mod_base = OTHER; note = 2'-fluorocytosine
  modified_base 24: mod_base = OTHER; note = Guanosine phosphorothiorate
  modified_base 25: mod_base = OTHER; note = 2'-fluorocytosine
  modified_base 28: mod_base = OTHER; note = 2'-Omethyluridine
  modified_base 30: mod_base = OTHER; note = 2'-Omethylguanosine
  modified_base 38: mod_base = OTHER; note = 2'-Omethyladenosine
  modified_base 43: mod_base = OTHER; note = 2'-Omethyladenosine
  modified_base 45: mod_base = OTHER; note = 2'-fluoroguanosine phosphorothiorate
  modified_base 48: mod_base = OTHER; note = 2'-Omethyluridine
  modified_base 55: mod_base = OTHER; note = Uridine phosphorothiorate
  modified_base 56: mod_base = OTHER; note = 2'-fluorocytosine phosphorothiorate
  modified_base 57: mod_base = OTHER; note = 2'-fluoroguanosine
  modified_base 60: mod_base = OTHER; note = 2'-Omethyluridine
  modified_base 63: mod_base = OTHER; note = 2'-Omethylcytosine
  modified_base 64: mod_base = OTHER; note = Guanosine phosphorothiorate
  modified_base 65: mod_base = OTHER; note = 2'-Omethylguanosine
  modified_base 67: mod_base = OTHER; note = 2'-Omethylguanosine phosphorothiorate
  modified_base 68: mod_base = OTHER; note = 2'-fluoroguanosine
  modified_base 70: mod_base = OTHER; note = 2'-Omethylguanosine phosphorothiorate
  modified_base 71: mod_base = OTHER; note = 2'-fluorouridine
  modified_base 72: mod_base = OTHER; note = 2'-fluorocytosine
  modified_base 73: mod_base = OTHER; note = Guanosine phosphorothiorate
  modified_base 75: mod_base = OTHER; note = Cytosine phosphorothiorate
  modified_base 76: mod_base = OTHER; note = 2'-Omethyladenosine

SEQ ID NO: 8114 - RNA, 86 nt, synthetic construct; identical to SEQ ID NO: 3290
  source 1..86: mol_type = other RNA
  modified_base 18: mod_base = OTHER; note = Guanosine phosphorothiorate

SEQ ID NO: 8115 - DNA, 76 bp, synthetic construct; identical to SEQ ID NO: 1924
  source 1..76: mol_type = other DNA
  misc_feature 1..7: note = RNA
  misc_feature 8..9: note = DNA
  misc_feature 10..76: note = RNA

SEQ ID NO: 8116 - RNA, 76 nt, synthetic construct; identical to SEQ ID NO: 625
  source 1..76: mol_type = other RNA
  modified_base 1: mod_base = OTHER; note = 2'-Omethylguanosine phosphorothiorate
  modified_base 2: mod_base = OTHER; note = 2'-Omethylguanosine phosphorothiorate
  modified_base 3: mod_base = OTHER; note = 2'-Omethylcytosine
  modified_base 4: mod_base = OTHER; note = 2'-Omethyluridine
  modified_base 5: mod_base = OTHER; note = 2'-Omethylcytosine
  modified_base 6: mod_base = OTHER; note = 2'-Omethylcytosine
  modified_base 10: mod_base = OTHER; note = 2'-Omethylguanosine
  modified_base 13: mod_base = OTHER; note = 2'-Omethylcytosine
  modified_base 17: mod_base = OTHER; note = Guanosine phosphorothiorate
  modified_base 18: mod_base = OTHER; note = 2'-Omethylguanosine
  modified_base 19: mod_base = OTHER; note = Adenosine phosphorothiorate
  modified_base 20: mod_base = OTHER; note = 2'-Omethyluridine
  modified_base 25: mod_base = OTHER; note = 2'-fluorocytosine
  modified_base 29: mod_base = OTHER; note = 2'-Omethylguanosine
  modified_base 33: mod_base = OTHER; note = 2'-fluorouridine
  modified_base 35: mod_base = OTHER; note = Cytosine phosphorothiorate
  modified_base 37: mod_base = OTHER; note = Adenosine phosphorothiorate
  modified_base 38: mod_base = OTHER; note = Adenosine phosphorothiorate
  modified_base 40: mod_base = OTHER; note = 2'-fluorouridine
  modified_base 41: mod_base = OTHER; note = 2'-Omethylcytosine
  modified_base 42: mod_base = OTHER; note = 2'-Omethyladenosine
  modified_base 43: mod_base = OTHER; note = 2'-Omethyladenosine
  modified_base 44: mod_base = OTHER; note = 2'-fluoroadenosine
  modified_base 46: mod_base = OTHER; note = Guanosine phosphorothiorate
  modified_base 49: mod_base = OTHER; note = 2'-Omethylcytosine
  modified_base 50: mod_base = OTHER; note = 2'-Omethylcytosine
  modified_base 51: mod_base = OTHER; note = 2'-Omethylguanosine
  modified_base 52: mod_base = OTHER; note = 2'-Omethylguanosine
  modified_base 53: mod_base = OTHER; note = 2'-Omethylguanosine
  modified_base 54: mod_base = OTHER; note = Uridine phosphorothiorate
  modified_base 55: mod_base = OTHER; note = Uridine phosphorothiorate
  modified_base 56: mod_base = OTHER; note = 2'-Omethylcytosine
  modified_base 57: mod_base = OTHER; note = 2'-O-(2-Methoxyethyl) guanosine
  modified_base 61: mod_base = OTHER; note = 2'-Omethylcytosine
  modified_base 62: mod_base = OTHER; note = 2'-Omethylcytosine
  modified_base 63: mod_base = OTHER; note = 2'-fluorocytosine
  modified_base 64: mod_base = OTHER; note = 2'-Omethylguanosine
  modified_base 65: mod_base = OTHER; note = 2'-Omethylguanosine
  modified_base 66: mod_base = OTHER; note = 2'-Omethylcytosine
  modified_base 67: mod_base = OTHER; note = 2'-Omethylguanosine
  modified_base 68: mod_base = OTHER; note = 2'-Omethylguanosine
  modified_base 69: mod_base = OTHER; note = 2'-fluoroadenosine
  modified_base 70: mod_base = OTHER; note = 2'-fluoroguanosine
  modified_base 71: mod_base = OTHER; note = 2'-Omethyluridine
  modified_base 73: mod_base = OTHER; note = 2'-Omethylguanosine
  modified_base 74: mod_base = OTHER; note = Cytosine phosphorothiorate
  modified_base 75: mod_base = OTHER; note = 2'-Omethylcytosine

SEQ ID NO: 8117 - RNA, 76 nt, synthetic construct
  source 1..76: mol_type = other RNA
ggctccgtggcgcaatggatagcgcaccggacttcaaattcggaggttccgggttcgagtcccggcggagtcgcca

SEQ ID NO: 8118 - RNA, 86 nt, synthetic construct
  source 1..86: mol_type = other RNA
accaggatggccgagtggttaaggcgttggacttcagatccaatggactatagtcctcgtgggttcgaaccccactcctggtacca

SEQ ID NO: 8119 - RNA, 76 nt, synthetic construct; identical to SEQ ID NO: 3329
  source 1..76: mol_type = other RNA
  modified_base 1: mod_base = OTHER; note = 2'-Omethylguanosine
  modified_base 2: mod_base = OTHER; note = 2'-Omethylguanosine
  modified_base 3: mod_base = OTHER; note = 2'-Omethylcytosine
  modified_base 4: mod_base = OTHER; note = 2'-Omethylcytosine
  modified_base 5: mod_base = OTHER; note = 2'-Omethylcytosine
  modified_base 6: mod_base = OTHER; note = 2'-Omethylcytosine
  modified_base 14: mod_base = OTHER; note = 2'-Omethyladenosine
  modified_base 15: mod_base = OTHER; note = 2'-Omethyladenosine
  modified_base 16: mod_base = OTHER; note = 2'-Omethyluridine
  modified_base 17: mod_base = OTHER; note = 2'-Omethylguanosine
  modified_base 18: mod_base = OTHER; note = 2'-Omethylguanosine
  modified_base 20: mod_base = OTHER; note = 2'-Omethyluridine
  modified_base 25: mod_base = OTHER; note = 2'-Omethylcytosine
  modified_base 33: mod_base = OTHER; note = 2'-fluorouridine
  modified_base 35: mod_base = OTHER; note = Cytosine phosphorothiorate
  modified_base 37: mod_base = OTHER; note = Adenosine phosphorothiorate
  modified_base 38: mod_base = OTHER; note = Adenosine phosphorothiorate
  modified_base 41: mod_base = OTHER; note = 2'-Omethylcytosine
  modified_base 42: mod_base = OTHER; note = 2'-Omethyladenosine
  modified_base 43: mod_base = OTHER; note = 2'-Omethyladenosine
  modified_base 44: mod_base = OTHER; note = 2'-fluoroadenosine
  modified_base 49: mod_base = OTHER; note = 2'-Omethylcytosine
  modified_base 50: mod_base = OTHER; note = 2'-Omethylcytosine
  modified_base 52: mod_base = OTHER; note = 2'-Omethylguanosine
  modified_base 54: mod_base = OTHER; note = 2'-Omethyluridine
  modified_base 55: mod_base = OTHER; note = Uridine phosphorothiorate
  modified_base 56: mod_base = OTHER; note = 2'-Omethylcytosine
  modified_base 57: mod_base = OTHER; note = 2'-fluoroguanosine
  modified_base 59: mod_base = OTHER; note = 2'-Omethylguanosine
  modified_base 61: mod_base = OTHER; note = 2'-Omethylcytosine
  modified_base 65: mod_base = OTHER; note = 2'-Omethylguanosine
  modified_base 73: mod_base = OTHER; note = 2'-Omethylguanosine

SEQ ID NO: 8120 - RNA, 85 nt, synthetic construct; identical to SEQ ID NO: 3297
  source 1..85: mol_type = other RNA
  modified_base 1: mod_base = OTHER; note = 2'-Omethylguanosine
  modified_base 35: mod_base = OTHER; note = Cytosine phosphorothiorate
  modified_base 37: mod_base = OTHER; note = Adenosine phosphorothiorate
  modified_base 82: mod_base = OTHER; note = 2'-Omethylguanosine

SEQ ID NO: 8121 - RNA, 86 nt, synthetic construct; identical to SEQ ID NO: 3290
  source 1..86: mol_type = other RNA
  modified_base 50: mod_base = OTHER; note = Uridine phosphorothiorate

SEQ ID NO: 8122 - RNA, 85 nt, synthetic construct; identical to SEQ ID NO: 3301
  source 1..85: mol_type = other RNA
  modified_base 1: mod_base = OTHER; note = 2'-Omethylguanosine phosphorothiorate
  modified_base 2: mod_base = OTHER; note = Cytosine phosphorothiorate
  modified_base 3: mod_base = OTHER; note = 2'-Omethyluridine phosphorothiorate
  modified_base 4: mod_base = OTHER; note = 2'-Omethylguanosine phosphorothiorate
  modified_base 11: mod_base = OTHER; note = 2'-fluorocytosine
  modified_base 12: mod_base = OTHER; note = 2'-fluorocytosine
  modified_base 13: mod_base = OTHER; note = 2'-fluoroguanosine phosphorothiorate
  modified_base 19: mod_base = OTHER; note = 2'-fluorouridine
  modified_base 23: mod_base = OTHER; note = 2'-Omethylguanosine
  modified_base 25: mod_base = OTHER; note = 2'-Omethylcytosine phosphorothiorate
  modified_base 27: mod_base = OTHER; note = 2'-Omethyluridine
  modified_base 33: mod_base = OTHER; note = 2'-fluorouridine
  modified_base 41: mod_base = OTHER; note = 2'-fluorocytosine
  modified_base 42: mod_base = OTHER; note = 2'-Omethyladenosine
  modified_base 44: mod_base = OTHER; note = 2'-fluorouridine phosphorothiorate
  modified_base 50: mod_base = OTHER; note = 2'-fluorocytosine
  modified_base 51: mod_base = OTHER; note = Uridine phosphorothiorate
  modified_base 59: mod_base = OTHER; note = 2'-Omethylcytosine
  modified_base 61: mod_base = OTHER; note = 2'-Omethylguanosine
  modified_base 72: mod_base = OTHER; note = 2'-fluorouridine
  modified_base 80: mod_base = OTHER; note = Guanosine phosphorothiorate
  modified_base 84: mod_base = OTHER; note = 2'-Omethylcytosine phosphorothiorate

SEQ ID NO: 8123 - RNA, 76 nt, synthetic construct; identical to SEQ ID NO: 3795
  source 1..76: mol_type = other RNA
  modified_base 1: mod_base = OTHER; note = 2'-Omethylguanosine
  modified_base 14: mod_base = OTHER; note = 2'-Omethyladenosine
  modified_base 15: mod_base = OTHER; note = 2'-fluoroadenosine
  modified_base 16: mod_base = OTHER; note = 2'-Omethyluridine
  modified_base 17: mod_base = OTHER; note = 2'-Omethylguanosine
  modified_base 18: mod_base = OTHER; note = 2'-Omethylguanosine
  modified_base 19: mod_base = OTHER; note = 2'-fluoroadenosine
  modified_base 20: mod_base = OTHER; note = 2'-Omethyluridine
  modified_base 33: mod_base = OTHER; note = 2'-fluorouridine
  modified_base 35: mod_base = OTHER; note = Cytosine phosphorothiorate
  modified_base 37: mod_base = OTHER; note = Adenosine phosphorothiorate
  modified_base 38: mod_base = OTHER; note = Adenosine phosphorothiorate
  modified_base 41: mod_base = OTHER; note = 2'-Omethylcytosine
  modified_base 42: mod_base = OTHER; note = 2'-Omethylguanosine
  modified_base 43: mod_base = OTHER; note = 2'-Omethylguanosine
  modified_base 44: mod_base = OTHER; note = 2'-Omethylguanosine
  modified_base 50: mod_base = OTHER; note = 2'-Omethylcytosine
  modified_base 52: mod_base = OTHER; note = 2'-Omethylguanosine
  modified_base 73: mod_base = OTHER; note = 2'-Omethylguanosine

SEQ ID NO: 8124 - DNA, 76 bp, synthetic construct; identical to SEQ ID NO: 1924
  source 1..76: mol_type = other DNA
  modified_base 1: mod_base = OTHER; note = 2'-Omethylguanosine phosphorothiorate
  modified_base 2: mod_base = OTHER; note = 2'-Omethylguanosine phosphorothiorate
  modified_base 5: mod_base = OTHER; note = 2'-O-(2-Methoxyethyl) 5-methylcytosine
  modified_base 8: mod_base = OTHER; note = Uridine phosphorothiorate
  modified_base 9: mod_base = OTHER; note = 2'-O-(2-Methoxyethyl) guanosine phosphorothiorate
  modified_base 10: mod_base = OTHER; note = 2'-fluoroguanosine
  modified_base 14: mod_base = OTHER; note = Adenosine phosphorothiorate
  modified_base 17: mod_base = OTHER; note = Guanosine phosphorothiorate
  modified_base 20: mod_base = OTHER; note = 2'-Omethyluridine
  modified_base 24: mod_base = OTHER; note = 2'-fluoroguanosine
  modified_base 31: mod_base = OTHER; note = 2'-Omethyladenosine
  modified_base 33: mod_base = OTHER; note = 2'-fluorouridine phosphorothiorate
  modified_base 35: mod_base = OTHER; note = 2'-O-(2-Methoxyethyl) 5-methylcytosine
  modified_base 37: mod_base = OTHER; note = 2'-fluoroadenosine
  modified_base 41: mod_base = OTHER; note = Cytosine phosphorothiorate
  modified_base 42: mod_base = OTHER; note = 2'-fluoroadenosine
  modified_base 45: mod_base = OTHER; note = Guanosine phosphorothiorate
  modified_base 46: mod_base = OTHER; note = 2'-O-(2-Methoxyethyl) guanosine
  modified_base 49: mod_base = OTHER; note = Cytosine phosphorothiorate
  modified_base 50: mod_base = OTHER; note = 2'-fluorocytosine
  modified_base 55: mod_base = OTHER; note = Uridine phosphorothiorate
  modified_base 56: mod_base = OTHER; note = 2'-fluorocytosine
  modified_base 58: mod_base = OTHER; note = Adenosine phosphorothiorate
  modified_base 59: mod_base = OTHER; note = 2'-O-(2-Methoxyethyl) guanosine
  modified_base 62: mod_base = OTHER; note = 2'-O-(2-Methoxyethyl) 5-methylcytosine
  modified_base 63: mod_base = OTHER; note = Cytosine phosphorothiorate
  modified_base 64: mod_base = OTHER; note = 2'-O-(2-Methoxyethyl) guanosine
  modified_base 65: mod_base = OTHER; note = Guanosine phosphorothiorate
  modified_base 68: mod_base = OTHER; note = 2'-Omethylguanosine
  modified_base 73: mod_base = OTHER; note = Guanosine phosphorothiorate
  modified_base 74: mod_base = OTHER; note = 2'-O-(2-Methoxyethyl) 5-methylcytosine phosphorothiorate
  modified_base 75: mod_base = OTHER; note = Cytosine phosphorothiorate
  modified_base 76: mod_base = OTHER; note = 2'-Omethyladenosine
  misc_feature 1..43: note = RNA
  misc_feature 44: note = DNA
  misc_feature 45..56: note = RNA
  misc_feature 57: note = DNA
  misc_feature 58..65: note = RNA
  misc_feature 66: note = DNA
  misc_feature 67..68: note = RNA
  misc_feature 69: note = DNA
  misc_feature 70..71: note = RNA
  misc_feature 72: note = DNA
  misc_feature 73..76: note = RNA

SEQ ID NO: 8125 - RNA, 76 nt, synthetic construct; identical to SEQ ID NO: 625
  source 1..76: mol_type = other RNA
  modified_base 1: mod_base = OTHER; note = 2'-Omethylguanosine
  modified_base 2: mod_base = OTHER; note = 2'-Omethylguanosine
  modified_base 3: mod_base = OTHER; note = 2'-Omethylcytosine
  modified_base 13: mod_base = OTHER; note = 2'-Omethylcytosine
  modified_base 33: mod_base = OTHER; note = 2'-fluorouridine
  modified_base 35: mod_base = OTHER; note = Cytosine phosphorothiorate
  modified_base 37: mod_base = OTHER; note = Adenosine phosphorothiorate
  modified_base 52: mod_base = OTHER; note = 2'-Omethylguanosine
  modified_base 56: mod_base = OTHER; note = 2'-Omethylcytosine
  modified_base 62: mod_base = OTHER; note = 2'-Omethylcytosine
  modified_base 63: mod_base = OTHER; note = 2'-fluorocytosine
  modified_base 73: mod_base = OTHER; note = 2'-Omethylguanosine
  modified_base 75: mod_base = OTHER; note = 2'-fluorocytosine phosphorothiorate

SEQ ID NO: 8126 - RNA, 76 nt, synthetic construct; identical to SEQ ID NO: 625
  source 1..76: mol_type = other RNA
  modified_base 1: mod_base = OTHER; note = 2'-fluoroguanosine
  modified_base 2: mod_base = OTHER; note = Guanosine phosphorothiorate
  modified_base 3: mod_base = OTHER; note = 2'-fluorocytosine
  modified_base 10: mod_base = OTHER; note = 2'-fluoroguanosine phosphorothiorate
  modified_base 13: mod_base = OTHER; note = Cytosine phosphorothiorate
  modified_base 14: mod_base = OTHER; note = Adenosine phosphorothiorate
  modified_base 15: mod_base = OTHER; note = 2'-fluoroadenosine
  modified_base 16: mod_base = OTHER; note = 2'-Omethyluridine
  modified_base 18: mod_base = OTHER; note = 2'-Omethylguanosine
  modified_base 20: mod_base = OTHER; note = 2'-Omethyluridine
  modified_base 22: mod_base = OTHER; note = Guanosine phosphorothiorate
  modified_base 24: mod_base = OTHER; note = Guanosine phosphorothiorate
  modified_base 25: mod_base = OTHER; note = 2'-fluorocytosine
  modified_base 27: mod_base = OTHER; note = 2'-Omethyluridine
  modified_base 28: mod_base = OTHER; note = Uridine phosphorothiorate
  modified_base 29: mod_base = OTHER; note = 2'-Omethylguanosine
  modified_base 33: mod_base = OTHER; note = 2'-fluorouridine
  modified_base 34: mod_base = OTHER; note = Uridine phosphorothiorate
  modified_base 42: mod_base = OTHER; note = 2'-Omethyladenosine phosphorothiorate
  modified_base 43: mod_base = OTHER; note = 2'-Omethyladenosine
  modified_base 48: mod_base = OTHER; note = Uridine phosphorothiorate
  modified_base 54: mod_base = OTHER; note = 2'-Omethyluridine
  modified_base 57: mod_base = OTHER; note = 2'-fluoroguanosine
  modified_base 61: mod_base = OTHER; note = 2'-fluorocytosine
  modified_base 63: mod_base = OTHER; note = Cytosine phosphorothiorate
  modified_base 64: mod_base = OTHER; note = 2'-fluoroguanosine
  modified_base 65: mod_base = OTHER; note = 2'-fluoroguanosine
  modified_base 66: mod_base = OTHER; note = 2'-Omethylcytosine
  modified_base 68: mod_base = OTHER; note = 2'-fluoroguanosine
  modified_base 70: mod_base = OTHER; note = 2'-Omethylguanosine
  modified_base 72: mod_base = OTHER; note = 2'-Omethylcytosine
  modified_base 74: mod_base = OTHER; note = Cytosine phosphorothiorate
  modified_base 75: mod_base = OTHER; note = 2'-fluorocytosine phosphorothiorate
  modified_base 76: mod_base = OTHER; note = 2'-fluoroadenosine

SEQ ID NO: 8127 - RNA, 86 nt, synthetic construct; identical to SEQ ID NO: 3290
  source 1..86: mol_type = other RNA
  modified_base 1: mod_base = OTHER; note = 2'-Omethyladenosine
  modified_base 10: mod_base = OTHER; note = 2'-Omethylguanosine
  modified_base 11: mod_base = OTHER; note = 2'-Omethylcytosine
  modified_base 12: mod_base = OTHER; note = 2'-Omethylcytosine
  modified_base 13: mod_base = OTHER; note = 2'-Omethylguanosine
  modified_base 16: mod_base = OTHER; note = 2'-Omethyluridine
  modified_base 17: mod_base = OTHER; note = 2'-Omethylguanosine
  modified_base 18: mod_base = OTHER; note = 2'-Omethylguanosine
  modified_base 22: mod_base = OTHER; note = 2'-Omethyladenosine
  modified_base 23: mod_base = OTHER; note = 2'-Omethylguanosine
  modified_base 24: mod_base = OTHER; note = 2'-Omethylguanosine
  modified_base 25: mod_base = OTHER; note = 2'-Omethylcytosine
  modified_base 44: mod_base = OTHER; note = 2'-Omethyluridine
  modified_base 57: mod_base = OTHER; note = 2'-fluoroguanosine
  modified_base 58: mod_base = OTHER; note = 2'-fluorocytosine
  modified_base 83: mod_base = OTHER; note = 2'-Omethyladenosine

SEQ ID NO: 8128 - RNA, 75 nt, synthetic construct; identical to SEQ ID NO: 3306
  source 1..75: mol_type = other RNA
  modified_base 1: mod_base = OTHER; note = 2'-Omethylguanosine
  modified_base 2: mod_base = OTHER; note = 2'-Omethyladenosine
  modified_base 3: mod_base = OTHER; note = 2'-Omethylcytosine
  modified_base 4: mod_base = OTHER; note = 2'-Omethylcytosine
  modified_base 5: mod_base = OTHER; note = 2'-Omethyluridine
  modified_base 6: mod_base = OTHER; note = 2'-Omethylcytosine
  modified_base 48: mod_base = OTHER; note = 2'-Omethylguanosine
  modified_base 49: mod_base = OTHER; note = 2'-Omethylcytosine
  modified_base 50: mod_base = OTHER; note = 2'-Omethylguanosine
  modified_base 51: mod_base = OTHER; note = 2'-Omethyluridine
  modified_base 52: mod_base = OTHER; note = 2'-Omethylguanosine
  modified_base 53: mod_base = OTHER; note = 2'-Omethyluridine
  modified_base 60: mod_base = OTHER; note = 2'-Omethylcytosine
  modified_base 61: mod_base = OTHER; note = 2'-Omethyladenosine
  modified_base 62: mod_base = OTHER; note = 2'-fluorocytosine
  modified_base 63: mod_base = OTHER; note = 2'-Omethylguanosine
  modified_base 64: mod_base = OTHER; note = 2'-Omethyluridine
  modified_base 65: mod_base = OTHER; note = 2'-Omethylcytosine
  modified_base 66: mod_base = OTHER; note = 2'-Omethylguanosine
  modified_base 67: mod_base = OTHER; note = 2'-Omethylguanosine
  modified_base 72: mod_base = OTHER; note = 2'-Omethyladenosine

SEQ ID NO: 8129 - RNA, 76 nt, synthetic construct; identical to SEQ ID NO: 3615
  source 1..76: mol_type = other RNA
  modified_base 1: mod_base = OTHER; note = 2'-Omethylguanosine phosphorothiorate
  modified_base 2: mod_base = OTHER; note = 2'-Omethylguanosine phosphorothiorate
  modified_base 3: mod_base = OTHER; note = 2'-Omethylcytosine
  modified_base 4: mod_base = OTHER; note = 2'-Omethyluridine
  modified_base 5: mod_base = OTHER; note = 2'-Omethylcytosine
  modified_base 6: mod_base = OTHER; note = 2'-Omethylcytosine
  modified_base 10: mod_base = OTHER; note = 2'-Omethylguanosine
  modified_base 11: mod_base = OTHER; note = 2'-Omethylcytosine
  modified_base 12: mod_base = OTHER; note = 2'-Omethylguanosine
  modified_base 13: mod_base = OTHER; note = 2'-Omethylcytosine
  modified_base 17: mod_base = OTHER; note = 2'-Omethylguanosine
  modified_base 18: mod_base = OTHER; note = 2'-Omethylguanosine
  modified_base 22: mod_base = OTHER; note = 2'-Omethylguanosine
  modified_base 23: mod_base = OTHER; note = 2'-Omethylcytosine
  modified_base 24: mod_base = OTHER; note = 2'-Omethylguanosine
  modified_base 25: mod_base = OTHER; note = 2'-Omethylcytosine
  modified_base 33: mod_base = OTHER; note = 2'-fluorouridine
  modified_base 35: mod_base = OTHER; note = Cytosine phosphorothiorate
  modified_base 37: mod_base = OTHER; note = Adenosine phosphorothiorate
  modified_base 38: mod_base = OTHER; note = Adenosine phosphorothiorate
  modified_base 41: mod_base = OTHER; note = 2'-fluorocytosine
  modified_base 42: mod_base = OTHER; note = 2'-Omethyladenosine
  modified_base 43: mod_base = OTHER; note = 2'-Omethyladenosine
  modified_base 44: mod_base = OTHER; note = 2'-fluoroguanosine
  modified_base 49: mod_base = OTHER; note = 2'-Omethylcytosine
  modified_base 50: mod_base = OTHER; note = 2'-Omethylcytosine
  modified_base 51: mod_base = OTHER; note = 2'-Omethylguanosine
  modified_base 52: mod_base = OTHER; note = 2'-Omethylguanosine
  modified_base 53: mod_base = OTHER; note = 2'-Omethylguanosine
  modified_base 54: mod_base = OTHER; note = Uridine phosphorothiorate
  modified_base 55: mod_base = OTHER; note = Uridine phosphorothiorate
  modified_base 61: mod_base = OTHER; note = 2'-Omethylcytosine
  modified_base 62: mod_base = OTHER; note = 2'-Omethylcytosine
  modified_base 63: mod_base = OTHER; note = 2'-fluorocytosine
  modified_base 64: mod_base = OTHER; note = 2'-Omethylguanosine
  modified_base 65: mod_base = OTHER; note = 2'-Omethylguanosine
  modified_base 66: mod_base = OTHER; note = 2'-Omethylcytosine
  modified_base 67: mod_base = OTHER; note = 2'-Omethylguanosine
  modified_base 68: mod_base = OTHER; note = 2'-Omethylguanosine
  modified_base 73: mod_base = OTHER; note = 2'-Omethylguanosine

SEQ ID NO: 8130 - RNA, 76 nt, synthetic construct
  source 1..76: mol_type = other RNA
ggctccgtggcgcaatggatagcgcgtctcacttcaaatgagaaggttccgggttcgagtcccggcggagtcgcca

SEQ ID NO: 8131 - RNA, 85 nt, synthetic construct; identical to SEQ ID NO: 3297
  source 1..85: mol_type = other RNA
  modified_base 1: mod_base = OTHER; note = 2'-Omethylguanosine phosphorothiorate
  modified_base 2: mod_base = OTHER; note = 2'-Omethylcytosine phosphorothiorate
  modified_base 19: mod_base = OTHER; note = 2'-Omethyluridine
  modified_base 26: mod_base = OTHER; note = 2'-Omethylguanosine phosphorothiorate
  modified_base 44: mod_base = OTHER; note = 2'-fluorouridine
  modified_base 45: mod_base = OTHER; note = 2'-Omethylguanosine
  modified_base 48: mod_base = OTHER; note = 2'-Omethylguanosine phosphorothiorate
  modified_base 61: mod_base = OTHER; note = Guanosine phosphorothiorate
  modified_base 80: mod_base = OTHER; note = 2'-Omethylguanosine

SEQ ID NO: 8132 - RNA, 75 nt, synthetic construct; identical to SEQ ID NO: 1045
  source 1..75: mol_type = other RNA
  modified_base 1: mod_base = OTHER; note = Guanosine phosphorothiorate
  modified_base 2: mod_base = OTHER; note = 2'-Omethylguanosine phosphorothiorate
  modified_base 12: mod_base = OTHER; note = Guanosine phosphorothiorate
  modified_base 16: mod_base = OTHER; note = 2'-fluorouridine
  modified_base 22: mod_base = OTHER; note = 2'-fluoroguanosine
  modified_base 42: mod_base = OTHER; note = 2'-fluoroadenosine
  modified_base 43: mod_base = OTHER; note = 2'-fluoroguanosine
  modified_base 47: mod_base = OTHER; note = 2'-fluorouridine
  modified_base 65: mod_base = OTHER; note = Uridine phosphorothiorate
  modified_base 66: mod_base = OTHER; note = Guanosine phosphorothiorate
  modified_base 67: mod_base = OTHER; note = 2'-fluoroguanosine
  modified_base 73: mod_base = OTHER; note = Cytosine phosphorothiorate
  modified_base 74: mod_base = OTHER; note = 2'-fluorocytosine phosphorothiorate

SEQ ID NO: 8133 - RNA, 76 nt, synthetic construct; identical to SEQ ID NO: 625
  source 1..76: mol_type = other RNA
  modified_base 1: mod_base = OTHER; note = 2'-Omethylguanosine phosphorothiorate
  modified_base 2: mod_base = OTHER; note = 2'-Omethylguanosine
  modified_base 13: mod_base = OTHER; note = 2'-Omethylcytosine
  modified_base 17: mod_base = OTHER; note = 2'-Omethylguanosine
  modified_base 25: mod_base = OTHER; note = 2'-Omethylcytosine
  modified_base 33: mod_base = OTHER; note = 2'-fluorouridine
  modified_base 35: mod_base = OTHER; note = Cytosine phosphorothiorate
  modified_base 37: mod_base = OTHER; note = Adenosine phosphorothiorate
  modified_base 38: mod_base = OTHER; note = Adenosine phosphorothiorate
  modified_base 52: mod_base = OTHER; note = 2'-Omethylguanosine
  modified_base 62: mod_base = OTHER; note = 2'-Omethylcytosine
  modified_base 63: mod_base = OTHER; note = 2'-fluorocytosine
  modified_base 68: mod_base = OTHER; note = 2'-Omethylguanosine
  modified_base 73: mod_base = OTHER; note = 2'-Omethylguanosine
  modified_base 75: mod_base = OTHER; note = 2'-fluorocytosine phosphorothiorate
  modified_base 76: mod_base = OTHER; note = 2'-Omethyladenosine

SEQ ID NO: 8134 - RNA, 76 nt, synthetic construct; identical to SEQ ID NO: 625
  source 1..76: mol_type = other RNA
  modified_base 1: mod_base = OTHER; note = 2'-Omethylguanosine
  modified_base 10: mod_base = OTHER; note = 2'-Omethylguanosine
  modified_base 13: mod_base = OTHER; note = 2'-Omethylcytosine
  modified_base 17: mod_base = OTHER; note = Guanosine phosphorothiorate
  modified_base 18: mod_base = OTHER; note = 2'-Omethylguanosine
  modified_base 19: mod_base = OTHER; note = Adenosine phosphorothiorate
  modified_base 20: mod_base = OTHER; note = 2'-Omethyluridine
  modified_base 25: mod_base = OTHER; note = 2'-Omethylcytosine
  modified_base 29: mod_base = OTHER; note = 2'-Omethylguanosine
  modified_base 33: mod_base = OTHER; note = 2'-fluorouridine
  modified_base 35: mod_base = OTHER; note = Cytosine phosphorothiorate
  modified_base 37: mod_base = OTHER; note = Adenosine phosphorothiorate
  modified_base 38: mod_base = OTHER; note = Adenosine phosphorothiorate
  modified_base 43: mod_base = OTHER; note = 2'-Omethyladenosine
  modified_base 44: mod_base = OTHER; note = 2'-fluoroadenosine
  modified_base 46: mod_base = OTHER; note = Guanosine phosphorothiorate
  modified_base 50: mod_base = OTHER; note = 2'-Omethylcytosine
  modified_base 52: mod_base = OTHER; note = 2'-Omethylguanosine
  modified_base 54: mod_base = OTHER; note = Uridine phosphorothiorate
  modified_base 55: mod_base = OTHER; note = Uridine phosphorothiorate
  modified_base 56: mod_base = OTHER; note = 2'-Omethylcytosine
  modified_base 57: mod_base = OTHER; note = 2'-Omethylguanosine
  modified_base 62: mod_base = OTHER; note = 2'-Omethylcytosine
  modified_base 63: mod_base = OTHER; note = 2'-fluorocytosine
  modified_base 65: mod_base = OTHER; note = 2'-Omethylguanosine
  modified_base 71: mod_base = OTHER; note = 2'-Omethyluridine
  modified_base 73: mod_base = OTHER; note = 2'-Omethylguanosine

SEQ ID NO: 8135 - RNA, 75 nt, synthetic construct; identical to SEQ ID NO: 1045
  source 1..75: mol_type = other RNA
  modified_base 1: mod_base = OTHER; note = 2'-Omethylguanosine phosphorothiorate
  modified_base 2: mod_base = OTHER; note = 2'-Omethylguanosine
  modified_base 13: mod_base = OTHER; note = Uridine phosphorothiorate
  modified_base 14: mod_base = OTHER; note = 2'-fluoroadenosine
  modified_base 22: mod_base = OTHER; note = 2'-fluoroguanosine
  modified_base 23: mod_base = OTHER; note = 2'-fluorocytosine
  modified_base 27: mod_base = OTHER; note = 2'-fluorocytosine phosphorothiorate
  modified_base 40: mod_base = OTHER; note = 2'-Omethylcytosine phosphorothiorate
  modified_base 41: mod_base = OTHER; note = 2'-fluorocytosine
  modified_base 44: mod_base = OTHER; note = 2'-fluorocytosine
  modified_base 55: mod_base = OTHER; note = Cytosine phosphorothiorate
  modified_base 73: mod_base = OTHER; note = Cytosine phosphorothiorate
  modified_base 74: mod_base = OTHER; note = Cytosine phosphorothiorate

SEQ ID NO: 8136 - RNA, 76 nt, synthetic construct
  source 1..76: mol_type = other RNA
ggctccgtggctaatcggatatagcattggacttcaaattcaaaggttccgggttcgagtcccggcggagtcgcca

SEQ ID NO: 8137 - RNA, 76 nt, synthetic construct; identical to SEQ ID NO: 3332
  source 1..76: mol_type = other RNA
  modified_base 1: mod_base = OTHER; note = 2'-Omethylguanosine
  modified_base 2: mod_base = OTHER; note = 2'-Omethylguanosine
  modified_base 3: mod_base = OTHER; note = 2'-Omethylcytosine
  modified_base 4: mod_base = OTHER; note = 2'-Omethylcytosine
  modified_base 5: mod_base = OTHER; note = 2'-Omethylcytosine
  modified_base 6: mod_base = OTHER; note = 2'-Omethylcytosine
  modified_base 10: mod_base = OTHER; note = 2'-Omethylguanosine
  modified_base 11: mod_base = OTHER; note = 2'-Omethylcytosine
  modified_base 12: mod_base = OTHER; note = 2'-Omethylguanosine
  modified_base 13: mod_base = OTHER; note = 2'-Omethylcytosine
  modified_base 16: mod_base = OTHER; note = 2'-Omethyluridine
  modified_base 17: mod_base = OTHER; note = 2'-Omethylguanosine
  modified_base 18: mod_base = OTHER; note = 2'-Omethylguanosine
  modified_base 20: mod_base = OTHER; note = 2'-Omethyluridine
  modified_base 25: mod_base = OTHER; note = 2'-Omethylcytosine
  modified_base 33: mod_base = OTHER; note = 2'-fluorouridine
  modified_base 35: mod_base = OTHER; note = Cytosine phosphorothiorate
  modified_base 37: mod_base = OTHER; note = Adenosine phosphorothiorate
  modified_base 38: mod_base = OTHER; note = Adenosine phosphorothiorate
  modified_base 41: mod_base = OTHER; note = 2'-fluorocytosine
  modified_base 42: mod_base = OTHER; note = 2'-Omethyladenosine
  modified_base 43: mod_base = OTHER; note = 2'-Omethyladenosine
  modified_base 44: mod_base = OTHER; note = 2'-fluoroadenosine
  modified_base 49: mod_base = OTHER; note = 2'-Omethylguanosine
  modified_base 50: mod_base = OTHER; note = 2'-Omethylcytosine
  modified_base 52: mod_base = OTHER; note = 2'-Omethylguanosine
  modified_base 54: mod_base = OTHER; note = 2'-Omethyluridine
  modified_base 55: mod_base = OTHER; note = Uridine phosphorothiorate
  modified_base 56: mod_base = OTHER; note = 2'-Omethylcytosine
  modified_base 57: mod_base = OTHER; note = 2'-fluoroguanosine
  modified_base 59: mod_base = OTHER; note = 2'-Omethylguanosine
  modified_base 61: mod_base = OTHER; note = 2'-Omethylcytosine
  modified_base 65: mod_base = OTHER; note = 2'-Omethylcytosine
  modified_base 73: mod_base = OTHER; note = 2'-Omethylguanosine

SEQ ID NO: 8138 - RNA, 76 nt, synthetic construct; identical to SEQ ID NO: 625
  source 1..76: mol_type = other RNA
  modified_base 2: mod_base = OTHER; note = 2'-fluoroguanosine
  modified_base 4: mod_base = OTHER; note = 2'-fluorouridine
  modified_base 6: mod_base = OTHER; note = 2'-Omethylcytosine
  modified_base 14: mod_base = OTHER; note = 2'-fluoroadenosine
  modified_base 15: mod_base = OTHER; note = Adenosine phosphorothiorate
  modified_base 16: mod_base = OTHER; note = 2'-Omethyluridine
  modified_base 24: mod_base = OTHER; note = Guanosine phosphorothiorate
  modified_base 26: mod_base = OTHER; note = 2'-Omethyladenosine
  modified_base 27: mod_base = OTHER; note = 2'-Omethyluridine phosphorothiorate
  modified_base 28: mod_base = OTHER; note = 2'-fluorouridine
  modified_base 30: mod_base = OTHER; note = 2'-Omethylguanosine
  modified_base 32: mod_base = OTHER; note = 2'-fluorocytosine
  modified_base 37: mod_base = OTHER; note = Adenosine phosphorothiorate
  modified_base 38: mod_base = OTHER; note = 2'-fluoroadenosine
  modified_base 43: mod_base = OTHER; note = 2'-Omethyladenosine
  modified_base 45: mod_base = OTHER; note = 2'-fluoroguanosine phosphorothiorate
  modified_base 46: mod_base = OTHER; note = Guanosine phosphorothiorate
  modified_base 48: mod_base = OTHER; note = 2'-Omethyluridine
  modified_base 51: mod_base = OTHER; note = 2'-Omethylguanosine
  modified_base 54: mod_base = OTHER; note = Uridine phosphorothiorate
  modified_base 56: mod_base = OTHER; note = 2'-Omethylcytosine
  modified_base 57: mod_base = OTHER; note = 2'-fluoroguanosine phosphorothiorate
  modified_base 58: mod_base = OTHER; note = 2'-fluoroadenosine
  modified_base 60: mod_base = OTHER; note = Uridine phosphorothiorate
  modified_base 61: mod_base = OTHER; note = 2'-fluorocytosine
  modified_base 62: mod_base = OTHER; note = 2'-fluorocytosine
  modified_base 64: mod_base = OTHER; note = 2'-Omethylguanosine
  modified_base 66: mod_base = OTHER; note = 2'-fluorocytosine
  modified_base 69: mod_base = OTHER; note = 2'-fluoroadenosine
  modified_base 74: mod_base = OTHER; note = 2'-fluorocytosine
  modified_base 75: mod_base = OTHER; note = Cytosine phosphorothiorate
  modified_base 76: mod_base = OTHER; note = 2'-fluoroadenosine

SEQ ID NO: 8139 - RNA, 75 nt, synthetic construct; identical to SEQ ID NO: 3306
  source 1..75: mol_type = other RNA
  modified_base 1: mod_base = OTHER; note = 2'-Omethylguanosine
  modified_base 2: mod_base = OTHER; note = 2'-Omethyladenosine
  modified_base 3: mod_base = OTHER; note = 2'-Omethylcytosine
  modified_base 4: mod_base = OTHER; note = 2'-Omethylcytosine
  modified_base 5: mod_base = OTHER; note = 2'-Omethyluridine
  modified_base 6: mod_base = OTHER; note = 2'-Omethylcytosine
  modified_base 14: mod_base = OTHER; note = 2'-Omethyladenosine
  modified_base 15: mod_base = OTHER; note = 2'-Omethyladenosine
  modified_base 16: mod_base = OTHER; note = 2'-Omethylcytosine
  modified_base 17: mod_base = OTHER; note = 2'-Omethylguanosine
  modified_base 18: mod_base = OTHER; note = 2'-Omethylguanosine
  modified_base 24: mod_base = OTHER; note = 2'-Omethylcytosine
  modified_base 32: mod_base = OTHER; note = 2'-fluorouridine
  modified_base 34: mod_base = OTHER; note = Uridine phosphorothiorate
  modified_base 36: mod_base = OTHER; note = Guanosine phosphorothiorate
  modified_base 37: mod_base = OTHER; note = Adenosine phosphorothiorate
  modified_base 40: mod_base = OTHER; note = 2'-Omethyladenosine
  modified_base 41: mod_base = OTHER; note = 2'-Omethylguanosine
  modified_base 42: mod_base = OTHER; note = 2'-Omethyladenosine
  modified_base 43: mod_base = OTHER; note = 2'-fluoroadenosine
  modified_base 48: mod_base = OTHER; note = 2'-Omethylguanosine
  modified_base 49: mod_base = OTHER; note = 2'-Omethylcytosine
  modified_base 51: mod_base = OTHER; note = 2'-Omethyluridine
  modified_base 53: mod_base = OTHER; note = 2'-Omethyluridine
  modified_base 54: mod_base = OTHER; note = Uridine phosphorothiorate
  modified_base 55: mod_base = OTHER; note = 2'-Omethylcytosine
  modified_base 56: mod_base = OTHER; note = 2'-fluoroadenosine
  modified_base 58: mod_base = OTHER; note = 2'-Omethyladenosine
  modified_base 60: mod_base = OTHER; note = 2'-Omethylcytosine
  modified_base 64: mod_base = OTHER; note = 2'-Omethyluridine
  modified_base 72: mod_base = OTHER; note = 2'-Omethyladenosine

SEQ ID NO: 8140 - RNA, 85 nt, synthetic construct; identical to SEQ ID NO: 3297
  source 1..85: mol_type = other RNA
  modified_base 1: mod_base = OTHER; note = 2'-Omethylguanosine
  modified_base 14: mod_base = OTHER; note = 2'-Omethyladenosine
  modified_base 15: mod_base = OTHER; note = 2'-Omethylguanosine
  modified_base 16: mod_base = OTHER; note = 2'-Omethyluridine
  modified_base 17: mod_base = OTHER; note = 2'-Omethylguanosine
  modified_base 18: mod_base = OTHER; note = 2'-Omethylguanosine
  modified_base 19: mod_base = OTHER; note = Uridine phosphorothiorate
  modified_base 20: mod_base = OTHER; note = 2'-Omethyluridine
  modified_base 21: mod_base = OTHER; note = Adenosine phosphorothiorate
  modified_base 33: mod_base = OTHER; note = Uridine phosphorothiorate
  modified_base 34: mod_base = OTHER; note = 2'-Omethyluridine
  modified_base 35: mod_base = OTHER; note = Cytosine phosphorothiorate
  modified_base 37: mod_base = OTHER; note = Adenosine phosphorothiorate
  modified_base 38: mod_base = OTHER; note = Adenosine phosphorothiorate
  modified_base 41: mod_base = OTHER; note = 2'-Omethylcytosine
  modified_base 42: mod_base = OTHER; note = 2'-Omethyladenosine
  modified_base 43: mod_base = OTHER; note = 2'-Omethyladenosine
  modified_base 44: mod_base = OTHER; note = 2'-Omethyluridine
  modified_base 59: mod_base = OTHER; note = 2'-Omethylcytosine
  modified_base 61: mod_base = OTHER; note = 2'-Omethylguanosine
  modified_base 82: mod_base = OTHER; note = 2'-Omethylguanosine

SEQ ID NO: 8141 - RNA, 76 nt, synthetic construct; identical to SEQ ID NO: 625
  source 1..76: mol_type = other RNA
  modified_base 1: mod_base = OTHER; note = 2'-O-(2-Methoxyethyl) guanosine
  modified_base 2: mod_base = OTHER; note = 2'-O-(2-Methoxyethyl) guanosine
  modified_base 3: mod_base = OTHER; note = 2'-O-(2-Methoxyethyl) cytosine
  modified_base 4: mod_base = OTHER; note = 2'-O-(2-Methoxyethyl) thymine
  modified_base 5: mod_base = OTHER; note = 2'-O-(2-Methoxyethyl) cytosine
  modified_base 6: mod_base = OTHER; note = 2'-O-(2-Methoxyethyl) cytosine
  modified_base 10: mod_base = OTHER; note = 2'-O-(2-Methoxyethyl) guanosine
  modified_base 11: mod_base = OTHER; note = 2'-O-(2-Methoxyethyl) cytosine
  modified_base 12: mod_base = OTHER; note = 2'-O-(2-Methoxyethyl) guanosine
  modified_base 13: mod_base = OTHER; note = 2'-O-(2-Methoxyethyl) cytosine
  modified_base 14: mod_base = OTHER; note = 2'-O-(2-Methoxyethyl) adenosine
  modified_base 15: mod_base = OTHER; note = 2'-O-(2-Methoxyethyl) adenosine
  modified_base 16: mod_base = OTHER; note = 2'-O-(2-Methoxyethyl) thymine
  modified_base 17: mod_base = OTHER; note = 2'-O-(2-Methoxyethyl) guanosine
  modified_base 18: mod_base = OTHER; note = 2'-O-(2-Methoxyethyl) guanosine
  modified_base 19: mod_base = OTHER; note = 2'-O-(2-Methoxyethyl) adenosine
  modified_base 20: mod_base = OTHER; note = 2'-O-(2-Methoxyethyl) thymine
  modified_base 21: mod_base = OTHER; note = 2'-O-(2-Methoxyethyl) adenosine
  modified_base 22: mod_base = OTHER; note = 2'-O-(2-Methoxyethyl) guanosine
  modified_base 23: mod_base = OTHER; note = 2'-O-(2-Methoxyethyl) cytosine
  modified_base 24: mod_base = OTHER; note = 2'-O-(2-Methoxyethyl) guanosine
  modified_base 25: mod_base = OTHER; note = 2'-O-(2-Methoxyethyl) cytosine
  modified_base 26: mod_base = OTHER; note = 2'-O-(2-Methoxyethyl) adenosine
  modified_base 27: mod_base = OTHER; note = 2'-O-(2-Methoxyethyl) thymine
  modified_base 28: mod_base = OTHER; note = 2'-O-(2-Methoxyethyl) thymine
  modified_base 29: mod_base = OTHER; note = 2'-O-(2-Methoxyethyl) guanosine
  modified_base 30: mod_base = OTHER; note = 2'-O-(2-Methoxyethyl) guanosine
  modified_base 31: mod_base = OTHER; note = 2'-O-(2-Methoxyethyl) adenosine
  modified_base 32: mod_base = OTHER; note = 2'-O-(2-Methoxyethyl) cytosine
  modified_base 33: mod_base = OTHER; note = 2'-O-(2-Methoxyethyl) thymine
  modified_base 34: mod_base = OTHER; note = 2'-O-(2-Methoxyethyl) thymine
  modified_base 35: mod_base = OTHER; note = 2'-O-(2-Methoxyethyl) cytosine
  modified_base 36: mod_base = OTHER; note = 2'-O-(2-Methoxyethyl) adenosine
  modified_base 37: mod_base = OTHER; note = 2'-O-(2-Methoxyethyl) adenosine
  modified_base 38: mod_base = OTHER; note = 2'-O-(2-Methoxyethyl) adenosine
  modified_base 41: mod_base = OTHER; note = 2'-O-(2-Methoxyethyl) cytosine
  modified_base 42: mod_base = OTHER; note = 2'-O-(2-Methoxyethyl) adenosine
  modified_base 43: mod_base = OTHER; note = 2'-O-(2-Methoxyethyl) adenosine
  modified_base 44: mod_base = OTHER; note = 2'-O-(2-Methoxyethyl) adenosine
  modified_base 45: mod_base = OTHER; note = 2'-O-(2-Methoxyethyl) guanosine
  modified_base 46: mod_base = OTHER; note = 2'-O-(2-Methoxyethyl) guanosine
  modified_base 47: mod_base = OTHER; note = 2'-O-(2-Methoxyethyl) thymine
  modified_base 48: mod_base = OTHER; note = 2'-O-(2-Methoxyethyl) thymine
  modified_base 49: mod_base = OTHER; note = 2'-O-(2-Methoxyethyl) cytosine
  modified_base 50: mod_base = OTHER; note = 2'-O-(2-Methoxyethyl) cytosine
  modified_base 51: mod_base = OTHER; note = 2'-O-(2-Methoxyethyl) guanosine
  modified_base 52: mod_base = OTHER; note = 2'-O-(2-Methoxyethyl) guanosine
  modified_base 53: mod_base = OTHER; note = 2'-O-(2-Methoxyethyl) guanosine
  modified_base 54: mod_base = OTHER; note = 2'-O-(2-Methoxyethyl) thymine
  modified_base 55: mod_base = OTHER; note = 2'-O-(2-Methoxyethyl) thymine
  modified_base 56: mod_base = OTHER; note = 2'-O-(2-Methoxyethyl) cytosine
  modified_base 57: mod_base = OTHER; note = 2'-O-(2-Methoxyethyl) guanosine
  modified_base 58: mod_base = OTHER; note = 2'-O-(2-Methoxyethyl) adenosine
  modified_base 59: mod_base = OTHER; note = 2'-O-(2-Methoxyethyl) guanosine
  modified_base 60: mod_base = OTHER; note = 2'-O-(2-Methoxyethyl) thymine
  modified_base 61: mod_base = OTHER; note = 2'-O-(2-Methoxyethyl) cytosine
  modified_base 62: mod_base = OTHER; note = 2'-O-(2-Methoxyethyl) cytosine
  modified_base 63: mod_base = OTHER; note = 2'-O-(2-Methoxyethyl) cytosine
  modified_base 65: mod_base = OTHER; note = 2'-O-(2-Methoxyethyl) guanosine
  modified_base 66: mod_base = OTHER; note = 2'-O-(2-Methoxyethyl) cytosine
  modified_base 67: mod_base = OTHER; note = 2'-O-(2-Methoxyethyl) guanosine
  modified_base 68: mod_base = OTHER; note = 2'-O-(2-Methoxyethyl) guanosine
  modified_base 71: mod_base = OTHER; note = 2'-O-(2-Methoxyethyl) thymine
  modified_base 72: mod_base = OTHER; note = 2'-O-(2-Methoxyethyl) cytosine
  modified_base 73: mod_base = OTHER; note = 2'-O-(2-Methoxyethyl) guanosine
  modified_base 74: mod_base = OTHER; note = 2'-O-(2-Methoxyethyl) cytosine
  modified_base 75: mod_base = OTHER; note = 2'-O-(2-Methoxyethyl) cytosine

SEQ ID NO: 8142 - RNA, 85 nt, synthetic construct; identical to SEQ ID NO: 3310
  source 1..85: mol_type = other RNA
  modified_base 1: mod_base = OTHER; note = 2'-Omethylcytosine
  modified_base 11: mod_base = OTHER; note = Cytosine phosphorothiorate
  modified_base 26: mod_base = OTHER; note = 2'-fluorouridine
  modified_base 30: mod_base = OTHER; note = 2'-fluoroadenosine
  modified_base 34: mod_base = OTHER; note = 2'-fluorouridine
  modified_base 43: mod_base = OTHER; note = 2'-Omethyluridine
  modified_base 46: mod_base = OTHER; note = 2'-Omethyladenosine
  modified_base 57: mod_base = OTHER; note = 2'-Omethylcytosine
  modified_base 64: mod_base = OTHER; note = Uridine phosphorothiorate
  modified_base 76: mod_base = OTHER; note = 2'-fluorocytosine
  modified_base 84: mod_base = OTHER; note = Cytosine phosphorothiorate

SEQ ID NO: 8143 - RNA, 85 nt, synthetic construct; identical to SEQ ID NO: 3288
  source 1..85: mol_type = other RNA
  modified_base 1: mod_base = OTHER; note = 2'-Omethylcytosine
  modified_base 11: mod_base = OTHER; note = Cytosine phosphorothiorate
  modified_base 16: mod_base = OTHER; note = 2'-Omethylguanosine
  modified_base 18: mod_base = OTHER; note = 2'-Omethyluridine
  modified_base 27: mod_base = OTHER; note = 2'-fluorouridine
  modified_base 30: mod_base = OTHER; note = 2'-fluoroadenosine
  modified_base 34: mod_base = OTHER; note = 2'-Omethylcytosine phosphorothiorate
  modified_base 41: mod_base = OTHER; note = Adenosine phosphorothiorate
  modified_base 43: mod_base = OTHER; note = 2'-Omethyluridine
  modified_base 46: mod_base = OTHER; note = Adenosine phosphorothiorate
  modified_base 48: mod_base = OTHER; note = 2'-Omethyladenosine
  modified_base 51: mod_base = OTHER; note = Uridine phosphorothiorate
  modified_base 53: mod_base = OTHER; note = 2'-fluorouridine
  modified_base 55: mod_base = OTHER; note = 2'-fluorocytosine
  modified_base 57: mod_base = OTHER; note = 2'-Omethylcytosine
  modified_base 76: mod_base = OTHER; note = Cytosine phosphorothiorate
  modified_base 84: mod_base = OTHER; note = 2'-Omethylcytosine
  modified_base 85: mod_base = OTHER; note = 2'-Omethyladenosine

SEQ ID NO: 8144 - RNA, 85 nt, synthetic construct; identical to SEQ ID NO: 3317
  source 1..85: mol_type = other RNA
  modified_base 1: mod_base = OTHER; note = 2'-Omethylguanosine phosphorothiorate
  modified_base 2: mod_base = OTHER; note = 2'-Omethylcytosine phosphorothiorate
  modified_base 30: mod_base = OTHER; note = 2'-Omethylguanosine phosphorothiorate
  modified_base 43: mod_base = OTHER; note = 2'-Omethyladenosine
  modified_base 56: mod_base = OTHER; note = 2'-Omethylguanosine phosphorothiorate
  modified_base 61: mod_base = OTHER; note = 2'-fluoroguanosine phosphorothiorate
  modified_base 63: mod_base = OTHER; note = 2'-fluorouridine phosphorothiorate
  modified_base 82: mod_base = OTHER; note = 2'-Omethylguanosine

SEQ ID NO: 8145 - RNA, 76 nt, synthetic construct; identical to SEQ ID NO: 3795
  source 1..76: mol_type = other RNA
  modified_base 1: mod_base = OTHER; note = 2'-Omethylguanosine
  modified_base 14: mod_base = OTHER; note = 2'-Omethyladenosine
  modified_base 15: mod_base = OTHER; note = 2'-fluoroadenosine
  modified_base 16: mod_base = OTHER; note = 2'-Omethyluridine
  modified_base 17: mod_base = OTHER; note = 2'-Omethylguanosine
  modified_base 18: mod_base = OTHER; note = 2'-Omethylguanosine
  modified_base 19: mod_base = OTHER; note = 2'-fluoroadenosine
  modified_base 20: mod_base = OTHER; note = 2'-Omethyluridine
  modified_base 54: mod_base = OTHER; note = 2'-Omethyluridine phosphorothiorate
  modified_base 55: mod_base = OTHER; note = Uridine phosphorothiorate
  modified_base 56: mod_base = OTHER; note = 2'-Omethylcytosine
  modified_base 57: mod_base = OTHER; note = 2'-Omethylguanosine
  modified_base 59: mod_base = OTHER; note = 2'-Omethylguanosine
  modified_base 73: mod_base = OTHER; note = 2'-Omethylguanosine

SEQ ID NO: 8146 - RNA, 76 nt, synthetic construct; identical to SEQ ID NO: 625
  source 1..76: mol_type = other RNA
  modified_base 1: mod_base = OTHER; note = 2'-Omethylguanosine
  modified_base 10: mod_base = OTHER; note = 2'-Omethylguanosine
  modified_base 13: mod_base = OTHER; note = 2'-Omethylcytosine
  modified_base 17: mod_base = OTHER; note = Guanosine phosphorothiorate
  modified_base 18: mod_base = OTHER; note = 2'-Omethylguanosine
  modified_base 19: mod_base = OTHER; note = Adenosine phosphorothiorate
  modified_base 20: mod_base = OTHER; note = 2'-Omethyluridine
  modified_base 25: mod_base = OTHER; note = 2'-Omethylcytosine
  modified_base 29: mod_base = OTHER; note = 2'-Omethylguanosine
  modified_base 33: mod_base = OTHER; note = 2'-fluorouridine
  modified_base 35: mod_base = OTHER; note = Cytosine phosphorothiorate
  modified_base 37: mod_base = OTHER; note = Adenosine phosphorothiorate
  modified_base 38: mod_base = OTHER; note = Adenosine phosphorothiorate
  modified_base 43: mod_base = OTHER; note = 2'-Omethyladenosine
  modified_base 44: mod_base = OTHER; note = 2'-fluoroadenosine
  modified_base 46: mod_base = OTHER; note = Guanosine phosphorothiorate
  modified_base 50: mod_base = OTHER; note = 2'-Omethylcytosine
  modified_base 52: mod_base = OTHER; note = 2'-Omethylguanosine
  modified_base 54: mod_base = OTHER; note = Uridine phosphorothiorate
  modified_base 55: mod_base = OTHER; note = Uridine phosphorothiorate
  modified_base 56: mod_base = OTHER; note = 2'-Omethylcytosine
  modified_base 57: mod_base = OTHER; note = Guanosine phosphorothiorate
  modified_base 62: mod_base = OTHER; note = 2'-Omethylcytosine
  modified_base 63: mod_base = OTHER; note = 2'-fluorocytosine
  modified_base 65: mod_base = OTHER; note = 2'-Omethylguanosine
  modified_base 68: mod_base = OTHER; note = 2'-fluoroguanosine
  modified_base 71: mod_base = OTHER; note = 2'-Omethyluridine
  modified_base 73: mod_base = OTHER; note = 2'-Omethylguanosine

SEQ ID NO: 8147 - RNA, 75 nt, synthetic construct; identical to SEQ ID NO: 3306
  source 1..75: mol_type = other RNA
  modified_base 1: mod_base = OTHER; note = 2'-Omethylguanosine
  modified_base 16: mod_base = OTHER; note = 2'-Omethylcytosine
  modified_base 17: mod_base = OTHER; note = 2'-Omethylguanosine
  modified_base 18: mod_base = OTHER; note = 2'-Omethylguanosine
  modified_base 53: mod_base = OTHER; note = 2'-Omethyluridine phosphorothiorate
  modified_base 54: mod_base = OTHER; note = Uridine phosphorothiorate
  modified_base 55: mod_base = OTHER; note = 2'-Omethylcytosine
  modified_base 56: mod_base = OTHER; note = 2'-fluoroadenosine
  modified_base 57: mod_base = OTHER; note = 2'-fluoroadenosine
  modified_base 58: mod_base = OTHER; note = 2'-Omethyladenosine
  modified_base 59: mod_base = OTHER; note = 2'-fluorouridine
  modified_base 72: mod_base = OTHER; note = 2'-Omethyladenosine

SEQ ID NO: 8148 - RNA, 75 nt, synthetic construct; identical to SEQ ID NO: 3336
  source 1..75: mol_type = other RNA
  modified_base 1: mod_base = OTHER; note = 2'-Omethylcytosine
  modified_base 6: mod_base = OTHER; note = 2'-Omethylguanosine phosphorothiorate
  modified_base 10: mod_base = OTHER; note = 2'-fluorocytosine
  modified_base 20: mod_base = OTHER; note = 2'-fluoroadenosine
  modified_base 21: mod_base = OTHER; note = 2'-fluoroguanosine
  modified_base 22: mod_base = OTHER; note = 2'-fluoroadenosine
  modified_base 25: mod_base = OTHER; note = 2'-Omethyladenosine phosphorothiorate
  modified_base 29: mod_base = OTHER; note = 2'-Omethylguanosine phosphorothiorate
  modified_base 35: mod_base = OTHER; note = 2'-fluoroadenosine phosphorothiorate
  modified_base 39: mod_base = OTHER; note = 2'-Omethylcytosine phosphorothiorate
  modified_base 42: mod_base = OTHER; note = 2'-fluoroadenosine
  modified_base 48: mod_base = OTHER; note = 2'-fluorocytosine
  modified_base 50: mod_base = OTHER; note = 2'-fluoroguanosine
  modified_base 52: mod_base = OTHER; note = 2'-fluoroguanosine phosphorothiorate
  modified_base 56: mod_base = OTHER; note = Adenosine phosphorothiorate
  modified_base 60: mod_base = OTHER; note = Cytosine phosphorothiorate
  modified_base 72: mod_base = OTHER; note = 2'-fluoroguanosine phosphorothiorate
  modified_base 74: mod_base = OTHER; note = 2'-Omethylcytosine

SEQ ID NO: 8149 - RNA, 85 nt, synthetic construct; identical to SEQ ID NO: 3317
  source 1..85: mol_type = other RNA
  modified_base 1: mod_base = OTHER; note = 2'-Omethylguanosine phosphorothiorate
  modified_base 2: mod_base = OTHER; note = Cytosine phosphorothiorate
  modified_base 14: mod_base = OTHER; note = Adenosine phosphorothiorate
  modified_base 34: mod_base = OTHER; note = 2'-fluorocytosine
  modified_base 44: mod_base = OTHER; note = Uridine phosphorothiorate
  modified_base 46: mod_base = OTHER; note = 2'-fluoroguanosine phosphorothiorate
  modified_base 60: mod_base = OTHER; note = 2'-fluoroadenosine
  modified_base 76: mod_base = OTHER; note = 2'-fluorocytosine
  modified_base 80: mod_base = OTHER; note = 2'-Omethylguanosine

SEQ ID NO: 8150 - RNA, 76 nt, synthetic construct
  source 1..76: mol_type = other RNA
ggctccgtggcgcaatggatagcgcatgggacttcaaattccatggttccgggttcgagtcccggcggagtcgcca

SEQ ID NO: 8151 - RNA, 86 nt, synthetic construct; identical to SEQ ID NO: 3290
  source 1..86: mol_type = other RNA
  modified_base 59: mod_base = OTHER; note = 2'-Omethylguanosine
  modified_base 60: mod_base = OTHER; note = 2'-Omethyluridine
  modified_base 61: mod_base = OTHER; note = 2'-Omethylguanosine
  modified_base 62: mod_base = OTHER; note = 2'-Omethylguanosine
  modified_base 63: mod_base = OTHER; note = 2'-Omethylguanosine
  modified_base 71: mod_base = OTHER; note = 2'-Omethylcytosine
  modified_base 72: mod_base = OTHER; note = 2'-Omethylcytosine
  modified_base 73: mod_base = OTHER; note = 2'-Omethylcytosine
  modified_base 74: mod_base = OTHER; note = 2'-Omethyladenosine
  modified_base 75: mod_base = OTHER; note = 2'-Omethylcytosine

SEQ ID NO: 8152 - RNA, 74 nt, synthetic construct; identical to SEQ ID NO: 766
  source 1..74: mol_type = other RNA
  modified_base 1: mod_base = OTHER; note = 2'-Omethylguanosine phosphorothiorate
  modified_base 2: mod_base = OTHER; note = 2'-Omethylguanosine
  modified_base 3: mod_base = OTHER; note = 2'-Omethylcytosine
  modified_base 4: mod_base = OTHER; note = 2'-Omethyluridine
  modified_base 5: mod_base = OTHER; note = 2'-Omethylcytosine
  modified_base 6: mod_base = OTHER; note = 2'-Omethylcytosine
  modified_base 54: mod_base = OTHER; note = 2'-Omethyluridine phosphorothiorate
  modified_base 56: mod_base = OTHER; note = 2'-Omethylcytosine
  modified_base 57: mod_base = OTHER; note = 2'-fluoroguanosine
  modified_base 59: mod_base = OTHER; note = 2'-Omethylguanosine
  modified_base 73: mod_base = OTHER; note = 2'-Omethylguanosine

SEQ ID NO: 8153 - RNA, 75 nt, synthetic construct; identical to SEQ ID NO: 3306
  source 1..75: mol_type = other RNA
  modified_base 1: mod_base = OTHER; note = 2'-Omethylguanosine phosphorothiorate
  modified_base 2: mod_base = OTHER; note = 2'-Omethyladenosine phosphorothiorate
  modified_base 3: mod_base = OTHER; note = 2'-Omethylcytosine
  modified_base 4: mod_base = OTHER; note = 2'-Omethylcytosine
  modified_base 5: mod_base = OTHER; note = 2'-Omethyluridine
  modified_base 6: mod_base = OTHER; note = 2'-Omethylcytosine
  modified_base 16: mod_base = OTHER; note = 2'-Omethylcytosine
  modified_base 17: mod_base = OTHER; note = 2'-Omethylguanosine
  modified_base 18: mod_base = OTHER; note = 2'-Omethylguanosine
  modified_base 24: mod_base = OTHER; note = 2'-Omethylcytosine
  modified_base 32: mod_base = OTHER; note = 2'-fluorouridine
  modified_base 34: mod_base = OTHER; note = Uridine phosphorothiorate
  modified_base 36: mod_base = OTHER; note = Guanosine phosphorothiorate
  modified_base 37: mod_base = OTHER; note = Adenosine phosphorothiorate
  modified_base 40: mod_base = OTHER; note = 2'-Omethyladenosine
  modified_base 43: mod_base = OTHER; note = 2'-Omethyladenosine
  modified_base 44: mod_base = OTHER; note = 2'-Omethylguanosine
  modified_base 45: mod_base = OTHER; note = 2'-fluoroguanosine
  modified_base 46: mod_base = OTHER; note = 2'-fluorouridine
  modified_base 47: mod_base = OTHER; note = 2'-fluorouridine
  modified_base 55: mod_base = OTHER; note = 2'-Omethylcytosine
  modified_base 58: mod_base = OTHER; note = 2'-Omethyladenosine
  modified_base 60: mod_base = OTHER; note = 2'-Omethylcytosine
  modified_base 61: mod_base = OTHER; note = 2'-Omethyladenosine
  modified_base 62: mod_base = OTHER; note = 2'-fluorocytosine
  modified_base 63: mod_base = OTHER; note = 2'-Omethylguanosine
  modified_base 64: mod_base = OTHER; note = 2'-Omethyluridine
  modified_base 65: mod_base = OTHER; note = 2'-Omethylcytosine
  modified_base 66: mod_base = OTHER; note = 2'-Omethylguanosine
  modified_base 67: mod_base = OTHER; note = 2'-Omethylguanosine
  modified_base 72: mod_base = OTHER; note = 2'-Omethyladenosine

SEQ ID NO: 8154 - RNA, 85 nt, synthetic construct; identical to SEQ ID NO: 3297
  source 1..85: mol_type = other RNA
  modified_base 1: mod_base = OTHER; note = 2'-Omethylguanosine
  modified_base 56: mod_base = OTHER; note = 2'-fluoroguanosine
  modified_base 57: mod_base = OTHER; note = 2'-fluorocytosine
  modified_base 82: mod_base = OTHER; note = 2'-Omethylguanosine

SEQ ID NO: 8155 - RNA, 85 nt, synthetic construct; identical to SEQ ID NO: 3297
  source 1..85: mol_type = other RNA
  modified_base 1: mod_base = OTHER; note = 2'-Omethylguanosine phosphorothiorate
  modified_base 2: mod_base = OTHER; note = 2'-Omethylcytosine

SEQ ID NO: 8156 - RNA, 76 nt, synthetic construct; identical to SEQ ID NO: 3318
  source 1..76: mol_type = other RNA
  modified_base 1: mod_base = OTHER; note = 2'-Omethylcytosine
  modified_base 2: mod_base = OTHER; note = 2'-Omethylcytosine
  modified_base 3: mod_base = OTHER; note = 2'-Omethyluridine
  modified_base 4: mod_base = OTHER; note = 2'-Omethyluridine
  modified_base 5: mod_base = OTHER; note = 2'-Omethylcytosine
  modified_base 6: mod_base = OTHER; note = 2'-Omethylguanosine

SEQ ID NO: 8157 - RNA, 73 nt, synthetic construct; identical to SEQ ID NO: 935
  source 1..73: mol_type = other RNA
  modified_base 1: mod_base = OTHER; note = 2'-Omethylguanosine phosphorothiorate
  modified_base 2: mod_base = OTHER; note = 2'-Omethylguanosine
  modified_base 72: mod_base = OTHER; note = 2'-Omethylcytosine

SEQ ID NO: 8158 - RNA, 74 nt, synthetic construct; identical to SEQ ID NO: 766
  source 1..74: mol_type = other RNA
  modified_base 1: mod_base = OTHER; note = 2'-Omethylguanosine phosphorothiorate
  modified_base 2: mod_base = OTHER; note = 2'-Omethylguanosine
  modified_base 25: mod_base = OTHER; note = 2'-fluorocytosine
  modified_base 72: mod_base = OTHER; note = 2'-Omethylcytosine
  modified_base 73: mod_base = OTHER; note = 2'-Omethylguanosine

SEQ ID NO: 8159 - RNA, 76 nt, synthetic construct; identical to SEQ ID NO: 625
  source 1..76: mol_type = other RNA
  modified_base 1: mod_base = OTHER; note = 2'-Omethylguanosine phosphorothiorate
  modified_base 2: mod_base = OTHER; note = 2'-Omethylguanosine
  modified_base 3: mod_base = OTHER; note = 2'-Omethylcytosine
  modified_base 4: mod_base = OTHER; note = 2'-Omethyluridine
  modified_base 5: mod_base = OTHER; note = 2'-Omethylcytosine
  modified_base 6: mod_base = OTHER; note = 2'-Omethylcytosine
  modified_base 10: mod_base = OTHER; note = 2'-Omethylguanosine
  modified_base 11: mod_base = OTHER; note = 2'-Omethylcytosine
  modified_base 12: mod_base = OTHER; note = 2'-Omethylguanosine
  modified_base 13: mod_base = OTHER; note = 2'-Omethylcytosine
  modified_base 16: mod_base = OTHER; note = 2'-Omethyluridine
  modified_base 17: mod_base = OTHER; note = 2'-Omethylguanosine
  modified_base 18: mod_base = OTHER; note = 2'-Omethylguanosine
  modified_base 40: mod_base = OTHER; note = 2'-fluorouridine
  modified_base 41: mod_base = OTHER; note = 2'-fluorocytosine
  modified_base 42: mod_base = OTHER; note = 2'-fluoroadenosine
  modified_base 43: mod_base = OTHER; note = 2'-fluoroadenosine
  modified_base 54: mod_base = OTHER; note = 2'-Omethyluridine phosphorothiorate
  modified_base 55: mod_base = OTHER; note = Uridine phosphorothiorate
  modified_base 56: mod_base = OTHER; note = 2'-Omethylcytosine
  modified_base 57: mod_base = OTHER; note = 2'-fluoroguanosine
  modified_base 59: mod_base = OTHER; note = 2'-Omethylguanosine
  modified_base 73: mod_base = OTHER; note = 2'-Omethylguanosine

SEQ ID NO: 8160 - RNA, 75 nt, synthetic construct; identical to SEQ ID NO: 3299
  source 1..75: mol_type = other RNA
  modified_base 10: mod_base = OTHER; note = Cytosine phosphorothiorate
  modified_base 13: mod_base = OTHER; note = 2'-Omethyladenosine phosphorothiorate
  modified_base 20: mod_base = OTHER; note = 2'-fluoroadenosine
  modified_base 29: mod_base = OTHER; note = Guanosine phosphorothiorate
  modified_base 45: mod_base = OTHER; note = 2'-fluoroguanosine
  modified_base 46: mod_base = OTHER; note = 2'-fluorouridine
  modified_base 57: mod_base = OTHER; note = 2'-Omethyladenosine phosphorothiorate
  modified_base 72: mod_base = OTHER; note = 2'-fluoroguanosine phosphorothiorate
  modified_base 73: mod_base = OTHER; note = Cytosine phosphorothiorate

SEQ ID NO: 8161 - RNA, 74 nt, synthetic construct; identical to SEQ ID NO: 3293
  source 1..74: mol_type = other RNA
  modified_base 1: mod_base = OTHER; note = Adenosine phosphorothiorate
  modified_base 4: mod_base = OTHER; note = 2'-Omethyluridine
  modified_base 8: mod_base = OTHER; note = Guanosine phosphorothiorate
  modified_base 25: mod_base = OTHER; note = Uridine phosphorothiorate
  modified_base 33: mod_base = OTHER; note = 2'-fluorouridine
  modified_base 46: mod_base = OTHER; note = Uridine phosphorothiorate
  modified_base 48: mod_base = OTHER; note = 2'-fluorocytosine
  modified_base 56: mod_base = OTHER; note = 2'-fluoroadenosine
  modified_base 73: mod_base = OTHER; note = 2'-Omethylcytosine phosphorothiorate
  modified_base 74: mod_base = OTHER; note = 2'-Omethyladenosine

SEQ ID NO: 8162 - RNA, 76 nt, synthetic construct; identical to SEQ ID NO: 625
  source 1..76: mol_type = other RNA
  modified_base 2: mod_base = OTHER; note = 2'-Omethylguanosine
  modified_base 4: mod_base = OTHER; note = Uridine phosphorothiorate
  modified_base 10: mod_base = OTHER; note = 2'-Omethylguanosine phosphorothiorate
  modified_base 11: mod_base = OTHER; note = 2'-Omethylcytosine
  modified_base 12: mod_base = OTHER; note = 2'-Omethylguanosine
  modified_base 13: mod_base = OTHER; note = 2'-Omethylcytosine
  modified_base 14: mod_base = OTHER; note = 2'-fluoroadenosine
  modified_base 16: mod_base = OTHER; note = 2'-Omethyluridine
  modified_base 17: mod_base = OTHER; note = 2'-Omethylguanosine
  modified_base 19: mod_base = OTHER; note = Adenosine phosphorothiorate
  modified_base 22: mod_base = OTHER; note = 2'-Omethylguanosine
  modified_base 23: mod_base = OTHER; note = 2'-fluorocytosine
  modified_base 24: mod_base = OTHER; note = 2'-Omethylguanosine
  modified_base 28: mod_base = OTHER; note = 2'-Omethyluridine
  modified_base 34: mod_base = OTHER; note = 2'-Omethyluridine
  modified_base 45: mod_base = OTHER; note = Guanosine phosphorothiorate
  modified_base 46: mod_base = OTHER; note = 2'-fluoroguanosine
  modified_base 51: mod_base = OTHER; note = 2'-Omethylguanosine
  modified_base 52: mod_base = OTHER; note = Guanosine phosphorothiorate
  modified_base 53: mod_base = OTHER; note = 2'-Omethylguanosine
  modified_base 54: mod_base = OTHER; note = Uridine phosphorothiorate
  modified_base 58: mod_base = OTHER; note = 2'-fluoroadenosine
  modified_base 60: mod_base = OTHER; note = 2'-fluorouridine phosphorothiorate
  modified_base 61: mod_base = OTHER; note = 2'-Omethylcytosine
  modified_base 63: mod_base = OTHER; note = 2'-fluorocytosine
  modified_base 66: mod_base = OTHER; note = Cytosine phosphorothiorate
  modified_base 67: mod_base = OTHER; note = 2'-Omethylguanosine
  modified_base 68: mod_base = OTHER; note = 2'-fluoroguanosine phosphorothiorate
  modified_base 69: mod_base = OTHER; note = 2'-fluoroadenosine
  modified_base 70: mod_base = OTHER; note = 2'-fluoroguanosine
  modified_base 72: mod_base = OTHER; note = Cytosine phosphorothiorate
  modified_base 76: mod_base = OTHER; note = 2'-Omethyladenosine

SEQ ID NO: 8163 - RNA, 85 nt, synthetic construct; identical to SEQ ID NO: 3317
  source 1..85: mol_type = other RNA
  modified_base 1: mod_base = OTHER; note = 2'-Omethylguanosine phosphorothiorate
  modified_base 2: mod_base = OTHER; note = 2'-Omethylcytosine
  modified_base 3: mod_base = OTHER; note = Uridine phosphorothiorate
  modified_base 4: mod_base = OTHER; note = 2'-Omethylguanosine
  modified_base 7: mod_base = OTHER; note = 2'-fluoroadenosine
  modified_base 15: mod_base = OTHER; note = 2'-Omethylguanosine phosphorothiorate
  modified_base 18: mod_base = OTHER; note = 2'-Omethylguanosine phosphorothiorate
  modified_base 24: mod_base = OTHER; note = 2'-fluoroguanosine
  modified_base 29: mod_base = OTHER; note = 2'-fluoroguanosine
  modified_base 34: mod_base = OTHER; note = 2'-fluorocytosine phosphorothiorate
  modified_base 36: mod_base = OTHER; note = Adenosine phosphorothiorate
  modified_base 44: mod_base = OTHER; note = 2'-Omethyluridine
  modified_base 46: mod_base = OTHER; note = 2'-Omethylguanosine
  modified_base 53: mod_base = OTHER; note = 2'-fluorocytosine
  modified_base 55: mod_base = OTHER; note = 2'-fluorocytosine
  modified_base 56: mod_base = OTHER; note = 2'-Omethylguanosine
  modified_base 58: mod_base = OTHER; note = 2'-fluoroguanosine phosphorothiorate
  modified_base 60: mod_base = OTHER; note = 2'-Omethyladenosine
  modified_base 64: mod_base = OTHER; note = 2'-Omethyluridine phosphorothiorate
  modified_base 78: mod_base = OTHER; note = 2'-fluorocytosine phosphorothiorate
  modified_base 82: mod_base = OTHER; note = 2'-Omethylguanosine

SEQ ID NO: 8164 - RNA, 75 nt, synthetic construct; identical to SEQ ID NO: 3336
  source 1..75: mol_type = other RNA
  modified_base 2: mod_base = OTHER; note = Cytosine phosphorothiorate
  modified_base 8: mod_base = OTHER; note = Adenosine phosphorothiorate
  modified_base 19: mod_base = OTHER; note = 2'-fluorouridine
  modified_base 21: mod_base = OTHER; note = 2'-Omethylguanosine phosphorothiorate
  modified_base 31: mod_base = OTHER; note = 2'-fluorocytosine
  modified_base 45: mod_base = OTHER; note = 2'-fluoroguanosine
  modified_base 73: mod_base = OTHER; note = Cytosine phosphorothiorate
  modified_base 74: mod_base = OTHER; note = 2'-Omethylcytosine

SEQ ID NO: 8165 - RNA, 74 nt, synthetic construct; identical to SEQ ID NO: 3293
  source 1..74: mol_type = other RNA
  modified_base 1: mod_base = OTHER; note = Adenosine phosphorothiorate
  modified_base 2: mod_base = OTHER; note = Cytosine phosphorothiorate
  modified_base 3: mod_base = OTHER; note = Cytosine phosphorothiorate
  modified_base 4: mod_base = OTHER; note = Uridine phosphorothiorate
  modified_base 6: mod_base = OTHER; note = Guanosine phosphorothiorate
  modified_base 8: mod_base = OTHER; note = Guanosine phosphorothiorate
  modified_base 9: mod_base = OTHER; note = 2'-Omethylguanosine
  modified_base 10: mod_base = OTHER; note = 2'-Omethylcytosine
  modified_base 11: mod_base = OTHER; note = 2'-Omethylguanosine phosphorothiorate
  modified_base 24: mod_base = OTHER; note = 2'-Omethylguanosine phosphorothiorate
  modified_base 26: mod_base = OTHER; note = 2'-fluorocytosine
  modified_base 28: mod_base = OTHER; note = 2'-Omethylguanosine
  modified_base 42: mod_base = OTHER; note = Adenosine phosphorothiorate
  modified_base 43: mod_base = OTHER; note = 2'-fluoroguanosine
  modified_base 46: mod_base = OTHER; note = Uridine phosphorothiorate
  modified_base 48: mod_base = OTHER; note = 2'-fluorocytosine
  modified_base 50: mod_base = OTHER; note = Uridine phosphorothiorate
  modified_base 51: mod_base = OTHER; note = 2'-fluoroguanosine
  modified_base 62: mod_base = OTHER; note = 2'-fluoroguanosine
  modified_base 73: mod_base = OTHER; note = 2'-Omethylcytosine phosphorothiorate
  modified_base 74: mod_base = OTHER; note = 2'-fluoroadenosine

SEQ ID NO: 8166 - RNA, 85 nt, synthetic construct; identical to SEQ ID NO: 3286
  source 1..85: mol_type = other RNA
  modified_base 1: mod_base = OTHER; note = 2'-Omethylcytosine
  modified_base 3: mod_base = OTHER; note = 2'-Omethyladenosine
  modified_base 5: mod_base = OTHER; note = 2'-fluoroguanosine
  modified_base 16: mod_base = OTHER; note = Guanosine phosphorothiorate
  modified_base 25: mod_base = OTHER; note = 2'-fluoroguanosine
  modified_base 26: mod_base = OTHER; note = 2'-fluorouridine phosphorothiorate
  modified_base 27: mod_base = OTHER; note = 2'-fluorouridine
  modified_base 30: mod_base = OTHER; note = 2'-fluoroadenosine
  modified_base 33: mod_base = OTHER; note = 2'-fluorouridine phosphorothiorate
  modified_base 34: mod_base = OTHER; note = 2'-fluorouridine
  modified_base 35: mod_base = OTHER; note = 2'-fluoroadenosine phosphorothiorate
  modified_base 43: mod_base = OTHER; note = 2'-Omethyluridine
  modified_base 46: mod_base = OTHER; note = 2'-Omethyladenosine
  modified_base 53: mod_base = OTHER; note = 2'-fluorouridine
  modified_base 54: mod_base = OTHER; note = 2'-Omethylcytosine
  modified_base 57: mod_base = OTHER; note = 2'-Omethylcytosine
  modified_base 58: mod_base = OTHER; note = 2'-Omethylguanosine phosphorothiorate
  modified_base 60: mod_base = OTHER; note = 2'-fluoroguanosine phosphorothiorate
  modified_base 62: mod_base = OTHER; note = 2'-fluoroguanosine phosphorothiorate
  modified_base 73: mod_base = OTHER; note = 2'-fluoroadenosine phosphorothiorate
  modified_base 84: mod_base = OTHER; note = Cytosine phosphorothiorate

SEQ ID NO: 8167 - RNA, 75 nt, synthetic construct; identical to SEQ ID NO: 1045
  source 1..75: mol_type = other RNA
  modified_base 1: mod_base = OTHER; note = 2'-Omethylguanosine
  modified_base 13: mod_base = OTHER; note = 2'-Omethyluridine
  modified_base 14: mod_base = OTHER; note = 2'-Omethyladenosine
  modified_base 15: mod_base = OTHER; note = 2'-Omethyladenosine
  modified_base 16: mod_base = OTHER; note = 2'-Omethyluridine
  modified_base 17: mod_base = OTHER; note = 2'-Omethylguanosine
  modified_base 18: mod_base = OTHER; note = 2'-Omethylguanosine
  modified_base 19: mod_base = OTHER; note = Uridine phosphorothiorate
  modified_base 20: mod_base = OTHER; note = 2'-Omethyladenosine
  modified_base 21: mod_base = OTHER; note = Adenosine phosphorothiorate
  modified_base 25: mod_base = OTHER; note = 2'-Omethylcytosine
  modified_base 41: mod_base = OTHER; note = 2'-fluorocytosine
  modified_base 42: mod_base = OTHER; note = 2'-Omethyladenosine
  modified_base 43: mod_base = OTHER; note = 2'-Omethylguanosine
  modified_base 44: mod_base = OTHER; note = 2'-fluorocytosine
  modified_base 48: mod_base = OTHER; note = 2'-Omethylcytosine
  modified_base 49: mod_base = OTHER; note = 2'-Omethylcytosine
  modified_base 51: mod_base = OTHER; note = 2'-Omethyladenosine
  modified_base 53: mod_base = OTHER; note = Uridine phosphorothiorate
  modified_base 54: mod_base = OTHER; note = Uridine phosphorothiorate
  modified_base 60: mod_base = OTHER; note = 2'-Omethylcytosine
  modified_base 64: mod_base = OTHER; note = 2'-Omethylguanosine
  modified_base 72: mod_base = OTHER; note = 2'-Omethyluridine

SEQ ID NO: 8168 - RNA, 85 nt, synthetic construct; identical to SEQ ID NO: 3286
  source 1..85: mol_type = other RNA
  modified_base 1: mod_base = OTHER; note = 2'-fluorocytosine
  modified_base 34: mod_base = OTHER; note = Uridine phosphorothiorate
  modified_base 36: mod_base = OTHER; note = 2'-fluoroguanosine
  modified_base 45: mod_base = OTHER; note = 2'-Omethylguanosine
  modified_base 57: mod_base = OTHER; note = 2'-fluorocytosine
  modified_base 59: mod_base = OTHER; note = 2'-Omethyluridine
  modified_base 71: mod_base = OTHER; note = 2'-fluorocytosine
  modified_base 75: mod_base = OTHER; note = Uridine phosphorothiorate

SEQ ID NO: 8169 - RNA, 75 nt, synthetic construct; identical to SEQ ID NO: 3336
  source 1..75: mol_type = other RNA
  modified_base 1: mod_base = OTHER; note = 2'-Omethylcytosine phosphorothiorate
  modified_base 11: mod_base = OTHER; note = Uridine phosphorothiorate
  modified_base 15: mod_base = OTHER; note = 2'-Omethyluridine
  modified_base 16: mod_base = OTHER; note = Cytosine phosphorothiorate
  modified_base 18: mod_base = OTHER; note = 2'-fluoroguanosine
  modified_base 20: mod_base = OTHER; note = Adenosine phosphorothiorate
  modified_base 21: mod_base = OTHER; note = 2'-fluoroguanosine
  modified_base 28: mod_base = OTHER; note = 2'-fluoroadenosine
  modified_base 37: mod_base = OTHER; note = 2'-fluoroadenosine phosphorothiorate
  modified_base 41: mod_base = OTHER; note = 2'-fluoroguanosine
  modified_base 42: mod_base = OTHER; note = 2'-fluoroadenosine
  modified_base 47: mod_base = OTHER; note = 2'-fluorocytosine
  modified_base 48: mod_base = OTHER; note = 2'-fluorocytosine
  modified_base 55: mod_base = OTHER; note = 2'-Omethylcytosine phosphorothiorate
  modified_base 64: mod_base = OTHER; note = 2'-fluoroguanosine
  modified_base 65: mod_base = OTHER; note = 2'-fluorouridine
  modified_base 69: mod_base = OTHER; note = 2'-fluoroguanosine phosphorothiorate
  modified_base 73: mod_base = OTHER; note = 2'-fluorocytosine phosphorothiorate
  modified_base 74: mod_base = OTHER; note = Cytosine phosphorothiorate
  modified_base 75: mod_base = OTHER; note = 2'-fluoroadenosine

SEQ ID NO: 8170 - RNA, 76 nt, synthetic construct; identical to SEQ ID NO: 3318
  source 1..76: mol_type = other RNA
  modified_base 51: mod_base = OTHER; note = 2'-Omethyluridine
  modified_base 63: mod_base = OTHER; note = 2'-Omethylguanosine

SEQ ID NO: 8171 - RNA, 86 nt, synthetic construct; identical to SEQ ID NO: 3290
  source 1..86: mol_type = other RNA
  modified_base 16: mod_base = OTHER; note = 2'-Omethyluridine

SEQ ID NO: 8172 - RNA, 76 nt, synthetic construct; identical to SEQ ID NO: 625
  source 1..76: mol_type = other RNA
  modified_base 1: mod_base = OTHER; note = 2'-fluoroguanosine
  modified_base 2: mod_base = OTHER; note = 2'-Omethylguanosine
  modified_base 3: mod_base = OTHER; note = 2'-fluorocytosine
  modified_base 14: mod_base = OTHER; note = 2'-fluoroadenosine
  modified_base 16: mod_base = OTHER; note = 2'-fluorouridine
  modified_base 17: mod_base = OTHER; note = 2'-Omethylguanosine
  modified_base 22: mod_base = OTHER; note = 2'-Omethylguanosine
  modified_base 23: mod_base = OTHER; note = 2'-fluorocytosine phosphorothiorate
  modified_base 28: mod_base = OTHER; note = Uridine phosphorothiorate
  modified_base 30: mod_base = OTHER; note = 2'-fluoroguanosine
  modified_base 38: mod_base = OTHER; note = 2'-Omethyladenosine phosphorothiorate
  modified_base 39: mod_base = OTHER; note = 2'-Omethyluridine phosphorothiorate
  modified_base 40: mod_base = OTHER; note = Uridine phosphorothiorate
  modified_base 41: mod_base = OTHER; note = 2'-Omethylcytosine
  modified_base 42: mod_base = OTHER; note = 2'-Omethyladenosine
  modified_base 45: mod_base = OTHER; note = 2'-Omethylguanosine phosphorothiorate
  modified_base 46: mod_base = OTHER; note = 2'-fluoroguanosine
  modified_base 47: mod_base = OTHER; note = 2'-fluorouridine
  modified_base 48: mod_base = OTHER; note = Uridine phosphorothiorate
  modified_base 49: mod_base = OTHER; note = 2'-fluorocytosine
  modified_base 51: mod_base = OTHER; note = 2'-Omethylguanosine phosphorothiorate
  modified_base 52: mod_base = OTHER; note = 2'-Omethylguanosine
  modified_base 55: mod_base = OTHER; note = Uridine phosphorothiorate
  modified_base 56: mod_base = OTHER; note = 2'-fluorocytosine phosphorothiorate
  modified_base 57: mod_base = OTHER; note = Guanosine phosphorothiorate
  modified_base 64: mod_base = OTHER; note = 2'-Omethylguanosine
  modified_base 67: mod_base = OTHER; note = 2'-Omethylguanosine
  modified_base 68: mod_base = OTHER; note = 2'-Omethylguanosine
  modified_base 70: mod_base = OTHER; note = 2'-Omethylguanosine
  modified_base 71: mod_base = OTHER; note = 2'-Omethyluridine
  modified_base 73: mod_base = OTHER; note = 2'-fluoroguanosine phosphorothiorate
  modified_base 74: mod_base = OTHER; note = 2'-fluorocytosine

SEQ ID NO: 8173 - RNA, 75 nt, synthetic construct; identical to SEQ ID NO: 1045
  source 1..75: mol_type = other RNA
  modified_base 1: mod_base = OTHER; note = 2'-Omethylguanosine phosphorothiorate
  modified_base 2: mod_base = OTHER; note = 2'-Omethylguanosine phosphorothiorate
  modified_base 18: mod_base = OTHER; note = 2'-Omethylguanosine phosphorothiorate
  modified_base 20: mod_base = OTHER; note = 2'-Omethyladenosine
  modified_base 27: mod_base = OTHER; note = 2'-Omethylcytosine
  modified_base 32: mod_base = OTHER; note = 2'-Omethylcytosine
  modified_base 46: mod_base = OTHER; note = 2'-Omethyladenosine phosphorothiorate
  modified_base 47: mod_base = OTHER; note = 2'-Omethyluridine phosphorothiorate
  modified_base 49: mod_base = OTHER; note = Cytosine phosphorothiorate
  modified_base 54: mod_base = OTHER; note = 2'-Omethyluridine phosphorothiorate
  modified_base 56: mod_base = OTHER; note = 2'-Omethylguanosine
  modified_base 72: mod_base = OTHER; note = 2'-Omethyluridine
  modified_base 73: mod_base = OTHER; note = 2'-fluorocytosine phosphorothiorate
  modified_base 74: mod_base = OTHER; note = 2'-Omethylcytosine phosphorothiorate
  modified_base 75: mod_base = OTHER; note = 2'-Omethyladenosine

SEQ ID NO: 8174 - RNA, 75 nt, synthetic construct; identical to SEQ ID NO: 3299
  source 1..75: mol_type = other RNA
  modified_base 2: mod_base = OTHER; note = Cytosine phosphorothiorate
  modified_base 12: mod_base = OTHER; note = 2'-fluorocytosine phosphorothiorate
  modified_base 21: mod_base = OTHER; note = 2'-fluoroguanosine
  modified_base 22: mod_base = OTHER; note = 2'-Omethyladenosine
  modified_base 28: mod_base = OTHER; note = 2'-fluoroadenosine
  modified_base 29: mod_base = OTHER; note = 2'-fluoroguanosine
  modified_base 30: mod_base = OTHER; note = 2'-Omethyladenosine phosphorothiorate
  modified_base 35: mod_base = OTHER; note = 2'-fluoroadenosine
  modified_base 38: mod_base = OTHER; note = 2'-fluorouridine
  modified_base 45: mod_base = OTHER; note = 2'-fluoroguanosine
  modified_base 47: mod_base = OTHER; note = 2'-Omethylcytosine
  modified_base 49: mod_base = OTHER; note = Adenosine phosphorothiorate
  modified_base 53: mod_base = OTHER; note = Uridine phosphorothiorate
  modified_base 60: mod_base = OTHER; note = 2'-fluorocytosine
  modified_base 68: mod_base = OTHER; note = 2'-fluoroadenosine phosphorothiorate
  modified_base 74: mod_base = OTHER; note = Cytosine phosphorothiorate

SEQ ID NO: 8175 - RNA, 76 nt, synthetic construct; identical to SEQ ID NO: 625
  source 1..76: mol_type = other RNA
  modified_base 13: mod_base = OTHER; note = Cytosine phosphorothiorate
  modified_base 14: mod_base = OTHER; note = 2'-fluoroadenosine phosphorothiorate
  modified_base 15: mod_base = OTHER; note = 2'-Omethyladenosine
  modified_base 18: mod_base = OTHER; note = 2'-fluoroguanosine
  modified_base 22: mod_base = OTHER; note = 2'-Omethylguanosine
  modified_base 24: mod_base = OTHER; note = 2'-fluoroguanosine
  modified_base 26: mod_base = OTHER; note = Adenosine phosphorothiorate
  modified_base 27: mod_base = OTHER; note = 2'-Omethyluridine phosphorothiorate
  modified_base 28: mod_base = OTHER; note = 2'-fluorouridine phosphorothiorate
  modified_base 31: mod_base = OTHER; note = 2'-fluoroadenosine
  modified_base 34: mod_base = OTHER; note = 2'-fluorouridine phosphorothiorate
  modified_base 39: mod_base = OTHER; note = 2'-fluorouridine
  modified_base 41: mod_base = OTHER; note = 2'-fluorocytosine
  modified_base 43: mod_base = OTHER; note = 2'-fluoroadenosine
  modified_base 44: mod_base = OTHER; note = 2'-fluoroadenosine
  modified_base 45: mod_base = OTHER; note = 2'-Omethylguanosine
  modified_base 47: mod_base = OTHER; note = 2'-Omethyluridine
  modified_base 48: mod_base = OTHER; note = 2'-fluorouridine
  modified_base 50: mod_base = OTHER; note = 2'-Omethylcytosine phosphorothiorate
  modified_base 51: mod_base = OTHER; note = 2'-Omethylguanosine
  modified_base 52: mod_base = OTHER; note = 2'-fluoroguanosine
  modified_base 54: mod_base = OTHER; note = 2'-fluorouridine
  modified_base 56: mod_base = OTHER; note = Cytosine phosphorothiorate
  modified_base 58: mod_base = OTHER; note = 2'-fluoroadenosine
  modified_base 60: mod_base = OTHER; note = 2'-Omethyluridine
  modified_base 62: mod_base = OTHER; note = Cytosine phosphorothiorate
  modified_base 63: mod_base = OTHER; note = 2'-Omethylcytosine
  modified_base 65: mod_base = OTHER; note = 2'-fluoroguanosine
  modified_base 66: mod_base = OTHER; note = 2'-fluorocytosine
  modified_base 68: mod_base = OTHER; note = 2'-fluoroguanosine
  modified_base 69: mod_base = OTHER; note = Adenosine phosphorothiorate
  modified_base 70: mod_base = OTHER; note = 2'-fluoroguanosine
  modified_base 73: mod_base = OTHER; note = 2'-Omethylguanosine phosphorothiorate
  modified_base 75: mod_base = OTHER; note = Cytosine phosphorothiorate
  modified_base 76: mod_base = OTHER; note = 2'-fluoroadenosine

SEQ ID NO: 8176 - RNA, 85 nt, synthetic construct; identical to SEQ ID NO: 3288
  source 1..85: mol_type = other RNA
  modified_base 1: mod_base = OTHER; note = 2'-Omethylcytosine phosphorothiorate
  modified_base 2: mod_base = OTHER; note = 2'-fluorocytosine phosphorothiorate
  modified_base 20: mod_base = OTHER; note = 2'-fluoroadenosine phosphorothiorate
  modified_base 26: mod_base = OTHER; note = 2'-fluorouridine
  modified_base 27: mod_base = OTHER; note = 2'-Omethyluridine phosphorothiorate
  modified_base 28: mod_base = OTHER; note = Guanosine phosphorothiorate
  modified_base 33: mod_base = OTHER; note = 2'-fluorouridine
  modified_base 44: mod_base = OTHER; note = 2'-Omethylguanosine
  modified_base 56: mod_base = OTHER; note = 2'-fluoroguanosine
  modified_base 57: mod_base = OTHER; note = 2'-fluorocytosine
  modified_base 58: mod_base = OTHER; note = 2'-Omethylguanosine
  modified_base 61: mod_base = OTHER; note = 2'-Omethylguanosine
  modified_base 71: mod_base = OTHER; note = Cytosine phosphorothiorate
  modified_base 73: mod_base = OTHER; note = 2'-fluoroadenosine phosphorothiorate
  modified_base 82: mod_base = OTHER; note = 2'-Omethyladenosine

SEQ ID NO: 8177 - RNA, 75 nt, synthetic construct; identical to SEQ ID NO: 3299
  source 1..75: mol_type = other RNA
  modified_base 1: mod_base = OTHER; note = 2'-Omethylcytosine
  modified_base 2: mod_base = OTHER; note = 2'-Omethylcytosine
  modified_base 12: mod_base = OTHER; note = 2'-fluorocytosine
  modified_base 18: mod_base = OTHER; note = 2'-Omethylguanosine phosphorothiorate
  modified_base 19: mod_base = OTHER; note = Uridine phosphorothiorate
  modified_base 20: mod_base = OTHER; note = 2'-fluoroadenosine
  modified_base 21: mod_base = OTHER; note = 2'-Omethylguanosine
  modified_base 23: mod_base = OTHER; note = 2'-fluoroguanosine phosphorothiorate
  modified_base 27: mod_base = OTHER; note = Cytosine phosphorothiorate
  modified_base 35: mod_base = OTHER; note = 2'-fluoroadenosine
  modified_base 37: mod_base = OTHER; note = 2'-fluoroadenosine phosphorothiorate
  modified_base 39: mod_base = OTHER; note = Cytosine phosphorothiorate
  modified_base 45: mod_base = OTHER; note = Guanosine phosphorothiorate
  modified_base 47: mod_base = OTHER; note = 2'-fluorocytosine
  modified_base 49: mod_base = OTHER; note = 2'-fluoroadenosine phosphorothiorate
  modified_base 54: mod_base = OTHER; note = 2'-Omethyluridine phosphorothiorate
  modified_base 60: mod_base = OTHER; note = 2'-fluorocytosine
  modified_base 63: mod_base = OTHER; note = 2'-fluorouridine
  modified_base 72: mod_base = OTHER; note = Guanosine phosphorothiorate
  modified_base 74: mod_base = OTHER; note = 2'-Omethylcytosine

SEQ ID NO: 8178 - DNA, 76 bp, synthetic construct; identical to SEQ ID NO: 1924
  source 1..76: mol_type = other DNA
  modified_base 1: mod_base = OTHER; note = 2'-Omethylguanosine phosphorothiorate
  modified_base 2: mod_base = OTHER; note = 2'-Omethylguanosine
  modified_base 13: mod_base = OTHER; note = Cytosine phosphorothiorate
  modified_base 14: mod_base = OTHER; note = Adenosine phosphorothiorate
  modified_base 17: mod_base = OTHER; note = 2'-fluoroguanosine
  modified_base 20: mod_base = OTHER; note = Uridine phosphorothiorate
  modified_base 21: mod_base = OTHER; note = 2'-Omethyladenosine
  modified_base 22: mod_base = OTHER; note = 2'-fluoroguanosine
  modified_base 23: mod_base = OTHER; note = 2'-fluorocytosine phosphorothiorate
  modified_base 27: mod_base = OTHER; note = 2'-Omethyluridine
  modified_base 29: mod_base = OTHER; note = 2'-fluoroguanosine phosphorothiorate
  modified_base 30: mod_base = OTHER; note = deoxyguanosine phosphorothiorate
  modified_base 32: mod_base = OTHER; note = 2'-Omethylcytosine
  modified_base 34: mod_base = OTHER; note = Uridine phosphorothiorate
  modified_base 37: mod_base = OTHER; note = Adenosine phosphorothiorate
  modified_base 38: mod_base = OTHER; note = 2'-fluoroadenosine
  modified_base 39: mod_base = OTHER; note = Uridine phosphorothiorate
  modified_base 41: mod_base = OTHER; note = Cytosine phosphorothiorate
  modified_base 42: mod_base = OTHER; note = 2'-Omethyladenosine
  modified_base 43: mod_base = OTHER; note = 2'-O-(2-Methoxyethyl) adenosine phosphorothiorate
  modified_base 45: mod_base = OTHER; note = 2'-fluoroguanosine
  modified_base 46: mod_base = OTHER; note = Guanosine phosphorothiorate
  modified_base 49: mod_base = OTHER; note = Cytosine phosphorothiorate
  modified_base 50: mod_base = OTHER; note = 2'-O-(2-Methoxyethyl) 5-methylcytosine
  modified_base 52: mod_base = OTHER; note = Guanosine phosphorothiorate
  modified_base 53: mod_base = OTHER; note = 2'-Omethylguanosine phosphorothiorate
  modified_base 58: mod_base = OTHER; note = Adenosine phosphorothiorate
  modified_base 59: mod_base = OTHER; note = 2'-Omethylguanosine
  modified_base 67: mod_base = OTHER; note = 2'-O-(2-Methoxyethyl) guanosine phosphorothiorate
  modified_base 68: mod_base = OTHER; note = 2'-O-(2-Methoxyethyl) guanosine phosphorothiorate
  modified_base 70: mod_base = OTHER; note = Guanosine phosphorothiorate
  modified_base 71: mod_base = OTHER; note = 2'-O-(2-Methoxyethyl) thymine
  modified_base 73: mod_base = OTHER; note = 2'-O-(2-Methoxyethyl) guanosine
  modified_base 74: mod_base = OTHER; note = Cytosine phosphorothiorate
  misc_feature 1..3: note = RNA
  misc_feature 4: note = DNA
  misc_feature 5..23: note = RNA
  misc_feature 24: note = DNA
  misc_feature 25..29: note = RNA
  misc_feature 30: note = DNA
  misc_feature 31..34: note = RNA
  misc_feature 35: note = DNA
  misc_feature 36..39: note = RNA
  misc_feature 40: note = DNA
  misc_feature 41..43: note = RNA
  misc_feature 44: note = DNA
  misc_feature 45..46: note = RNA
  misc_feature 47: note = DNA
  misc_feature 48..68: note = RNA
  misc_feature 69: note = DNA
  misc_feature 70..71: note = RNA
  misc_feature 72: note = DNA
  misc_feature 73..74: note = RNA
  misc_feature 75: note = DNA
  misc_feature 76: note = RNA

SEQ ID NO: 8179 - RNA, 76 nt, synthetic construct; identical to SEQ ID NO: 625
  source 1..76: mol_type = other RNA
  modified_base 1: mod_base = OTHER; note = 2'-fluoroguanosine
  modified_base 2: mod_base = OTHER; note = 2'-fluoroguanosine phosphorothiorate
  modified_base 3: mod_base = OTHER; note = Cytosine phosphorothiorate
  modified_base 4: mod_base = OTHER; note = 2'-Omethyluridine
  modified_base 13: mod_base = OTHER; note = 2'-fluorocytosine
  modified_base 14: mod_base = OTHER; note = 2'-Omethyladenosine
  modified_base 15: mod_base = OTHER; note = 2'-fluoroadenosine
  modified_base 16: mod_base = OTHER; note = Uridine phosphorothiorate
  modified_base 17: mod_base = OTHER; note = 2'-Omethylguanosine
  modified_base 20: mod_base = OTHER; note = 2'-Omethyluridine phosphorothiorate
  modified_base 22: mod_base = OTHER; note = Guanosine phosphorothiorate
  modified_base 25: mod_base = OTHER; note = Cytosine phosphorothiorate
  modified_base 26: mod_base = OTHER; note = 2'-Omethyladenosine
  modified_base 28: mod_base = OTHER; note = 2'-fluorouridine
  modified_base 34: mod_base = OTHER; note = 2'-Omethyluridine
  modified_base 42: mod_base = OTHER; note = 2'-fluoroadenosine
  modified_base 45: mod_base = OTHER; note = 2'-fluoroguanosine
  modified_base 46: mod_base = OTHER; note = Guanosine phosphorothiorate
  modified_base 47: mod_base = OTHER; note = 2'-Omethyluridine
  modified_base 51: mod_base = OTHER; note = 2'-Omethylguanosine
  modified_base 56: mod_base = OTHER; note = Cytosine phosphorothiorate
  modified_base 58: mod_base = OTHER; note = Adenosine phosphorothiorate
  modified_base 59: mod_base = OTHER; note = 2'-fluoroguanosine
  modified_base 61: mod_base = OTHER; note = 2'-Omethylcytosine
  modified_base 62: mod_base = OTHER; note = Cytosine phosphorothiorate
  modified_base 63: mod_base = OTHER; note = 2'-Omethylcytosine
  modified_base 64: mod_base = OTHER; note = 2'-Omethylguanosine phosphorothiorate
  modified_base 65: mod_base = OTHER; note = 2'-Omethylguanosine
  modified_base 66: mod_base = OTHER; note = 2'-fluorocytosine
  modified_base 67: mod_base = OTHER; note = 2'-fluoroguanosine
  modified_base 72: mod_base = OTHER; note = 2'-Omethylcytosine
  modified_base 73: mod_base = OTHER; note = 2'-fluoroguanosine

SEQ ID NO: 8180 - RNA, 76 nt, synthetic construct; identical to SEQ ID NO: 3615
  source 1..76: mol_type = other RNA
  modified_base 1: mod_base = OTHER; note = 2'-Omethylguanosine
  modified_base 2: mod_base = OTHER; note = 2'-Omethylguanosine
  modified_base 3: mod_base = OTHER; note = 2'-Omethylcytosine
  modified_base 4: mod_base = OTHER; note = 2'-Omethyluridine
  modified_base 5: mod_base = OTHER; note = 2'-Omethylcytosine
  modified_base 6: mod_base = OTHER; note = 2'-Omethylcytosine
  modified_base 10: mod_base = OTHER; note = 2'-Omethylguanosine
  modified_base 11: mod_base = OTHER; note = 2'-Omethylcytosine
  modified_base 12: mod_base = OTHER; note = 2'-Omethylguanosine
  modified_base 13: mod_base = OTHER; note = 2'-Omethylcytosine
  modified_base 14: mod_base = OTHER; note = 2'-Omethyladenosine
  modified_base 15: mod_base = OTHER; note = 2'-fluoroadenosine
  modified_base 16: mod_base = OTHER; note = 2'-Omethyluridine
  modified_base 17: mod_base = OTHER; note = 2'-Omethylguanosine
  modified_base 18: mod_base = OTHER; note = 2'-Omethylguanosine
  modified_base 19: mod_base = OTHER; note = 2'-fluoroadenosine
  modified_base 20: mod_base = OTHER; note = 2'-Omethyluridine
  modified_base 25: mod_base = OTHER; note = 2'-Omethylcytosine
  modified_base 33: mod_base = OTHER; note = 2'-fluorouridine
  modified_base 35: mod_base = OTHER; note = Cytosine phosphorothiorate
  modified_base 37: mod_base = OTHER; note = Adenosine phosphorothiorate
  modified_base 38: mod_base = OTHER; note = Adenosine phosphorothiorate
  modified_base 41: mod_base = OTHER; note = 2'-Omethylcytosine
  modified_base 42: mod_base = OTHER; note = 2'-Omethyladenosine
  modified_base 43: mod_base = OTHER; note = 2'-Omethyladenosine
  modified_base 44: mod_base = OTHER; note = 2'-Omethylguanosine
  modified_base 49: mod_base = OTHER; note = 2'-Omethylcytosine
  modified_base 50: mod_base = OTHER; note = 2'-Omethylcytosine
  modified_base 52: mod_base = OTHER; note = 2'-Omethylguanosine
  modified_base 54: mod_base = OTHER; note = 2'-Omethyluridine
  modified_base 55: mod_base = OTHER; note = Uridine phosphorothiorate
  modified_base 56: mod_base = OTHER; note = 2'-Omethylcytosine
  modified_base 57: mod_base = OTHER; note = 2'-fluoroguanosine
  modified_base 59: mod_base = OTHER; note = 2'-Omethylguanosine
  modified_base 61: mod_base = OTHER; note = 2'-Omethylcytosine
  modified_base 65: mod_base = OTHER; note = 2'-Omethylguanosine
  modified_base 73: mod_base = OTHER; note = 2'-Omethylguanosine

SEQ ID NO: 8181 - RNA, 74 nt, synthetic construct; identical to SEQ ID NO: 3293
  source 1..74: mol_type = other RNA
  modified_base 1: mod_base = OTHER; note = 2'-Omethyladenosine phosphorothiorate
  modified_base 8: mod_base = OTHER; note = Guanosine phosphorothiorate
  modified_base 10: mod_base = OTHER; note = 2'-fluorocytosine
  modified_base 12: mod_base = OTHER; note = Cytosine phosphorothiorate
  modified_base 21: mod_base = OTHER; note = 2'-fluorocytosine
  modified_base 28: mod_base = OTHER; note = 2'-Omethylguanosine phosphorothiorate
  modified_base 44: mod_base = OTHER; note = 2'-fluoroguanosine
  modified_base 48: mod_base = OTHER; note = 2'-Omethylcytosine phosphorothiorate
  modified_base 51: mod_base = OTHER; note = Guanosine phosphorothiorate
  modified_base 57: mod_base = OTHER; note = 2'-fluoroadenosine phosphorothiorate
  modified_base 60: mod_base = OTHER; note = 2'-fluoroadenosine
  modified_base 73: mod_base = OTHER; note = 2'-Omethylcytosine phosphorothiorate

SEQ ID NO: 8182 - RNA, 76 nt, synthetic construct; identical to SEQ ID NO: 625
  source 1..76: mol_type = other RNA
  modified_base 1: mod_base = OTHER; note = 2'-Omethylguanosine
  modified_base 2: mod_base = OTHER; note = 2'-Omethylguanosine
  modified_base 3: mod_base = OTHER; note = 2'-Omethylcytosine
  modified_base 4: mod_base = OTHER; note = 2'-Omethyluridine
  modified_base 5: mod_base = OTHER; note = 2'-Omethylcytosine
  modified_base 6: mod_base = OTHER; note = 2'-Omethylcytosine
  modified_base 10: mod_base = OTHER; note = 2'-Omethylguanosine
  modified_base 13: mod_base = OTHER; note = 2'-Omethylcytosine
  modified_base 14: mod_base = OTHER; note = 2'-Omethyladenosine
  modified_base 15: mod_base = OTHER; note = 2'-fluoroadenosine
  modified_base 16: mod_base = OTHER; note = 2'-Omethyluridine
  modified_base 17: mod_base = OTHER; note = Guanosine phosphorothiorate
  modified_base 18: mod_base = OTHER; note = 2'-Omethylguanosine
  modified_base 19: mod_base = OTHER; note = Adenosine phosphorothiorate
  modified_base 20: mod_base = OTHER; note = 2'-Omethyluridine
  modified_base 25: mod_base = OTHER; note = 2'-Omethylcytosine
  modified_base 29: mod_base = OTHER; note = 2'-Omethylguanosine
  modified_base 33: mod_base = OTHER; note = 2'-fluorouridine
  modified_base 35: mod_base = OTHER; note = Cytosine phosphorothiorate
  modified_base 37: mod_base = OTHER; note = Adenosine phosphorothiorate
  modified_base 38: mod_base = OTHER; note = Adenosine phosphorothiorate
  modified_base 40: mod_base = OTHER; note = 2'-fluorouridine
  modified_base 41: mod_base = OTHER; note = 2'-Omethylcytosine
  modified_base 42: mod_base = OTHER; note = 2'-Omethyladenosine
  modified_base 43: mod_base = OTHER; note = 2'-Omethyladenosine
  modified_base 44: mod_base = OTHER; note = 2'-fluoroadenosine
  modified_base 45: mod_base = OTHER; note = 2'-Omethylguanosine
  modified_base 46: mod_base = OTHER; note = Guanosine phosphorothiorate
  modified_base 47: mod_base = OTHER; note = Uridine phosphorothiorate
  modified_base 48: mod_base = OTHER; note = 2'-fluorouridine
  modified_base 49: mod_base = OTHER; note = 2'-Omethylcytosine
  modified_base 50: mod_base = OTHER; note = 2'-Omethylcytosine
  modified_base 52: mod_base = OTHER; note = 2'-Omethylguanosine
  modified_base 54: mod_base = OTHER; note = Uridine phosphorothiorate
  modified_base 55: mod_base = OTHER; note = Uridine phosphorothiorate
  modified_base 56: mod_base = OTHER; note = 2'-Omethylcytosine
  modified_base 57: mod_base = OTHER; note = Guanosine phosphorothiorate
  modified_base 62: mod_base = OTHER; note = 2'-Omethylcytosine
  modified_base 63: mod_base = OTHER; note = 2'-fluorocytosine
  modified_base 65: mod_base = OTHER; note = 2'-Omethylguanosine phosphorothiorate
  modified_base 71: mod_base = OTHER; note = 2'-Omethyluridine
  modified_base 73: mod_base = OTHER; note = 2'-Omethylguanosine
  modified_base 75: mod_base = OTHER; note = 2'-fluorocytosine phosphorothiorate

SEQ ID NO: 8183 - RNA, 76 nt, synthetic construct; identical to SEQ ID NO: 625
  source 1..76: mol_type = other RNA
  modified_base 1: mod_base = OTHER; note = 2'-Omethylguanosine phosphorothiorate
  modified_base 2: mod_base = OTHER; note = Guanosine phosphorothiorate
  modified_base 3: mod_base = OTHER; note = 2'-fluorocytosine
  modified_base 4: mod_base = OTHER; note = Uridine phosphorothiorate
  modified_base 5: mod_base = OTHER; note = 2'-Omethylcytosine
  modified_base 6: mod_base = OTHER; note = Cytosine phosphorothiorate
  modified_base 9: mod_base = OTHER; note = Guanosine phosphorothiorate
  modified_base 10: mod_base = OTHER; note = 2'-Omethylguanosine
  modified_base 11: mod_base = OTHER; note = 2'-fluorocytosine phosphorothiorate
  modified_base 12: mod_base = OTHER; note = 2'-fluoroguanosine
  modified_base 14: mod_base = OTHER; note = Adenosine phosphorothiorate
  modified_base 16: mod_base = OTHER; note = 2'-Omethyluridine
  modified_base 18: mod_base = OTHER; note = Guanosine phosphorothiorate
  modified_base 22: mod_base = OTHER; note = 2'-Omethylguanosine
  modified_base 23: mod_base = OTHER; note = Cytosine phosphorothiorate
  modified_base 24: mod_base = OTHER; note = 2'-Omethylguanosine
  modified_base 25: mod_base = OTHER; note = 2'-fluorocytosine
  modified_base 26: mod_base = OTHER; note = 2'-Omethyladenosine
  modified_base 28: mod_base = OTHER; note = Uridine phosphorothiorate
  modified_base 33: mod_base = OTHER; note = 2'-fluorouridine
  modified_base 38: mod_base = OTHER; note = 2'-Omethyladenosine phosphorothiorate
  modified_base 40: mod_base = OTHER; note = Uridine phosphorothiorate
  modified_base 43: mod_base = OTHER; note = Adenosine phosphorothiorate
  modified_base 44: mod_base = OTHER; note = 2'-Omethyladenosine
  modified_base 45: mod_base = OTHER; note = Guanosine phosphorothiorate
  modified_base 47: mod_base = OTHER; note = 2'-Omethyluridine
  modified_base 48: mod_base = OTHER; note = 2'-fluorouridine
  modified_base 49: mod_base = OTHER; note = 2'-fluorocytosine phosphorothiorate
  modified_base 50: mod_base = OTHER; note = 2'-fluorocytosine
  modified_base 54: mod_base = OTHER; note = 2'-fluorouridine phosphorothiorate
  modified_base 56: mod_base = OTHER; note = 2'-Omethylcytosine
  modified_base 64: mod_base = OTHER; note = 2'-Omethylguanosine
  modified_base 65: mod_base = OTHER; note = 2'-Omethylguanosine
  modified_base 66: mod_base = OTHER; note = Cytosine phosphorothiorate
  modified_base 67: mod_base = OTHER; note = 2'-Omethylguanosine phosphorothiorate
  modified_base 68: mod_base = OTHER; note = 2'-fluoroguanosine
  modified_base 73: mod_base = OTHER; note = 2'-Omethylguanosine
  modified_base 74: mod_base = OTHER; note = 2'-fluorocytosine
  modified_base 75: mod_base = OTHER; note = 2'-Omethylcytosine

SEQ ID NO: 8184 - RNA, 76 nt, synthetic construct; identical to SEQ ID NO: 625
  source 1..76: mol_type = other RNA
  modified_base 1: mod_base = OTHER; note = 2'-Omethylguanosine
  modified_base 3: mod_base = OTHER; note = 2'-Omethylcytosine
  modified_base 10: mod_base = OTHER; note = 2'-Omethylguanosine
  modified_base 13: mod_base = OTHER; note = 2'-Omethylcytosine
  modified_base 17: mod_base = OTHER; note = Guanosine phosphorothiorate
  modified_base 18: mod_base = OTHER; note = 2'-Omethylguanosine
  modified_base 19: mod_base = OTHER; note = Adenosine phosphorothiorate
  modified_base 20: mod_base = OTHER; note = 2'-Omethyluridine
  modified_base 25: mod_base = OTHER; note = 2'-Omethylcytosine
  modified_base 29: mod_base = OTHER; note = 2'-Omethylguanosine
  modified_base 33: mod_base = OTHER; note = 2'-fluorouridine
  modified_base 35: mod_base = OTHER; note = Cytosine phosphorothiorate
  modified_base 37: mod_base = OTHER; note = Adenosine phosphorothiorate
  modified_base 38: mod_base = OTHER; note = Adenosine phosphorothiorate
  modified_base 41: mod_base = OTHER; note = 2'-fluorocytosine phosphorothiorate
  modified_base 43: mod_base = OTHER; note = 2'-Omethyladenosine
  modified_base 44: mod_base = OTHER; note = 2'-fluoroadenosine
  modified_base 50: mod_base = OTHER; note = 2'-Omethylcytosine
  modified_base 52: mod_base = OTHER; note = 2'-Omethylguanosine
  modified_base 54: mod_base = OTHER; note = Uridine phosphorothiorate
  modified_base 55: mod_base = OTHER; note = Uridine phosphorothiorate
  modified_base 56: mod_base = OTHER; note = 2'-Omethylcytosine
  modified_base 57: mod_base = OTHER; note = Guanosine phosphorothiorate
  modified_base 62: mod_base = OTHER; note = 2'-Omethylcytosine
  modified_base 63: mod_base = OTHER; note = 2'-fluorocytosine
  modified_base 65: mod_base = OTHER; note = 2'-Omethylguanosine
  modified_base 71: mod_base = OTHER; note = 2'-Omethyluridine
  modified_base 73: mod_base = OTHER; note = 2'-Omethylguanosine

SEQ ID NO: 8185 - RNA, 85 nt, synthetic construct; identical to SEQ ID NO: 3288
  source 1..85: mol_type = other RNA
  modified_base 1: mod_base = OTHER; note = 2'-Omethylcytosine phosphorothiorate
  modified_base 26: mod_base = OTHER; note = 2'-fluorouridine
  modified_base 30: mod_base = OTHER; note = 2'-fluoroadenosine
  modified_base 34: mod_base = OTHER; note = 2'-fluorocytosine
  modified_base 44: mod_base = OTHER; note = Guanosine phosphorothiorate
  modified_base 45: mod_base = OTHER; note = Guanosine phosphorothiorate
  modified_base 56: mod_base = OTHER; note = Guanosine phosphorothiorate
  modified_base 83: mod_base = OTHER; note = Cytosine phosphorothiorate
  modified_base 84: mod_base = OTHER; note = 2'-Omethylcytosine

SEQ ID NO: 8186 - RNA, 76 nt, synthetic construct; identical to SEQ ID NO: 625
  source 1..76: mol_type = other RNA
  modified_base 1: mod_base = OTHER; note = 2'-Omethylguanosine phosphorothiorate
  modified_base 2: mod_base = OTHER; note = 2'-Omethylguanosine
  modified_base 3: mod_base = OTHER; note = 2'-Omethylcytosine
  modified_base 4: mod_base = OTHER; note = 2'-Omethyluridine
  modified_base 5: mod_base = OTHER; note = 2'-Omethylcytosine
  modified_base 6: mod_base = OTHER; note = 2'-Omethylcytosine
  modified_base 14: mod_base = OTHER; note = 2'-Omethyladenosine
  modified_base 15: mod_base = OTHER; note = 2'-fluoroadenosine
  modified_base 16: mod_base = OTHER; note = 2'-Omethyluridine
  modified_base 17: mod_base = OTHER; note = 2'-Omethylguanosine
  modified_base 18: mod_base = OTHER; note = 2'-Omethylguanosine
  modified_base 19: mod_base = OTHER; note = 2'-fluoroadenosine
  modified_base 20: mod_base = OTHER; note = 2'-Omethyluridine
  modified_base 21: mod_base = OTHER; note = 2'-fluoroadenosine
  modified_base 25: mod_base = OTHER; note = 2'-Omethylcytosine
  modified_base 33: mod_base = OTHER; note = 2'-fluorouridine
  modified_base 35: mod_base = OTHER; note = Cytosine phosphorothiorate
  modified_base 37: mod_base = OTHER; note = Adenosine phosphorothiorate
  modified_base 38: mod_base = OTHER; note = Adenosine phosphorothiorate
  modified_base 49: mod_base = OTHER; note = 2'-Omethylcytosine
  modified_base 50: mod_base = OTHER; note = 2'-Omethylcytosine
  modified_base 51: mod_base = OTHER; note = 2'-Omethylguanosine
  modified_base 52: mod_base = OTHER; note = 2'-fluoroguanosine
  modified_base 53: mod_base = OTHER; note = 2'-Omethylguanosine
  modified_base 56: mod_base = OTHER; note = 2'-Omethylcytosine
  modified_base 61: mod_base = OTHER; note = 2'-Omethylcytosine
  modified_base 62: mod_base = OTHER; note = 2'-Omethylcytosine
  modified_base 63: mod_base = OTHER; note = 2'-fluorocytosine
  modified_base 64: mod_base = OTHER; note = 2'-Omethylguanosine
  modified_base 65: mod_base = OTHER; note = 2'-Omethylguanosine
  modified_base 66: mod_base = OTHER; note = 2'-Omethylcytosine
  modified_base 67: mod_base = OTHER; note = 2'-Omethylguanosine
  modified_base 68: mod_base = OTHER; note = 2'-Omethylguanosine
  modified_base 69: mod_base = OTHER; note = 2'-Omethyladenosine
  modified_base 73: mod_base = OTHER; note = 2'-Omethylguanosine
  modified_base 75: mod_base = OTHER; note = 2'-fluorocytosine phosphorothiorate

SEQ ID NO: 8187 - RNA, 86 nt, synthetic construct; identical to SEQ ID NO: 3290
  source 1..86: mol_type = other RNA
  modified_base 74: mod_base = OTHER; note = Adenosine phosphorothiorate

SEQ ID NO: 8188 - RNA, 85 nt, synthetic construct; identical to SEQ ID NO: 3297
  source 1..85: mol_type = other RNA
  modified_base 1: mod_base = OTHER; note = 2'-Omethylguanosine
  modified_base 4: mod_base = OTHER; note = 2'-Omethylguanosine
  modified_base 13: mod_base = OTHER; note = 2'-Omethylguanosine
  modified_base 17: mod_base = OTHER; note = 2'-Omethylguanosine
  modified_base 18: mod_base = OTHER; note = 2'-Omethylguanosine
  modified_base 20: mod_base = OTHER; note = 2'-Omethyluridine
  modified_base 25: mod_base = OTHER; note = 2'-Omethylcytosine
  modified_base 29: mod_base = OTHER; note = 2'-Omethylguanosine
  modified_base 30: mod_base = OTHER; note = 2'-Omethylguanosine
  modified_base 58: mod_base = OTHER; note = 2'-Omethylguanosine
  modified_base 59: mod_base = OTHER; note = 2'-Omethylcytosine
  modified_base 61: mod_base = OTHER; note = 2'-Omethylguanosine
  modified_base 65: mod_base = OTHER; note = 2'-Omethylcytosine
  modified_base 68: mod_base = OTHER; note = 2'-Omethyladenosine
  modified_base 74: mod_base = OTHER; note = 2'-Omethylcytosine
  modified_base 78: mod_base = OTHER; note = 2'-Omethylcytosine
  modified_base 80: mod_base = OTHER; note = 2'-Omethylguanosine
  modified_base 81: mod_base = OTHER; note = 2'-Omethylcytosine
  modified_base 82: mod_base = OTHER; note = 2'-Omethylguanosine

SEQ ID NO: 8189 - RNA, 76 nt, synthetic construct; identical to SEQ ID NO: 625
  source 1..76: mol_type = other RNA
  modified_base 4: mod_base = OTHER; note = 2'-fluorouridine
  modified_base 6: mod_base = OTHER; note = 2'-Omethylcytosine
  modified_base 10: mod_base = OTHER; note = 2'-fluoroguanosine phosphorothiorate
  modified_base 11: mod_base = OTHER; note = 2'-fluorocytosine phosphorothiorate
  modified_base 12: mod_base = OTHER; note = 2'-Omethylguanosine phosphorothiorate
  modified_base 13: mod_base = OTHER; note = 2'-fluorocytosine
  modified_base 15: mod_base = OTHER; note = 2'-Omethyladenosine
  modified_base 17: mod_base = OTHER; note = 2'-Omethylguanosine
  modified_base 20: mod_base = OTHER; note = 2'-fluorouridine
  modified_base 23: mod_base = OTHER; note = 2'-fluorocytosine
  modified_base 26: mod_base = OTHER; note = Adenosine phosphorothiorate
  modified_base 28: mod_base = OTHER; note = Uridine phosphorothiorate
  modified_base 29: mod_base = OTHER; note = 2'-fluoroguanosine
  modified_base 30: mod_base = OTHER; note = 2'-fluoroguanosine phosphorothiorate
  modified_base 31: mod_base = OTHER; note = 2'-Omethyladenosine
  modified_base 33: mod_base = OTHER; note = 2'-fluorouridine
  modified_base 34: mod_base = OTHER; note = 2'-fluorouridine
  modified_base 38: mod_base = OTHER; note = 2'-fluoroadenosine
  modified_base 39: mod_base = OTHER; note = Uridine phosphorothiorate
  modified_base 40: mod_base = OTHER; note = 2'-Omethyluridine
  modified_base 41: mod_base = OTHER; note = 2'-fluorocytosine
  modified_base 42: mod_base = OTHER; note = 2'-fluoroadenosine phosphorothiorate
  modified_base 43: mod_base = OTHER; note = 2'-Omethyladenosine
  modified_base 49: mod_base = OTHER; note = 2'-fluorocytosine phosphorothiorate
  modified_base 54: mod_base = OTHER; note = 2'-Omethyluridine
  modified_base 57: mod_base = OTHER; note = 2'-Omethylguanosine
  modified_base 62: mod_base = OTHER; note = 2'-Omethylcytosine
  modified_base 65: mod_base = OTHER; note = 2'-Omethylguanosine
  modified_base 69: mod_base = OTHER; note = 2'-Omethyladenosine
  modified_base 70: mod_base = OTHER; note = 2'-fluoroguanosine
  modified_base 73: mod_base = OTHER; note = 2'-fluoroguanosine
  modified_base 74: mod_base = OTHER; note = 2'-fluorocytosine
  modified_base 75: mod_base = OTHER; note = 2'-Omethylcytosine phosphorothiorate

SEQ ID NO: 8190 - RNA, 76 nt, synthetic construct; identical to SEQ ID NO: 625
  source 1..76: mol_type = other RNA
  modified_base 2: mod_base = OTHER; note = 2'-Omethylguanosine
  modified_base 3: mod_base = OTHER; note = 2'-Omethylcytosine phosphorothiorate
  modified_base 4: mod_base = OTHER; note = 2'-fluorouridine
  modified_base 5: mod_base = OTHER; note = 2'-fluorocytosine
  modified_base 8: mod_base = OTHER; note = Uridine phosphorothiorate
  modified_base 11: mod_base = OTHER; note = 2'-Omethylcytosine
  modified_base 13: mod_base = OTHER; note = 2'-fluorocytosine
  modified_base 14: mod_base = OTHER; note = 2'-Omethyladenosine
  modified_base 15: mod_base = OTHER; note = 2'-fluoroadenosine phosphorothiorate
  modified_base 16: mod_base = OTHER; note = 2'-Omethyluridine
  modified_base 17: mod_base = OTHER; note = 2'-Omethylguanosine
  modified_base 18: mod_base = OTHER; note = 2'-fluoroguanosine
  modified_base 20: mod_base = OTHER; note = Uridine phosphorothiorate
  modified_base 22: mod_base = OTHER; note = Guanosine phosphorothiorate
  modified_base 23: mod_base = OTHER; note = 2'-Omethylcytosine
  modified_base 28: mod_base = OTHER; note = 2'-Omethyluridine phosphorothiorate
  modified_base 29: mod_base = OTHER; note = 2'-fluoroguanosine
  modified_base 30: mod_base = OTHER; note = 2'-fluoroguanosine
  modified_base 33: mod_base = OTHER; note = Uridine phosphorothiorate
  modified_base 38: mod_base = OTHER; note = 2'-Omethyladenosine
  modified_base 40: mod_base = OTHER; note = Uridine phosphorothiorate
  modified_base 41: mod_base = OTHER; note = 2'-fluorocytosine
  modified_base 42: mod_base = OTHER; note = 2'-fluoroadenosine
  modified_base 48: mod_base = OTHER; note = 2'-Omethyluridine
  modified_base 52: mod_base = OTHER; note = 2'-fluoroguanosine
  modified_base 56: mod_base = OTHER; note = Cytosine phosphorothiorate
  modified_base 58: mod_base = OTHER; note = 2'-fluoroadenosine
  modified_base 59: mod_base = OTHER; note = 2'-fluoroguanosine
  modified_base 60: mod_base = OTHER; note = Uridine phosphorothiorate
  modified_base 61: mod_base = OTHER; note = 2'-fluorocytosine
  modified_base 62: mod_base = OTHER; note = 2'-Omethylcytosine
  modified_base 65: mod_base = OTHER; note = 2'-Omethylguanosine
  modified_base 67: mod_base = OTHER; note = Guanosine phosphorothiorate
  modified_base 68: mod_base = OTHER; note = 2'-Omethylguanosine
  modified_base 69: mod_base = OTHER; note = Adenosine phosphorothiorate
  modified_base 70: mod_base = OTHER; note = 2'-fluoroguanosine phosphorothiorate
  modified_base 71: mod_base = OTHER; note = 2'-Omethyluridine
  modified_base 74: mod_base = OTHER; note = 2'-Omethylcytosine
  modified_base 76: mod_base = OTHER; note = 2'-Omethyladenosine

SEQ ID NO: 8191 - RNA, 76 nt, synthetic construct; identical to SEQ ID NO: 625
  source 1..76: mol_type = other RNA
  modified_base 1: mod_base = OTHER; note = 2'-Omethylguanosine
  modified_base 10: mod_base = OTHER; note = 2'-Omethylguanosine
  modified_base 13: mod_base = OTHER; note = 2'-Omethylcytosine
  modified_base 17: mod_base = OTHER; note = Guanosine phosphorothiorate
  modified_base 18: mod_base = OTHER; note = 2'-Omethylguanosine
  modified_base 19: mod_base = OTHER; note = Adenosine phosphorothiorate
  modified_base 20: mod_base = OTHER; note = 2'-Omethyluridine
  modified_base 25: mod_base = OTHER; note = 2'-Omethylcytosine
  modified_base 29: mod_base = OTHER; note = 2'-Omethylguanosine
  modified_base 33: mod_base = OTHER; note = 2'-fluorouridine
  modified_base 35: mod_base = OTHER; note = Cytosine phosphorothiorate
  modified_base 37: mod_base = OTHER; note = Adenosine phosphorothiorate
  modified_base 38: mod_base = OTHER; note = Adenosine phosphorothiorate
  modified_base 43: mod_base = OTHER; note = 2'-Omethyladenosine
  modified_base 44: mod_base = OTHER; note = 2'-Omethyladenosine
  modified_base 46: mod_base = OTHER; note = Guanosine phosphorothiorate
  modified_base 50: mod_base = OTHER; note = 2'-Omethylcytosine
  modified_base 52: mod_base = OTHER; note = 2'-Omethylguanosine
  modified_base 54: mod_base = OTHER; note = Uridine phosphorothiorate
  modified_base 55: mod_base = OTHER; note = Uridine phosphorothiorate
  modified_base 56: mod_base = OTHER; note = 2'-Omethylcytosine
  modified_base 57: mod_base = OTHER; note = Guanosine phosphorothiorate
  modified_base 62: mod_base = OTHER; note = 2'-Omethylcytosine
  modified_base 63: mod_base = OTHER; note = 2'-fluorocytosine
  modified_base 65: mod_base = OTHER; note = 2'-Omethylguanosine
  modified_base 71: mod_base = OTHER; note = 2'-Omethyluridine
  modified_base 73: mod_base = OTHER; note = 2'-Omethylguanosine

SEQ ID NO: 8192 - RNA, 76 nt, synthetic construct; identical to SEQ ID NO: 625
  source 1..76: mol_type = other RNA
  modified_base 1: mod_base = OTHER; note = 2'-Omethylguanosine phosphorothiorate
  modified_base 2: mod_base = OTHER; note = 2'-Omethylguanosine
  modified_base 17: mod_base = OTHER; note = 2'-fluoroguanosine phosphorothiorate
  modified_base 25: mod_base = OTHER; note = 2'-Omethylcytosine
  modified_base 33: mod_base = OTHER; note = 2'-fluorouridine
  modified_base 35: mod_base = OTHER; note = Cytosine phosphorothiorate
  modified_base 37: mod_base = OTHER; note = Adenosine phosphorothiorate
  modified_base 38: mod_base = OTHER; note = Adenosine phosphorothiorate
  modified_base 52: mod_base = OTHER; note = 2'-fluoroguanosine
  modified_base 56: mod_base = OTHER; note = 2'-Omethylcytosine
  modified_base 62: mod_base = OTHER; note = 2'-Omethylcytosine
  modified_base 73: mod_base = OTHER; note = 2'-Omethylguanosine
  modified_base 75: mod_base = OTHER; note = 2'-fluorocytosine phosphorothiorate

SEQ ID NO: 8193 - RNA, 76 nt, synthetic construct; identical to SEQ ID NO: 625
  source 1..76: mol_type = other RNA
  modified_base 1: mod_base = OTHER; note = 2'-Omethylguanosine
  modified_base 3: mod_base = OTHER; note = 2'-Omethylcytosine
  modified_base 10: mod_base = OTHER; note = 2'-Omethylguanosine
  modified_base 13: mod_base = OTHER; note = 2'-Omethylcytosine
  modified_base 17: mod_base = OTHER; note = Guanosine phosphorothiorate
  modified_base 18: mod_base = OTHER; note = 2'-Omethylguanosine
  modified_base 19: mod_base = OTHER; note = Adenosine phosphorothiorate
  modified_base 20: mod_base = OTHER; note = 2'-Omethyluridine
  modified_base 25: mod_base = OTHER; note = 2'-Omethylcytosine
  modified_base 29: mod_base = OTHER; note = 2'-Omethylguanosine
  modified_base 33: mod_base = OTHER; note = 2'-fluorouridine
  modified_base 35: mod_base = OTHER; note = Cytosine phosphorothiorate
  modified_base 37: mod_base = OTHER; note = Adenosine phosphorothiorate
  modified_base 38: mod_base = OTHER; note = Adenosine phosphorothiorate
  modified_base 43: mod_base = OTHER; note = 2'-Omethyladenosine
  modified_base 44: mod_base = OTHER; note = 2'-fluoroadenosine
  modified_base 46: mod_base = OTHER; note = Guanosine phosphorothiorate
  modified_base 50: mod_base = OTHER; note = 2'-Omethylcytosine
  modified_base 52: mod_base = OTHER; note = 2'-Omethylguanosine
  modified_base 54: mod_base = OTHER; note = Uridine phosphorothiorate
  modified_base 55: mod_base = OTHER; note = Uridine phosphorothiorate
  modified_base 56: mod_base = OTHER; note = 2'-Omethylcytosine
  modified_base 57: mod_base = OTHER; note = Guanosine phosphorothiorate
  modified_base 62: mod_base = OTHER; note = 2'-Omethylcytosine
  modified_base 63: mod_base = OTHER; note = 2'-fluorocytosine
  modified_base 65: mod_base = OTHER; note = 2'-Omethylguanosine
  modified_base 71: mod_base = OTHER; note = 2'-Omethyluridine
  modified_base 73: mod_base = OTHER; note = 2'-Omethylguanosine

SEQ ID NO: 8194 - RNA, 75 nt, synthetic construct; identical to SEQ ID NO: 3311
  source 1..75: mol_type = other RNA
  modified_base 1: mod_base = OTHER; note = 2'-fluoroguanosine
  modified_base 3: mod_base = OTHER; note = Uridine phosphorothiorate
  modified_base 12: mod_base = OTHER; note = 2'-fluoroguanosine
  modified_base 14: mod_base = OTHER; note = 2'-fluoroadenosine
  modified_base 21: mod_base = OTHER; note = Adenosine phosphorothiorate
  modified_base 22: mod_base = OTHER; note = 2'-fluoroguanosine
  modified_base 29: mod_base = OTHER; note = 2'-fluoroguanosine
  modified_base 45: mod_base = OTHER; note = 2'-fluoroguanosine
  modified_base 55: mod_base = OTHER; note = 2'-Omethylcytosine
  modified_base 59: mod_base = OTHER; note = Uridine phosphorothiorate
  modified_base 64: mod_base = OTHER; note = Guanosine phosphorothiorate
  modified_base 66: mod_base = OTHER; note = Guanosine phosphorothiorate
  modified_base 68: mod_base = OTHER; note = Adenosine phosphorothiorate
  modified_base 72: mod_base = OTHER; note = Uridine phosphorothiorate
  modified_base 73: mod_base = OTHER; note = Cytosine phosphorothiorate
  modified_base 74: mod_base = OTHER; note = 2'-fluorocytosine phosphorothiorate

SEQ ID NO: 8195 - RNA, 76 nt, synthetic construct; identical to SEQ ID NO: 625
  source 1..76: mol_type = other RNA
  modified_base 49: mod_base = OTHER; note = Cytosine phosphorothiorate
  modified_base 50: mod_base = OTHER; note = Cytosine phosphorothiorate
  modified_base 51: mod_base = OTHER; note = Guanosine phosphorothiorate
  modified_base 52: mod_base = OTHER; note = Guanosine phosphorothiorate
  modified_base 53: mod_base = OTHER; note = Guanosine phosphorothiorate
  modified_base 61: mod_base = OTHER; note = Cytosine phosphorothiorate
  modified_base 62: mod_base = OTHER; note = Cytosine phosphorothiorate
  modified_base 63: mod_base = OTHER; note = Cytosine phosphorothiorate
  modified_base 64: mod_base = OTHER; note = Guanosine phosphorothiorate
  modified_base 65: mod_base = OTHER; note = Guanosine phosphorothiorate

SEQ ID NO: 8196 - RNA, 76 nt, synthetic construct; identical to SEQ ID NO: 625
  source 1..76: mol_type = other RNA
  modified_base 1: mod_base = OTHER; note = 2'-Omethylguanosine
  modified_base 2: mod_base = OTHER; note = 2'-Omethylguanosine
  modified_base 18: mod_base = OTHER; note = 2'-Omethylguanosine
  modified_base 33: mod_base = OTHER; note = 2'-fluorouridine
  modified_base 35: mod_base = OTHER; note = Cytosine phosphorothiorate
  modified_base 37: mod_base = OTHER; note = Adenosine phosphorothiorate
  modified_base 38: mod_base = OTHER; note = Adenosine phosphorothiorate
  modified_base 52: mod_base = OTHER; note = 2'-Omethylguanosine
  modified_base 57: mod_base = OTHER; note = 2'-Omethylguanosine
  modified_base 62: mod_base = OTHER; note = 2'-Omethylcytosine
  modified_base 68: mod_base = OTHER; note = 2'-Omethylguanosine
  modified_base 73: mod_base = OTHER; note = 2'-Omethylguanosine
  modified_base 75: mod_base = OTHER; note = 2'-fluorocytosine phosphorothiorate

SEQ ID NO: 8197 - RNA, 76 nt, synthetic construct; identical to SEQ ID NO: 625
  source 1..76: mol_type = other RNA
  modified_base 1: mod_base = OTHER; note = 2'-Omethylguanosine phosphorothiorate
  modified_base 2: mod_base = OTHER; note = 2'-Omethylguanosine
  modified_base 12: mod_base = OTHER; note = 2'-Omethylguanosine
  modified_base 13: mod_base = OTHER; note = 2'-Omethylcytosine
  modified_base 33: mod_base = OTHER; note = 2'-fluorouridine
  modified_base 35: mod_base = OTHER; note = Cytosine phosphorothiorate
  modified_base 37: mod_base = OTHER; note = Adenosine phosphorothiorate
  modified_base 52: mod_base = OTHER; note = 2'-Omethylguanosine
  modified_base 54: mod_base = OTHER; note = 2'-Omethyluridine
  modified_base 62: mod_base = OTHER; note = 2'-Omethylcytosine
  modified_base 73: mod_base = OTHER; note = 2'-Omethylguanosine
  modified_base 75: mod_base = OTHER; note = 2'-fluorocytosine phosphorothiorate

SEQ ID NO: 8198 - RNA, 76 nt, synthetic construct; identical to SEQ ID NO: 3419
  source 1..76: mol_type = other RNA
  modified_base 1: mod_base = OTHER; note = 2'-Omethylguanosine phosphorothiorate
  modified_base 2: mod_base = OTHER; note = 2'-Omethylguanosine phosphorothiorate
  modified_base 13: mod_base = OTHER; note = 2'-fluorocytosine
  modified_base 14: mod_base = OTHER; note = 2'-fluoroadenosine
  modified_base 54: mod_base = OTHER; note = 2'-fluorouridine
  modified_base 59: mod_base = OTHER; note = 2'-Omethylguanosine
  modified_base 75: mod_base = OTHER; note = Cytosine phosphorothiorate
  modified_base 76: mod_base = OTHER; note = 2'-Omethyladenosine

SEQ ID NO: 8199 - RNA, 86 nt, synthetic construct; identical to SEQ ID NO: 3290
  source 1..86: mol_type = other RNA
  modified_base 18: mod_base = OTHER; note = 2'-Omethylguanosine
  modified_base 83: mod_base = OTHER; note = 2'-Omethyladenosine

SEQ ID NO: 8200 - RNA, 85 nt, synthetic construct; identical to SEQ ID NO: 3288
  source 1..85: mol_type = other RNA
  modified_base 1: mod_base = OTHER; note = 2'-Omethylcytosine
  modified_base 9: mod_base = OTHER; note = Guanosine phosphorothiorate
  modified_base 15: mod_base = OTHER; note = 2'-Omethyluridine
  modified_base 30: mod_base = OTHER; note = 2'-fluoroadenosine
  modified_base 36: mod_base = OTHER; note = 2'-fluoroguanosine
  modified_base 44: mod_base = OTHER; note = Guanosine phosphorothiorate
  modified_base 45: mod_base = OTHER; note = Guanosine phosphorothiorate
  modified_base 48: mod_base = OTHER; note = 2'-Omethyladenosine
  modified_base 51: mod_base = OTHER; note = 2'-Omethyluridine
  modified_base 55: mod_base = OTHER; note = Cytosine phosphorothiorate
  modified_base 57: mod_base = OTHER; note = 2'-Omethylcytosine
  modified_base 64: mod_base = OTHER; note = Uridine phosphorothiorate
  modified_base 68: mod_base = OTHER; note = 2'-Omethyladenosine
  modified_base 72: mod_base = OTHER; note = Cytosine phosphorothiorate
  modified_base 83: mod_base = OTHER; note = Cytosine phosphorothiorate
  modified_base 84: mod_base = OTHER; note = 2'-Omethylcytosine

SEQ ID NO: 8201 - RNA, 85 nt, synthetic construct; identical to SEQ ID NO: 3310
  source 1..85: mol_type = other RNA
  modified_base 1: mod_base = OTHER; note = 2'-Omethylcytosine
  modified_base 9: mod_base = OTHER; note = Guanosine phosphorothiorate
  modified_base 26: mod_base = OTHER; note = 2'-fluorouridine
  modified_base 28: mod_base = OTHER; note = 2'-fluoroguanosine
  modified_base 38: mod_base = OTHER; note = Uridine phosphorothiorate
  modified_base 41: mod_base = OTHER; note = Adenosine phosphorothiorate
  modified_base 47: mod_base = OTHER; note = 2'-Omethylcytosine
  modified_base 73: mod_base = OTHER; note = Adenosine phosphorothiorate
  modified_base 84: mod_base = OTHER; note = Cytosine phosphorothiorate
  modified_base 85: mod_base = OTHER; note = 2'-Omethyladenosine

SEQ ID NO: 8202 - RNA, 76 nt, synthetic construct; identical to SEQ ID NO: 625
  source 1..76: mol_type = other RNA
  modified_base 2: mod_base = OTHER; note = 2'-Omethylguanosine
  modified_base 5: mod_base = OTHER; note = 2'-fluorocytosine phosphorothiorate
  modified_base 8: mod_base = OTHER; note = Uridine phosphorothiorate
  modified_base 11: mod_base = OTHER; note = 2'-Omethylcytosine
  modified_base 12: mod_base = OTHER; note = 2'-fluoroguanosine
  modified_base 14: mod_base = OTHER; note = Adenosine phosphorothiorate
  modified_base 18: mod_base = OTHER; note = Guanosine phosphorothiorate
  modified_base 20: mod_base = OTHER; note = 2'-Omethyluridine
  modified_base 21: mod_base = OTHER; note = Adenosine phosphorothiorate
  modified_base 22: mod_base = OTHER; note = 2'-Omethylguanosine
  modified_base 24: mod_base = OTHER; note = Guanosine phosphorothiorate
  modified_base 25: mod_base = OTHER; note = 2'-Omethylcytosine
  modified_base 26: mod_base = OTHER; note = 2'-Omethyladenosine
  modified_base 28: mod_base = OTHER; note = 2'-fluorouridine
  modified_base 29: mod_base = OTHER; note = 2'-Omethylguanosine
  modified_base 31: mod_base = OTHER; note = 2'-Omethyladenosine
  modified_base 34: mod_base = OTHER; note = 2'-Omethyluridine
  modified_base 39: mod_base = OTHER; note = Uridine phosphorothiorate
  modified_base 40: mod_base = OTHER; note = 2'-fluorouridine
  modified_base 42: mod_base = OTHER; note = 2'-Omethyladenosine
  modified_base 43: mod_base = OTHER; note = 2'-Omethyladenosine
  modified_base 44: mod_base = OTHER; note = Adenosine phosphorothiorate
  modified_base 45: mod_base = OTHER; note = 2'-fluoroguanosine
  modified_base 48: mod_base = OTHER; note = Uridine phosphorothiorate
  modified_base 49: mod_base = OTHER; note = 2'-fluorocytosine
  modified_base 50: mod_base = OTHER; note = 2'-fluorocytosine
  modified_base 51: mod_base = OTHER; note = 2'-Omethylguanosine
  modified_base 54: mod_base = OTHER; note = 2'-Omethyluridine phosphorothiorate
  modified_base 55: mod_base = OTHER; note = Uridine phosphorothiorate
  modified_base 58: mod_base = OTHER; note = 2'-fluoroadenosine
  modified_base 60: mod_base = OTHER; note = Uridine phosphorothiorate
  modified_base 61: mod_base = OTHER; note = 2'-fluorocytosine
  modified_base 63: mod_base = OTHER; note = 2'-fluorocytosine
  modified_base 64: mod_base = OTHER; note = 2'-fluoroguanosine
  modified_base 67: mod_base = OTHER; note = Guanosine phosphorothiorate
  modified_base 70: mod_base = OTHER; note = 2'-Omethylguanosine
  modified_base 73: mod_base = OTHER; note = 2'-fluoroguanosine
  modified_base 74: mod_base = OTHER; note = 2'-fluorocytosine
  modified_base 75: mod_base = OTHER; note = 2'-Omethylcytosine

SEQ ID NO: 8203 - RNA, 73 nt, synthetic construct; identical to SEQ ID NO: 935
  source 1..73: mol_type = other RNA
  modified_base 1: mod_base = OTHER; note = 2'-Omethylguanosine phosphorothiorate
  modified_base 2: mod_base = OTHER; note = 2'-Omethylguanosine phosphorothiorate
  modified_base 22: mod_base = OTHER; note = Guanosine phosphorothiorate
  modified_base 23: mod_base = OTHER; note = 2'-Omethylcytosine
  modified_base 66: mod_base = OTHER; note = Cytosine phosphorothiorate
  modified_base 67: mod_base = OTHER; note = 2'-Omethylguanosine

SEQ ID NO: 8204 - RNA, 76 nt, synthetic construct; identical to SEQ ID NO: 3318
  source 1..76: mol_type = other RNA
  modified_base 1: mod_base = OTHER; note = 2'-Omethylcytosine phosphorothiorate
  modified_base 2: mod_base = OTHER; note = 2'-Omethylcytosine phosphorothiorate
  modified_base 10: mod_base = OTHER; note = 2'-Omethylguanosine
  modified_base 13: mod_base = OTHER; note = 2'-Omethylcytosine
  modified_base 16: mod_base = OTHER; note = Uridine phosphorothiorate
  modified_base 18: mod_base = OTHER; note = Guanosine phosphorothiorate
  modified_base 19: mod_base = OTHER; note = 2'-Omethylguanosine phosphorothiorate
  modified_base 20: mod_base = OTHER; note = Uridine phosphorothiorate
  modified_base 25: mod_base = OTHER; note = 2'-Omethylcytosine
  modified_base 29: mod_base = OTHER; note = 2'-Omethylguanosine
  modified_base 33: mod_base = OTHER; note = 2'-fluorouridine
  modified_base 35: mod_base = OTHER; note = Uridine phosphorothiorate
  modified_base 37: mod_base = OTHER; note = Guanosine phosphorothiorate
  modified_base 38: mod_base = OTHER; note = Adenosine phosphorothiorate
  modified_base 41: mod_base = OTHER; note = 2'-fluorocytosine
  modified_base 42: mod_base = OTHER; note = Uridine phosphorothiorate
  modified_base 43: mod_base = OTHER; note = 2'-Omethyluridine
  modified_base 44: mod_base = OTHER; note = 2'-fluoroadenosine
  modified_base 46: mod_base = OTHER; note = Guanosine phosphorothiorate
  modified_base 50: mod_base = OTHER; note = 2'-Omethylcytosine
  modified_base 52: mod_base = OTHER; note = 2'-Omethylguanosine
  modified_base 54: mod_base = OTHER; note = Uridine phosphorothiorate
  modified_base 55: mod_base = OTHER; note = Uridine phosphorothiorate
  modified_base 56: mod_base = OTHER; note = 2'-Omethylcytosine
  modified_base 57: mod_base = OTHER; note = Guanosine phosphorothiorate
  modified_base 62: mod_base = OTHER; note = 2'-Omethylcytosine
  modified_base 63: mod_base = OTHER; note = 2'-fluoroguanosine
  modified_base 65: mod_base = OTHER; note = 2'-Omethylcytosine
  modified_base 71: mod_base = OTHER; note = 2'-Omethylguanosine
  modified_base 73: mod_base = OTHER; note = 2'-Omethyladenosine

SEQ ID NO: 8205 - RNA, 86 nt, synthetic construct; identical to SEQ ID NO: 3290
  source 1..86: mol_type = other RNA
  modified_base 1: mod_base = OTHER; note = 2'-Omethyladenosine
  modified_base 2: mod_base = OTHER; note = 2'-Omethylcytosine
  modified_base 3: mod_base = OTHER; note = 2'-Omethylcytosine
  modified_base 4: mod_base = OTHER; note = 2'-Omethyladenosine
  modified_base 5: mod_base = OTHER; note = 2'-Omethylguanosine
  modified_base 6: mod_base = OTHER; note = 2'-Omethylguanosine
  modified_base 13: mod_base = OTHER; note = 2'-Omethylguanosine
  modified_base 14: mod_base = OTHER; note = 2'-Omethyladenosine
  modified_base 15: mod_base = OTHER; note = 2'-Omethylguanosine
  modified_base 16: mod_base = OTHER; note = 2'-Omethyluridine
  modified_base 17: mod_base = OTHER; note = 2'-Omethylguanosine
  modified_base 18: mod_base = OTHER; note = 2'-Omethylguanosine
  modified_base 19: mod_base = OTHER; note = Uridine phosphorothiorate
  modified_base 20: mod_base = OTHER; note = 2'-Omethyluridine
  modified_base 21: mod_base = OTHER; note = Adenosine phosphorothiorate
  modified_base 25: mod_base = OTHER; note = 2'-Omethylcytosine
  modified_base 33: mod_base = OTHER; note = 2'-fluorouridine
  modified_base 34: mod_base = OTHER; note = 2'-Omethyluridine
  modified_base 35: mod_base = OTHER; note = Cytosine phosphorothiorate
  modified_base 37: mod_base = OTHER; note = Guanosine phosphorothiorate
  modified_base 38: mod_base = OTHER; note = Adenosine phosphorothiorate
  modified_base 59: mod_base = OTHER; note = 2'-Omethylguanosine
  modified_base 60: mod_base = OTHER; note = 2'-Omethyluridine
  modified_base 61: mod_base = OTHER; note = 2'-Omethylguanosine
  modified_base 62: mod_base = OTHER; note = 2'-Omethylguanosine
  modified_base 63: mod_base = OTHER; note = 2'-Omethylguanosine
  modified_base 64: mod_base = OTHER; note = Uridine phosphorothiorate
  modified_base 65: mod_base = OTHER; note = Uridine phosphorothiorate
  modified_base 71: mod_base = OTHER; note = 2'-Omethylcytosine
  modified_base 75: mod_base = OTHER; note = 2'-Omethylcytosine
  modified_base 83: mod_base = OTHER; note = 2'-Omethyladenosine

SEQ ID NO: 8206 - RNA, 76 nt, synthetic construct; identical to SEQ ID NO: 3318
  source 1..76: mol_type = other RNA
  modified_base 1: mod_base = OTHER; note = 2'-Omethylcytosine
  modified_base 2: mod_base = OTHER; note = 2'-Omethylcytosine
  modified_base 3: mod_base = OTHER; note = 2'-Omethyluridine
  modified_base 4: mod_base = OTHER; note = 2'-Omethyluridine
  modified_base 5: mod_base = OTHER; note = 2'-Omethylcytosine
  modified_base 6: mod_base = OTHER; note = 2'-Omethylguanosine
  modified_base 66: mod_base = OTHER; note = 2'-Omethyluridine
  modified_base 67: mod_base = OTHER; note = 2'-Omethylcytosine
  modified_base 68: mod_base = OTHER; note = 2'-Omethylguanosine
  modified_base 73: mod_base = OTHER; note = 2'-Omethyladenosine

SEQ ID NO: 8207 - RNA, 76 nt, synthetic construct; identical to SEQ ID NO: 625
  source 1..76: mol_type = other RNA
  modified_base 1: mod_base = OTHER; note = 2'-Omethylguanosine phosphorothiorate
  modified_base 2: mod_base = OTHER; note = 2'-Omethylguanosine
  modified_base 3: mod_base = OTHER; note = 2'-Omethylcytosine
  modified_base 4: mod_base = OTHER; note = 2'-Omethyluridine
  modified_base 5: mod_base = OTHER; note = 2'-Omethylcytosine
  modified_base 6: mod_base = OTHER; note = 2'-Omethylcytosine
  modified_base 17: mod_base = OTHER; note = 2'-Omethylguanosine
  modified_base 25: mod_base = OTHER; note = 2'-Omethylcytosine
  modified_base 33: mod_base = OTHER; note = 2'-fluorouridine
  modified_base 35: mod_base = OTHER; note = Cytosine phosphorothiorate
  modified_base 37: mod_base = OTHER; note = Adenosine phosphorothiorate
  modified_base 38: mod_base = OTHER; note = Adenosine phosphorothiorate
  modified_base 49: mod_base = OTHER; note = 2'-Omethylcytosine
  modified_base 50: mod_base = OTHER; note = 2'-Omethylcytosine
  modified_base 51: mod_base = OTHER; note = 2'-Omethylguanosine
  modified_base 52: mod_base = OTHER; note = 2'-Omethylguanosine
  modified_base 53: mod_base = OTHER; note = 2'-Omethylguanosine
  modified_base 56: mod_base = OTHER; note = 2'-Omethylcytosine
  modified_base 61: mod_base = OTHER; note = 2'-Omethylcytosine
  modified_base 62: mod_base = OTHER; note = 2'-Omethylcytosine
  modified_base 63: mod_base = OTHER; note = 2'-fluorocytosine
  modified_base 64: mod_base = OTHER; note = 2'-Omethylguanosine
  modified_base 65: mod_base = OTHER; note = 2'-Omethylguanosine
  modified_base 66: mod_base = OTHER; note = 2'-Omethylcytosine
  modified_base 67: mod_base = OTHER; note = 2'-Omethylguanosine
  modified_base 68: mod_base = OTHER; note = 2'-Omethylguanosine
  modified_base 69: mod_base = OTHER; note = 2'-fluoroadenosine
  modified_base 71: mod_base = OTHER; note = 2'-Omethyluridine
  modified_base 73: mod_base = OTHER; note = 2'-Omethylguanosine
  modified_base 74: mod_base = OTHER; note = 2'-Omethylcytosine phosphorothiorate
  modified_base 75: mod_base = OTHER; note = 2'-fluorocytosine phosphorothiorate

SEQ ID NO: 8208 - RNA, 76 nt, synthetic construct; identical to SEQ ID NO: 625
  source 1..76: mol_type = other RNA
  modified_base 1: mod_base = OTHER; note = 2'-Omethylguanosine
  modified_base 2: mod_base = OTHER; note = 2'-Omethylguanosine
  modified_base 3: mod_base = OTHER; note = 2'-Omethylcytosine
  modified_base 4: mod_base = OTHER; note = 2'-Omethyluridine
  modified_base 5: mod_base = OTHER; note = 2'-Omethylcytosine
  modified_base 6: mod_base = OTHER; note = 2'-Omethylcytosine
  modified_base 10: mod_base = OTHER; note = 2'-Omethylguanosine
  modified_base 11: mod_base = OTHER; note = 2'-Omethylcytosine
  modified_base 12: mod_base = OTHER; note = 2'-Omethylguanosine
  modified_base 13: mod_base = OTHER; note = 2'-Omethylcytosine
  modified_base 17: mod_base = OTHER; note = 2'-Omethylguanosine
  modified_base 22: mod_base = OTHER; note = 2'-Omethylguanosine
  modified_base 23: mod_base = OTHER; note = 2'-Omethylcytosine
  modified_base 24: mod_base = OTHER; note = 2'-Omethylguanosine
  modified_base 25: mod_base = OTHER; note = 2'-Omethylcytosine
  modified_base 33: mod_base = OTHER; note = 2'-fluorouridine
  modified_base 35: mod_base = OTHER; note = Cytosine phosphorothiorate
  modified_base 37: mod_base = OTHER; note = Adenosine phosphorothiorate
  modified_base 38: mod_base = OTHER; note = Adenosine phosphorothiorate
  modified_base 49: mod_base = OTHER; note = 2'-Omethylcytosine
  modified_base 50: mod_base = OTHER; note = 2'-Omethylcytosine
  modified_base 51: mod_base = OTHER; note = 2'-Omethylguanosine
  modified_base 52: mod_base = OTHER; note = 2'-Omethylguanosine
  modified_base 53: mod_base = OTHER; note = 2'-Omethylguanosine
  modified_base 61: mod_base = OTHER; note = 2'-Omethylcytosine
  modified_base 62: mod_base = OTHER; note = 2'-Omethylcytosine
  modified_base 63: mod_base = OTHER; note = 2'-fluorocytosine
  modified_base 64: mod_base = OTHER; note = 2'-Omethylguanosine
  modified_base 65: mod_base = OTHER; note = 2'-Omethylguanosine
  modified_base 66: mod_base = OTHER; note = 2'-Omethylcytosine
  modified_base 67: mod_base = OTHER; note = 2'-Omethylguanosine
  modified_base 68: mod_base = OTHER; note = 2'-Omethylguanosine
  modified_base 69: mod_base = OTHER; note = 2'-fluoroadenosine
  modified_base 71: mod_base = OTHER; note = 2'-Omethyluridine
  modified_base 73: mod_base = OTHER; note = 2'-Omethylguanosine
  modified_base 75: mod_base = OTHER; note = 2'-fluorocytosine phosphorothiorate

SEQ ID NO: 8209 - RNA, 85 nt, synthetic construct; identical to SEQ ID NO: 3297
  source 1..85: mol_type = other RNA
  modified_base 1: mod_base = OTHER; note = 2'-Omethylguanosine phosphorothiorate
  modified_base 3: mod_base = OTHER; note = 2'-Omethyluridine
  modified_base 5: mod_base = OTHER; note = 2'-Omethyluridine
  modified_base 35: mod_base = OTHER; note = 2'-fluorocytosine phosphorothiorate
  modified_base 47: mod_base = OTHER; note = 2'-Omethylguanosine
  modified_base 83: mod_base = OTHER; note = 2'-Omethylcytosine phosphorothiorate

SEQ ID NO: 8210 - RNA, 76 nt, synthetic construct; identical to SEQ ID NO: 625
  source 1..76: mol_type = other RNA
  modified_base 1: mod_base = OTHER; note = 2'-Omethylguanosine
  modified_base 10: mod_base = OTHER; note = 2'-Omethylguanosine
  modified_base 13: mod_base = OTHER; note = 2'-Omethylcytosine
  modified_base 17: mod_base = OTHER; note = 2'-Omethylguanosine
  modified_base 18: mod_base = OTHER; note = 2'-Omethylguanosine
  modified_base 19: mod_base = OTHER; note = Adenosine phosphorothiorate
  modified_base 20: mod_base = OTHER; note = 2'-Omethyluridine
  modified_base 25: mod_base = OTHER; note = 2'-Omethylcytosine
  modified_base 29: mod_base = OTHER; note = 2'-Omethylguanosine
  modified_base 33: mod_base = OTHER; note = 2'-fluorouridine
  modified_base 35: mod_base = OTHER; note = Cytosine phosphorothiorate
  modified_base 37: mod_base = OTHER; note = Adenosine phosphorothiorate
  modified_base 38: mod_base = OTHER; note = Adenosine phosphorothiorate
  modified_base 41: mod_base = OTHER; note = 2'-Omethylcytosine
  modified_base 43: mod_base = OTHER; note = 2'-Omethyladenosine
  modified_base 44: mod_base = OTHER; note = 2'-fluoroadenosine
  modified_base 46: mod_base = OTHER; note = Guanosine phosphorothiorate
  modified_base 50: mod_base = OTHER; note = 2'-Omethylcytosine
  modified_base 52: mod_base = OTHER; note = 2'-Omethylguanosine
  modified_base 54: mod_base = OTHER; note = Uridine phosphorothiorate
  modified_base 55: mod_base = OTHER; note = Uridine phosphorothiorate
  modified_base 56: mod_base = OTHER; note = 2'-Omethylcytosine
  modified_base 57: mod_base = OTHER; note = Guanosine phosphorothiorate
  modified_base 62: mod_base = OTHER; note = 2'-Omethylcytosine
  modified_base 63: mod_base = OTHER; note = 2'-fluorocytosine
  modified_base 65: mod_base = OTHER; note = 2'-Omethylguanosine
  modified_base 71: mod_base = OTHER; note = 2'-Omethyluridine
  modified_base 73: mod_base = OTHER; note = 2'-Omethylguanosine

SEQ ID NO: 8211 - RNA, 85 nt, synthetic construct; identical to SEQ ID NO: 3288
  source 1..85: mol_type = other RNA
  modified_base 1: mod_base = OTHER; note = Cytosine phosphorothiorate
  modified_base 3: mod_base = OTHER; note = 2'-fluoroadenosine
  modified_base 13: mod_base = OTHER; note = 2'-Omethyladenosine
  modified_base 20: mod_base = OTHER; note = Adenosine phosphorothiorate
  modified_base 27: mod_base = OTHER; note = 2'-fluorouridine
  modified_base 29: mod_base = OTHER; note = 2'-fluoroguanosine
  modified_base 33: mod_base = OTHER; note = Uridine phosphorothiorate
  modified_base 40: mod_base = OTHER; note = Cytosine phosphorothiorate
  modified_base 47: mod_base = OTHER; note = Cytosine phosphorothiorate
  modified_base 51: mod_base = OTHER; note = 2'-Omethyluridine
  modified_base 53: mod_base = OTHER; note = Uridine phosphorothiorate
  modified_base 55: mod_base = OTHER; note = 2'-Omethylcytosine
  modified_base 56: mod_base = OTHER; note = 2'-Omethylguanosine phosphorothiorate
  modified_base 57: mod_base = OTHER; note = 2'-Omethylcytosine
  modified_base 62: mod_base = OTHER; note = 2'-fluoroguanosine phosphorothiorate
  modified_base 76: mod_base = OTHER; note = Cytosine phosphorothiorate
  modified_base 84: mod_base = OTHER; note = Cytosine phosphorothiorate

SEQ ID NO: 8212 - RNA, 76 nt, synthetic construct; identical to SEQ ID NO: 625
  source 1..76: mol_type = other RNA
  modified_base 1: mod_base = OTHER; note = 2'-Omethylguanosine
  modified_base 2: mod_base = OTHER; note = 2'-Omethylguanosine
  modified_base 3: mod_base = OTHER; note = 2'-Omethylcytosine
  modified_base 4: mod_base = OTHER; note = 2'-Omethyluridine
  modified_base 5: mod_base = OTHER; note = 2'-Omethylcytosine
  modified_base 6: mod_base = OTHER; note = 2'-Omethylcytosine
  modified_base 10: mod_base = OTHER; note = 2'-Omethylguanosine
  modified_base 13: mod_base = OTHER; note = 2'-Omethylcytosine
  modified_base 14: mod_base = OTHER; note = 2'-Omethyladenosine
  modified_base 16: mod_base = OTHER; note = 2'-Omethyluridine
  modified_base 17: mod_base = OTHER; note = 2'-Omethylguanosine
  modified_base 18: mod_base = OTHER; note = 2'-Omethylguanosine
  modified_base 19: mod_base = OTHER; note = 2'-fluoroadenosine phosphorothiorate
  modified_base 21: mod_base = OTHER; note = 2'-fluoroadenosine phosphorothiorate
  modified_base 23: mod_base = OTHER; note = 2'-Omethylcytosine
  modified_base 24: mod_base = OTHER; note = 2'-Omethylguanosine phosphorothiorate
  modified_base 25: mod_base = OTHER; note = 2'-Omethylcytosine
  modified_base 26: mod_base = OTHER; note = Adenosine phosphorothiorate
  modified_base 29: mod_base = OTHER; note = 2'-Omethylguanosine
  modified_base 30: mod_base = OTHER; note = 2'-Omethylguanosine phosphorothiorate
  modified_base 31: mod_base = OTHER; note = 2'-Omethyladenosine phosphorothiorate
  modified_base 33: mod_base = OTHER; note = 2'-fluorouridine
  modified_base 35: mod_base = OTHER; note = Cytosine phosphorothiorate
  modified_base 37: mod_base = OTHER; note = Adenosine phosphorothiorate
  modified_base 38: mod_base = OTHER; note = Adenosine phosphorothiorate
  modified_base 40: mod_base = OTHER; note = 2'-Omethyluridine
  modified_base 41: mod_base = OTHER; note = 2'-fluorocytosine
  modified_base 44: mod_base = OTHER; note = 2'-Omethyladenosine
  modified_base 45: mod_base = OTHER; note = 2'-Omethylguanosine phosphorothiorate
  modified_base 47: mod_base = OTHER; note = Uridine phosphorothiorate
  modified_base 49: mod_base = OTHER; note = 2'-Omethylcytosine
  modified_base 50: mod_base = OTHER; note = 2'-Omethylcytosine
  modified_base 52: mod_base = OTHER; note = 2'-Omethylguanosine
  modified_base 53: mod_base = OTHER; note = 2'-fluoroguanosine
  modified_base 55: mod_base = OTHER; note = Uridine phosphorothiorate
  modified_base 56: mod_base = OTHER; note = Cytosine phosphorothiorate
  modified_base 59: mod_base = OTHER; note = 2'-Omethylguanosine
  modified_base 60: mod_base = OTHER; note = 2'-Omethyluridine phosphorothiorate
  modified_base 61: mod_base = OTHER; note = 2'-Omethylcytosine
  modified_base 62: mod_base = OTHER; note = 2'-Omethylcytosine
  modified_base 63: mod_base = OTHER; note = 2'-Omethylcytosine phosphorothiorate
  modified_base 64: mod_base = OTHER; note = 2'-Omethylguanosine
  modified_base 65: mod_base = OTHER; note = 2'-Omethylguanosine phosphorothiorate
  modified_base 66: mod_base = OTHER; note = 2'-fluorocytosine
  modified_base 67: mod_base = OTHER; note = 2'-fluoroguanosine
  modified_base 68: mod_base = OTHER; note = 2'-Omethylguanosine
  modified_base 69: mod_base = OTHER; note = 2'-Omethyladenosine phosphorothiorate
  modified_base 71: mod_base = OTHER; note = 2'-Omethyluridine phosphorothiorate
  modified_base 73: mod_base = OTHER; note = 2'-Omethylguanosine
  modified_base 74: mod_base = OTHER; note = 2'-fluorocytosine
  modified_base 75: mod_base = OTHER; note = 2'-Omethylcytosine phosphorothiorate
  modified_base 76: mod_base = OTHER; note = 2'-Omethyladenosine

SEQ ID NO: 8213 - RNA, 75 nt, synthetic construct; identical to SEQ ID NO: 3299
  source 1..75: mol_type = other RNA
  modified_base 5: mod_base = OTHER; note = 2'-fluoroguanosine phosphorothiorate
  modified_base 21: mod_base = OTHER; note = 2'-fluoroguanosine
  modified_base 24: mod_base = OTHER; note = 2'-fluorocytosine
  modified_base 25: mod_base = OTHER; note = 2'-fluoroadenosine
  modified_base 39: mod_base = OTHER; note = 2'-Omethylcytosine
  modified_base 47: mod_base = OTHER; note = Cytosine phosphorothiorate
  modified_base 74: mod_base = OTHER; note = 2'-Omethylcytosine phosphorothiorate

SEQ ID NO: 8214 - RNA, 76 nt, synthetic construct; identical to SEQ ID NO: 625
  source 1..76: mol_type = other RNA
  modified_base 1: mod_base = OTHER; note = 2'-Omethylguanosine phosphorothiorate
  modified_base 2: mod_base = OTHER; note = 2'-Omethylguanosine
  modified_base 3: mod_base = OTHER; note = 2'-Omethylcytosine
  modified_base 4: mod_base = OTHER; note = 2'-Omethyluridine
  modified_base 5: mod_base = OTHER; note = 2'-Omethylcytosine
  modified_base 6: mod_base = OTHER; note = 2'-Omethylcytosine
  modified_base 10: mod_base = OTHER; note = 2'-Omethylguanosine
  modified_base 11: mod_base = OTHER; note = 2'-Omethylcytosine
  modified_base 12: mod_base = OTHER; note = 2'-Omethylguanosine
  modified_base 13: mod_base = OTHER; note = 2'-Omethylcytosine
  modified_base 17: mod_base = OTHER; note = 2'-Omethylguanosine
  modified_base 22: mod_base = OTHER; note = 2'-Omethylguanosine
  modified_base 23: mod_base = OTHER; note = 2'-Omethylcytosine
  modified_base 24: mod_base = OTHER; note = 2'-Omethylguanosine
  modified_base 25: mod_base = OTHER; note = 2'-Omethylcytosine
  modified_base 33: mod_base = OTHER; note = 2'-fluorouridine
  modified_base 35: mod_base = OTHER; note = Cytosine phosphorothiorate
  modified_base 37: mod_base = OTHER; note = Adenosine phosphorothiorate
  modified_base 38: mod_base = OTHER; note = Adenosine phosphorothiorate
  modified_base 40: mod_base = OTHER; note = 2'-fluorouridine
  modified_base 41: mod_base = OTHER; note = 2'-Omethylcytosine
  modified_base 42: mod_base = OTHER; note = 2'-Omethyladenosine
  modified_base 43: mod_base = OTHER; note = 2'-Omethyladenosine
  modified_base 52: mod_base = OTHER; note = 2'-Omethylguanosine
  modified_base 56: mod_base = OTHER; note = 2'-Omethylcytosine
  modified_base 57: mod_base = OTHER; note = 2'-Omethylguanosine
  modified_base 62: mod_base = OTHER; note = 2'-Omethylcytosine
  modified_base 68: mod_base = OTHER; note = 2'-Omethylguanosine
  modified_base 73: mod_base = OTHER; note = 2'-Omethylguanosine
  modified_base 75: mod_base = OTHER; note = 2'-fluorocytosine phosphorothiorate

SEQ ID NO: 8215 - RNA, 76 nt, synthetic construct; identical to SEQ ID NO: 3295
  source 1..76: mol_type = other RNA
  modified_base 1: mod_base = OTHER; note = 2'-Omethylcytosine
  modified_base 2: mod_base = OTHER; note = 2'-Omethylcytosine phosphorothiorate
  modified_base 3: mod_base = OTHER; note = 2'-Omethyluridine
  modified_base 4: mod_base = OTHER; note = 2'-fluorouridine phosphorothiorate
  modified_base 5: mod_base = OTHER; note = 2'-fluorocytosine phosphorothiorate
  modified_base 12: mod_base = OTHER; note = 2'-fluorouridine phosphorothiorate
  modified_base 13: mod_base = OTHER; note = 2'-fluorocytosine phosphorothiorate
  modified_base 17: mod_base = OTHER; note = 2'-fluorouridine
  modified_base 20: mod_base = OTHER; note = 2'-Omethyluridine
  modified_base 24: mod_base = OTHER; note = 2'-Omethylguanosine phosphorothiorate
  modified_base 25: mod_base = OTHER; note = 2'-Omethylcytosine phosphorothiorate
  modified_base 37: mod_base = OTHER; note = 2'-fluoroguanosine
  modified_base 40: mod_base = OTHER; note = 2'-fluorocytosine phosphorothiorate
  modified_base 41: mod_base = OTHER; note = 2'-fluorocytosine phosphorothiorate
  modified_base 45: mod_base = OTHER; note = 2'-fluoroguanosine phosphorothiorate
  modified_base 49: mod_base = OTHER; note = 2'-fluoroguanosine phosphorothiorate
  modified_base 52: mod_base = OTHER; note = 2'-fluoroguanosine
  modified_base 53: mod_base = OTHER; note = 2'-Omethylguanosine
  modified_base 60: mod_base = OTHER; note = 2'-Omethyluridine phosphorothiorate
  modified_base 75: mod_base = OTHER; note = 2'-Omethylcytosine phosphorothiorate
  modified_base 76: mod_base = OTHER; note = 2'-fluoroadenosine

SEQ ID NO: 8216 - RNA, 76 nt, synthetic construct; identical to SEQ ID NO: 625
  source 1..76: mol_type = other RNA
  modified_base 1: mod_base = OTHER; note = 2'-Omethylguanosine phosphorothiorate
  modified_base 2: mod_base = OTHER; note = 2'-Omethylguanosine
  modified_base 3: mod_base = OTHER; note = 2'-Omethylcytosine
  modified_base 4: mod_base = OTHER; note = 2'-Omethyluridine
  modified_base 5: mod_base = OTHER; note = 2'-Omethylcytosine
  modified_base 6: mod_base = OTHER; note = 2'-Omethylcytosine
  modified_base 10: mod_base = OTHER; note = 2'-Omethylguanosine
  modified_base 11: mod_base = OTHER; note = 2'-Omethylcytosine
  modified_base 12: mod_base = OTHER; note = 2'-Omethylguanosine
  modified_base 13: mod_base = OTHER; note = 2'-Omethylcytosine
  modified_base 16: mod_base = OTHER; note = 2'-Omethyluridine
  modified_base 17: mod_base = OTHER; note = 2'-Omethylguanosine
  modified_base 18: mod_base = OTHER; note = 2'-Omethylguanosine
  modified_base 22: mod_base = OTHER; note = 2'-Omethylguanosine
  modified_base 23: mod_base = OTHER; note = 2'-Omethylcytosine
  modified_base 24: mod_base = OTHER; note = 2'-Omethylguanosine
  modified_base 25: mod_base = OTHER; note = 2'-Omethylcytosine
  modified_base 54: mod_base = OTHER; note = 2'-Omethyluridine phosphorothiorate
  modified_base 56: mod_base = OTHER; note = 2'-Omethylcytosine
  modified_base 57: mod_base = OTHER; note = 2'-fluoroguanosine
  modified_base 59: mod_base = OTHER; note = 2'-Omethylguanosine
  modified_base 73: mod_base = OTHER; note = 2'-Omethylguanosine

SEQ ID NO: 8217 - RNA, 86 nt, synthetic construct; identical to SEQ ID NO: 3290
  source 1..86: mol_type = other RNA
  modified_base 1: mod_base = OTHER; note = 2'-Omethyladenosine phosphorothiorate
  modified_base 2: mod_base = OTHER; note = 2'-Omethylcytosine phosphorothiorate
  modified_base 14: mod_base = OTHER; note = Adenosine phosphorothiorate
  modified_base 20: mod_base = OTHER; note = Uridine phosphorothiorate
  modified_base 21: mod_base = OTHER; note = 2'-fluoroadenosine
  modified_base 84: mod_base = OTHER; note = Cytosine phosphorothiorate
  modified_base 85: mod_base = OTHER; note = 2'-Omethylcytosine phosphorothiorate
  modified_base 86: mod_base = OTHER; note = 2'-Omethyladenosine

SEQ ID NO: 8218 - RNA, 85 nt, synthetic construct; identical to SEQ ID NO: 3288
  source 1..85: mol_type = other RNA
  modified_base 1: mod_base = OTHER; note = 2'-Omethylcytosine
  modified_base 11: mod_base = OTHER; note = Cytosine phosphorothiorate
  modified_base 37: mod_base = OTHER; note = 2'-fluoroadenosine
  modified_base 44: mod_base = OTHER; note = 2'-Omethylguanosine
  modified_base 50: mod_base = OTHER; note = Adenosine phosphorothiorate
  modified_base 54: mod_base = OTHER; note = 2'-fluorocytosine
  modified_base 72: mod_base = OTHER; note = 2'-fluorocytosine

SEQ ID NO: 8219 - RNA, 76 nt, synthetic construct; identical to SEQ ID NO: 3289
  source 1..76: mol_type = other RNA
  modified_base 52: mod_base = OTHER; note = 2'-Omethylguanosine
  modified_base 65: mod_base = OTHER; note = 2'-Omethylguanosine

SEQ ID NO: 8220 - DNA, 74 bp, synthetic construct; identical to SEQ ID NO: 3384
  source 1..74: mol_type = other DNA
  modified_base 1: mod_base = OTHER; note = 2'-Omethylguanosine phosphorothiorate
  modified_base 2: mod_base = OTHER; note = 2'-Omethylguanosine
  modified_base 12: mod_base = OTHER; note = Guanosine phosphorothiorate
  modified_base 13: mod_base = OTHER; note = 2'-fluorocytosine
  modified_base 25: mod_base = OTHER; note = Cytosine phosphorothiorate
  modified_base 44: mod_base = OTHER; note = Adenosine phosphorothiorate
  modified_base 45: mod_base = OTHER; note = 2'-O-(2-Methoxyethyl) guanosine
  modified_base 51: mod_base = OTHER; note = Guanosine phosphorothiorate
  modified_base 72: mod_base = OTHER; note = 2'-Omethylcytosine
  modified_base 73: mod_base = OTHER; note = 2'-Omethylguanosine
  misc_feature 1..51: note = RNA
  misc_feature 52: note = DNA
  misc_feature 53..74: note = RNA

SEQ ID NO: 8221 - RNA, 76 nt, synthetic construct; identical to SEQ ID NO: 625
  source 1..76: mol_type = other RNA
  modified_base 1: mod_base = OTHER; note = 2'-Omethylguanosine phosphorothiorate
  modified_base 2: mod_base = OTHER; note = 2'-Omethylguanosine
  modified_base 3: mod_base = OTHER; note = 2'-Omethylcytosine
  modified_base 4: mod_base = OTHER; note = 2'-Omethyluridine
  modified_base 5: mod_base = OTHER; note = 2'-Omethylcytosine
  modified_base 6: mod_base = OTHER; note = 2'-Omethylcytosine
  modified_base 13: mod_base = OTHER; note = 2'-Omethylcytosine
  modified_base 17: mod_base = OTHER; note = 2'-Omethylguanosine
  modified_base 33: mod_base = OTHER; note = 2'-fluorouridine
  modified_base 35: mod_base = OTHER; note = Cytosine phosphorothiorate
  modified_base 37: mod_base = OTHER; note = Adenosine phosphorothiorate
  modified_base 38: mod_base = OTHER; note = Adenosine phosphorothiorate
  modified_base 48: mod_base = OTHER; note = 2'-fluorouridine
  modified_base 49: mod_base = OTHER; note = 2'-Omethylcytosine
  modified_base 50: mod_base = OTHER; note = 2'-Omethylcytosine
  modified_base 51: mod_base = OTHER; note = 2'-Omethylguanosine
  modified_base 52: mod_base = OTHER; note = 2'-Omethylguanosine
  modified_base 53: mod_base = OTHER; note = 2'-Omethylguanosine
  modified_base 54: mod_base = OTHER; note = 2'-Omethyluridine
  modified_base 56: mod_base = OTHER; note = 2'-Omethylcytosine
  modified_base 57: mod_base = OTHER; note = 2'-Omethylguanosine
  modified_base 61: mod_base = OTHER; note = 2'-Omethylcytosine
  modified_base 62: mod_base = OTHER; note = 2'-Omethylcytosine
  modified_base 63: mod_base = OTHER; note = 2'-fluorocytosine
  modified_base 64: mod_base = OTHER; note = 2'-Omethylguanosine
  modified_base 65: mod_base = OTHER; note = 2'-Omethylguanosine
  modified_base 66: mod_base = OTHER; note = 2'-Omethylcytosine
  modified_base 67: mod_base = OTHER; note = 2'-Omethylguanosine
  modified_base 68: mod_base = OTHER; note = 2'-Omethylguanosine
  modified_base 73: mod_base = OTHER; note = 2'-Omethylguanosine
  modified_base 75: mod_base = OTHER; note = 2'-fluorocytosine phosphorothiorate

SEQ ID NO: 8222 - RNA, 76 nt, synthetic construct; identical to SEQ ID NO: 3419
  source 1..76: mol_type = other RNA
  modified_base 1: mod_base = OTHER; note = 2'-Omethylguanosine
  modified_base 2: mod_base = OTHER; note = 2'-Omethylguanosine
  modified_base 3: mod_base = OTHER; note = 2'-Omethylcytosine
  modified_base 4: mod_base = OTHER; note = 2'-Omethyluridine
  modified_base 5: mod_base = OTHER; note = 2'-Omethylcytosine
  modified_base 6: mod_base = OTHER; note = 2'-Omethylcytosine
  modified_base 14: mod_base = OTHER; note = 2'-Omethyladenosine
  modified_base 15: mod_base = OTHER; note = 2'-Omethyladenosine
  modified_base 16: mod_base = OTHER; note = 2'-Omethyluridine
  modified_base 17: mod_base = OTHER; note = 2'-Omethylguanosine
  modified_base 18: mod_base = OTHER; note = 2'-Omethylguanosine
  modified_base 20: mod_base = OTHER; note = 2'-Omethyluridine
  modified_base 25: mod_base = OTHER; note = 2'-Omethylcytosine
  modified_base 33: mod_base = OTHER; note = 2'-fluorouridine
  modified_base 35: mod_base = OTHER; note = Cytosine phosphorothiorate
  modified_base 37: mod_base = OTHER; note = Adenosine phosphorothiorate
  modified_base 38: mod_base = OTHER; note = Adenosine phosphorothiorate
  modified_base 41: mod_base = OTHER; note = 2'-fluoroguanosine
  modified_base 42: mod_base = OTHER; note = 2'-Omethylguanosine
  modified_base 43: mod_base = OTHER; note = 2'-Omethyluridine
  modified_base 44: mod_base = OTHER; note = 2'-fluoroadenosine
  modified_base 49: mod_base = OTHER; note = 2'-Omethylcytosine
  modified_base 50: mod_base = OTHER; note = 2'-Omethylcytosine
  modified_base 52: mod_base = OTHER; note = 2'-Omethylguanosine
  modified_base 54: mod_base = OTHER; note = 2'-Omethyluridine
  modified_base 55: mod_base = OTHER; note = Uridine phosphorothiorate
  modified_base 56: mod_base = OTHER; note = 2'-Omethylcytosine
  modified_base 57: mod_base = OTHER; note = 2'-fluoroguanosine
  modified_base 59: mod_base = OTHER; note = 2'-Omethylguanosine
  modified_base 61: mod_base = OTHER; note = 2'-Omethylcytosine
  modified_base 62: mod_base = OTHER; note = 2'-Omethylcytosine
  modified_base 63: mod_base = OTHER; note = 2'-fluorocytosine
  modified_base 64: mod_base = OTHER; note = 2'-Omethylguanosine
  modified_base 65: mod_base = OTHER; note = 2'-Omethylguanosine
  modified_base 73: mod_base = OTHER; note = 2'-Omethylguanosine

SEQ ID NO: 8223 - RNA, 85 nt, synthetic construct; identical to SEQ ID NO: 3297
  source 1..85: mol_type = other RNA
  modified_base 10: mod_base = OTHER; note = 2'-Omethylguanosine
  modified_base 11: mod_base = OTHER; note = 2'-Omethylcytosine
  modified_base 12: mod_base = OTHER; note = 2'-Omethylcytosine
  modified_base 13: mod_base = OTHER; note = 2'-Omethylguanosine
  modified_base 22: mod_base = OTHER; note = 2'-Omethyladenosine
  modified_base 23: mod_base = OTHER; note = 2'-Omethylguanosine
  modified_base 24: mod_base = OTHER; note = 2'-Omethylguanosine
  modified_base 25: mod_base = OTHER; note = 2'-Omethylcytosine
  modified_base 58: mod_base = OTHER; note = 2'-Omethylguanosine
  modified_base 59: mod_base = OTHER; note = 2'-Omethylcytosine
  modified_base 60: mod_base = OTHER; note = 2'-Omethyladenosine
  modified_base 61: mod_base = OTHER; note = 2'-Omethylguanosine
  modified_base 62: mod_base = OTHER; note = 2'-Omethylguanosine
  modified_base 82: mod_base = OTHER; note = 2'-Omethylguanosine

SEQ ID NO: 8224 - RNA, 73 nt, synthetic construct; identical to SEQ ID NO: 935
  source 1..73: mol_type = other RNA
  modified_base 1: mod_base = OTHER; note = 2'-Omethylguanosine phosphorothiorate
  modified_base 2: mod_base = OTHER; note = 2'-Omethylguanosine
  modified_base 13: mod_base = OTHER; note = 2'-fluorocytosine

SEQ ID NO: 8225 - RNA, 76 nt, synthetic construct
  source 1..76: mol_type = other RNA
ggctccgtggtgggatggataccacattggacttcaaattcaaaggttccgggttcgagtcccggcggagtcgcca

SEQ ID NO: 8226 - RNA, 76 nt, synthetic construct; identical to SEQ ID NO: 625
  source 1..76: mol_type = other RNA
  modified_base 1: mod_base = OTHER; note = 2'-Omethylguanosine
  modified_base 2: mod_base = OTHER; note = 2'-Omethylguanosine phosphorothiorate
  modified_base 10: mod_base = OTHER; note = 2'-Omethylguanosine
  modified_base 13: mod_base = OTHER; note = 2'-Omethylcytosine
  modified_base 17: mod_base = OTHER; note = Guanosine phosphorothiorate
  modified_base 18: mod_base = OTHER; note = 2'-Omethylguanosine
  modified_base 19: mod_base = OTHER; note = Adenosine phosphorothiorate
  modified_base 20: mod_base = OTHER; note = 2'-Omethyluridine
  modified_base 25: mod_base = OTHER; note = 2'-Omethylcytosine
  modified_base 29: mod_base = OTHER; note = 2'-Omethylguanosine
  modified_base 33: mod_base = OTHER; note = 2'-fluorouridine
  modified_base 35: mod_base = OTHER; note = Cytosine phosphorothiorate
  modified_base 37: mod_base = OTHER; note = Adenosine phosphorothiorate
  modified_base 38: mod_base = OTHER; note = Adenosine phosphorothiorate
  modified_base 41: mod_base = OTHER; note = 2'-fluorocytosine
  modified_base 43: mod_base = OTHER; note = 2'-Omethyladenosine
  modified_base 44: mod_base = OTHER; note = 2'-fluoroadenosine
  modified_base 46: mod_base = OTHER; note = Guanosine phosphorothiorate
  modified_base 50: mod_base = OTHER; note = 2'-Omethylcytosine
  modified_base 52: mod_base = OTHER; note = 2'-Omethylguanosine
  modified_base 54: mod_base = OTHER; note = Uridine phosphorothiorate
  modified_base 55: mod_base = OTHER; note = Uridine phosphorothiorate
  modified_base 56: mod_base = OTHER; note = 2'-Omethylcytosine
  modified_base 57: mod_base = OTHER; note = Guanosine phosphorothiorate
  modified_base 62: mod_base = OTHER; note = 2'-Omethylcytosine
  modified_base 63: mod_base = OTHER; note = 2'-fluorocytosine
  modified_base 65: mod_base = OTHER; note = 2'-Omethylguanosine
  modified_base 71: mod_base = OTHER; note = 2'-Omethyluridine
  modified_base 73: mod_base = OTHER; note = 2'-Omethylguanosine

SEQ ID NO: 8227 - RNA, 73 nt, synthetic construct; identical to SEQ ID NO: 935
  source 1..73: mol_type = other RNA
  modified_base 1: mod_base = OTHER; note = 2'-Omethylguanosine phosphorothiorate
  modified_base 2: mod_base = OTHER; note = 2'-Omethylguanosine phosphorothiorate
  modified_base 13: mod_base = OTHER; note = 2'-fluorocytosine
  modified_base 14: mod_base = OTHER; note = 2'-fluoroadenosine
  modified_base 54: mod_base = OTHER; note = 2'-fluorouridine
  modified_base 59: mod_base = OTHER; note = 2'-Omethylguanosine
  modified_base 72: mod_base = OTHER; note = 2'-Omethylcytosine

SEQ ID NO: 8228 - RNA, 75 nt, synthetic construct; identical to SEQ ID NO: 3299
  source 1..75: mol_type = other RNA
  modified_base 1: mod_base = OTHER; note = 2'-Omethylcytosine
  modified_base 2: mod_base = OTHER; note = Cytosine phosphorothiorate
  modified_base 8: mod_base = OTHER; note = 2'-fluoroadenosine phosphorothiorate
  modified_base 11: mod_base = OTHER; note = Uridine phosphorothiorate
  modified_base 14: mod_base = OTHER; note = 2'-fluoroguanosine
  modified_base 16: mod_base = OTHER; note = 2'-fluorocytosine
  modified_base 20: mod_base = OTHER; note = 2'-fluoroadenosine
  modified_base 21: mod_base = OTHER; note = 2'-fluoroguanosine
  modified_base 25: mod_base = OTHER; note = 2'-fluoroadenosine
  modified_base 26: mod_base = OTHER; note = Uridine phosphorothiorate
  modified_base 28: mod_base = OTHER; note = 2'-fluoroadenosine
  modified_base 31: mod_base = OTHER; note = 2'-Omethylcytosine phosphorothiorate
  modified_base 33: mod_base = OTHER; note = 2'-fluorouridine
  modified_base 37: mod_base = OTHER; note = 2'-Omethyladenosine
  modified_base 46: mod_base = OTHER; note = 2'-fluorouridine
  modified_base 47: mod_base = OTHER; note = 2'-fluorocytosine
  modified_base 50: mod_base = OTHER; note = Guanosine phosphorothiorate
  modified_base 52: mod_base = OTHER; note = 2'-fluoroguanosine phosphorothiorate
  modified_base 61: mod_base = OTHER; note = 2'-fluorocytosine
  modified_base 62: mod_base = OTHER; note = Cytosine phosphorothiorate
  modified_base 73: mod_base = OTHER; note = Cytosine phosphorothiorate
  modified_base 74: mod_base = OTHER; note = 2'-Omethylcytosine

SEQ ID NO: 8229 - RNA, 76 nt, synthetic construct; identical to SEQ ID NO: 625
  source 1..76: mol_type = other RNA
  modified_base 1: mod_base = OTHER; note = 2'-Omethylguanosine phosphorothiorate
  modified_base 2: mod_base = OTHER; note = 2'-Omethylguanosine
  modified_base 64: mod_base = OTHER; note = Guanosine phosphorothiorate
  modified_base 65: mod_base = OTHER; note = 2'-fluoroguanosine
  modified_base 73: mod_base = OTHER; note = 2'-Omethylguanosine phosphorothiorate
  modified_base 74: mod_base = OTHER; note = Cytosine phosphorothiorate
  modified_base 75: mod_base = OTHER; note = 2'-Omethylcytosine phosphorothiorate
  modified_base 76: mod_base = OTHER; note = 2'-Omethyladenosine

SEQ ID NO: 8230 - DNA, 76 bp, synthetic construct; identical to SEQ ID NO: 1924
  source 1..76: mol_type = other DNA
  modified_base 1: mod_base = OTHER; note = 2'-Omethylguanosine phosphorothiorate
  modified_base 2: mod_base = OTHER; note = 2'-Omethylguanosine phosphorothiorate
  modified_base 13: mod_base = OTHER; note = Cytosine phosphorothiorate
  modified_base 37: mod_base = OTHER; note = Adenosine phosphorothiorate
  modified_base 44: mod_base = OTHER; note = Adenosine phosphorothiorate
  modified_base 52: mod_base = OTHER; note = Guanosine phosphorothiorate
  modified_base 60: mod_base = OTHER; note = Uridine phosphorothiorate
  modified_base 61: mod_base = OTHER; note = 2'-O-(2-Methoxyethyl) 5-methylcytosine
  modified_base 75: mod_base = OTHER; note = Cytosine phosphorothiorate
  modified_base 76: mod_base = OTHER; note = 2'-Omethyladenosine
  misc_feature 1..22: note = RNA
  misc_feature 23: note = DNA
  misc_feature 24..37: note = RNA
  misc_feature 38: note = DNA
  misc_feature 39..76: note = RNA

SEQ ID NO: 8231 - RNA, 86 nt, synthetic construct; identical to SEQ ID NO: 3290
  source 1..86: mol_type = other RNA
  modified_base 1: mod_base = OTHER; note = 2'-Omethyladenosine phosphorothiorate
  modified_base 2: mod_base = OTHER; note = 2'-Omethylcytosine phosphorothiorate
  modified_base 3: mod_base = OTHER; note = 2'-Omethylcytosine
  modified_base 4: mod_base = OTHER; note = 2'-Omethyladenosine
  modified_base 5: mod_base = OTHER; note = 2'-Omethylguanosine
  modified_base 6: mod_base = OTHER; note = 2'-Omethylguanosine
  modified_base 10: mod_base = OTHER; note = 2'-Omethylguanosine
  modified_base 11: mod_base = OTHER; note = 2'-Omethylcytosine
  modified_base 12: mod_base = OTHER; note = 2'-Omethylcytosine
  modified_base 13: mod_base = OTHER; note = 2'-Omethylguanosine
  modified_base 14: mod_base = OTHER; note = 2'-Omethyladenosine
  modified_base 15: mod_base = OTHER; note = 2'-fluoroguanosine
  modified_base 16: mod_base = OTHER; note = 2'-Omethyluridine
  modified_base 17: mod_base = OTHER; note = 2'-Omethylguanosine
  modified_base 18: mod_base = OTHER; note = 2'-Omethylguanosine
  modified_base 19: mod_base = OTHER; note = 2'-fluorouridine
  modified_base 20: mod_base = OTHER; note = 2'-Omethyluridine
  modified_base 22: mod_base = OTHER; note = 2'-Omethyladenosine
  modified_base 23: mod_base = OTHER; note = 2'-Omethylguanosine
  modified_base 24: mod_base = OTHER; note = 2'-Omethylguanosine
  modified_base 25: mod_base = OTHER; note = 2'-Omethylcytosine
  modified_base 59: mod_base = OTHER; note = 2'-Omethylguanosine
  modified_base 60: mod_base = OTHER; note = 2'-Omethyluridine
  modified_base 61: mod_base = OTHER; note = 2'-Omethylguanosine
  modified_base 62: mod_base = OTHER; note = 2'-Omethylguanosine
  modified_base 63: mod_base = OTHER; note = 2'-Omethylguanosine
  modified_base 64: mod_base = OTHER; note = 2'-Omethyluridine
  modified_base 71: mod_base = OTHER; note = 2'-Omethylcytosine
  modified_base 72: mod_base = OTHER; note = 2'-Omethylcytosine
  modified_base 73: mod_base = OTHER; note = 2'-fluorocytosine
  modified_base 74: mod_base = OTHER; note = 2'-Omethyladenosine
  modified_base 75: mod_base = OTHER; note = 2'-Omethylcytosine
  modified_base 76: mod_base = OTHER; note = 2'-Omethyluridine
  modified_base 77: mod_base = OTHER; note = 2'-Omethylcytosine
  modified_base 78: mod_base = OTHER; note = 2'-Omethylcytosine
  modified_base 83: mod_base = OTHER; note = 2'-Omethyladenosine

SEQ ID NO: 8232 - RNA, 85 nt, synthetic construct; identical to SEQ ID NO: 3286
  source 1..85: mol_type = other RNA
  modified_base 1: mod_base = OTHER; note = 2'-Omethylcytosine phosphorothiorate
  modified_base 2: mod_base = OTHER; note = 2'-Omethylcytosine phosphorothiorate
  modified_base 3: mod_base = OTHER; note = 2'-Omethyladenosine
  modified_base 29: mod_base = OTHER; note = 2'-fluoroguanosine
  modified_base 44: mod_base = OTHER; note = 2'-Omethylguanosine
  modified_base 50: mod_base = OTHER; note = Adenosine phosphorothiorate
  modified_base 57: mod_base = OTHER; note = 2'-Omethylcytosine
  modified_base 73: mod_base = OTHER; note = 2'-fluoroadenosine
  modified_base 84: mod_base = OTHER; note = 2'-Omethylcytosine phosphorothiorate

SEQ ID NO: 8233 - RNA, 75 nt, synthetic construct; identical to SEQ ID NO: 3306
  source 1..75: mol_type = other RNA
  modified_base 1: mod_base = OTHER; note = 2'-Omethylguanosine
  modified_base 2: mod_base = OTHER; note = 2'-Omethyladenosine
  modified_base 3: mod_base = OTHER; note = 2'-Omethylcytosine
  modified_base 4: mod_base = OTHER; note = 2'-Omethylcytosine
  modified_base 5: mod_base = OTHER; note = 2'-Omethyluridine
  modified_base 6: mod_base = OTHER; note = 2'-Omethylcytosine
  modified_base 21: mod_base = OTHER; note = 2'-Omethylguanosine
  modified_base 22: mod_base = OTHER; note = 2'-Omethylcytosine
  modified_base 23: mod_base = OTHER; note = 2'-Omethylguanosine
  modified_base 24: mod_base = OTHER; note = 2'-Omethylcytosine

SEQ ID NO: 8234 - RNA, 76 nt, synthetic construct; identical to SEQ ID NO: 625
  source 1..76: mol_type = other RNA
  modified_base 1: mod_base = OTHER; note = 2'-Omethylguanosine
  modified_base 10: mod_base = OTHER; note = 2'-Omethylguanosine
  modified_base 13: mod_base = OTHER; note = 2'-Omethylcytosine
  modified_base 17: mod_base = OTHER; note = Guanosine phosphorothiorate
  modified_base 18: mod_base = OTHER; note = 2'-Omethylguanosine
  modified_base 19: mod_base = OTHER; note = Adenosine phosphorothiorate
  modified_base 20: mod_base = OTHER; note = 2'-Omethyluridine
  modified_base 25: mod_base = OTHER; note = 2'-Omethylcytosine
  modified_base 29: mod_base = OTHER; note = 2'-Omethylguanosine
  modified_base 33: mod_base = OTHER; note = 2'-fluorouridine
  modified_base 35: mod_base = OTHER; note = Cytosine phosphorothiorate
  modified_base 37: mod_base = OTHER; note = Adenosine phosphorothiorate
  modified_base 38: mod_base = OTHER; note = Adenosine phosphorothiorate
  modified_base 41: mod_base = OTHER; note = 2'-fluorocytosine
  modified_base 43: mod_base = OTHER; note = 2'-Omethyladenosine
  modified_base 44: mod_base = OTHER; note = 2'-fluoroadenosine
  modified_base 46: mod_base = OTHER; note = Guanosine phosphorothiorate
  modified_base 50: mod_base = OTHER; note = 2'-Omethylcytosine
  modified_base 52: mod_base = OTHER; note = 2'-Omethylguanosine
  modified_base 54: mod_base = OTHER; note = Uridine phosphorothiorate
  modified_base 55: mod_base = OTHER; note = Uridine phosphorothiorate
  modified_base 56: mod_base = OTHER; note = 2'-Omethylcytosine
  modified_base 57: mod_base = OTHER; note = Guanosine phosphorothiorate
  modified_base 62: mod_base = OTHER; note = 2'-Omethylcytosine
  modified_base 63: mod_base = OTHER; note = 2'-fluorocytosine
  modified_base 65: mod_base = OTHER; note = 2'-Omethylguanosine
  modified_base 71: mod_base = OTHER; note = 2'-Omethyluridine phosphorothiorate
  modified_base 73: mod_base = OTHER; note = 2'-Omethylguanosine

SEQ ID NO: 8235 - RNA, 76 nt, synthetic construct; identical to SEQ ID NO: 625
  source 1..76: mol_type = other RNA
  modified_base 1: mod_base = OTHER; note = 2'-Omethylguanosine
  modified_base 2: mod_base = OTHER; note = 2'-Omethylguanosine
  modified_base 3: mod_base = OTHER; note = 2'-Omethylcytosine
  modified_base 4: mod_base = OTHER; note = 2'-Omethyluridine
  modified_base 5: mod_base = OTHER; note = 2'-Omethylcytosine
  modified_base 6: mod_base = OTHER; note = 2'-Omethylcytosine
  modified_base 7: mod_base = OTHER; note = 2'-Omethylguanosine phosphorothiorate
  modified_base 9: mod_base = OTHER; note = 2'-Omethylguanosine phosphorothiorate
  modified_base 10: mod_base = OTHER; note = 2'-Omethylguanosine
  modified_base 11: mod_base = OTHER; note = 2'-Omethylcytosine
  modified_base 12: mod_base = OTHER; note = 2'-Omethylguanosine
  modified_base 13: mod_base = OTHER; note = 2'-fluorocytosine
  modified_base 14: mod_base = OTHER; note = 2'-Omethyladenosine
  modified_base 15: mod_base = OTHER; note = 2'-fluoroadenosine
  modified_base 16: mod_base = OTHER; note = 2'-Omethyluridine
  modified_base 17: mod_base = OTHER; note = 2'-Omethylguanosine
  modified_base 18: mod_base = OTHER; note = 2'-Omethylguanosine
  modified_base 19: mod_base = OTHER; note = 2'-Omethyladenosine
  modified_base 20: mod_base = OTHER; note = 2'-Omethyluridine
  modified_base 21: mod_base = OTHER; note = 2'-fluoroadenosine phosphorothiorate
  modified_base 22: mod_base = OTHER; note = 2'-Omethylguanosine phosphorothiorate
  modified_base 23: mod_base = OTHER; note = 2'-Omethylcytosine
  modified_base 24: mod_base = OTHER; note = 2'-Omethylguanosine
  modified_base 25: mod_base = OTHER; note = 2'-Omethylcytosine
  modified_base 26: mod_base = OTHER; note = Adenosine phosphorothiorate
  modified_base 27: mod_base = OTHER; note = 2'-Omethyluridine
  modified_base 28: mod_base = OTHER; note = 2'-Omethyluridine
  modified_base 29: mod_base = OTHER; note = 2'-Omethylguanosine
  modified_base 30: mod_base = OTHER; note = 2'-Omethylguanosine
  modified_base 31: mod_base = OTHER; note = 2'-Omethyladenosine
  modified_base 33: mod_base = OTHER; note = 2'-Omethyluridine
  modified_base 34: mod_base = OTHER; note = 2'-Omethyluridine phosphorothiorate
  modified_base 35: mod_base = OTHER; note = Cytosine phosphorothiorate
  modified_base 36: mod_base = OTHER; note = 2'-Omethyladenosine phosphorothiorate
  modified_base 37: mod_base = OTHER; note = Adenosine phosphorothiorate
  modified_base 38: mod_base = OTHER; note = Adenosine phosphorothiorate
  modified_base 40: mod_base = OTHER; note = 2'-Omethyluridine
  modified_base 41: mod_base = OTHER; note = 2'-Omethylcytosine
  modified_base 42: mod_base = OTHER; note = 2'-Omethyladenosine
  modified_base 43: mod_base = OTHER; note = 2'-Omethyladenosine
  modified_base 44: mod_base = OTHER; note = 2'-Omethyladenosine
  modified_base 45: mod_base = OTHER; note = 2'-Omethylguanosine phosphorothiorate
  modified_base 46: mod_base = OTHER; note = 2'-Omethylguanosine
  modified_base 48: mod_base = OTHER; note = 2'-fluorouridine
  modified_base 49: mod_base = OTHER; note = 2'-Omethylcytosine
  modified_base 50: mod_base = OTHER; note = 2'-Omethylcytosine
  modified_base 51: mod_base = OTHER; note = 2'-Omethylguanosine
  modified_base 52: mod_base = OTHER; note = 2'-Omethylguanosine
  modified_base 53: mod_base = OTHER; note = 2'-fluoroguanosine
  modified_base 55: mod_base = OTHER; note = Uridine phosphorothiorate
  modified_base 56: mod_base = OTHER; note = 2'-Omethylcytosine
  modified_base 57: mod_base = OTHER; note = Guanosine phosphorothiorate
  modified_base 58: mod_base = OTHER; note = 2'-Omethyladenosine
  modified_base 59: mod_base = OTHER; note = 2'-Omethylguanosine
  modified_base 60: mod_base = OTHER; note = 2'-Omethyluridine phosphorothiorate
  modified_base 61: mod_base = OTHER; note = 2'-Omethylcytosine
  modified_base 62: mod_base = OTHER; note = 2'-Omethylcytosine
  modified_base 63: mod_base = OTHER; note = 2'-fluorocytosine
  modified_base 64: mod_base = OTHER; note = 2'-Omethylguanosine
  modified_base 65: mod_base = OTHER; note = 2'-Omethylguanosine
  modified_base 66: mod_base = OTHER; note = 2'-Omethylcytosine
  modified_base 67: mod_base = OTHER; note = 2'-Omethylguanosine
  modified_base 68: mod_base = OTHER; note = 2'-Omethylguanosine
  modified_base 69: mod_base = OTHER; note = 2'-Omethyladenosine
  modified_base 70: mod_base = OTHER; note = 2'-Omethylguanosine
  modified_base 72: mod_base = OTHER; note = 2'-Omethylcytosine
  modified_base 73: mod_base = OTHER; note = 2'-Omethylguanosine
  modified_base 74: mod_base = OTHER; note = 2'-fluorocytosine phosphorothiorate
  modified_base 75: mod_base = OTHER; note = 2'-fluorocytosine phosphorothiorate

SEQ ID NO: 8236 - RNA, 86 nt, synthetic construct; identical to SEQ ID NO: 3290
  source 1..86: mol_type = other RNA
  modified_base 71: mod_base = OTHER; note = 2'-Omethylcytosine

SEQ ID NO: 8237 - RNA, 76 nt, synthetic construct; identical to SEQ ID NO: 625
  source 1..76: mol_type = other RNA
  modified_base 1: mod_base = OTHER; note = 2'-Omethylguanosine phosphorothiorate
  modified_base 2: mod_base = OTHER; note = 2'-Omethylguanosine
  modified_base 3: mod_base = OTHER; note = 2'-Omethylcytosine
  modified_base 4: mod_base = OTHER; note = 2'-Omethyluridine
  modified_base 5: mod_base = OTHER; note = 2'-Omethylcytosine
  modified_base 6: mod_base = OTHER; note = 2'-Omethylcytosine
  modified_base 10: mod_base = OTHER; note = 2'-Omethylguanosine
  modified_base 13: mod_base = OTHER; note = 2'-Omethylcytosine
  modified_base 14: mod_base = OTHER; note = 2'-Omethyladenosine
  modified_base 15: mod_base = OTHER; note = 2'-fluoroadenosine
  modified_base 16: mod_base = OTHER; note = 2'-Omethyluridine
  modified_base 17: mod_base = OTHER; note = Guanosine phosphorothiorate
  modified_base 18: mod_base = OTHER; note = 2'-Omethylguanosine
  modified_base 19: mod_base = OTHER; note = Adenosine phosphorothiorate
  modified_base 20: mod_base = OTHER; note = 2'-Omethyluridine
  modified_base 25: mod_base = OTHER; note = 2'-Omethylcytosine
  modified_base 29: mod_base = OTHER; note = 2'-Omethylguanosine
  modified_base 33: mod_base = OTHER; note = 2'-fluorouridine
  modified_base 35: mod_base = OTHER; note = Cytosine phosphorothiorate
  modified_base 37: mod_base = OTHER; note = Adenosine phosphorothiorate
  modified_base 38: mod_base = OTHER; note = Adenosine phosphorothiorate
  modified_base 40: mod_base = OTHER; note = 2'-fluorouridine
  modified_base 41: mod_base = OTHER; note = 2'-Omethylcytosine
  modified_base 42: mod_base = OTHER; note = 2'-Omethyladenosine
  modified_base 43: mod_base = OTHER; note = 2'-Omethyladenosine
  modified_base 44: mod_base = OTHER; note = 2'-fluoroadenosine
  modified_base 46: mod_base = OTHER; note = Guanosine phosphorothiorate
  modified_base 49: mod_base = OTHER; note = 2'-Omethylcytosine
  modified_base 50: mod_base = OTHER; note = 2'-Omethylcytosine
  modified_base 51: mod_base = OTHER; note = 2'-Omethylguanosine
  modified_base 52: mod_base = OTHER; note = 2'-Omethylguanosine
  modified_base 53: mod_base = OTHER; note = 2'-Omethylguanosine
  modified_base 54: mod_base = OTHER; note = 2'-Omethyluridine
  modified_base 55: mod_base = OTHER; note = Uridine phosphorothiorate
  modified_base 56: mod_base = OTHER; note = 2'-Omethylcytosine
  modified_base 57: mod_base = OTHER; note = 2'-Omethylguanosine
  modified_base 59: mod_base = OTHER; note = 2'-Omethylguanosine
  modified_base 61: mod_base = OTHER; note = 2'-Omethylcytosine
  modified_base 62: mod_base = OTHER; note = 2'-Omethylcytosine
  modified_base 63: mod_base = OTHER; note = 2'-fluorocytosine
  modified_base 64: mod_base = OTHER; note = 2'-Omethylguanosine
  modified_base 65: mod_base = OTHER; note = 2'-Omethylguanosine
  modified_base 66: mod_base = OTHER; note = 2'-Omethylcytosine
  modified_base 67: mod_base = OTHER; note = 2'-Omethylguanosine
  modified_base 68: mod_base = OTHER; note = 2'-Omethylguanosine
  modified_base 69: mod_base = OTHER; note = 2'-Omethyladenosine
  modified_base 70: mod_base = OTHER; note = 2'-fluoroguanosine
  modified_base 71: mod_base = OTHER; note = 2'-Omethyluridine
  modified_base 73: mod_base = OTHER; note = 2'-Omethylguanosine
  modified_base 75: mod_base = OTHER; note = 2'-fluorocytosine phosphorothiorate

SEQ ID NO: 8238 - RNA, 74 nt, synthetic construct; identical to SEQ ID NO: 3293
  source 1..74: mol_type = other RNA
  modified_base 1: mod_base = OTHER; note = Adenosine phosphorothiorate
  modified_base 3: mod_base = OTHER; note = 2'-fluorocytosine
  modified_base 4: mod_base = OTHER; note = 2'-fluorouridine
  modified_base 10: mod_base = OTHER; note = 2'-Omethylcytosine phosphorothiorate
  modified_base 17: mod_base = OTHER; note = 2'-Omethylguanosine phosphorothiorate
  modified_base 41: mod_base = OTHER; note = Adenosine phosphorothiorate
  modified_base 44: mod_base = OTHER; note = Guanosine phosphorothiorate
  modified_base 49: mod_base = OTHER; note = 2'-fluoroguanosine
  modified_base 72: mod_base = OTHER; note = 2'-Omethylcytosine
  modified_base 74: mod_base = OTHER; note = 2'-fluoroadenosine

SEQ ID NO: 8239 - RNA, 76 nt, synthetic construct; identical to SEQ ID NO: 3318
  source 1..76: mol_type = other RNA
  modified_base 1: mod_base = OTHER; note = 2'-Omethylcytosine
  modified_base 16: mod_base = OTHER; note = 2'-Omethyluridine
  modified_base 18: mod_base = OTHER; note = 2'-Omethylguanosine
  modified_base 19: mod_base = OTHER; note = 2'-Omethylguanosine
  modified_base 54: mod_base = OTHER; note = 2'-Omethyluridine phosphorothiorate
  modified_base 55: mod_base = OTHER; note = Uridine phosphorothiorate
  modified_base 56: mod_base = OTHER; note = 2'-Omethylcytosine
  modified_base 57: mod_base = OTHER; note = 2'-fluoroguanosine
  modified_base 58: mod_base = OTHER; note = 2'-fluoroadenosine
  modified_base 59: mod_base = OTHER; note = 2'-Omethyladenosine
  modified_base 60: mod_base = OTHER; note = 2'-Omethyluridine
  modified_base 73: mod_base = OTHER; note = 2'-Omethyladenosine

SEQ ID NO: 8240 - RNA, 85 nt, synthetic construct; identical to SEQ ID NO: 3310
  source 1..85: mol_type = other RNA
  modified_base 1: mod_base = OTHER; note = 2'-Omethylcytosine
  modified_base 14: mod_base = OTHER; note = Guanosine phosphorothiorate
  modified_base 26: mod_base = OTHER; note = 2'-fluorouridine
  modified_base 30: mod_base = OTHER; note = 2'-fluoroadenosine
  modified_base 36: mod_base = OTHER; note = Guanosine phosphorothiorate
  modified_base 44: mod_base = OTHER; note = 2'-Omethylguanosine
  modified_base 53: mod_base = OTHER; note = Uridine phosphorothiorate
  modified_base 54: mod_base = OTHER; note = 2'-fluorocytosine
  modified_base 64: mod_base = OTHER; note = Uridine phosphorothiorate
  modified_base 76: mod_base = OTHER; note = 2'-fluorocytosine
  modified_base 84: mod_base = OTHER; note = 2'-fluorocytosine phosphorothiorate

SEQ ID NO: 8241 - RNA, 76 nt, synthetic construct; identical to SEQ ID NO: 625
  source 1..76: mol_type = other RNA
  modified_base 27: mod_base = OTHER; note = Thymine
  modified_base 28: mod_base = OTHER; note = Thymine
  modified_base 39: mod_base = OTHER; note = Thymine
  modified_base 40: mod_base = OTHER; note = Thymine
  modified_base 54: mod_base = OTHER; note = Thymine
  modified_base 55: mod_base = OTHER; note = Thymine
  modified_base 60: mod_base = OTHER; note = Thymine

SEQ ID NO: 8242 - RNA, 85 nt, synthetic construct; identical to SEQ ID NO: 3297
  source 1..85: mol_type = other RNA
  modified_base 1: mod_base = OTHER; note = 2'-Omethylguanosine
  modified_base 2: mod_base = OTHER; note = 2'-Omethylcytosine
  modified_base 3: mod_base = OTHER; note = 2'-Omethyluridine
  modified_base 4: mod_base = OTHER; note = 2'-Omethylguanosine
  modified_base 5: mod_base = OTHER; note = 2'-Omethyluridine
  modified_base 6: mod_base = OTHER; note = 2'-Omethylguanosine
  modified_base 10: mod_base = OTHER; note = 2'-Omethylguanosine
  modified_base 11: mod_base = OTHER; note = 2'-Omethylcytosine
  modified_base 12: mod_base = OTHER; note = 2'-Omethylcytosine
  modified_base 13: mod_base = OTHER; note = 2'-Omethylguanosine
  modified_base 58: mod_base = OTHER; note = 2'-Omethylguanosine
  modified_base 59: mod_base = OTHER; note = 2'-Omethylcytosine
  modified_base 60: mod_base = OTHER; note = 2'-Omethyladenosine
  modified_base 61: mod_base = OTHER; note = 2'-Omethylguanosine
  modified_base 62: mod_base = OTHER; note = 2'-Omethylguanosine

SEQ ID NO: 8243 - RNA, 76 nt, synthetic construct; identical to SEQ ID NO: 625
  source 1..76: mol_type = other RNA
  modified_base 1: mod_base = OTHER; note = 2'-Omethylguanosine
  modified_base 10: mod_base = OTHER; note = 2'-Omethylguanosine
  modified_base 13: mod_base = OTHER; note = 2'-Omethylcytosine
  modified_base 17: mod_base = OTHER; note = Guanosine phosphorothiorate
  modified_base 18: mod_base = OTHER; note = 2'-Omethylguanosine
  modified_base 19: mod_base = OTHER; note = Adenosine phosphorothiorate
  modified_base 20: mod_base = OTHER; note = 2'-Omethyluridine
  modified_base 25: mod_base = OTHER; note = 2'-Omethylcytosine
  modified_base 29: mod_base = OTHER; note = 2'-Omethylguanosine
  modified_base 33: mod_base = OTHER; note = 2'-fluorouridine
  modified_base 35: mod_base = OTHER; note = Cytosine phosphorothiorate
  modified_base 37: mod_base = OTHER; note = Adenosine phosphorothiorate
  modified_base 38: mod_base = OTHER; note = Adenosine phosphorothiorate
  modified_base 41: mod_base = OTHER; note = 2'-fluorocytosine phosphorothiorate
  modified_base 43: mod_base = OTHER; note = 2'-Omethyladenosine
  modified_base 44: mod_base = OTHER; note = 2'-fluoroadenosine
  modified_base 46: mod_base = OTHER; note = Guanosine phosphorothiorate
  modified_base 50: mod_base = OTHER; note = 2'-Omethylcytosine
  modified_base 52: mod_base = OTHER; note = 2'-Omethylguanosine
  modified_base 54: mod_base = OTHER; note = Uridine phosphorothiorate
  modified_base 55: mod_base = OTHER; note = Uridine phosphorothiorate
  modified_base 56: mod_base = OTHER; note = 2'-Omethylcytosine
  modified_base 62: mod_base = OTHER; note = 2'-Omethylcytosine
  modified_base 63: mod_base = OTHER; note = 2'-fluorocytosine
  modified_base 65: mod_base = OTHER; note = 2'-Omethylguanosine
  modified_base 73: mod_base = OTHER; note = 2'-Omethylguanosine

SEQ ID NO: 8244 - RNA, 85 nt, synthetic construct; identical to SEQ ID NO: 3297
  source 1..85: mol_type = other RNA
  modified_base 1: mod_base = OTHER; note = 2'-Omethylguanosine
  modified_base 10: mod_base = OTHER; note = 2'-Omethylguanosine
  modified_base 11: mod_base = OTHER; note = 2'-Omethylcytosine
  modified_base 12: mod_base = OTHER; note = 2'-Omethylcytosine
  modified_base 13: mod_base = OTHER; note = 2'-Omethylguanosine
  modified_base 14: mod_base = OTHER; note = 2'-Omethyladenosine
  modified_base 15: mod_base = OTHER; note = 2'-Omethylguanosine
  modified_base 16: mod_base = OTHER; note = 2'-Omethyluridine
  modified_base 17: mod_base = OTHER; note = 2'-Omethylguanosine
  modified_base 18: mod_base = OTHER; note = 2'-Omethylguanosine
  modified_base 19: mod_base = OTHER; note = Uridine phosphorothiorate
  modified_base 20: mod_base = OTHER; note = 2'-Omethyluridine
  modified_base 21: mod_base = OTHER; note = Adenosine phosphorothiorate
  modified_base 22: mod_base = OTHER; note = 2'-Omethyladenosine
  modified_base 23: mod_base = OTHER; note = 2'-Omethylguanosine
  modified_base 24: mod_base = OTHER; note = 2'-Omethylguanosine
  modified_base 25: mod_base = OTHER; note = 2'-Omethylcytosine
  modified_base 33: mod_base = OTHER; note = 2'-fluorouridine
  modified_base 34: mod_base = OTHER; note = 2'-Omethyluridine
  modified_base 35: mod_base = OTHER; note = Cytosine phosphorothiorate
  modified_base 37: mod_base = OTHER; note = Adenosine phosphorothiorate
  modified_base 38: mod_base = OTHER; note = Adenosine phosphorothiorate
  modified_base 41: mod_base = OTHER; note = 2'-Omethylcytosine
  modified_base 42: mod_base = OTHER; note = 2'-Omethyladenosine
  modified_base 43: mod_base = OTHER; note = 2'-Omethyladenosine
  modified_base 44: mod_base = OTHER; note = 2'-Omethyluridine
  modified_base 58: mod_base = OTHER; note = 2'-Omethylguanosine
  modified_base 59: mod_base = OTHER; note = 2'-Omethylcytosine
  modified_base 61: mod_base = OTHER; note = 2'-Omethylguanosine
  modified_base 63: mod_base = OTHER; note = Uridine phosphorothiorate
  modified_base 64: mod_base = OTHER; note = Uridine phosphorothiorate
  modified_base 70: mod_base = OTHER; note = 2'-Omethylcytosine
  modified_base 74: mod_base = OTHER; note = 2'-Omethylcytosine
  modified_base 82: mod_base = OTHER; note = 2'-Omethylguanosine

SEQ ID NO: 8245 - RNA, 76 nt, synthetic construct; identical to SEQ ID NO: 3795
  source 1..76: mol_type = other RNA
  modified_base 1: mod_base = OTHER; note = 2'-Omethylguanosine phosphorothiorate
  modified_base 2: mod_base = OTHER; note = 2'-Omethylcytosine phosphorothiorate
  modified_base 74: mod_base = OTHER; note = Cytosine phosphorothiorate
  modified_base 75: mod_base = OTHER; note = 2'-Omethylcytosine

SEQ ID NO: 8246 - RNA, 75 nt, synthetic construct; identical to SEQ ID NO: 3311
  source 1..75: mol_type = other RNA
  modified_base 1: mod_base = OTHER; note = 2'-fluoroguanosine phosphorothiorate
  modified_base 2: mod_base = OTHER; note = 2'-Omethylguanosine phosphorothiorate
  modified_base 11: mod_base = OTHER; note = 2'-fluorouridine
  modified_base 13: mod_base = OTHER; note = 2'-fluorouridine
  modified_base 19: mod_base = OTHER; note = 2'-fluorouridine
  modified_base 23: mod_base = OTHER; note = 2'-fluorocytosine
  modified_base 51: mod_base = OTHER; note = 2'-fluoroadenosine
  modified_base 63: mod_base = OTHER; note = Guanosine phosphorothiorate
  modified_base 64: mod_base = OTHER; note = 2'-fluoroguanosine
  modified_base 65: mod_base = OTHER; note = 2'-fluorouridine
  modified_base 66: mod_base = OTHER; note = Guanosine phosphorothiorate
  modified_base 67: mod_base = OTHER; note = 2'-fluoroguanosine
  modified_base 74: mod_base = OTHER; note = Cytosine phosphorothiorate
  modified_base 75: mod_base = OTHER; note = 2'-fluoroadenosine

SEQ ID NO: 8247 - RNA, 85 nt, synthetic construct; identical to SEQ ID NO: 3310
  source 1..85: mol_type = other RNA
  modified_base 8: mod_base = OTHER; note = Guanosine phosphorothiorate
  modified_base 33: mod_base = OTHER; note = Cytosine phosphorothiorate
  modified_base 45: mod_base = OTHER; note = 2'-Omethylguanosine
  modified_base 56: mod_base = OTHER; note = 2'-fluoroguanosine
  modified_base 77: mod_base = OTHER; note = 2'-fluorocytosine
  modified_base 85: mod_base = OTHER; note = 2'-Omethyladenosine

SEQ ID NO: 8248 - RNA, 86 nt, synthetic construct; identical to SEQ ID NO: 3290
  source 1..86: mol_type = other RNA
  modified_base 36: mod_base = OTHER; note = 2'-Omethyladenosine

SEQ ID NO: 8249 - RNA, 85 nt, synthetic construct; identical to SEQ ID NO: 3288
  source 1..85: mol_type = other RNA
  modified_base 1: mod_base = OTHER; note = 2'-Omethylcytosine
  modified_base 12: mod_base = OTHER; note = Guanosine phosphorothiorate
  modified_base 19: mod_base = OTHER; note = 2'-fluorouridine
  modified_base 27: mod_base = OTHER; note = 2'-fluorouridine
  modified_base 29: mod_base = OTHER; note = 2'-fluoroguanosine
  modified_base 35: mod_base = OTHER; note = 2'-fluoroadenosine
  modified_base 43: mod_base = OTHER; note = 2'-Omethyluridine
  modified_base 45: mod_base = OTHER; note = Guanosine phosphorothiorate
  modified_base 46: mod_base = OTHER; note = 2'-fluoroadenosine
  modified_base 49: mod_base = OTHER; note = 2'-Omethyluridine
  modified_base 55: mod_base = OTHER; note = 2'-fluorocytosine
  modified_base 59: mod_base = OTHER; note = 2'-Omethyluridine phosphorothiorate
  modified_base 67: mod_base = OTHER; note = Adenosine phosphorothiorate
  modified_base 68: mod_base = OTHER; note = Adenosine phosphorothiorate
  modified_base 75: mod_base = OTHER; note = 2'-fluorouridine
  modified_base 80: mod_base = OTHER; note = 2'-Omethylguanosine
  modified_base 84: mod_base = OTHER; note = Cytosine phosphorothiorate

SEQ ID NO: 8250 - RNA, 85 nt, synthetic construct; identical to SEQ ID NO: 3286
  source 1..85: mol_type = other RNA
  modified_base 8: mod_base = OTHER; note = Guanosine phosphorothiorate
  modified_base 33: mod_base = OTHER; note = Uridine phosphorothiorate
  modified_base 45: mod_base = OTHER; note = 2'-Omethylguanosine
  modified_base 56: mod_base = OTHER; note = 2'-fluoroguanosine
  modified_base 77: mod_base = OTHER; note = 2'-fluorocytosine
  modified_base 85: mod_base = OTHER; note = 2'-Omethyladenosine

SEQ ID NO: 8251 - RNA, 76 nt, synthetic construct; identical to SEQ ID NO: 3289
  source 1..76: mol_type = other RNA
  modified_base 1: mod_base = OTHER; note = 2'-Omethylguanosine
  modified_base 43: mod_base = OTHER; note = 2'-Omethyladenosine

SEQ ID NO: 8252 - RNA, 76 nt, synthetic construct; identical to SEQ ID NO: 625
  source 1..76: mol_type = other RNA
  modified_base 1: mod_base = OTHER; note = 2'-Omethylguanosine
  modified_base 2: mod_base = OTHER; note = 2'-Omethylguanosine
  modified_base 3: mod_base = OTHER; note = 2'-Omethylcytosine
  modified_base 4: mod_base = OTHER; note = 2'-Omethyluridine
  modified_base 5: mod_base = OTHER; note = 2'-Omethylcytosine
  modified_base 6: mod_base = OTHER; note = 2'-Omethylcytosine
  modified_base 20: mod_base = OTHER; note = 2'-Omethyluridine
  modified_base 25: mod_base = OTHER; note = 2'-Omethylcytosine
  modified_base 49: mod_base = OTHER; note = 2'-Omethylcytosine
  modified_base 50: mod_base = OTHER; note = 2'-Omethylcytosine
  modified_base 51: mod_base = OTHER; note = 2'-Omethylguanosine
  modified_base 52: mod_base = OTHER; note = 2'-Omethylguanosine
  modified_base 53: mod_base = OTHER; note = 2'-Omethylguanosine
  modified_base 54: mod_base = OTHER; note = 2'-Omethyluridine
  modified_base 61: mod_base = OTHER; note = 2'-Omethylcytosine
  modified_base 62: mod_base = OTHER; note = 2'-Omethylcytosine
  modified_base 63: mod_base = OTHER; note = 2'-fluorocytosine
  modified_base 64: mod_base = OTHER; note = 2'-Omethylguanosine
  modified_base 65: mod_base = OTHER; note = 2'-Omethylguanosine
  modified_base 66: mod_base = OTHER; note = 2'-Omethylcytosine
  modified_base 67: mod_base = OTHER; note = 2'-Omethylguanosine
  modified_base 68: mod_base = OTHER; note = 2'-Omethylguanosine
  modified_base 73: mod_base = OTHER; note = 2'-Omethylguanosine

SEQ ID NO: 8253 - RNA, 85 nt, synthetic construct; identical to SEQ ID NO: 3297
  source 1..85: mol_type = other RNA
  modified_base 1: mod_base = OTHER; note = 2'-Omethylguanosine
  modified_base 13: mod_base = OTHER; note = 2'-Omethylguanosine

SEQ ID NO: 8254 - RNA, 76 nt, synthetic construct; identical to SEQ ID NO: 625
  source 1..76: mol_type = other RNA
  modified_base 1: mod_base = OTHER; note = 2'-Omethylguanosine phosphorothiorate
  modified_base 2: mod_base = OTHER; note = 2'-Omethylguanosine phosphorothiorate
  modified_base 3: mod_base = OTHER; note = 2'-Omethylcytosine phosphorothiorate
  modified_base 4: mod_base = OTHER; note = 2'-Omethyluridine phosphorothiorate
  modified_base 5: mod_base = OTHER; note = 2'-Omethylcytosine phosphorothiorate
  modified_base 6: mod_base = OTHER; note = 2'-Omethylcytosine phosphorothiorate
  modified_base 10: mod_base = OTHER; note = 2'-Omethylguanosine
  modified_base 11: mod_base = OTHER; note = 2'-Omethylcytosine
  modified_base 12: mod_base = OTHER; note = 2'-Omethylguanosine
  modified_base 13: mod_base = OTHER; note = 2'-Omethylcytosine
  modified_base 22: mod_base = OTHER; note = 2'-Omethylguanosine
  modified_base 23: mod_base = OTHER; note = 2'-Omethylcytosine
  modified_base 24: mod_base = OTHER; note = 2'-Omethylguanosine
  modified_base 25: mod_base = OTHER; note = 2'-Omethylcytosine
  modified_base 49: mod_base = OTHER; note = 2'-Omethylcytosine
  modified_base 50: mod_base = OTHER; note = 2'-Omethylcytosine
  modified_base 51: mod_base = OTHER; note = 2'-Omethylguanosine
  modified_base 52: mod_base = OTHER; note = 2'-Omethylguanosine
  modified_base 53: mod_base = OTHER; note = 2'-Omethylguanosine
  modified_base 54: mod_base = OTHER; note = Uridine phosphorothiorate
  modified_base 55: mod_base = OTHER; note = Uridine phosphorothiorate
  modified_base 56: mod_base = OTHER; note = Cytosine phosphorothiorate
  modified_base 57: mod_base = OTHER; note = Guanosine phosphorothiorate

SEQ ID NO: 8255 - DNA, 76 bp, synthetic construct; identical to SEQ ID NO: 1924
  source 1..76: mol_type = other DNA
  modified_base 1: mod_base = OTHER; note = 2'-Omethylguanosine phosphorothiorate
  modified_base 2: mod_base = OTHER; note = 2'-Omethylguanosine
  modified_base 3: mod_base = OTHER; note = 2'-Omethylcytosine
  modified_base 4: mod_base = OTHER; note = Uridine phosphorothiorate
  modified_base 5: mod_base = OTHER; note = 2'-Omethylcytosine
  modified_base 6: mod_base = OTHER; note = 2'-fluorocytosine phosphorothiorate
  modified_base 7: mod_base = OTHER; note = 2'-O-(2-Methoxyethyl) guanosine
  modified_base 8: mod_base = OTHER; note = 2'-fluorouridine
  modified_base 9: mod_base = OTHER; note = 2'-O-(2-Methoxyethyl) guanosine
  modified_base 14: mod_base = OTHER; note = Adenosine phosphorothiorate
  modified_base 18: mod_base = OTHER; note = Guanosine phosphorothiorate
  modified_base 19: mod_base = OTHER; note = 2'-Omethyladenosine
  modified_base 22: mod_base = OTHER; note = Guanosine phosphorothiorate
  modified_base 24: mod_base = OTHER; note = Guanosine phosphorothiorate
  modified_base 25: mod_base = OTHER; note = 2'-O-(2-Methoxyethyl) 5-methylcytosine
  modified_base 26: mod_base = OTHER; note = 2'-O-(2-Methoxyethyl) adenosine phosphorothiorate
  modified_base 29: mod_base = OTHER; note = Guanosine phosphorothiorate
  modified_base 30: mod_base = OTHER; note = 2'-fluoroguanosine phosphorothiorate
  modified_base 31: mod_base = OTHER; note = 2'-Omethyladenosine
  modified_base 33: mod_base = OTHER; note = Uridine phosphorothiorate
  modified_base 34: mod_base = OTHER; note = 2'-Omethyluridine
  modified_base 35: mod_base = OTHER; note = 2'-fluorocytosine
  modified_base 37: mod_base = OTHER; note = Adenosine phosphorothiorate
  modified_base 38: mod_base = OTHER; note = 2'-O-(2-Methoxyethyl) adenosine
  modified_base 39: mod_base = OTHER; note = Uridine phosphorothiorate
  modified_base 40: mod_base = OTHER; note = 2'-Omethyluridine phosphorothiorate
  modified_base 41: mod_base = OTHER; note = 2'-O-(2-Methoxyethyl) 5-methylcytosine phosphorothiorate
  modified_base 42: mod_base = OTHER; note = Adenosine phosphorothiorate
  modified_base 49: mod_base = OTHER; note = 2'-O-(2-Methoxyethyl) 5-methylcytosine phosphorothiorate
  modified_base 52: mod_base = OTHER; note = 2'-fluoroguanosine phosphorothiorate
  modified_base 53: mod_base = OTHER; note = Guanosine phosphorothiorate
  modified_base 62: mod_base = OTHER; note = 2'-O-(2-Methoxyethyl) 5-methylcytosine phosphorothiorate
  modified_base 65: mod_base = OTHER; note = 2'-O-(2-Methoxyethyl) guanosine phosphorothiorate
  modified_base 68: mod_base = OTHER; note = 2'-Omethylguanosine
  modified_base 75: mod_base = OTHER; note = 2'-O-(2-Methoxyethyl) 5-methylcytosine
  modified_base 76: mod_base = OTHER; note = 2'-fluoroadenosine
  misc_feature 1..11: note = RNA
  misc_feature 12: note = DNA
  misc_feature 13..14: note = RNA
  misc_feature 15: note = DNA
  misc_feature 16..42: note = RNA
  misc_feature 43: note = DNA
  misc_feature 44..62: note = RNA
  misc_feature 63: note = DNA
  misc_feature 64..76: note = RNA

SEQ ID NO: 8256 - RNA, 75 nt, synthetic construct; identical to SEQ ID NO: 3311
  source 1..75: mol_type = other RNA
  modified_base 2: mod_base = OTHER; note = 2'-Omethylguanosine phosphorothiorate
  modified_base 6: mod_base = OTHER; note = 2'-fluorocytosine phosphorothiorate
  modified_base 12: mod_base = OTHER; note = 2'-Omethylguanosine
  modified_base 22: mod_base = OTHER; note = Guanosine phosphorothiorate
  modified_base 23: mod_base = OTHER; note = 2'-fluorocytosine
  modified_base 33: mod_base = OTHER; note = 2'-fluorouridine
  modified_base 47: mod_base = OTHER; note = 2'-fluorouridine
  modified_base 58: mod_base = OTHER; note = 2'-fluoroguanosine
  modified_base 73: mod_base = OTHER; note = Cytosine phosphorothiorate

SEQ ID NO: 8257 - RNA, 76 nt, synthetic construct; identical to SEQ ID NO: 625
  source 1..76: mol_type = other RNA
  modified_base 1: mod_base = OTHER; note = 2'-Omethylguanosine
  modified_base 5: mod_base = OTHER; note = 2'-fluorocytosine
  modified_base 6: mod_base = OTHER; note = 2'-Omethylcytosine
  modified_base 7: mod_base = OTHER; note = Guanosine phosphorothiorate
  modified_base 10: mod_base = OTHER; note = Guanosine phosphorothiorate
  modified_base 11: mod_base = OTHER; note = 2'-Omethylcytosine phosphorothiorate
  modified_base 12: mod_base = OTHER; note = 2'-Omethylguanosine phosphorothiorate
  modified_base 13: mod_base = OTHER; note = 2'-fluorocytosine
  modified_base 16: mod_base = OTHER; note = 2'-fluorouridine phosphorothiorate
  modified_base 17: mod_base = OTHER; note = 2'-Omethylguanosine
  modified_base 20: mod_base = OTHER; note = 2'-fluorouridine phosphorothiorate
  modified_base 22: mod_base = OTHER; note = Guanosine phosphorothiorate
  modified_base 23: mod_base = OTHER; note = 2'-fluorocytosine phosphorothiorate
  modified_base 26: mod_base = OTHER; note = 2'-Omethyladenosine
  modified_base 38: mod_base = OTHER; note = 2'-Omethyladenosine
  modified_base 41: mod_base = OTHER; note = Cytosine phosphorothiorate
  modified_base 42: mod_base = OTHER; note = 2'-fluoroadenosine
  modified_base 47: mod_base = OTHER; note = 2'-fluorouridine
  modified_base 49: mod_base = OTHER; note = Cytosine phosphorothiorate
  modified_base 50: mod_base = OTHER; note = 2'-fluorocytosine
  modified_base 52: mod_base = OTHER; note = Guanosine phosphorothiorate
  modified_base 54: mod_base = OTHER; note = 2'-fluorouridine
  modified_base 55: mod_base = OTHER; note = Uridine phosphorothiorate
  modified_base 57: mod_base = OTHER; note = 2'-Omethylguanosine
  modified_base 59: mod_base = OTHER; note = Guanosine phosphorothiorate
  modified_base 60: mod_base = OTHER; note = 2'-Omethyluridine
  modified_base 61: mod_base = OTHER; note = 2'-Omethylcytosine
  modified_base 63: mod_base = OTHER; note = 2'-Omethylcytosine
  modified_base 69: mod_base = OTHER; note = 2'-Omethyladenosine
  modified_base 70: mod_base = OTHER; note = 2'-fluoroguanosine phosphorothiorate
  modified_base 71: mod_base = OTHER; note = 2'-Omethyluridine
  modified_base 72: mod_base = OTHER; note = 2'-Omethylcytosine
  modified_base 73: mod_base = OTHER; note = 2'-Omethylguanosine
  modified_base 76: mod_base = OTHER; note = 2'-Omethyladenosine

SEQ ID NO: 8258 - RNA, 76 nt, synthetic construct; identical to SEQ ID NO: 625
  source 1..76: mol_type = other RNA
  modified_base 1: mod_base = OTHER; note = 2'-Omethylguanosine phosphorothiorate
  modified_base 2: mod_base = OTHER; note = 2'-Omethylguanosine
  modified_base 3: mod_base = OTHER; note = 2'-Omethylcytosine
  modified_base 4: mod_base = OTHER; note = 2'-Omethyluridine
  modified_base 5: mod_base = OTHER; note = 2'-Omethylcytosine
  modified_base 6: mod_base = OTHER; note = 2'-Omethylcytosine
  modified_base 10: mod_base = OTHER; note = 2'-Omethylguanosine
  modified_base 11: mod_base = OTHER; note = 2'-Omethylcytosine
  modified_base 12: mod_base = OTHER; note = 2'-Omethylguanosine
  modified_base 13: mod_base = OTHER; note = 2'-Omethylcytosine
  modified_base 14: mod_base = OTHER; note = 2'-Omethyladenosine
  modified_base 15: mod_base = OTHER; note = 2'-fluoroadenosine
  modified_base 16: mod_base = OTHER; note = 2'-Omethyluridine
  modified_base 17: mod_base = OTHER; note = 2'-Omethylguanosine
  modified_base 18: mod_base = OTHER; note = 2'-Omethylguanosine
  modified_base 19: mod_base = OTHER; note = 2'-fluoroadenosine
  modified_base 20: mod_base = OTHER; note = 2'-Omethyluridine
  modified_base 22: mod_base = OTHER; note = 2'-Omethylguanosine
  modified_base 23: mod_base = OTHER; note = 2'-Omethylcytosine
  modified_base 24: mod_base = OTHER; note = 2'-Omethylguanosine
  modified_base 25: mod_base = OTHER; note = 2'-Omethylcytosine
  modified_base 38: mod_base = OTHER; note = Adenosine phosphorothiorate
  modified_base 39: mod_base = OTHER; note = Uridine phosphorothiorate
  modified_base 40: mod_base = OTHER; note = 2'-fluorouridine
  modified_base 43: mod_base = OTHER; note = 2'-Omethyladenosine
  modified_base 44: mod_base = OTHER; note = 2'-Omethyladenosine
  modified_base 45: mod_base = OTHER; note = 2'-Omethylguanosine
  modified_base 46: mod_base = OTHER; note = 2'-fluoroguanosine
  modified_base 48: mod_base = OTHER; note = 2'-fluorouridine
  modified_base 49: mod_base = OTHER; note = 2'-Omethylcytosine
  modified_base 50: mod_base = OTHER; note = 2'-Omethylcytosine
  modified_base 54: mod_base = OTHER; note = Uridine phosphorothiorate
  modified_base 55: mod_base = OTHER; note = Uridine phosphorothiorate
  modified_base 56: mod_base = OTHER; note = 2'-Omethylcytosine
  modified_base 57: mod_base = OTHER; note = Guanosine phosphorothiorate
  modified_base 61: mod_base = OTHER; note = 2'-Omethylcytosine
  modified_base 62: mod_base = OTHER; note = 2'-Omethylcytosine
  modified_base 63: mod_base = OTHER; note = 2'-fluorocytosine
  modified_base 64: mod_base = OTHER; note = 2'-Omethylguanosine
  modified_base 65: mod_base = OTHER; note = 2'-Omethylguanosine
  modified_base 66: mod_base = OTHER; note = 2'-Omethylcytosine
  modified_base 67: mod_base = OTHER; note = 2'-Omethylguanosine
  modified_base 68: mod_base = OTHER; note = 2'-Omethylguanosine
  modified_base 69: mod_base = OTHER; note = 2'-fluoroadenosine

SEQ ID NO: 8259 - RNA, 73 nt, synthetic construct; identical to SEQ ID NO: 935
  source 1..73: mol_type = other RNA
  modified_base 1: mod_base = OTHER; note = 2'-Omethylguanosine phosphorothiorate
  modified_base 2: mod_base = OTHER; note = 2'-Omethylguanosine
  modified_base 16: mod_base = OTHER; note = 2'-fluorouridine
  modified_base 72: mod_base = OTHER; note = 2'-Omethylcytosine

SEQ ID NO: 8260 - RNA, 85 nt, synthetic construct; identical to SEQ ID NO: 3317
  source 1..85: mol_type = other RNA
  modified_base 1: mod_base = OTHER; note = 2'-Omethylguanosine phosphorothiorate
  modified_base 2: mod_base = OTHER; note = 2'-Omethylcytosine phosphorothiorate
  modified_base 4: mod_base = OTHER; note = Guanosine phosphorothiorate
  modified_base 12: mod_base = OTHER; note = 2'-fluorocytosine
  modified_base 16: mod_base = OTHER; note = 2'-Omethyluridine phosphorothiorate
  modified_base 22: mod_base = OTHER; note = 2'-Omethyladenosine phosphorothiorate
  modified_base 23: mod_base = OTHER; note = 2'-fluoroguanosine
  modified_base 25: mod_base = OTHER; note = Cytosine phosphorothiorate
  modified_base 37: mod_base = OTHER; note = 2'-fluoroadenosine
  modified_base 39: mod_base = OTHER; note = 2'-fluorouridine
  modified_base 43: mod_base = OTHER; note = 2'-fluoroadenosine
  modified_base 46: mod_base = OTHER; note = 2'-Omethylguanosine phosphorothiorate
  modified_base 51: mod_base = OTHER; note = 2'-fluorouridine
  modified_base 52: mod_base = OTHER; note = 2'-fluorocytosine
  modified_base 56: mod_base = OTHER; note = 2'-fluoroguanosine phosphorothiorate
  modified_base 59: mod_base = OTHER; note = 2'-Omethylcytosine
  modified_base 80: mod_base = OTHER; note = 2'-Omethylguanosine
  modified_base 82: mod_base = OTHER; note = 2'-fluoroguanosine

SEQ ID NO: 8261 - RNA, 76 nt, synthetic construct; identical to SEQ ID NO: 3289
  source 1..76: mol_type = other RNA
  modified_base 1: mod_base = OTHER; note = 2'-Omethylguanosine phosphorothiorate
  modified_base 2: mod_base = OTHER; note = 2'-Omethylcytosine phosphorothiorate
  modified_base 3: mod_base = OTHER; note = 2'-Omethylcytosine
  modified_base 4: mod_base = OTHER; note = 2'-Omethyluridine
  modified_base 5: mod_base = OTHER; note = 2'-Omethylguanosine
  modified_base 6: mod_base = OTHER; note = 2'-Omethylguanosine
  modified_base 16: mod_base = OTHER; note = 2'-Omethyluridine
  modified_base 18: mod_base = OTHER; note = 2'-Omethylguanosine
  modified_base 19: mod_base = OTHER; note = 2'-Omethylguanosine
  modified_base 25: mod_base = OTHER; note = 2'-Omethylcytosine
  modified_base 33: mod_base = OTHER; note = 2'-fluorouridine
  modified_base 35: mod_base = OTHER; note = Uridine phosphorothiorate
  modified_base 37: mod_base = OTHER; note = Adenosine phosphorothiorate
  modified_base 38: mod_base = OTHER; note = Adenosine phosphorothiorate
  modified_base 41: mod_base = OTHER; note = 2'-Omethyluridine
  modified_base 44: mod_base = OTHER; note = 2'-Omethylguanosine
  modified_base 45: mod_base = OTHER; note = 2'-Omethylguanosine
  modified_base 46: mod_base = OTHER; note = 2'-fluoroguanosine
  modified_base 47: mod_base = OTHER; note = 2'-fluorouridine
  modified_base 48: mod_base = OTHER; note = 2'-fluorocytosine
  modified_base 56: mod_base = OTHER; note = 2'-Omethylcytosine
  modified_base 59: mod_base = OTHER; note = 2'-Omethylguanosine
  modified_base 61: mod_base = OTHER; note = 2'-Omethylcytosine
  modified_base 62: mod_base = OTHER; note = 2'-Omethylcytosine
  modified_base 63: mod_base = OTHER; note = 2'-fluorocytosine
  modified_base 64: mod_base = OTHER; note = 2'-Omethyluridine
  modified_base 65: mod_base = OTHER; note = 2'-Omethylguanosine
  modified_base 66: mod_base = OTHER; note = 2'-Omethyluridine
  modified_base 67: mod_base = OTHER; note = 2'-Omethylcytosine
  modified_base 68: mod_base = OTHER; note = 2'-Omethylcytosine
  modified_base 73: mod_base = OTHER; note = 2'-Omethylguanosine

SEQ ID NO: 8262 - RNA, 75 nt, synthetic construct; identical to SEQ ID NO: 3311
  source 1..75: mol_type = other RNA
  modified_base 2: mod_base = OTHER; note = 2'-Omethylguanosine phosphorothiorate
  modified_base 12: mod_base = OTHER; note = 2'-Omethylguanosine
  modified_base 22: mod_base = OTHER; note = 2'-fluoroguanosine
  modified_base 25: mod_base = OTHER; note = Cytosine phosphorothiorate
  modified_base 26: mod_base = OTHER; note = 2'-fluorouridine
  modified_base 41: mod_base = OTHER; note = 2'-fluorocytosine
  modified_base 42: mod_base = OTHER; note = 2'-Omethyladenosine
  modified_base 53: mod_base = OTHER; note = 2'-fluorouridine phosphorothiorate
  modified_base 61: mod_base = OTHER; note = Uridine phosphorothiorate
  modified_base 73: mod_base = OTHER; note = Cytosine phosphorothiorate
  modified_base 75: mod_base = OTHER; note = 2'-Omethyladenosine

SEQ ID NO: 8263 - RNA, 76 nt, synthetic construct; identical to SEQ ID NO: 3318
  source 1..76: mol_type = other RNA
  modified_base 1: mod_base = OTHER; note = 2'-Omethylcytosine
  modified_base 18: mod_base = OTHER; note = 2'-Omethylguanosine
  modified_base 19: mod_base = OTHER; note = 2'-Omethylguanosine
  modified_base 50: mod_base = OTHER; note = 2'-Omethylcytosine
  modified_base 52: mod_base = OTHER; note = 2'-Omethylguanosine
  modified_base 73: mod_base = OTHER; note = 2'-Omethyladenosine

SEQ ID NO: 8264 - RNA, 76 nt, synthetic construct; identical to SEQ ID NO: 3615
  source 1..76: mol_type = other RNA
  modified_base 1: mod_base = OTHER; note = 2'-Omethylguanosine
  modified_base 17: mod_base = OTHER; note = 2'-Omethylguanosine
  modified_base 18: mod_base = OTHER; note = 2'-Omethylguanosine
  modified_base 50: mod_base = OTHER; note = 2'-Omethylcytosine
  modified_base 52: mod_base = OTHER; note = 2'-Omethylguanosine
  modified_base 73: mod_base = OTHER; note = 2'-Omethylguanosine

SEQ ID NO: 8265 - RNA, 76 nt, synthetic construct; identical to SEQ ID NO: 625
  source 1..76: mol_type = other RNA
  modified_base 5: mod_base = OTHER; note = Cytosine phosphorothiorate
  modified_base 6: mod_base = OTHER; note = 2'-Omethylcytosine phosphorothiorate
  modified_base 8: mod_base = OTHER; note = Uridine phosphorothiorate
  modified_base 11: mod_base = OTHER; note = 2'-fluorocytosine
  modified_base 13: mod_base = OTHER; note = 2'-Omethylcytosine
  modified_base 14: mod_base = OTHER; note = 2'-Omethyladenosine
  modified_base 18: mod_base = OTHER; note = 2'-fluoroguanosine
  modified_base 21: mod_base = OTHER; note = Adenosine phosphorothiorate
  modified_base 23: mod_base = OTHER; note = 2'-fluorocytosine
  modified_base 24: mod_base = OTHER; note = 2'-fluoroguanosine
  modified_base 25: mod_base = OTHER; note = Cytosine phosphorothiorate
  modified_base 26: mod_base = OTHER; note = 2'-Omethyladenosine
  modified_base 28: mod_base = OTHER; note = 2'-Omethyluridine
  modified_base 30: mod_base = OTHER; note = 2'-Omethylguanosine
  modified_base 40: mod_base = OTHER; note = 2'-Omethyluridine
  modified_base 41: mod_base = OTHER; note = Cytosine phosphorothiorate
  modified_base 47: mod_base = OTHER; note = 2'-Omethyluridine
  modified_base 48: mod_base = OTHER; note = Uridine phosphorothiorate
  modified_base 53: mod_base = OTHER; note = 2'-fluoroguanosine
  modified_base 54: mod_base = OTHER; note = Uridine phosphorothiorate
  modified_base 55: mod_base = OTHER; note = Uridine phosphorothiorate
  modified_base 56: mod_base = OTHER; note = 2'-fluorocytosine
  modified_base 57: mod_base = OTHER; note = 2'-Omethylguanosine
  modified_base 59: mod_base = OTHER; note = 2'-fluoroguanosine
  modified_base 60: mod_base = OTHER; note = 2'-fluorouridine phosphorothiorate
  modified_base 63: mod_base = OTHER; note = Cytosine phosphorothiorate
  modified_base 66: mod_base = OTHER; note = 2'-Omethylcytosine
  modified_base 68: mod_base = OTHER; note = 2'-Omethylguanosine
  modified_base 69: mod_base = OTHER; note = 2'-fluoroadenosine
  modified_base 71: mod_base = OTHER; note = 2'-Omethyluridine
  modified_base 72: mod_base = OTHER; note = 2'-Omethylcytosine
  modified_base 73: mod_base = OTHER; note = 2'-fluoroguanosine

SEQ ID NO: 8266 - RNA, 75 nt, synthetic construct; identical to SEQ ID NO: 1045
  source 1..75: mol_type = other RNA
  modified_base 1: mod_base = OTHER; note = 2'-Omethylguanosine
  modified_base 14: mod_base = OTHER; note = 2'-Omethyladenosine
  modified_base 15: mod_base = OTHER; note = 2'-Omethyladenosine
  modified_base 16: mod_base = OTHER; note = 2'-Omethyluridine
  modified_base 17: mod_base = OTHER; note = 2'-Omethylguanosine
  modified_base 18: mod_base = OTHER; note = 2'-Omethylguanosine
  modified_base 19: mod_base = OTHER; note = Uridine phosphorothiorate
  modified_base 20: mod_base = OTHER; note = 2'-Omethyladenosine
  modified_base 21: mod_base = OTHER; note = Adenosine phosphorothiorate
  modified_base 33: mod_base = OTHER; note = Uridine phosphorothiorate
  modified_base 34: mod_base = OTHER; note = 2'-Omethyluridine
  modified_base 35: mod_base = OTHER; note = Uridine phosphorothiorate
  modified_base 37: mod_base = OTHER; note = Adenosine phosphorothiorate
  modified_base 38: mod_base = OTHER; note = Adenosine phosphorothiorate
  modified_base 41: mod_base = OTHER; note = 2'-fluorocytosine
  modified_base 42: mod_base = OTHER; note = 2'-Omethyladenosine
  modified_base 43: mod_base = OTHER; note = 2'-Omethylguanosine
  modified_base 44: mod_base = OTHER; note = 2'-fluorocytosine
  modified_base 49: mod_base = OTHER; note = 2'-Omethylcytosine
  modified_base 51: mod_base = OTHER; note = 2'-Omethyladenosine
  modified_base 72: mod_base = OTHER; note = 2'-Omethyluridine

SEQ ID NO: 8267 - RNA, 85 nt, synthetic construct; identical to SEQ ID NO: 3317
  source 1..85: mol_type = other RNA
  modified_base 1: mod_base = OTHER; note = 2'-Omethylguanosine phosphorothiorate
  modified_base 5: mod_base = OTHER; note = Uridine phosphorothiorate
  modified_base 7: mod_base = OTHER; note = 2'-Omethyladenosine
  modified_base 18: mod_base = OTHER; note = 2'-Omethylguanosine phosphorothiorate
  modified_base 24: mod_base = OTHER; note = 2'-fluoroguanosine
  modified_base 25: mod_base = OTHER; note = 2'-fluorocytosine
  modified_base 31: mod_base = OTHER; note = 2'-fluoroadenosine
  modified_base 33: mod_base = OTHER; note = 2'-fluorouridine
  modified_base 40: mod_base = OTHER; note = Cytosine phosphorothiorate
  modified_base 48: mod_base = OTHER; note = 2'-Omethylguanosine
  modified_base 53: mod_base = OTHER; note = Cytosine phosphorothiorate
  modified_base 58: mod_base = OTHER; note = 2'-fluoroguanosine
  modified_base 63: mod_base = OTHER; note = Uridine phosphorothiorate
  modified_base 65: mod_base = OTHER; note = 2'-fluorocytosine
  modified_base 80: mod_base = OTHER; note = 2'-fluoroguanosine
  modified_base 82: mod_base = OTHER; note = 2'-Omethylguanosine phosphorothiorate
  modified_base 85: mod_base = OTHER; note = 2'-fluoroadenosine

SEQ ID NO: 8268 - RNA, 76 nt, synthetic construct; identical to SEQ ID NO: 3318
  source 1..76: mol_type = other RNA
  modified_base 1: mod_base = OTHER; note = 2'-Omethylcytosine
  modified_base 16: mod_base = OTHER; note = 2'-Omethyluridine
  modified_base 18: mod_base = OTHER; note = 2'-Omethylguanosine
  modified_base 19: mod_base = OTHER; note = 2'-Omethylguanosine
  modified_base 54: mod_base = OTHER; note = 2'-Omethyluridine
  modified_base 55: mod_base = OTHER; note = Uridine phosphorothiorate
  modified_base 56: mod_base = OTHER; note = 2'-Omethylcytosine
  modified_base 59: mod_base = OTHER; note = 2'-Omethyladenosine
  modified_base 73: mod_base = OTHER; note = 2'-Omethyladenosine

SEQ ID NO: 8269 - RNA, 76 nt, synthetic construct; identical to SEQ ID NO: 625
  source 1..76: mol_type = other RNA
  modified_base 27: mod_base = OTHER; note = 2'-O-(2-Methoxyethyl) thymine
  modified_base 28: mod_base = OTHER; note = 2'-O-(2-Methoxyethyl) thymine
  modified_base 29: mod_base = OTHER; note = 2'-O-(2-Methoxyethyl) guanosine
  modified_base 30: mod_base = OTHER; note = 2'-O-(2-Methoxyethyl) guanosine
  modified_base 31: mod_base = OTHER; note = 2'-O-(2-Methoxyethyl) adenosine
  modified_base 39: mod_base = OTHER; note = 2'-O-(2-Methoxyethyl) thymine
  modified_base 40: mod_base = OTHER; note = 2'-O-(2-Methoxyethyl) thymine
  modified_base 41: mod_base = OTHER; note = 2'-O-(2-Methoxyethyl) cytosine
  modified_base 42: mod_base = OTHER; note = 2'-O-(2-Methoxyethyl) adenosine
  modified_base 43: mod_base = OTHER; note = 2'-O-(2-Methoxyethyl) adenosine

SEQ ID NO: 8270 - RNA, 76 nt, synthetic construct; identical to SEQ ID NO: 625
  source 1..76: mol_type = other RNA
  modified_base 1: mod_base = OTHER; note = 2'-Omethylguanosine
  modified_base 33: mod_base = OTHER; note = 2'-O-(2-Methoxyethyl) thymine
  modified_base 40: mod_base = OTHER; note = 2'-Omethyluridine phosphorothiorate
  modified_base 41: mod_base = OTHER; note = 2'-Omethylcytosine
  modified_base 42: mod_base = OTHER; note = 2'-fluoroadenosine phosphorothiorate
  modified_base 43: mod_base = OTHER; note = 2'-Omethyladenosine phosphorothiorate
  modified_base 73: mod_base = OTHER; note = 2'-Omethylguanosine

SEQ ID NO: 8271 - RNA, 76 nt, synthetic construct; identical to SEQ ID NO: 625
  source 1..76: mol_type = other RNA
  modified_base 1: mod_base = OTHER; note = Guanosine phosphorothiorate
  modified_base 2: mod_base = OTHER; note = 2'-Omethylguanosine
  modified_base 3: mod_base = OTHER; note = Cytosine phosphorothiorate
  modified_base 4: mod_base = OTHER; note = 2'-fluorouridine
  modified_base 5: mod_base = OTHER; note = 2'-Omethylcytosine
  modified_base 11: mod_base = OTHER; note = 2'-Omethylcytosine
  modified_base 16: mod_base = OTHER; note = Uridine phosphorothiorate
  modified_base 17: mod_base = OTHER; note = Guanosine phosphorothiorate
  modified_base 18: mod_base = OTHER; note = 2'-Omethylguanosine
  modified_base 24: mod_base = OTHER; note = 2'-fluoroguanosine phosphorothiorate
  modified_base 25: mod_base = OTHER; note = 2'-fluorocytosine
  modified_base 26: mod_base = OTHER; note = Adenosine phosphorothiorate
  modified_base 27: mod_base = OTHER; note = 2'-Omethyluridine
  modified_base 28: mod_base = OTHER; note = 2'-Omethyluridine
  modified_base 29: mod_base = OTHER; note = Guanosine phosphorothiorate
  modified_base 30: mod_base = OTHER; note = 2'-fluoroguanosine
  modified_base 32: mod_base = OTHER; note = 2'-fluorocytosine
  modified_base 34: mod_base = OTHER; note = Uridine phosphorothiorate
  modified_base 38: mod_base = OTHER; note = Adenosine phosphorothiorate
  modified_base 39: mod_base = OTHER; note = 2'-Omethyluridine
  modified_base 40: mod_base = OTHER; note = Uridine phosphorothiorate
  modified_base 41: mod_base = OTHER; note = 2'-Omethylcytosine
  modified_base 42: mod_base = OTHER; note = Adenosine phosphorothiorate
  modified_base 43: mod_base = OTHER; note = 2'-fluoroadenosine
  modified_base 46: mod_base = OTHER; note = 2'-Omethylguanosine
  modified_base 48: mod_base = OTHER; note = 2'-Omethyluridine
  modified_base 52: mod_base = OTHER; note = 2'-Omethylguanosine phosphorothiorate
  modified_base 53: mod_base = OTHER; note = 2'-Omethylguanosine
  modified_base 55: mod_base = OTHER; note = Uridine phosphorothiorate
  modified_base 56: mod_base = OTHER; note = 2'-Omethylcytosine
  modified_base 59: mod_base = OTHER; note = 2'-fluoroguanosine
  modified_base 60: mod_base = OTHER; note = 2'-fluorouridine
  modified_base 61: mod_base = OTHER; note = 2'-Omethylcytosine
  modified_base 65: mod_base = OTHER; note = Guanosine phosphorothiorate
  modified_base 70: mod_base = OTHER; note = Guanosine phosphorothiorate
  modified_base 72: mod_base = OTHER; note = Cytosine phosphorothiorate
  modified_base 75: mod_base = OTHER; note = 2'-fluorocytosine

SEQ ID NO: 8272 - RNA, 76 nt, synthetic construct; identical to SEQ ID NO: 625
  source 1..76: mol_type = other RNA
  modified_base 1: mod_base = OTHER; note = Guanosine phosphorothiorate
  modified_base 2: mod_base = OTHER; note = Guanosine phosphorothiorate
  modified_base 3: mod_base = OTHER; note = 2'-fluorocytosine
  modified_base 11: mod_base = OTHER; note = Cytosine phosphorothiorate
  modified_base 12: mod_base = OTHER; note = 2'-fluoroguanosine
  modified_base 13: mod_base = OTHER; note = 2'-fluorocytosine
  modified_base 16: mod_base = OTHER; note = 2'-fluorouridine
  modified_base 22: mod_base = OTHER; note = 2'-Omethylguanosine
  modified_base 24: mod_base = OTHER; note = Guanosine phosphorothiorate
  modified_base 25: mod_base = OTHER; note = 2'-fluorocytosine
  modified_base 27: mod_base = OTHER; note = Uridine phosphorothiorate
  modified_base 28: mod_base = OTHER; note = 2'-fluorouridine
  modified_base 30: mod_base = OTHER; note = 2'-Omethylguanosine
  modified_base 34: mod_base = OTHER; note = 2'-Omethyluridine
  modified_base 38: mod_base = OTHER; note = 2'-Omethyladenosine
  modified_base 39: mod_base = OTHER; note = 2'-Omethyluridine phosphorothiorate
  modified_base 40: mod_base = OTHER; note = 2'-fluorouridine phosphorothiorate
  modified_base 41: mod_base = OTHER; note = 2'-fluorocytosine
  modified_base 43: mod_base = OTHER; note = 2'-fluoroadenosine
  modified_base 45: mod_base = OTHER; note = Guanosine phosphorothiorate
  modified_base 46: mod_base = OTHER; note = 2'-Omethylguanosine
  modified_base 47: mod_base = OTHER; note = 2'-Omethyluridine
  modified_base 49: mod_base = OTHER; note = 2'-fluorocytosine
  modified_base 50: mod_base = OTHER; note = Cytosine phosphorothiorate
  modified_base 52: mod_base = OTHER; note = 2'-Omethylguanosine
  modified_base 55: mod_base = OTHER; note = Uridine phosphorothiorate
  modified_base 56: mod_base = OTHER; note = 2'-fluorocytosine
  modified_base 57: mod_base = OTHER; note = 2'-Omethylguanosine
  modified_base 60: mod_base = OTHER; note = 2'-fluorouridine
  modified_base 61: mod_base = OTHER; note = Cytosine phosphorothiorate
  modified_base 62: mod_base = OTHER; note = 2'-fluorocytosine phosphorothiorate
  modified_base 63: mod_base = OTHER; note = 2'-Omethylcytosine
  modified_base 64: mod_base = OTHER; note = 2'-Omethylguanosine
  modified_base 67: mod_base = OTHER; note = Guanosine phosphorothiorate
  modified_base 68: mod_base = OTHER; note = 2'-Omethylguanosine
  modified_base 69: mod_base = OTHER; note = 2'-Omethyladenosine
  modified_base 72: mod_base = OTHER; note = 2'-Omethylcytosine
  modified_base 73: mod_base = OTHER; note = 2'-fluoroguanosine phosphorothiorate
  modified_base 75: mod_base = OTHER; note = 2'-Omethylcytosine

SEQ ID NO: 8273 - RNA, 76 nt, synthetic construct; identical to SEQ ID NO: 625
  source 1..76: mol_type = other RNA
  modified_base 2: mod_base = OTHER; note = Guanosine phosphorothiorate
  modified_base 3: mod_base = OTHER; note = 2'-Omethylcytosine
  modified_base 10: mod_base = OTHER; note = Guanosine phosphorothiorate
  modified_base 11: mod_base = OTHER; note = 2'-Omethylcytosine
  modified_base 13: mod_base = OTHER; note = 2'-fluorocytosine phosphorothiorate
  modified_base 14: mod_base = OTHER; note = 2'-Omethyladenosine
  modified_base 18: mod_base = OTHER; note = 2'-fluoroguanosine
  modified_base 21: mod_base = OTHER; note = Adenosine phosphorothiorate
  modified_base 25: mod_base = OTHER; note = Cytosine phosphorothiorate
  modified_base 26: mod_base = OTHER; note = 2'-Omethyladenosine phosphorothiorate
  modified_base 27: mod_base = OTHER; note = 2'-Omethyluridine phosphorothiorate
  modified_base 28: mod_base = OTHER; note = 2'-Omethyluridine
  modified_base 31: mod_base = OTHER; note = 2'-fluoroadenosine
  modified_base 36: mod_base = OTHER; note = Adenosine phosphorothiorate
  modified_base 38: mod_base = OTHER; note = 2'-Omethyladenosine
  modified_base 41: mod_base = OTHER; note = 2'-fluorocytosine
  modified_base 42: mod_base = OTHER; note = 2'-Omethyladenosine phosphorothiorate
  modified_base 43: mod_base = OTHER; note = 2'-Omethyladenosine
  modified_base 45: mod_base = OTHER; note = 2'-fluoroguanosine
  modified_base 46: mod_base = OTHER; note = 2'-Omethylguanosine
  modified_base 47: mod_base = OTHER; note = 2'-Omethyluridine
  modified_base 48: mod_base = OTHER; note = 2'-fluorouridine
  modified_base 53: mod_base = OTHER; note = 2'-fluoroguanosine
  modified_base 54: mod_base = OTHER; note = 2'-Omethyluridine
  modified_base 55: mod_base = OTHER; note = Uridine phosphorothiorate
  modified_base 56: mod_base = OTHER; note = 2'-Omethylcytosine
  modified_base 58: mod_base = OTHER; note = Adenosine phosphorothiorate
  modified_base 59: mod_base = OTHER; note = 2'-Omethylguanosine
  modified_base 60: mod_base = OTHER; note = 2'-Omethyluridine
  modified_base 61: mod_base = OTHER; note = 2'-Omethylcytosine
  modified_base 64: mod_base = OTHER; note = 2'-Omethylguanosine
  modified_base 65: mod_base = OTHER; note = 2'-Omethylguanosine phosphorothiorate
  modified_base 71: mod_base = OTHER; note = 2'-Omethyluridine
  modified_base 73: mod_base = OTHER; note = 2'-fluoroguanosine phosphorothiorate
  modified_base 74: mod_base = OTHER; note = 2'-Omethylcytosine phosphorothiorate

SEQ ID NO: 8274 - RNA, 76 nt, synthetic construct; identical to SEQ ID NO: 625
  source 1..76: mol_type = other RNA
  modified_base 1: mod_base = OTHER; note = 2'-Omethylguanosine
  modified_base 2: mod_base = OTHER; note = 2'-Omethylguanosine
  modified_base 13: mod_base = OTHER; note = 2'-Omethylcytosine
  modified_base 33: mod_base = OTHER; note = 2'-fluorouridine
  modified_base 37: mod_base = OTHER; note = Adenosine phosphorothiorate
  modified_base 52: mod_base = OTHER; note = 2'-Omethylguanosine
  modified_base 56: mod_base = OTHER; note = 2'-Omethylcytosine
  modified_base 62: mod_base = OTHER; note = 2'-Omethylcytosine
  modified_base 63: mod_base = OTHER; note = 2'-fluorocytosine
  modified_base 73: mod_base = OTHER; note = 2'-Omethylguanosine
  modified_base 75: mod_base = OTHER; note = 2'-fluorocytosine phosphorothiorate

SEQ ID NO: 8275 - RNA, 75 nt, synthetic construct; identical to SEQ ID NO: 3336
  source 1..75: mol_type = other RNA
  modified_base 13: mod_base = OTHER; note = 2'-fluoroadenosine
  modified_base 14: mod_base = OTHER; note = 2'-fluoroguanosine
  modified_base 19: mod_base = OTHER; note = Uridine phosphorothiorate
  modified_base 21: mod_base = OTHER; note = 2'-fluoroguanosine
  modified_base 26: mod_base = OTHER; note = Uridine phosphorothiorate
  modified_base 27: mod_base = OTHER; note = Cytosine phosphorothiorate
  modified_base 47: mod_base = OTHER; note = 2'-fluorocytosine
  modified_base 49: mod_base = OTHER; note = 2'-fluoroadenosine
  modified_base 73: mod_base = OTHER; note = Cytosine phosphorothiorate
  modified_base 74: mod_base = OTHER; note = 2'-Omethylcytosine

SEQ ID NO: 8276 - RNA, 75 nt, synthetic construct; identical to SEQ ID NO: 3336
  source 1..75: mol_type = other RNA
  modified_base 1: mod_base = OTHER; note = 2'-Omethylcytosine phosphorothiorate
  modified_base 11: mod_base = OTHER; note = Uridine phosphorothiorate
  modified_base 17: mod_base = OTHER; note = 2'-fluoroguanosine phosphorothiorate
  modified_base 18: mod_base = OTHER; note = 2'-fluoroguanosine
  modified_base 25: mod_base = OTHER; note = Adenosine phosphorothiorate
  modified_base 26: mod_base = OTHER; note = Uridine phosphorothiorate
  modified_base 28: mod_base = OTHER; note = 2'-fluoroadenosine
  modified_base 36: mod_base = OTHER; note = 2'-fluoroadenosine
  modified_base 46: mod_base = OTHER; note = 2'-fluorouridine
  modified_base 63: mod_base = OTHER; note = 2'-fluorouridine phosphorothiorate
  modified_base 74: mod_base = OTHER; note = 2'-Omethylcytosine phosphorothiorate

SEQ ID NO: 8277 - RNA, 86 nt, synthetic construct; identical to SEQ ID NO: 3290
  source 1..86: mol_type = other RNA
  modified_base 1: mod_base = OTHER; note = 2'-Omethyladenosine
  modified_base 10: mod_base = OTHER; note = 2'-Omethylguanosine
  modified_base 11: mod_base = OTHER; note = 2'-Omethylcytosine
  modified_base 12: mod_base = OTHER; note = 2'-Omethylcytosine
  modified_base 13: mod_base = OTHER; note = 2'-Omethylguanosine
  modified_base 14: mod_base = OTHER; note = 2'-Omethyladenosine
  modified_base 15: mod_base = OTHER; note = 2'-Omethylguanosine
  modified_base 16: mod_base = OTHER; note = 2'-Omethyluridine
  modified_base 17: mod_base = OTHER; note = 2'-Omethylguanosine
  modified_base 18: mod_base = OTHER; note = 2'-Omethylguanosine
  modified_base 19: mod_base = OTHER; note = Uridine phosphorothiorate
  modified_base 20: mod_base = OTHER; note = 2'-Omethyluridine
  modified_base 21: mod_base = OTHER; note = Adenosine phosphorothiorate
  modified_base 22: mod_base = OTHER; note = 2'-Omethyladenosine
  modified_base 23: mod_base = OTHER; note = 2'-Omethylguanosine
  modified_base 24: mod_base = OTHER; note = 2'-Omethylguanosine
  modified_base 25: mod_base = OTHER; note = 2'-Omethylcytosine
  modified_base 41: mod_base = OTHER; note = 2'-Omethylcytosine
  modified_base 42: mod_base = OTHER; note = 2'-Omethyladenosine
  modified_base 43: mod_base = OTHER; note = 2'-Omethyladenosine
  modified_base 44: mod_base = OTHER; note = 2'-Omethyluridine
  modified_base 59: mod_base = OTHER; note = 2'-Omethylguanosine
  modified_base 60: mod_base = OTHER; note = 2'-Omethyluridine
  modified_base 62: mod_base = OTHER; note = 2'-Omethylguanosine
  modified_base 64: mod_base = OTHER; note = Uridine phosphorothiorate
  modified_base 65: mod_base = OTHER; note = Uridine phosphorothiorate
  modified_base 71: mod_base = OTHER; note = 2'-Omethylcytosine
  modified_base 75: mod_base = OTHER; note = 2'-Omethylcytosine
  modified_base 83: mod_base = OTHER; note = 2'-Omethyladenosine

SEQ ID NO: 8278 - RNA, 76 nt, synthetic construct; identical to SEQ ID NO: 625
  source 1..76: mol_type = other RNA
  modified_base 25: mod_base = OTHER; note = 2'-O-(2-Methoxyethyl) 5-methylcytosine

SEQ ID NO: 8279 - RNA, 76 nt, synthetic construct; identical to SEQ ID NO: 625
  source 1..76: mol_type = other RNA
  modified_base 1: mod_base = OTHER; note = 2'-Omethylguanosine phosphorothiorate
  modified_base 2: mod_base = OTHER; note = 2'-Omethylguanosine
  modified_base 13: mod_base = OTHER; note = 2'-Omethylcytosine
  modified_base 33: mod_base = OTHER; note = 2'-fluorouridine
  modified_base 35: mod_base = OTHER; note = Cytosine phosphorothiorate
  modified_base 37: mod_base = OTHER; note = Adenosine phosphorothiorate
  modified_base 38: mod_base = OTHER; note = Adenosine phosphorothiorate
  modified_base 52: mod_base = OTHER; note = 2'-Omethylguanosine
  modified_base 68: mod_base = OTHER; note = 2'-fluoroguanosine
  modified_base 73: mod_base = OTHER; note = 2'-Omethylguanosine
  modified_base 75: mod_base = OTHER; note = 2'-fluorocytosine phosphorothiorate

SEQ ID NO: 8280 - RNA, 75 nt, synthetic construct; identical to SEQ ID NO: 3299
  source 1..75: mol_type = other RNA
  modified_base 2: mod_base = OTHER; note = Cytosine phosphorothiorate
  modified_base 12: mod_base = OTHER; note = 2'-fluorocytosine phosphorothiorate
  modified_base 16: mod_base = OTHER; note = 2'-fluorocytosine
  modified_base 23: mod_base = OTHER; note = 2'-fluoroguanosine phosphorothiorate
  modified_base 25: mod_base = OTHER; note = 2'-fluoroadenosine
  modified_base 28: mod_base = OTHER; note = Adenosine phosphorothiorate
  modified_base 34: mod_base = OTHER; note = 2'-fluorouridine
  modified_base 35: mod_base = OTHER; note = 2'-fluoroadenosine
  modified_base 38: mod_base = OTHER; note = 2'-fluorouridine
  modified_base 40: mod_base = OTHER; note = 2'-fluorouridine
  modified_base 46: mod_base = OTHER; note = 2'-fluorouridine
  modified_base 47: mod_base = OTHER; note = 2'-fluorocytosine
  modified_base 50: mod_base = OTHER; note = 2'-fluoroguanosine
  modified_base 60: mod_base = OTHER; note = Cytosine phosphorothiorate
  modified_base 70: mod_base = OTHER; note = 2'-fluoroguanosine phosphorothiorate
  modified_base 72: mod_base = OTHER; note = Guanosine phosphorothiorate
  modified_base 74: mod_base = OTHER; note = Cytosine phosphorothiorate

SEQ ID NO: 8281 - RNA, 76 nt, synthetic construct; identical to SEQ ID NO: 3419
  source 1..76: mol_type = other RNA
  modified_base 1: mod_base = OTHER; note = 2'-Omethylguanosine phosphorothiorate
  modified_base 2: mod_base = OTHER; note = 2'-Omethylguanosine
  modified_base 3: mod_base = OTHER; note = 2'-Omethylcytosine
  modified_base 4: mod_base = OTHER; note = 2'-Omethyluridine
  modified_base 5: mod_base = OTHER; note = 2'-Omethylcytosine
  modified_base 6: mod_base = OTHER; note = 2'-Omethylcytosine
  modified_base 49: mod_base = OTHER; note = 2'-Omethylcytosine
  modified_base 50: mod_base = OTHER; note = 2'-Omethylcytosine
  modified_base 51: mod_base = OTHER; note = 2'-Omethylguanosine
  modified_base 52: mod_base = OTHER; note = 2'-Omethylguanosine
  modified_base 53: mod_base = OTHER; note = 2'-Omethylguanosine
  modified_base 61: mod_base = OTHER; note = 2'-Omethylcytosine
  modified_base 62: mod_base = OTHER; note = 2'-Omethylcytosine
  modified_base 63: mod_base = OTHER; note = 2'-fluorocytosine
  modified_base 64: mod_base = OTHER; note = 2'-Omethylguanosine
  modified_base 65: mod_base = OTHER; note = 2'-Omethylguanosine
  modified_base 66: mod_base = OTHER; note = 2'-Omethylcytosine
  modified_base 67: mod_base = OTHER; note = 2'-Omethylguanosine
  modified_base 68: mod_base = OTHER; note = 2'-Omethylguanosine
  modified_base 69: mod_base = OTHER; note = 2'-Omethyladenosine
  modified_base 71: mod_base = OTHER; note = 2'-Omethyluridine
  modified_base 72: mod_base = OTHER; note = 2'-Omethylcytosine

SEQ ID NO: 8282 - RNA, 76 nt, synthetic construct; identical to SEQ ID NO: 3318
  source 1..76: mol_type = other RNA
  modified_base 1: mod_base = OTHER; note = 2'-Omethylcytosine phosphorothiorate
  modified_base 2: mod_base = OTHER; note = 2'-Omethylcytosine
  modified_base 3: mod_base = OTHER; note = 2'-Omethyluridine
  modified_base 4: mod_base = OTHER; note = 2'-Omethyluridine
  modified_base 5: mod_base = OTHER; note = 2'-Omethylcytosine
  modified_base 6: mod_base = OTHER; note = 2'-Omethylguanosine
  modified_base 27: mod_base = OTHER; note = 2'-Omethylguanosine
  modified_base 28: mod_base = OTHER; note = 2'-Omethyladenosine
  modified_base 29: mod_base = OTHER; note = 2'-Omethylguanosine
  modified_base 30: mod_base = OTHER; note = 2'-fluoroguanosine
  modified_base 40: mod_base = OTHER; note = 2'-fluorocytosine
  modified_base 41: mod_base = OTHER; note = 2'-Omethylcytosine
  modified_base 42: mod_base = OTHER; note = 2'-Omethyluridine
  modified_base 43: mod_base = OTHER; note = 2'-Omethyluridine
  modified_base 73: mod_base = OTHER; note = 2'-Omethyladenosine

SEQ ID NO: 8283 - RNA, 76 nt, synthetic construct; identical to SEQ ID NO: 625
  source 1..76: mol_type = other RNA
  modified_base 27: mod_base = OTHER; note = 2'-O-(2-Methoxyethyl) thymine
  modified_base 28: mod_base = OTHER; note = 2'-O-(2-Methoxyethyl) thymine
  modified_base 29: mod_base = OTHER; note = 2'-O-(2-Methoxyethyl) guanosine
  modified_base 30: mod_base = OTHER; note = 2'-O-(2-Methoxyethyl) guanosine
  modified_base 31: mod_base = OTHER; note = 2'-O-(2-Methoxyethyl) adenosine

SEQ ID NO: 8284 - RNA, 86 nt, synthetic construct; identical to SEQ ID NO: 3290
  source 1..86: mol_type = other RNA
  modified_base 71: mod_base = OTHER; note = 2'-Omethylcytosine
  modified_base 72: mod_base = OTHER; note = 2'-Omethylcytosine
  modified_base 73: mod_base = OTHER; note = 2'-Omethylcytosine
  modified_base 74: mod_base = OTHER; note = 2'-Omethyladenosine
  modified_base 75: mod_base = OTHER; note = 2'-Omethylcytosine

SEQ ID NO: 8285 - RNA, 75 nt, synthetic construct; identical to SEQ ID NO: 3336
  source 1..75: mol_type = other RNA
  modified_base 11: mod_base = OTHER; note = Uridine phosphorothiorate
  modified_base 13: mod_base = OTHER; note = Adenosine phosphorothiorate
  modified_base 14: mod_base = OTHER; note = 2'-fluoroguanosine
  modified_base 19: mod_base = OTHER; note = 2'-fluorouridine
  modified_base 20: mod_base = OTHER; note = 2'-fluoroadenosine
  modified_base 22: mod_base = OTHER; note = 2'-fluoroadenosine phosphorothiorate
  modified_base 23: mod_base = OTHER; note = Guanosine phosphorothiorate
  modified_base 25: mod_base = OTHER; note = Adenosine phosphorothiorate
  modified_base 28: mod_base = OTHER; note = 2'-fluoroadenosine phosphorothiorate
  modified_base 34: mod_base = OTHER; note = 2'-fluorouridine phosphorothiorate
  modified_base 35: mod_base = OTHER; note = 2'-fluoroadenosine
  modified_base 38: mod_base = OTHER; note = 2'-fluorouridine
  modified_base 40: mod_base = OTHER; note = 2'-fluorouridine
  modified_base 42: mod_base = OTHER; note = Adenosine phosphorothiorate
  modified_base 47: mod_base = OTHER; note = 2'-Omethylcytosine phosphorothiorate
  modified_base 49: mod_base = OTHER; note = Adenosine phosphorothiorate
  modified_base 58: mod_base = OTHER; note = Guanosine phosphorothiorate
  modified_base 73: mod_base = OTHER; note = Cytosine phosphorothiorate
  modified_base 74: mod_base = OTHER; note = 2'-Omethylcytosine

SEQ ID NO: 8286 - RNA, 85 nt, synthetic construct; identical to SEQ ID NO: 3310
  source 1..85: mol_type = other RNA
  modified_base 1: mod_base = OTHER; note = 2'-Omethylcytosine
  modified_base 13: mod_base = OTHER; note = Adenosine phosphorothiorate
  modified_base 30: mod_base = OTHER; note = 2'-fluoroadenosine
  modified_base 36: mod_base = OTHER; note = Guanosine phosphorothiorate
  modified_base 44: mod_base = OTHER; note = 2'-Omethylguanosine
  modified_base 52: mod_base = OTHER; note = Guanosine phosphorothiorate
  modified_base 58: mod_base = OTHER; note = 2'-Omethylguanosine
  modified_base 73: mod_base = OTHER; note = Adenosine phosphorothiorate
  modified_base 84: mod_base = OTHER; note = Cytosine phosphorothiorate

SEQ ID NO: 8287 - RNA, 74 nt, synthetic construct
  source 1..74: mol_type = other RNA
  modified_base 1: mod_base = OTHER; note = 2'-Omethylguanosine
  modified_base 17: mod_base = OTHER; note = 2'-Omethylguanosine
  modified_base 18: mod_base = OTHER; note = 2'-Omethylguanosine
  modified_base 49: mod_base = OTHER; note = 2'-Omethylcytosine
  modified_base 51: mod_base = OTHER; note = 2'-Omethyluridine
  modified_base 72: mod_base = OTHER; note = 2'-Omethyladenosine
gacctcgtggcgcaacggtagcgcgtctgactctagatcagaaggttgcgtgttcaaatcacgtcggggtcacc

SEQ ID NO: 8288 - RNA, 75 nt, synthetic construct; identical to SEQ ID NO: 3299
  source 1..75: mol_type = other RNA
  modified_base 1: mod_base = OTHER; note = 2'-Omethylcytosine
  modified_base 3: mod_base = OTHER; note = Uridine phosphorothiorate
  modified_base 6: mod_base = OTHER; note = 2'-Omethylguanosine phosphorothiorate
  modified_base 10: mod_base = OTHER; note = 2'-fluorocytosine phosphorothiorate
  modified_base 13: mod_base = OTHER; note = 2'-fluoroadenosine
  modified_base 18: mod_base = OTHER; note = 2'-fluoroguanosine
  modified_base 21: mod_base = OTHER; note = 2'-fluoroguanosine phosphorothiorate
  modified_base 26: mod_base = OTHER; note = Uridine phosphorothiorate
  modified_base 28: mod_base = OTHER; note = 2'-fluoroadenosine
  modified_base 39: mod_base = OTHER; note = 2'-fluorocytosine
  modified_base 40: mod_base = OTHER; note = 2'-fluorouridine
  modified_base 41: mod_base = OTHER; note = 2'-fluoroguanosine
  modified_base 47: mod_base = OTHER; note = 2'-fluorocytosine
  modified_base 48: mod_base = OTHER; note = 2'-Omethylcytosine phosphorothiorate
  modified_base 50: mod_base = OTHER; note = 2'-fluoroguanosine
  modified_base 55: mod_base = OTHER; note = 2'-Omethylcytosine phosphorothiorate
  modified_base 60: mod_base = OTHER; note = 2'-Omethylcytosine
  modified_base 61: mod_base = OTHER; note = Cytosine phosphorothiorate
  modified_base 68: mod_base = OTHER; note = 2'-Omethyladenosine phosphorothiorate
  modified_base 72: mod_base = OTHER; note = 2'-Omethylguanosine
  modified_base 74: mod_base = OTHER; note = Cytosine phosphorothiorate

SEQ ID NO: 8289 - RNA, 85 nt, synthetic construct; identical to SEQ ID NO: 3297
  source 1..85: mol_type = other RNA
  modified_base 1: mod_base = OTHER; note = 2'-Omethylguanosine phosphorothiorate
  modified_base 4: mod_base = OTHER; note = 2'-Omethylguanosine
  modified_base 37: mod_base = OTHER; note = 2'-Omethyladenosine phosphorothiorate
  modified_base 61: mod_base = OTHER; note = 2'-Omethylguanosine
  modified_base 63: mod_base = OTHER; note = 2'-fluorouridine
  modified_base 81: mod_base = OTHER; note = Cytosine phosphorothiorate
  modified_base 82: mod_base = OTHER; note = 2'-fluoroguanosine

SEQ ID NO: 8290 - RNA, 76 nt, synthetic construct; identical to SEQ ID NO: 625
  source 1..76: mol_type = other RNA
  modified_base 2: mod_base = OTHER; note = 2'-fluoroguanosine
  modified_base 3: mod_base = OTHER; note = 2'-fluorocytosine phosphorothiorate
  modified_base 10: mod_base = OTHER; note = 2'-Omethylguanosine
  modified_base 11: mod_base = OTHER; note = 2'-fluorocytosine
  modified_base 12: mod_base = OTHER; note = 2'-Omethylguanosine
  modified_base 13: mod_base = OTHER; note = 2'-Omethylcytosine
  modified_base 14: mod_base = OTHER; note = Adenosine phosphorothiorate
  modified_base 15: mod_base = OTHER; note = 2'-fluoroadenosine
  modified_base 18: mod_base = OTHER; note = Guanosine phosphorothiorate
  modified_base 22: mod_base = OTHER; note = Guanosine phosphorothiorate
  modified_base 23: mod_base = OTHER; note = 2'-fluorocytosine
  modified_base 27: mod_base = OTHER; note = 2'-fluorouridine
  modified_base 28: mod_base = OTHER; note = 2'-fluorouridine phosphorothiorate
  modified_base 29: mod_base = OTHER; note = 2'-Omethylguanosine
  modified_base 31: mod_base = OTHER; note = 2'-fluoroadenosine
  modified_base 33: mod_base = OTHER; note = Uridine phosphorothiorate
  modified_base 34: mod_base = OTHER; note = 2'-fluorouridine phosphorothiorate
  modified_base 38: mod_base = OTHER; note = 2'-fluoroadenosine
  modified_base 39: mod_base = OTHER; note = 2'-Omethyluridine
  modified_base 40: mod_base = OTHER; note = 2'-Omethyluridine
  modified_base 44: mod_base = OTHER; note = 2'-Omethyladenosine
  modified_base 46: mod_base = OTHER; note = 2'-fluoroguanosine
  modified_base 47: mod_base = OTHER; note = 2'-fluorouridine
  modified_base 48: mod_base = OTHER; note = 2'-fluorouridine
  modified_base 50: mod_base = OTHER; note = Cytosine phosphorothiorate
  modified_base 52: mod_base = OTHER; note = Guanosine phosphorothiorate
  modified_base 54: mod_base = OTHER; note = Uridine phosphorothiorate
  modified_base 56: mod_base = OTHER; note = 2'-Omethylcytosine
  modified_base 57: mod_base = OTHER; note = 2'-fluoroguanosine
  modified_base 58: mod_base = OTHER; note = Adenosine phosphorothiorate
  modified_base 66: mod_base = OTHER; note = Cytosine phosphorothiorate
  modified_base 71: mod_base = OTHER; note = 2'-Omethyluridine
  modified_base 73: mod_base = OTHER; note = 2'-Omethylguanosine phosphorothiorate
  modified_base 74: mod_base = OTHER; note = 2'-Omethylcytosine

SEQ ID NO: 8291 - RNA, 75 nt, synthetic construct; identical to SEQ ID NO: 3299
  source 1..75: mol_type = other RNA
  modified_base 1: mod_base = OTHER; note = 2'-fluorocytosine phosphorothiorate
  modified_base 3: mod_base = OTHER; note = 2'-Omethyluridine
  modified_base 12: mod_base = OTHER; note = 2'-fluorocytosine
  modified_base 13: mod_base = OTHER; note = 2'-fluoroadenosine
  modified_base 20: mod_base = OTHER; note = 2'-fluoroadenosine
  modified_base 24: mod_base = OTHER; note = 2'-fluorocytosine
  modified_base 26: mod_base = OTHER; note = Uridine phosphorothiorate
  modified_base 30: mod_base = OTHER; note = 2'-fluoroadenosine
  modified_base 37: mod_base = OTHER; note = 2'-fluoroadenosine
  modified_base 39: mod_base = OTHER; note = 2'-Omethylcytosine phosphorothiorate
  modified_base 40: mod_base = OTHER; note = 2'-fluorouridine
  modified_base 41: mod_base = OTHER; note = 2'-fluoroguanosine
  modified_base 47: mod_base = OTHER; note = Cytosine phosphorothiorate
  modified_base 49: mod_base = OTHER; note = 2'-Omethyladenosine
  modified_base 56: mod_base = OTHER; note = 2'-Omethyladenosine
  modified_base 58: mod_base = OTHER; note = 2'-Omethylguanosine phosphorothiorate
  modified_base 61: mod_base = OTHER; note = 2'-fluorocytosine
  modified_base 65: mod_base = OTHER; note = Uridine phosphorothiorate
  modified_base 71: mod_base = OTHER; note = Cytosine phosphorothiorate
  modified_base 74: mod_base = OTHER; note = Cytosine phosphorothiorate

SEQ ID NO: 8292 - RNA, 76 nt, synthetic construct; identical to SEQ ID NO: 625
  source 1..76: mol_type = other RNA
  modified_base 1: mod_base = OTHER; note = Guanosine phosphorothiorate
  modified_base 2: mod_base = OTHER; note = Guanosine phosphorothiorate
  modified_base 5: mod_base = OTHER; note = 2'-fluorocytosine phosphorothiorate
  modified_base 6: mod_base = OTHER; note = 2'-fluorocytosine
  modified_base 14: mod_base = OTHER; note = Adenosine phosphorothiorate
  modified_base 15: mod_base = OTHER; note = 2'-Omethyladenosine
  modified_base 17: mod_base = OTHER; note = 2'-Omethylguanosine
  modified_base 18: mod_base = OTHER; note = 2'-Omethylguanosine
  modified_base 20: mod_base = OTHER; note = Uridine phosphorothiorate
  modified_base 22: mod_base = OTHER; note = 2'-fluoroguanosine
  modified_base 27: mod_base = OTHER; note = Uridine phosphorothiorate
  modified_base 31: mod_base = OTHER; note = 2'-Omethyladenosine
  modified_base 32: mod_base = OTHER; note = 2'-fluorocytosine
  modified_base 34: mod_base = OTHER; note = Uridine phosphorothiorate
  modified_base 36: mod_base = OTHER; note = Adenosine phosphorothiorate
  modified_base 39: mod_base = OTHER; note = 2'-Omethyluridine phosphorothiorate
  modified_base 40: mod_base = OTHER; note = 2'-fluorouridine
  modified_base 41: mod_base = OTHER; note = 2'-fluorocytosine
  modified_base 42: mod_base = OTHER; note = 2'-fluoroadenosine
  modified_base 43: mod_base = OTHER; note = 2'-fluoroadenosine
  modified_base 44: mod_base = OTHER; note = 2'-fluoroadenosine
  modified_base 45: mod_base = OTHER; note = 2'-Omethylguanosine
  modified_base 46: mod_base = OTHER; note = Guanosine phosphorothiorate
  modified_base 47: mod_base = OTHER; note = 2'-fluorouridine
  modified_base 48: mod_base = OTHER; note = 2'-fluorouridine
  modified_base 52: mod_base = OTHER; note = 2'-fluoroguanosine
  modified_base 56: mod_base = OTHER; note = 2'-Omethylcytosine
  modified_base 57: mod_base = OTHER; note = Guanosine phosphorothiorate
  modified_base 58: mod_base = OTHER; note = 2'-fluoroadenosine
  modified_base 61: mod_base = OTHER; note = 2'-fluorocytosine
  modified_base 62: mod_base = OTHER; note = 2'-Omethylcytosine
  modified_base 67: mod_base = OTHER; note = 2'-fluoroguanosine
  modified_base 69: mod_base = OTHER; note = Adenosine phosphorothiorate
  modified_base 70: mod_base = OTHER; note = 2'-fluoroguanosine
  modified_base 71: mod_base = OTHER; note = 2'-fluorouridine phosphorothiorate
  modified_base 72: mod_base = OTHER; note = 2'-fluorocytosine
  modified_base 73: mod_base = OTHER; note = 2'-fluoroguanosine
  modified_base 74: mod_base = OTHER; note = 2'-Omethylcytosine
  modified_base 76: mod_base = OTHER; note = 2'-fluoroadenosine

SEQ ID NO: 8293 - RNA, 76 nt, synthetic construct; identical to SEQ ID NO: 625
  source 1..76: mol_type = other RNA
  modified_base 4: mod_base = OTHER; note = 2'-fluorouridine
  modified_base 5: mod_base = OTHER; note = 2'-fluorocytosine
  modified_base 6: mod_base = OTHER; note = 2'-fluorocytosine
  modified_base 11: mod_base = OTHER; note = 2'-Omethylcytosine
  modified_base 12: mod_base = OTHER; note = 2'-fluoroguanosine
  modified_base 15: mod_base = OTHER; note = 2'-Omethyladenosine
  modified_base 16: mod_base = OTHER; note = 2'-fluorouridine
  modified_base 18: mod_base = OTHER; note = 2'-fluoroguanosine
  modified_base 24: mod_base = OTHER; note = 2'-fluoroguanosine
  modified_base 25: mod_base = OTHER; note = 2'-Omethylcytosine phosphorothiorate
  modified_base 27: mod_base = OTHER; note = 2'-Omethyluridine phosphorothiorate
  modified_base 29: mod_base = OTHER; note = 2'-Omethylguanosine
  modified_base 31: mod_base = OTHER; note = 2'-fluoroadenosine
  modified_base 33: mod_base = OTHER; note = Uridine phosphorothiorate
  modified_base 34: mod_base = OTHER; note = 2'-fluorouridine
  modified_base 42: mod_base = OTHER; note = 2'-fluoroadenosine
  modified_base 46: mod_base = OTHER; note = 2'-fluoroguanosine
  modified_base 48: mod_base = OTHER; note = 2'-fluorouridine
  modified_base 49: mod_base = OTHER; note = 2'-Omethylcytosine
  modified_base 52: mod_base = OTHER; note = Guanosine phosphorothiorate
  modified_base 53: mod_base = OTHER; note = 2'-Omethylguanosine
  modified_base 56: mod_base = OTHER; note = 2'-fluorocytosine
  modified_base 57: mod_base = OTHER; note = 2'-Omethylguanosine
  modified_base 58: mod_base = OTHER; note = 2'-fluoroadenosine phosphorothiorate
  modified_base 59: mod_base = OTHER; note = 2'-Omethylguanosine
  modified_base 61: mod_base = OTHER; note = 2'-fluorocytosine
  modified_base 62: mod_base = OTHER; note = 2'-Omethylcytosine
  modified_base 64: mod_base = OTHER; note = Guanosine phosphorothiorate
  modified_base 65: mod_base = OTHER; note = 2'-Omethylguanosine
  modified_base 67: mod_base = OTHER; note = 2'-Omethylguanosine
  modified_base 68: mod_base = OTHER; note = 2'-fluoroguanosine
  modified_base 69: mod_base = OTHER; note = 2'-Omethyladenosine
  modified_base 70: mod_base = OTHER; note = Guanosine phosphorothiorate
  modified_base 74: mod_base = OTHER; note = 2'-fluorocytosine
  modified_base 75: mod_base = OTHER; note = 2'-Omethylcytosine
  modified_base 76: mod_base = OTHER; note = 2'-fluoroadenosine

SEQ ID NO: 8294 - RNA, 85 nt, synthetic construct; identical to SEQ ID NO: 3288
  source 1..85: mol_type = other RNA
  modified_base 1: mod_base = OTHER; note = 2'-Omethylcytosine
  modified_base 11: mod_base = OTHER; note = Cytosine phosphorothiorate
  modified_base 20: mod_base = OTHER; note = 2'-fluoroadenosine
  modified_base 26: mod_base = OTHER; note = 2'-fluorouridine
  modified_base 27: mod_base = OTHER; note = 2'-Omethyluridine phosphorothiorate
  modified_base 30: mod_base = OTHER; note = 2'-fluoroadenosine
  modified_base 32: mod_base = OTHER; note = 2'-fluorouridine
  modified_base 34: mod_base = OTHER; note = Cytosine phosphorothiorate
  modified_base 40: mod_base = OTHER; note = Cytosine phosphorothiorate
  modified_base 43: mod_base = OTHER; note = 2'-Omethyluridine
  modified_base 45: mod_base = OTHER; note = Guanosine phosphorothiorate
  modified_base 46: mod_base = OTHER; note = 2'-Omethyladenosine
  modified_base 48: mod_base = OTHER; note = 2'-Omethyladenosine
  modified_base 54: mod_base = OTHER; note = 2'-fluorocytosine
  modified_base 55: mod_base = OTHER; note = Cytosine phosphorothiorate
  modified_base 57: mod_base = OTHER; note = 2'-Omethylcytosine
  modified_base 62: mod_base = OTHER; note = 2'-Omethylguanosine phosphorothiorate
  modified_base 71: mod_base = OTHER; note = Cytosine phosphorothiorate
  modified_base 75: mod_base = OTHER; note = 2'-fluorouridine
  modified_base 77: mod_base = OTHER; note = 2'-fluorocytosine
  modified_base 84: mod_base = OTHER; note = 2'-Omethylcytosine

SEQ ID NO: 8295 - RNA, 85 nt, synthetic construct; identical to SEQ ID NO: 3317
  source 1..85: mol_type = other RNA
  modified_base 1: mod_base = OTHER; note = 2'-Omethylguanosine phosphorothiorate
  modified_base 2: mod_base = OTHER; note = 2'-Omethylcytosine phosphorothiorate
  modified_base 16: mod_base = OTHER; note = 2'-fluorouridine
  modified_base 17: mod_base = OTHER; note = 2'-Omethylguanosine phosphorothiorate
  modified_base 27: mod_base = OTHER; note = Uridine phosphorothiorate
  modified_base 34: mod_base = OTHER; note = 2'-Omethylcytosine
  modified_base 36: mod_base = OTHER; note = 2'-fluoroadenosine phosphorothiorate
  modified_base 37: mod_base = OTHER; note = 2'-fluoroadenosine
  modified_base 42: mod_base = OTHER; note = 2'-Omethyladenosine
  modified_base 44: mod_base = OTHER; note = 2'-Omethyluridine
  modified_base 46: mod_base = OTHER; note = 2'-Omethylguanosine
  modified_base 50: mod_base = OTHER; note = 2'-fluorocytosine
  modified_base 51: mod_base = OTHER; note = 2'-Omethyluridine
  modified_base 53: mod_base = OTHER; note = 2'-Omethylcytosine phosphorothiorate
  modified_base 59: mod_base = OTHER; note = 2'-Omethylcytosine
  modified_base 60: mod_base = OTHER; note = Adenosine phosphorothiorate
  modified_base 72: mod_base = OTHER; note = 2'-fluorouridine
  modified_base 81: mod_base = OTHER; note = 2'-Omethylcytosine phosphorothiorate

SEQ ID NO: 8296 - RNA, 74 nt, synthetic construct; identical to SEQ ID NO: 766
  source 1..74: mol_type = other RNA
  modified_base 1: mod_base = OTHER; note = 2'-Omethylguanosine phosphorothiorate
  modified_base 2: mod_base = OTHER; note = 2'-Omethylguanosine phosphorothiorate
  modified_base 3: mod_base = OTHER; note = 2'-Omethylcytosine
  modified_base 4: mod_base = OTHER; note = 2'-Omethyluridine
  modified_base 5: mod_base = OTHER; note = 2'-Omethylcytosine
  modified_base 6: mod_base = OTHER; note = 2'-Omethylcytosine
  modified_base 14: mod_base = OTHER; note = 2'-Omethyladenosine
  modified_base 15: mod_base = OTHER; note = 2'-Omethyladenosine
  modified_base 16: mod_base = OTHER; note = 2'-Omethyluridine
  modified_base 17: mod_base = OTHER; note = 2'-Omethylguanosine
  modified_base 18: mod_base = OTHER; note = 2'-Omethylguanosine
  modified_base 20: mod_base = OTHER; note = 2'-Omethyluridine
  modified_base 25: mod_base = OTHER; note = 2'-Omethylcytosine
  modified_base 33: mod_base = OTHER; note = 2'-fluorouridine
  modified_base 35: mod_base = OTHER; note = Cytosine phosphorothiorate
  modified_base 37: mod_base = OTHER; note = Adenosine phosphorothiorate
  modified_base 38: mod_base = OTHER; note = Adenosine phosphorothiorate
  modified_base 49: mod_base = OTHER; note = 2'-Omethylcytosine
  modified_base 50: mod_base = OTHER; note = 2'-Omethylcytosine
  modified_base 52: mod_base = OTHER; note = 2'-Omethylguanosine
  modified_base 54: mod_base = OTHER; note = 2'-Omethyluridine
  modified_base 55: mod_base = OTHER; note = Uridine phosphorothiorate
  modified_base 56: mod_base = OTHER; note = 2'-Omethylcytosine
  modified_base 57: mod_base = OTHER; note = 2'-fluoroguanosine
  modified_base 59: mod_base = OTHER; note = 2'-Omethylguanosine
  modified_base 61: mod_base = OTHER; note = 2'-Omethylcytosine
  modified_base 62: mod_base = OTHER; note = 2'-Omethylcytosine
  modified_base 63: mod_base = OTHER; note = 2'-fluorocytosine
  modified_base 64: mod_base = OTHER; note = 2'-Omethylguanosine
  modified_base 65: mod_base = OTHER; note = 2'-Omethylguanosine
  modified_base 73: mod_base = OTHER; note = 2'-Omethylguanosine

SEQ ID NO: 8297 - RNA, 75 nt, synthetic construct; identical to SEQ ID NO: 3336
  source 1..75: mol_type = other RNA
  modified_base 3: mod_base = OTHER; note = 2'-fluorouridine phosphorothiorate
  modified_base 27: mod_base = OTHER; note = 2'-fluorocytosine
  modified_base 38: mod_base = OTHER; note = 2'-Omethyluridine
  modified_base 45: mod_base = OTHER; note = 2'-Omethylguanosine phosphorothiorate
  modified_base 60: mod_base = OTHER; note = 2'-fluorocytosine
  modified_base 71: mod_base = OTHER; note = 2'-fluorocytosine phosphorothiorate
  modified_base 73: mod_base = OTHER; note = Cytosine phosphorothiorate

SEQ ID NO: 8298 - RNA, 76 nt, synthetic construct; identical to SEQ ID NO: 625
  source 1..76: mol_type = other RNA
  modified_base 1: mod_base = OTHER; note = Guanosine phosphorothiorate
  modified_base 2: mod_base = OTHER; note = 2'-Omethylguanosine
  modified_base 3: mod_base = OTHER; note = 2'-fluorocytosine
  modified_base 6: mod_base = OTHER; note = 2'-fluorocytosine
  modified_base 10: mod_base = OTHER; note = 2'-fluoroguanosine
  modified_base 11: mod_base = OTHER; note = 2'-fluorocytosine
  modified_base 13: mod_base = OTHER; note = Cytosine phosphorothiorate
  modified_base 16: mod_base = OTHER; note = 2'-fluorouridine
  modified_base 18: mod_base = OTHER; note = Guanosine phosphorothiorate
  modified_base 24: mod_base = OTHER; note = 2'-fluoroguanosine
  modified_base 27: mod_base = OTHER; note = 2'-fluorouridine
  modified_base 28: mod_base = OTHER; note = 2'-fluorouridine
  modified_base 29: mod_base = OTHER; note = 2'-Omethylguanosine
  modified_base 30: mod_base = OTHER; note = 2'-fluoroguanosine phosphorothiorate
  modified_base 31: mod_base = OTHER; note = 2'-Omethyladenosine
  modified_base 32: mod_base = OTHER; note = 2'-fluorocytosine
  modified_base 34: mod_base = OTHER; note = 2'-fluorouridine phosphorothiorate
  modified_base 37: mod_base = OTHER; note = Adenosine phosphorothiorate
  modified_base 41: mod_base = OTHER; note = Cytosine phosphorothiorate
  modified_base 42: mod_base = OTHER; note = 2'-fluoroadenosine
  modified_base 47: mod_base = OTHER; note = 2'-Omethyluridine
  modified_base 51: mod_base = OTHER; note = 2'-Omethylguanosine
  modified_base 53: mod_base = OTHER; note = 2'-Omethylguanosine
  modified_base 55: mod_base = OTHER; note = Uridine phosphorothiorate
  modified_base 56: mod_base = OTHER; note = 2'-fluorocytosine
  modified_base 59: mod_base = OTHER; note = 2'-Omethylguanosine
  modified_base 60: mod_base = OTHER; note = 2'-fluorouridine
  modified_base 61: mod_base = OTHER; note = 2'-Omethylcytosine
  modified_base 64: mod_base = OTHER; note = 2'-fluoroguanosine
  modified_base 67: mod_base = OTHER; note = 2'-Omethylguanosine
  modified_base 68: mod_base = OTHER; note = 2'-fluoroguanosine
  modified_base 69: mod_base = OTHER; note = Adenosine phosphorothiorate

SEQ ID NO: 8299 - RNA, 76 nt, synthetic construct; identical to SEQ ID NO: 625
  source 1..76: mol_type = other RNA
  modified_base 2: mod_base = OTHER; note = 2'-fluoroguanosine
  modified_base 3: mod_base = OTHER; note = 2'-Omethylcytosine phosphorothiorate
  modified_base 4: mod_base = OTHER; note = 2'-fluorouridine
  modified_base 6: mod_base = OTHER; note = 2'-fluorocytosine
  modified_base 8: mod_base = OTHER; note = Uridine phosphorothiorate
  modified_base 14: mod_base = OTHER; note = 2'-Omethyladenosine
  modified_base 17: mod_base = OTHER; note = 2'-Omethylguanosine
  modified_base 18: mod_base = OTHER; note = 2'-Omethylguanosine phosphorothiorate
  modified_base 20: mod_base = OTHER; note = Uridine phosphorothiorate
  modified_base 21: mod_base = OTHER; note = Adenosine phosphorothiorate
  modified_base 22: mod_base = OTHER; note = 2'-fluoroguanosine
  modified_base 23: mod_base = OTHER; note = 2'-fluorocytosine
  modified_base 24: mod_base = OTHER; note = 2'-fluoroguanosine
  modified_base 25: mod_base = OTHER; note = 2'-Omethylcytosine
  modified_base 26: mod_base = OTHER; note = 2'-fluoroadenosine
  modified_base 27: mod_base = OTHER; note = Uridine phosphorothiorate
  modified_base 30: mod_base = OTHER; note = 2'-fluoroguanosine
  modified_base 31: mod_base = OTHER; note = 2'-fluoroadenosine
  modified_base 34: mod_base = OTHER; note = 2'-fluorouridine
  modified_base 40: mod_base = OTHER; note = Uridine phosphorothiorate
  modified_base 41: mod_base = OTHER; note = 2'-fluorocytosine phosphorothiorate
  modified_base 43: mod_base = OTHER; note = 2'-Omethyladenosine
  modified_base 45: mod_base = OTHER; note = 2'-Omethylguanosine
  modified_base 46: mod_base = OTHER; note = Guanosine phosphorothiorate
  modified_base 47: mod_base = OTHER; note = 2'-fluorouridine
  modified_base 48: mod_base = OTHER; note = 2'-fluorouridine
  modified_base 51: mod_base = OTHER; note = 2'-Omethylguanosine
  modified_base 52: mod_base = OTHER; note = Guanosine phosphorothiorate
  modified_base 53: mod_base = OTHER; note = 2'-fluoroguanosine
  modified_base 54: mod_base = OTHER; note = 2'-Omethyluridine phosphorothiorate
  modified_base 62: mod_base = OTHER; note = 2'-Omethylcytosine
  modified_base 68: mod_base = OTHER; note = 2'-fluoroguanosine
  modified_base 69: mod_base = OTHER; note = 2'-Omethyladenosine
  modified_base 72: mod_base = OTHER; note = Cytosine phosphorothiorate

SEQ ID NO: 8300 - RNA, 86 nt, synthetic construct; identical to SEQ ID NO: 3290
  source 1..86: mol_type = other RNA
  modified_base 1: mod_base = OTHER; note = 2'-Omethyladenosine phosphorothiorate
  modified_base 2: mod_base = OTHER; note = 2'-Omethylcytosine phosphorothiorate
  modified_base 84: mod_base = OTHER; note = 2'-Omethylcytosine phosphorothiorate
  modified_base 85: mod_base = OTHER; note = 2'-Omethylcytosine phosphorothiorate
  modified_base 86: mod_base = OTHER; note = 2'-Omethyladenosine

SEQ ID NO: 8301 - RNA, 76 nt, synthetic construct; identical to SEQ ID NO: 3332
  source 1..76: mol_type = other RNA
  modified_base 1: mod_base = OTHER; note = 2'-Omethylguanosine phosphorothiorate
  modified_base 2: mod_base = OTHER; note = 2'-Omethylguanosine phosphorothiorate
  modified_base 3: mod_base = OTHER; note = 2'-Omethylcytosine
  modified_base 4: mod_base = OTHER; note = 2'-Omethylcytosine
  modified_base 5: mod_base = OTHER; note = 2'-Omethylcytosine
  modified_base 6: mod_base = OTHER; note = 2'-Omethylcytosine
  modified_base 16: mod_base = OTHER; note = 2'-Omethyluridine
  modified_base 17: mod_base = OTHER; note = 2'-Omethylguanosine
  modified_base 18: mod_base = OTHER; note = 2'-Omethylguanosine
  modified_base 20: mod_base = OTHER; note = 2'-Omethyluridine
  modified_base 25: mod_base = OTHER; note = 2'-Omethylcytosine
  modified_base 33: mod_base = OTHER; note = 2'-fluorouridine
  modified_base 35: mod_base = OTHER; note = Cytosine phosphorothiorate
  modified_base 37: mod_base = OTHER; note = Adenosine phosphorothiorate
  modified_base 38: mod_base = OTHER; note = Adenosine phosphorothiorate
  modified_base 41: mod_base = OTHER; note = 2'-Omethylcytosine
  modified_base 44: mod_base = OTHER; note = 2'-Omethyladenosine
  modified_base 45: mod_base = OTHER; note = 2'-Omethylguanosine
  modified_base 46: mod_base = OTHER; note = 2'-fluoroguanosine
  modified_base 47: mod_base = OTHER; note = 2'-fluorouridine
  modified_base 48: mod_base = OTHER; note = 2'-fluorouridine
  modified_base 49: mod_base = OTHER; note = 2'-Omethylguanosine
  modified_base 50: mod_base = OTHER; note = 2'-Omethylcytosine
  modified_base 51: mod_base = OTHER; note = 2'-Omethylguanosine
  modified_base 52: mod_base = OTHER; note = 2'-Omethylguanosine
  modified_base 53: mod_base = OTHER; note = 2'-Omethylguanosine
  modified_base 54: mod_base = OTHER; note = 2'-Omethyluridine
  modified_base 56: mod_base = OTHER; note = 2'-Omethylcytosine
  modified_base 59: mod_base = OTHER; note = 2'-Omethylguanosine
  modified_base 73: mod_base = OTHER; note = 2'-Omethylguanosine

SEQ ID NO: 8302 - RNA, 76 nt, synthetic construct; identical to SEQ ID NO: 625
  source 1..76: mol_type = other RNA
  modified_base 23: mod_base = OTHER; note = 2'-O-(2-Methoxyethyl) 5-methylcytosine

SEQ ID NO: 8303 - RNA, 85 nt, synthetic construct; identical to SEQ ID NO: 3288
  source 1..85: mol_type = other RNA
  modified_base 1: mod_base = OTHER; note = 2'-Omethylcytosine phosphorothiorate
  modified_base 2: mod_base = OTHER; note = 2'-fluorocytosine phosphorothiorate
  modified_base 14: mod_base = OTHER; note = Guanosine phosphorothiorate
  modified_base 16: mod_base = OTHER; note = 2'-fluoroguanosine
  modified_base 25: mod_base = OTHER; note = Guanosine phosphorothiorate
  modified_base 26: mod_base = OTHER; note = 2'-fluorouridine phosphorothiorate
  modified_base 27: mod_base = OTHER; note = 2'-fluorouridine
  modified_base 30: mod_base = OTHER; note = 2'-fluoroadenosine
  modified_base 34: mod_base = OTHER; note = 2'-fluorocytosine
  modified_base 39: mod_base = OTHER; note = Cytosine phosphorothiorate
  modified_base 43: mod_base = OTHER; note = 2'-Omethyluridine
  modified_base 46: mod_base = OTHER; note = Adenosine phosphorothiorate
  modified_base 47: mod_base = OTHER; note = 2'-fluorocytosine
  modified_base 50: mod_base = OTHER; note = 2'-Omethyladenosine
  modified_base 52: mod_base = OTHER; note = 2'-Omethylguanosine
  modified_base 56: mod_base = OTHER; note = 2'-fluoroguanosine phosphorothiorate
  modified_base 57: mod_base = OTHER; note = 2'-Omethylcytosine
  modified_base 61: mod_base = OTHER; note = Guanosine phosphorothiorate
  modified_base 76: mod_base = OTHER; note = 2'-fluorocytosine
  modified_base 84: mod_base = OTHER; note = Cytosine phosphorothiorate
  modified_base 85: mod_base = OTHER; note = 2'-Omethyladenosine

SEQ ID NO: 8304 - DNA, 76 bp, synthetic construct; identical to SEQ ID NO: 1924
  source 1..76: mol_type = other DNA
  misc_feature 1..43: note = RNA
  misc_feature 44..48: note = DNA
  misc_feature 49..76: note = RNA

SEQ ID NO: 8305 - RNA, 73 nt, synthetic construct; identical to SEQ ID NO: 935
  source 1..73: mol_type = other RNA
  modified_base 1: mod_base = OTHER; note = 2'-Omethylguanosine phosphorothiorate
  modified_base 2: mod_base = OTHER; note = 2'-Omethylguanosine
  modified_base 3: mod_base = OTHER; note = 2'-Omethylcytosine
  modified_base 4: mod_base = OTHER; note = 2'-Omethyluridine
  modified_base 5: mod_base = OTHER; note = 2'-Omethylcytosine
  modified_base 6: mod_base = OTHER; note = 2'-Omethylcytosine
  modified_base 49: mod_base = OTHER; note = 2'-Omethylcytosine
  modified_base 50: mod_base = OTHER; note = 2'-Omethylcytosine
  modified_base 51: mod_base = OTHER; note = 2'-Omethylguanosine
  modified_base 52: mod_base = OTHER; note = 2'-Omethylguanosine
  modified_base 53: mod_base = OTHER; note = 2'-Omethylguanosine
  modified_base 61: mod_base = OTHER; note = 2'-Omethylcytosine
  modified_base 62: mod_base = OTHER; note = 2'-Omethylcytosine
  modified_base 63: mod_base = OTHER; note = 2'-fluorocytosine
  modified_base 64: mod_base = OTHER; note = 2'-Omethylguanosine
  modified_base 65: mod_base = OTHER; note = 2'-Omethylguanosine
  modified_base 66: mod_base = OTHER; note = 2'-Omethylcytosine
  modified_base 67: mod_base = OTHER; note = 2'-Omethylguanosine
  modified_base 68: mod_base = OTHER; note = 2'-Omethylguanosine
  modified_base 69: mod_base = OTHER; note = 2'-Omethyladenosine
  modified_base 70: mod_base = OTHER; note = 2'-fluoroguanosine
  modified_base 72: mod_base = OTHER; note = 2'-Omethylcytosine

SEQ ID NO: 8306 - RNA, 76 nt, synthetic construct; identical to SEQ ID NO: 625
  source 1..76: mol_type = other RNA
  modified_base 2: mod_base = OTHER; note = Guanosine phosphorothiorate
  modified_base 3: mod_base = OTHER; note = 2'-Omethylcytosine
  modified_base 4: mod_base = OTHER; note = 2'-fluorouridine
  modified_base 6: mod_base = OTHER; note = 2'-Omethylcytosine
  modified_base 8: mod_base = OTHER; note = Uridine phosphorothiorate
  modified_base 11: mod_base = OTHER; note = Cytosine phosphorothiorate
  modified_base 13: mod_base = OTHER; note = 2'-Omethylcytosine
  modified_base 15: mod_base = OTHER; note = Adenosine phosphorothiorate
  modified_base 16: mod_base = OTHER; note = 2'-fluorouridine
  modified_base 18: mod_base = OTHER; note = 2'-Omethylguanosine
  modified_base 20: mod_base = OTHER; note = 2'-fluorouridine phosphorothiorate
  modified_base 23: mod_base = OTHER; note = 2'-Omethylcytosine
  modified_base 27: mod_base = OTHER; note = 2'-fluorouridine
  modified_base 28: mod_base = OTHER; note = 2'-Omethyluridine
  modified_base 29: mod_base = OTHER; note = Guanosine phosphorothiorate
  modified_base 30: mod_base = OTHER; note = 2'-Omethylguanosine
  modified_base 33: mod_base = OTHER; note = Uridine phosphorothiorate
  modified_base 34: mod_base = OTHER; note = 2'-Omethyluridine
  modified_base 38: mod_base = OTHER; note = Adenosine phosphorothiorate
  modified_base 39: mod_base = OTHER; note = 2'-Omethyluridine phosphorothiorate
  modified_base 41: mod_base = OTHER; note = Cytosine phosphorothiorate
  modified_base 42: mod_base = OTHER; note = 2'-fluoroadenosine
  modified_base 46: mod_base = OTHER; note = Guanosine phosphorothiorate
  modified_base 50: mod_base = OTHER; note = 2'-Omethylcytosine
  modified_base 51: mod_base = OTHER; note = 2'-Omethylguanosine
  modified_base 52: mod_base = OTHER; note = 2'-Omethylguanosine
  modified_base 53: mod_base = OTHER; note = 2'-fluoroguanosine
  modified_base 57: mod_base = OTHER; note = Guanosine phosphorothiorate
  modified_base 58: mod_base = OTHER; note = 2'-fluoroadenosine
  modified_base 59: mod_base = OTHER; note = 2'-fluoroguanosine
  modified_base 61: mod_base = OTHER; note = 2'-Omethylcytosine
  modified_base 64: mod_base = OTHER; note = 2'-fluoroguanosine
  modified_base 65: mod_base = OTHER; note = 2'-fluoroguanosine
  modified_base 66: mod_base = OTHER; note = 2'-fluorocytosine
  modified_base 67: mod_base = OTHER; note = Guanosine phosphorothiorate
  modified_base 68: mod_base = OTHER; note = 2'-Omethylguanosine
  modified_base 70: mod_base = OTHER; note = 2'-fluoroguanosine phosphorothiorate
  modified_base 71: mod_base = OTHER; note = 2'-Omethyluridine
  modified_base 72: mod_base = OTHER; note = 2'-fluorocytosine
  modified_base 73: mod_base = OTHER; note = Guanosine phosphorothiorate
  modified_base 74: mod_base = OTHER; note = 2'-Omethylcytosine
  modified_base 75: mod_base = OTHER; note = Cytosine phosphorothiorate
  modified_base 76: mod_base = OTHER; note = 2'-Omethyladenosine

SEQ ID NO: 8307 - RNA, 76 nt, synthetic construct; identical to SEQ ID NO: 625
  source 1..76: mol_type = other RNA
  modified_base 1: mod_base = OTHER; note = 2'-fluoroguanosine
  modified_base 3: mod_base = OTHER; note = 2'-Omethylcytosine
  modified_base 5: mod_base = OTHER; note = 2'-Omethylcytosine
  modified_base 6: mod_base = OTHER; note = 2'-fluorocytosine
  modified_base 7: mod_base = OTHER; note = Guanosine phosphorothiorate
  modified_base 8: mod_base = OTHER; note = Uridine phosphorothiorate
  modified_base 11: mod_base = OTHER; note = Cytosine phosphorothiorate
  modified_base 12: mod_base = OTHER; note = 2'-fluoroguanosine
  modified_base 13: mod_base = OTHER; note = Cytosine phosphorothiorate
  modified_base 14: mod_base = OTHER; note = 2'-Omethyladenosine
  modified_base 18: mod_base = OTHER; note = 2'-fluoroguanosine
  modified_base 20: mod_base = OTHER; note = 2'-Omethyluridine
  modified_base 23: mod_base = OTHER; note = 2'-fluorocytosine
  modified_base 24: mod_base = OTHER; note = 2'-fluoroguanosine
  modified_base 25: mod_base = OTHER; note = 2'-Omethylcytosine
  modified_base 27: mod_base = OTHER; note = 2'-fluorouridine
  modified_base 28: mod_base = OTHER; note = 2'-Omethyluridine
  modified_base 32: mod_base = OTHER; note = 2'-fluorocytosine
  modified_base 37: mod_base = OTHER; note = Adenosine phosphorothiorate
  modified_base 38: mod_base = OTHER; note = 2'-fluoroadenosine
  modified_base 41: mod_base = OTHER; note = 2'-fluorocytosine
  modified_base 46: mod_base = OTHER; note = 2'-fluoroguanosine phosphorothiorate
  modified_base 47: mod_base = OTHER; note = 2'-Omethyluridine
  modified_base 48: mod_base = OTHER; note = Uridine phosphorothiorate
  modified_base 51: mod_base = OTHER; note = 2'-Omethylguanosine
  modified_base 52: mod_base = OTHER; note = Guanosine phosphorothiorate
  modified_base 53: mod_base = OTHER; note = 2'-Omethylguanosine phosphorothiorate
  modified_base 54: mod_base = OTHER; note = 2'-Omethyluridine
  modified_base 55: mod_base = OTHER; note = Uridine phosphorothiorate
  modified_base 56: mod_base = OTHER; note = 2'-fluorocytosine
  modified_base 57: mod_base = OTHER; note = 2'-fluoroguanosine
  modified_base 58: mod_base = OTHER; note = 2'-fluoroadenosine
  modified_base 60: mod_base = OTHER; note = 2'-Omethyluridine
  modified_base 62: mod_base = OTHER; note = 2'-Omethylcytosine
  modified_base 64: mod_base = OTHER; note = 2'-Omethylguanosine
  modified_base 71: mod_base = OTHER; note = 2'-Omethyluridine
  modified_base 72: mod_base = OTHER; note = Cytosine phosphorothiorate
  modified_base 73: mod_base = OTHER; note = 2'-fluoroguanosine

SEQ ID NO: 8308 - RNA, 76 nt, synthetic construct; identical to SEQ ID NO: 3289
  source 1..76: mol_type = other RNA
  modified_base 10: mod_base = OTHER; note = 2'-Omethylguanosine
  modified_base 11: mod_base = OTHER; note = 2'-Omethylcytosine
  modified_base 12: mod_base = OTHER; note = 2'-Omethyluridine
  modified_base 13: mod_base = OTHER; note = 2'-Omethylcytosine
  modified_base 49: mod_base = OTHER; note = 2'-Omethylcytosine
  modified_base 50: mod_base = OTHER; note = 2'-Omethyladenosine
  modified_base 51: mod_base = OTHER; note = 2'-Omethylguanosine
  modified_base 52: mod_base = OTHER; note = 2'-Omethylguanosine
  modified_base 53: mod_base = OTHER; note = 2'-Omethylguanosine
  modified_base 73: mod_base = OTHER; note = 2'-Omethylguanosine

SEQ ID NO: 8309 - RNA, 85 nt, synthetic construct; identical to SEQ ID NO: 3301
  source 1..85: mol_type = other RNA
  modified_base 1: mod_base = OTHER; note = 2'-Omethylguanosine phosphorothiorate
  modified_base 2: mod_base = OTHER; note = Cytosine phosphorothiorate
  modified_base 3: mod_base = OTHER; note = 2'-Omethyluridine phosphorothiorate
  modified_base 4: mod_base = OTHER; note = 2'-Omethylguanosine phosphorothiorate
  modified_base 8: mod_base = OTHER; note = 2'-fluorouridine
  modified_base 13: mod_base = OTHER; note = 2'-fluoroguanosine
  modified_base 14: mod_base = OTHER; note = 2'-fluoroadenosine
  modified_base 18: mod_base = OTHER; note = 2'-Omethylguanosine
  modified_base 21: mod_base = OTHER; note = Adenosine phosphorothiorate
  modified_base 26: mod_base = OTHER; note = 2'-Omethylguanosine
  modified_base 27: mod_base = OTHER; note = 2'-fluorouridine
  modified_base 28: mod_base = OTHER; note = 2'-Omethyluridine
  modified_base 33: mod_base = OTHER; note = 2'-fluorouridine
  modified_base 44: mod_base = OTHER; note = 2'-Omethyluridine
  modified_base 46: mod_base = OTHER; note = 2'-Omethylguanosine
  modified_base 52: mod_base = OTHER; note = 2'-fluorocytosine
  modified_base 55: mod_base = OTHER; note = 2'-Omethylcytosine phosphorothiorate
  modified_base 59: mod_base = OTHER; note = 2'-Omethylcytosine phosphorothiorate
  modified_base 61: mod_base = OTHER; note = 2'-Omethylguanosine
  modified_base 66: mod_base = OTHER; note = Guanosine phosphorothiorate
  modified_base 72: mod_base = OTHER; note = 2'-fluorouridine
  modified_base 73: mod_base = OTHER; note = 2'-fluoroguanosine phosphorothiorate
  modified_base 82: mod_base = OTHER; note = 2'-fluoroguanosine
  modified_base 83: mod_base = OTHER; note = Cytosine phosphorothiorate

SEQ ID NO: 8310 - RNA, 86 nt, synthetic construct; identical to SEQ ID NO: 3290
  source 1..86: mol_type = other RNA
  modified_base 1: mod_base = OTHER; note = 2'-Omethyladenosine phosphorothiorate
  modified_base 2: mod_base = OTHER; note = 2'-Omethylcytosine phosphorothiorate
  modified_base 32: mod_base = OTHER; note = Cytosine phosphorothiorate
  modified_base 33: mod_base = OTHER; note = 2'-Omethyluridine
  modified_base 84: mod_base = OTHER; note = Cytosine phosphorothiorate
  modified_base 85: mod_base = OTHER; note = 2'-Omethylcytosine phosphorothiorate
  modified_base 86: mod_base = OTHER; note = 2'-Omethyladenosine

SEQ ID NO: 8311 - RNA, 75 nt, synthetic construct; identical to SEQ ID NO: 1045
  source 1..75: mol_type = other RNA
  modified_base 1: mod_base = OTHER; note = 2'-Omethylguanosine phosphorothiorate
  modified_base 2: mod_base = OTHER; note = 2'-Omethylguanosine
  modified_base 3: mod_base = OTHER; note = 2'-Omethyluridine
  modified_base 4: mod_base = OTHER; note = 2'-Omethyluridine
  modified_base 5: mod_base = OTHER; note = 2'-Omethylcytosine
  modified_base 6: mod_base = OTHER; note = 2'-Omethylcytosine
  modified_base 43: mod_base = OTHER; note = 2'-Omethylguanosine
  modified_base 44: mod_base = OTHER; note = 2'-Omethylcytosine
  modified_base 45: mod_base = OTHER; note = 2'-Omethylguanosine
  modified_base 46: mod_base = OTHER; note = 2'-fluoroadenosine
  modified_base 47: mod_base = OTHER; note = 2'-fluorouridine
  modified_base 72: mod_base = OTHER; note = 2'-Omethyluridine

SEQ ID NO: 8312 - RNA, 76 nt, synthetic construct; identical to SEQ ID NO: 3329
  source 1..76: mol_type = other RNA
  modified_base 1: mod_base = OTHER; note = 2'-Omethylguanosine
  modified_base 14: mod_base = OTHER; note = 2'-Omethyladenosine
  modified_base 15: mod_base = OTHER; note = 2'-fluoroadenosine
  modified_base 16: mod_base = OTHER; note = 2'-Omethyluridine
  modified_base 17: mod_base = OTHER; note = 2'-Omethylguanosine
  modified_base 18: mod_base = OTHER; note = 2'-Omethylguanosine
  modified_base 19: mod_base = OTHER; note = 2'-fluoroadenosine
  modified_base 20: mod_base = OTHER; note = 2'-Omethyluridine
  modified_base 54: mod_base = OTHER; note = 2'-Omethyluridine phosphorothiorate
  modified_base 55: mod_base = OTHER; note = Uridine phosphorothiorate
  modified_base 56: mod_base = OTHER; note = 2'-Omethylcytosine
  modified_base 57: mod_base = OTHER; note = 2'-Omethylguanosine
  modified_base 59: mod_base = OTHER; note = 2'-Omethylguanosine
  modified_base 73: mod_base = OTHER; note = 2'-Omethylguanosine

SEQ ID NO: 8313 - RNA, 76 nt, synthetic construct; identical to SEQ ID NO: 625
  source 1..76: mol_type = other RNA
  modified_base 1: mod_base = OTHER; note = 2'-Omethylguanosine phosphorothiorate
  modified_base 2: mod_base = OTHER; note = 2'-Omethylguanosine
  modified_base 3: mod_base = OTHER; note = 2'-Omethylcytosine
  modified_base 4: mod_base = OTHER; note = 2'-Omethyluridine
  modified_base 5: mod_base = OTHER; note = 2'-Omethylcytosine
  modified_base 6: mod_base = OTHER; note = 2'-Omethylcytosine
  modified_base 10: mod_base = OTHER; note = 2'-Omethylguanosine
  modified_base 11: mod_base = OTHER; note = 2'-Omethylcytosine
  modified_base 12: mod_base = OTHER; note = 2'-Omethylguanosine
  modified_base 13: mod_base = OTHER; note = 2'-Omethylcytosine
  modified_base 14: mod_base = OTHER; note = 2'-Omethyladenosine
  modified_base 15: mod_base = OTHER; note = 2'-Omethyladenosine
  modified_base 16: mod_base = OTHER; note = 2'-Omethyluridine
  modified_base 17: mod_base = OTHER; note = 2'-Omethylguanosine
  modified_base 18: mod_base = OTHER; note = 2'-Omethylguanosine
  modified_base 19: mod_base = OTHER; note = 2'-Omethyladenosine
  modified_base 22: mod_base = OTHER; note = 2'-fluoroguanosine
  modified_base 23: mod_base = OTHER; note = 2'-Omethylcytosine
  modified_base 24: mod_base = OTHER; note = 2'-Omethylguanosine
  modified_base 25: mod_base = OTHER; note = 2'-Omethylcytosine
  modified_base 30: mod_base = OTHER; note = 2'-Omethylguanosine
  modified_base 33: mod_base = OTHER; note = 2'-fluorouridine
  modified_base 35: mod_base = OTHER; note = Cytosine phosphorothiorate
  modified_base 37: mod_base = OTHER; note = Adenosine phosphorothiorate
  modified_base 38: mod_base = OTHER; note = Adenosine phosphorothiorate
  modified_base 41: mod_base = OTHER; note = 2'-fluorocytosine
  modified_base 42: mod_base = OTHER; note = 2'-Omethyladenosine
  modified_base 43: mod_base = OTHER; note = 2'-Omethyladenosine
  modified_base 44: mod_base = OTHER; note = 2'-fluoroadenosine
  modified_base 49: mod_base = OTHER; note = 2'-Omethylcytosine
  modified_base 50: mod_base = OTHER; note = 2'-Omethylcytosine
  modified_base 51: mod_base = OTHER; note = 2'-Omethylguanosine
  modified_base 52: mod_base = OTHER; note = 2'-Omethylguanosine
  modified_base 53: mod_base = OTHER; note = 2'-fluoroguanosine
  modified_base 54: mod_base = OTHER; note = 2'-Omethyluridine
  modified_base 55: mod_base = OTHER; note = Uridine phosphorothiorate
  modified_base 56: mod_base = OTHER; note = 2'-Omethylcytosine
  modified_base 57: mod_base = OTHER; note = 2'-fluoroguanosine
  modified_base 59: mod_base = OTHER; note = 2'-Omethylguanosine
  modified_base 61: mod_base = OTHER; note = 2'-Omethylcytosine
  modified_base 62: mod_base = OTHER; note = 2'-Omethylcytosine
  modified_base 63: mod_base = OTHER; note = 2'-fluorocytosine
  modified_base 64: mod_base = OTHER; note = 2'-Omethylguanosine
  modified_base 65: mod_base = OTHER; note = 2'-Omethylguanosine
  modified_base 66: mod_base = OTHER; note = 2'-Omethylcytosine
  modified_base 67: mod_base = OTHER; note = 2'-Omethylguanosine
  modified_base 68: mod_base = OTHER; note = 2'-Omethylguanosine
  modified_base 73: mod_base = OTHER; note = 2'-Omethylguanosine
  modified_base 74: mod_base = OTHER; note = 2'-fluorocytosine phosphorothiorate
  modified_base 75: mod_base = OTHER; note = 2'-fluorocytosine phosphorothiorate

SEQ ID NO: 8314 - RNA, 76 nt, synthetic construct; identical to SEQ ID NO: 625
  source 1..76: mol_type = other RNA
  modified_base 10: mod_base = OTHER; note = 2'-Omethylguanosine
  modified_base 11: mod_base = OTHER; note = 2'-Omethylcytosine
  modified_base 12: mod_base = OTHER; note = 2'-Omethylguanosine
  modified_base 13: mod_base = OTHER; note = 2'-Omethylcytosine
  modified_base 14: mod_base = OTHER; note = 2'-Omethyladenosine
  modified_base 15: mod_base = OTHER; note = 2'-Omethyladenosine
  modified_base 16: mod_base = OTHER; note = 2'-Omethyluridine
  modified_base 17: mod_base = OTHER; note = 2'-Omethylguanosine
  modified_base 18: mod_base = OTHER; note = 2'-Omethylguanosine
  modified_base 19: mod_base = OTHER; note = 2'-Omethyladenosine
  modified_base 20: mod_base = OTHER; note = 2'-Omethyluridine
  modified_base 40: mod_base = OTHER; note = 2'-fluorouridine
  modified_base 41: mod_base = OTHER; note = 2'-fluorocytosine
  modified_base 42: mod_base = OTHER; note = 2'-fluoroadenosine
  modified_base 43: mod_base = OTHER; note = 2'-fluoroadenosine

SEQ ID NO: 8315 - DNA, 76 bp, synthetic construct; identical to SEQ ID NO: 1924
  source 1..76: mol_type = other DNA
  modified_base 1: mod_base = OTHER; note = 2'-Omethylguanosine phosphorothiorate
  modified_base 2: mod_base = OTHER; note = Guanosine phosphorothiorate
  modified_base 3: mod_base = OTHER; note = Cytosine phosphorothiorate
  modified_base 4: mod_base = OTHER; note = 2'-Omethyluridine
  modified_base 5: mod_base = OTHER; note = 2'-O-(2-Methoxyethyl) 5-methylcytosine
  modified_base 17: mod_base = OTHER; note = 2'-Omethylguanosine phosphorothiorate
  modified_base 19: mod_base = OTHER; note = 2'-fluoroadenosine
  modified_base 20: mod_base = OTHER; note = deoxyuridine phosphorothiorate
  modified_base 23: mod_base = OTHER; note = 2'-fluorocytosine phosphorothiorate
  modified_base 25: mod_base = OTHER; note = Cytosine phosphorothiorate
  modified_base 26: mod_base = OTHER; note = 2'-Omethyladenosine
  modified_base 29: mod_base = OTHER; note = Guanosine phosphorothiorate
  modified_base 30: mod_base = OTHER; note = 2'-Omethylguanosine
  modified_base 31: mod_base = OTHER; note = Adenosine phosphorothiorate
  modified_base 32: mod_base = OTHER; note = 2'-Omethylcytosine
  modified_base 33: mod_base = OTHER; note = 2'-Omethyluridine
  modified_base 35: mod_base = OTHER; note = 2'-fluorocytosine
  modified_base 42: mod_base = OTHER; note = Adenosine phosphorothiorate
  modified_base 43: mod_base = OTHER; note = 2'-Omethyladenosine phosphorothiorate
  modified_base 46: mod_base = OTHER; note = Guanosine phosphorothiorate
  modified_base 52: mod_base = OTHER; note = 2'-fluoroguanosine
  modified_base 58: mod_base = OTHER; note = Adenosine phosphorothiorate
  modified_base 59: mod_base = OTHER; note = 2'-fluoroguanosine
  modified_base 60: mod_base = OTHER; note = Uridine phosphorothiorate
  modified_base 61: mod_base = OTHER; note = Cytosine phosphorothiorate
  modified_base 62: mod_base = OTHER; note = deoxycytosine phosphorothiorate
  modified_base 63: mod_base = OTHER; note = 2'-fluorocytosine
  modified_base 66: mod_base = OTHER; note = Cytosine phosphorothiorate
  modified_base 68: mod_base = OTHER; note = 2'-Omethylguanosine
  modified_base 69: mod_base = OTHER; note = Adenosine phosphorothiorate
  modified_base 70: mod_base = OTHER; note = 2'-O-(2-Methoxyethyl) guanosine
  modified_base 73: mod_base = OTHER; note = Guanosine phosphorothiorate
  modified_base 75: mod_base = OTHER; note = 2'-fluorocytosine phosphorothiorate
  modified_base 76: mod_base = OTHER; note = 2'-Omethyladenosine
  misc_feature 1..8: note = RNA
  misc_feature 9: note = DNA
  misc_feature 10..17: note = RNA
  misc_feature 18: note = DNA
  misc_feature 19: note = RNA
  misc_feature 20: note = DNA
  misc_feature 21..43: note = RNA
  misc_feature 44: note = DNA
  misc_feature 45..46: note = RNA
  misc_feature 47: note = DNA
  misc_feature 48..61: note = RNA
  misc_feature 62: note = DNA
  misc_feature 63..66: note = RNA
  misc_feature 67: note = DNA
  misc_feature 68..76: note = RNA

SEQ ID NO: 8316 - RNA, 75 nt, synthetic construct; identical to SEQ ID NO: 3311
  source 1..75: mol_type = other RNA
  modified_base 1: mod_base = OTHER; note = Guanosine phosphorothiorate
  modified_base 3: mod_base = OTHER; note = Uridine phosphorothiorate
  modified_base 7: mod_base = OTHER; note = Adenosine phosphorothiorate
  modified_base 8: mod_base = OTHER; note = 2'-fluorouridine phosphorothiorate
  modified_base 16: mod_base = OTHER; note = 2'-fluorouridine
  modified_base 23: mod_base = OTHER; note = 2'-fluorocytosine
  modified_base 39: mod_base = OTHER; note = Uridine phosphorothiorate
  modified_base 40: mod_base = OTHER; note = 2'-fluorocytosine
  modified_base 62: mod_base = OTHER; note = Cytosine phosphorothiorate
  modified_base 65: mod_base = OTHER; note = 2'-fluorouridine
  modified_base 68: mod_base = OTHER; note = Adenosine phosphorothiorate
  modified_base 72: mod_base = OTHER; note = 2'-fluorouridine phosphorothiorate
  modified_base 73: mod_base = OTHER; note = Cytosine phosphorothiorate
  modified_base 74: mod_base = OTHER; note = 2'-fluorocytosine phosphorothiorate

SEQ ID NO: 8317 - RNA, 86 nt, synthetic construct; identical to SEQ ID NO: 3290
  source 1..86: mol_type = other RNA
  modified_base 76: mod_base = OTHER; note = 2'-fluorouridine

SEQ ID NO: 8318 - RNA, 75 nt, synthetic construct; identical to SEQ ID NO: 3311
  source 1..75: mol_type = other RNA
  modified_base 2: mod_base = OTHER; note = 2'-Omethylguanosine phosphorothiorate
  modified_base 6: mod_base = OTHER; note = 2'-Omethylcytosine
  modified_base 27: mod_base = OTHER; note = 2'-fluorocytosine
  modified_base 39: mod_base = OTHER; note = 2'-Omethyluridine
  modified_base 56: mod_base = OTHER; note = 2'-Omethylguanosine
  modified_base 70: mod_base = OTHER; note = 2'-fluorocytosine
  modified_base 74: mod_base = OTHER; note = 2'-fluorocytosine phosphorothiorate

SEQ ID NO: 8319 - RNA, 76 nt, synthetic construct; identical to SEQ ID NO: 3295
  source 1..76: mol_type = other RNA
  modified_base 1: mod_base = OTHER; note = 2'-Omethylcytosine
  modified_base 2: mod_base = OTHER; note = 2'-Omethylcytosine
  modified_base 3: mod_base = OTHER; note = Uridine phosphorothiorate
  modified_base 15: mod_base = OTHER; note = 2'-Omethylguanosine
  modified_base 17: mod_base = OTHER; note = 2'-Omethyluridine
  modified_base 25: mod_base = OTHER; note = 2'-Omethylcytosine
  modified_base 42: mod_base = OTHER; note = Uridine phosphorothiorate
  modified_base 54: mod_base = OTHER; note = 2'-fluorouridine phosphorothiorate
  modified_base 66: mod_base = OTHER; note = Uridine phosphorothiorate
  modified_base 74: mod_base = OTHER; note = 2'-Omethylcytosine phosphorothiorate
  modified_base 76: mod_base = OTHER; note = 2'-Omethyladenosine

SEQ ID NO: 8320 - RNA, 76 nt, synthetic construct; identical to SEQ ID NO: 625
  source 1..76: mol_type = other RNA
  modified_base 1: mod_base = OTHER; note = 2'-fluoroguanosine
  modified_base 2: mod_base = OTHER; note = 2'-fluoroguanosine
  modified_base 11: mod_base = OTHER; note = 2'-fluorocytosine
  modified_base 12: mod_base = OTHER; note = 2'-fluoroguanosine
  modified_base 16: mod_base = OTHER; note = 2'-fluorouridine
  modified_base 18: mod_base = OTHER; note = 2'-Omethylguanosine
  modified_base 20: mod_base = OTHER; note = 2'-Omethyluridine
  modified_base 22: mod_base = OTHER; note = 2'-fluoroguanosine
  modified_base 23: mod_base = OTHER; note = 2'-fluorocytosine phosphorothiorate
  modified_base 25: mod_base = OTHER; note = 2'-Omethylcytosine
  modified_base 26: mod_base = OTHER; note = 2'-fluoroadenosine phosphorothiorate
  modified_base 27: mod_base = OTHER; note = 2'-fluorouridine
  modified_base 28: mod_base = OTHER; note = 2'-Omethyluridine
  modified_base 31: mod_base = OTHER; note = 2'-Omethyladenosine
  modified_base 33: mod_base = OTHER; note = 2'-fluorouridine
  modified_base 34: mod_base = OTHER; note = 2'-fluorouridine phosphorothiorate
  modified_base 39: mod_base = OTHER; note = 2'-Omethyluridine phosphorothiorate
  modified_base 40: mod_base = OTHER; note = 2'-fluorouridine
  modified_base 42: mod_base = OTHER; note = 2'-Omethyladenosine
  modified_base 46: mod_base = OTHER; note = 2'-fluoroguanosine
  modified_base 48: mod_base = OTHER; note = 2'-Omethyluridine
  modified_base 49: mod_base = OTHER; note = Cytosine phosphorothiorate
  modified_base 51: mod_base = OTHER; note = Guanosine phosphorothiorate
  modified_base 52: mod_base = OTHER; note = 2'-fluoroguanosine phosphorothiorate
  modified_base 53: mod_base = OTHER; note = 2'-Omethylguanosine
  modified_base 56: mod_base = OTHER; note = 2'-Omethylcytosine
  modified_base 58: mod_base = OTHER; note = Adenosine phosphorothiorate
  modified_base 59: mod_base = OTHER; note = 2'-Omethylguanosine
  modified_base 60: mod_base = OTHER; note = Uridine phosphorothiorate
  modified_base 61: mod_base = OTHER; note = 2'-fluorocytosine
  modified_base 62: mod_base = OTHER; note = Cytosine phosphorothiorate
  modified_base 64: mod_base = OTHER; note = 2'-Omethylguanosine
  modified_base 65: mod_base = OTHER; note = Guanosine phosphorothiorate
  modified_base 66: mod_base = OTHER; note = 2'-fluorocytosine
  modified_base 69: mod_base = OTHER; note = Adenosine phosphorothiorate
  modified_base 70: mod_base = OTHER; note = 2'-fluoroguanosine
  modified_base 75: mod_base = OTHER; note = Cytosine phosphorothiorate
  modified_base 76: mod_base = OTHER; note = 2'-Omethyladenosine

SEQ ID NO: 8321 - RNA, 75 nt, synthetic construct; identical to SEQ ID NO: 1045
  source 1..75: mol_type = other RNA
  modified_base 1: mod_base = OTHER; note = 2'-Omethylguanosine phosphorothiorate
  modified_base 2: mod_base = OTHER; note = 2'-Omethylguanosine phosphorothiorate
  modified_base 11: mod_base = OTHER; note = Uridine phosphorothiorate
  modified_base 12: mod_base = OTHER; note = 2'-fluoroguanosine
  modified_base 15: mod_base = OTHER; note = 2'-fluoroadenosine
  modified_base 18: mod_base = OTHER; note = 2'-fluoroguanosine
  modified_base 19: mod_base = OTHER; note = 2'-fluorouridine
  modified_base 23: mod_base = OTHER; note = 2'-fluorocytosine
  modified_base 28: mod_base = OTHER; note = 2'-fluorouridine
  modified_base 29: mod_base = OTHER; note = 2'-Omethylguanosine
  modified_base 44: mod_base = OTHER; note = 2'-fluorocytosine
  modified_base 59: mod_base = OTHER; note = 2'-fluorouridine
  modified_base 60: mod_base = OTHER; note = Cytosine phosphorothiorate
  modified_base 61: mod_base = OTHER; note = Uridine phosphorothiorate
  modified_base 65: mod_base = OTHER; note = Uridine phosphorothiorate
  modified_base 66: mod_base = OTHER; note = Guanosine phosphorothiorate
  modified_base 73: mod_base = OTHER; note = Cytosine phosphorothiorate
  modified_base 74: mod_base = OTHER; note = 2'-Omethylcytosine

SEQ ID NO: 8322 - RNA, 86 nt, synthetic construct; identical to SEQ ID NO: 3290
  source 1..86: mol_type = other RNA
  modified_base 1: mod_base = OTHER; note = 2'-Omethyladenosine
  modified_base 40: mod_base = OTHER; note = 2'-fluorocytosine
  modified_base 41: mod_base = OTHER; note = 2'-Omethylcytosine phosphorothiorate
  modified_base 42: mod_base = OTHER; note = 2'-fluoroadenosine
  modified_base 43: mod_base = OTHER; note = 2'-Omethyladenosine phosphorothiorate
  modified_base 83: mod_base = OTHER; note = 2'-Omethyladenosine

SEQ ID NO: 8323 - RNA, 75 nt, synthetic construct; identical to SEQ ID NO: 3299
  source 1..75: mol_type = other RNA
  modified_base 3: mod_base = OTHER; note = 2'-fluorouridine phosphorothiorate
  modified_base 27: mod_base = OTHER; note = 2'-fluorocytosine
  modified_base 38: mod_base = OTHER; note = 2'-Omethyluridine
  modified_base 45: mod_base = OTHER; note = 2'-Omethylguanosine phosphorothiorate
  modified_base 60: mod_base = OTHER; note = 2'-fluorocytosine
  modified_base 71: mod_base = OTHER; note = 2'-fluorocytosine phosphorothiorate
  modified_base 73: mod_base = OTHER; note = Cytosine phosphorothiorate

SEQ ID NO: 8324 - RNA, 85 nt, synthetic construct; identical to SEQ ID NO: 3317
  source 1..85: mol_type = other RNA
  modified_base 1: mod_base = OTHER; note = 2'-Omethylguanosine phosphorothiorate
  modified_base 4: mod_base = OTHER; note = 2'-Omethylguanosine phosphorothiorate
  modified_base 16: mod_base = OTHER; note = 2'-Omethyluridine
  modified_base 23: mod_base = OTHER; note = Guanosine phosphorothiorate
  modified_base 48: mod_base = OTHER; note = 2'-fluoroguanosine
  modified_base 51: mod_base = OTHER; note = 2'-fluorouridine
  modified_base 83: mod_base = OTHER; note = Cytosine phosphorothiorate

SEQ ID NO: 8325 - RNA, 73 nt, synthetic construct; identical to SEQ ID NO: 935
  source 1..73: mol_type = other RNA
  modified_base 1: mod_base = OTHER; note = 2'-Omethylguanosine
  modified_base 13: mod_base = OTHER; note = 2'-Omethylcytosine
  modified_base 73: mod_base = OTHER; note = 2'-Omethylguanosine

SEQ ID NO: 8326 - RNA, 75 nt, synthetic construct; identical to SEQ ID NO: 3336
  source 1..75: mol_type = other RNA
  modified_base 1: mod_base = OTHER; note = 2'-fluorocytosine
  modified_base 3: mod_base = OTHER; note = 2'-Omethyluridine
  modified_base 7: mod_base = OTHER; note = 2'-Omethyluridine
  modified_base 20: mod_base = OTHER; note = 2'-fluoroadenosine
  modified_base 21: mod_base = OTHER; note = 2'-fluoroguanosine
  modified_base 25: mod_base = OTHER; note = 2'-fluoroadenosine
  modified_base 26: mod_base = OTHER; note = 2'-fluorouridine phosphorothiorate
  modified_base 28: mod_base = OTHER; note = 2'-Omethyladenosine phosphorothiorate
  modified_base 35: mod_base = OTHER; note = 2'-fluoroadenosine phosphorothiorate
  modified_base 40: mod_base = OTHER; note = 2'-fluorouridine
  modified_base 41: mod_base = OTHER; note = 2'-fluoroguanosine
  modified_base 46: mod_base = OTHER; note = 2'-fluorouridine
  modified_base 47: mod_base = OTHER; note = 2'-fluorocytosine
  modified_base 49: mod_base = OTHER; note = 2'-fluoroadenosine phosphorothiorate
  modified_base 53: mod_base = OTHER; note = 2'-Omethyluridine phosphorothiorate
  modified_base 61: mod_base = OTHER; note = 2'-fluorocytosine
  modified_base 62: mod_base = OTHER; note = 2'-Omethylcytosine phosphorothiorate
  modified_base 72: mod_base = OTHER; note = Guanosine phosphorothiorate
  modified_base 73: mod_base = OTHER; note = Cytosine phosphorothiorate
  modified_base 74: mod_base = OTHER; note = 2'-Omethylcytosine

SEQ ID NO: 8327 - RNA, 76 nt, synthetic construct; identical to SEQ ID NO: 625
  source 1..76: mol_type = other RNA
  modified_base 3: mod_base = OTHER; note = 2'-fluorocytosine
  modified_base 5: mod_base = OTHER; note = Cytosine phosphorothiorate
  modified_base 13: mod_base = OTHER; note = 2'-fluorocytosine phosphorothiorate
  modified_base 14: mod_base = OTHER; note = 2'-Omethyladenosine
  modified_base 15: mod_base = OTHER; note = 2'-fluoroadenosine
  modified_base 16: mod_base = OTHER; note = 2'-fluorouridine
  modified_base 18: mod_base = OTHER; note = 2'-fluoroguanosine
  modified_base 19: mod_base = OTHER; note = Adenosine phosphorothiorate
  modified_base 20: mod_base = OTHER; note = 2'-fluorouridine
  modified_base 22: mod_base = OTHER; note = 2'-Omethylguanosine
  modified_base 24: mod_base = OTHER; note = Guanosine phosphorothiorate
  modified_base 27: mod_base = OTHER; note = Uridine phosphorothiorate
  modified_base 28: mod_base = OTHER; note = 2'-Omethyluridine
  modified_base 30: mod_base = OTHER; note = 2'-Omethylguanosine
  modified_base 32: mod_base = OTHER; note = 2'-fluorocytosine
  modified_base 34: mod_base = OTHER; note = Uridine phosphorothiorate
  modified_base 36: mod_base = OTHER; note = Adenosine phosphorothiorate
  modified_base 39: mod_base = OTHER; note = 2'-fluorouridine
  modified_base 41: mod_base = OTHER; note = 2'-Omethylcytosine
  modified_base 42: mod_base = OTHER; note = Adenosine phosphorothiorate
  modified_base 43: mod_base = OTHER; note = 2'-fluoroadenosine
  modified_base 45: mod_base = OTHER; note = 2'-Omethylguanosine
  modified_base 50: mod_base = OTHER; note = 2'-fluorocytosine
  modified_base 52: mod_base = OTHER; note = 2'-Omethylguanosine phosphorothiorate
  modified_base 53: mod_base = OTHER; note = 2'-fluoroguanosine
  modified_base 54: mod_base = OTHER; note = 2'-fluorouridine
  modified_base 57: mod_base = OTHER; note = Guanosine phosphorothiorate
  modified_base 63: mod_base = OTHER; note = 2'-fluorocytosine
  modified_base 66: mod_base = OTHER; note = 2'-fluorocytosine
  modified_base 67: mod_base = OTHER; note = 2'-Omethylguanosine
  modified_base 68: mod_base = OTHER; note = Guanosine phosphorothiorate
  modified_base 69: mod_base = OTHER; note = 2'-Omethyladenosine
  modified_base 70: mod_base = OTHER; note = 2'-fluoroguanosine
  modified_base 71: mod_base = OTHER; note = 2'-fluorouridine
  modified_base 76: mod_base = OTHER; note = 2'-fluoroadenosine

SEQ ID NO: 8328 - RNA, 76 nt, synthetic construct; identical to SEQ ID NO: 625
  source 1..76: mol_type = other RNA
  modified_base 54: mod_base = OTHER; note = Uridine phosphorothiorate
  modified_base 55: mod_base = OTHER; note = Uridine phosphorothiorate
  modified_base 56: mod_base = OTHER; note = Cytosine phosphorothiorate
  modified_base 57: mod_base = OTHER; note = Guanosine phosphorothiorate
  modified_base 58: mod_base = OTHER; note = Adenosine phosphorothiorate
  modified_base 59: mod_base = OTHER; note = Guanosine phosphorothiorate
  modified_base 60: mod_base = OTHER; note = Uridine phosphorothiorate

SEQ ID NO: 8329 - RNA, 76 nt, synthetic construct; identical to SEQ ID NO: 625
  source 1..76: mol_type = other RNA
  modified_base 2: mod_base = OTHER; note = 2'-fluoroguanosine
  modified_base 3: mod_base = OTHER; note = 2'-Omethylcytosine
  modified_base 10: mod_base = OTHER; note = 2'-Omethylguanosine phosphorothiorate
  modified_base 12: mod_base = OTHER; note = Guanosine phosphorothiorate
  modified_base 13: mod_base = OTHER; note = 2'-Omethylcytosine
  modified_base 25: mod_base = OTHER; note = 2'-Omethylcytosine
  modified_base 27: mod_base = OTHER; note = 2'-Omethyluridine
  modified_base 28: mod_base = OTHER; note = 2'-Omethyluridine
  modified_base 29: mod_base = OTHER; note = Guanosine phosphorothiorate
  modified_base 30: mod_base = OTHER; note = 2'-fluoroguanosine phosphorothiorate
  modified_base 31: mod_base = OTHER; note = 2'-Omethyladenosine
  modified_base 33: mod_base = OTHER; note = 2'-fluorouridine
  modified_base 41: mod_base = OTHER; note = Cytosine phosphorothiorate
  modified_base 42: mod_base = OTHER; note = 2'-Omethyladenosine
  modified_base 48: mod_base = OTHER; note = Uridine phosphorothiorate
  modified_base 50: mod_base = OTHER; note = 2'-Omethylcytosine
  modified_base 51: mod_base = OTHER; note = Guanosine phosphorothiorate
  modified_base 52: mod_base = OTHER; note = 2'-Omethylguanosine
  modified_base 53: mod_base = OTHER; note = Guanosine phosphorothiorate
  modified_base 54: mod_base = OTHER; note = Uridine phosphorothiorate
  modified_base 56: mod_base = OTHER; note = 2'-Omethylcytosine
  modified_base 58: mod_base = OTHER; note = 2'-fluoroadenosine
  modified_base 59: mod_base = OTHER; note = Guanosine phosphorothiorate
  modified_base 60: mod_base = OTHER; note = 2'-Omethyluridine phosphorothiorate
  modified_base 62: mod_base = OTHER; note = Cytosine phosphorothiorate
  modified_base 63: mod_base = OTHER; note = 2'-fluorocytosine
  modified_base 64: mod_base = OTHER; note = 2'-Omethylguanosine
  modified_base 65: mod_base = OTHER; note = 2'-fluoroguanosine
  modified_base 70: mod_base = OTHER; note = Guanosine phosphorothiorate
  modified_base 71: mod_base = OTHER; note = Uridine phosphorothiorate
  modified_base 72: mod_base = OTHER; note = 2'-fluorocytosine phosphorothiorate
  modified_base 73: mod_base = OTHER; note = 2'-Omethylguanosine
  modified_base 74: mod_base = OTHER; note = 2'-fluorocytosine phosphorothiorate
  modified_base 75: mod_base = OTHER; note = 2'-fluorocytosine

SEQ ID NO: 8330 - RNA, 76 nt, synthetic construct; identical to SEQ ID NO: 3490
  source 1..76: mol_type = other RNA
  modified_base 1: mod_base = OTHER; note = 2'-Omethylguanosine phosphorothiorate
  modified_base 2: mod_base = OTHER; note = 2'-Omethylguanosine
  modified_base 3: mod_base = OTHER; note = 2'-Omethylcytosine
  modified_base 4: mod_base = OTHER; note = 2'-Omethyluridine
  modified_base 5: mod_base = OTHER; note = 2'-Omethylcytosine
  modified_base 6: mod_base = OTHER; note = 2'-Omethylcytosine
  modified_base 44: mod_base = OTHER; note = 2'-Omethyladenosine
  modified_base 45: mod_base = OTHER; note = 2'-Omethylguanosine
  modified_base 46: mod_base = OTHER; note = 2'-fluoroguanosine
  modified_base 47: mod_base = OTHER; note = 2'-fluorouridine
  modified_base 48: mod_base = OTHER; note = 2'-Omethyluridine
  modified_base 49: mod_base = OTHER; note = 2'-Omethylguanosine
  modified_base 73: mod_base = OTHER; note = 2'-Omethylguanosine

SEQ ID NO: 8331 - RNA, 86 nt, synthetic construct; identical to SEQ ID NO: 3290
  source 1..86: mol_type = other RNA
  modified_base 61: mod_base = OTHER; note = Guanosine phosphorothiorate

SEQ ID NO: 8332 - RNA, 76 nt, synthetic construct; identical to SEQ ID NO: 625
  source 1..76: mol_type = other RNA
  modified_base 1: mod_base = OTHER; note = Guanosine phosphorothiorate
  modified_base 2: mod_base = OTHER; note = 2'-Omethylguanosine phosphorothiorate
  modified_base 3: mod_base = OTHER; note = 2'-fluorocytosine
  modified_base 4: mod_base = OTHER; note = Uridine phosphorothiorate
  modified_base 6: mod_base = OTHER; note = 2'-Omethylcytosine
  modified_base 10: mod_base = OTHER; note = 2'-Omethylguanosine phosphorothiorate
  modified_base 12: mod_base = OTHER; note = 2'-fluoroguanosine
  modified_base 13: mod_base = OTHER; note = Cytosine phosphorothiorate
  modified_base 14: mod_base = OTHER; note = 2'-fluoroadenosine
  modified_base 18: mod_base = OTHER; note = 2'-fluoroguanosine
  modified_base 22: mod_base = OTHER; note = 2'-Omethylguanosine
  modified_base 23: mod_base = OTHER; note = 2'-fluorocytosine
  modified_base 24: mod_base = OTHER; note = 2'-fluoroguanosine
  modified_base 26: mod_base = OTHER; note = Adenosine phosphorothiorate
  modified_base 33: mod_base = OTHER; note = Uridine phosphorothiorate
  modified_base 34: mod_base = OTHER; note = 2'-fluorouridine
  modified_base 37: mod_base = OTHER; note = Adenosine phosphorothiorate
  modified_base 38: mod_base = OTHER; note = 2'-Omethyladenosine
  modified_base 42: mod_base = OTHER; note = 2'-Omethyladenosine
  modified_base 45: mod_base = OTHER; note = 2'-Omethylguanosine
  modified_base 46: mod_base = OTHER; note = 2'-Omethylguanosine
  modified_base 48: mod_base = OTHER; note = 2'-Omethyluridine
  modified_base 50: mod_base = OTHER; note = 2'-fluorocytosine
  modified_base 51: mod_base = OTHER; note = 2'-Omethylguanosine
  modified_base 55: mod_base = OTHER; note = Uridine phosphorothiorate
  modified_base 56: mod_base = OTHER; note = 2'-Omethylcytosine
  modified_base 59: mod_base = OTHER; note = 2'-Omethylguanosine
  modified_base 60: mod_base = OTHER; note = 2'-Omethyluridine
  modified_base 63: mod_base = OTHER; note = 2'-Omethylcytosine
  modified_base 64: mod_base = OTHER; note = 2'-Omethylguanosine phosphorothiorate
  modified_base 65: mod_base = OTHER; note = 2'-fluoroguanosine
  modified_base 67: mod_base = OTHER; note = Guanosine phosphorothiorate
  modified_base 68: mod_base = OTHER; note = 2'-Omethylguanosine phosphorothiorate
  modified_base 69: mod_base = OTHER; note = 2'-fluoroadenosine
  modified_base 75: mod_base = OTHER; note = 2'-fluorocytosine

SEQ ID NO: 8333 - RNA, 85 nt, synthetic construct; identical to SEQ ID NO: 3288
  source 1..85: mol_type = other RNA
  modified_base 1: mod_base = OTHER; note = 2'-Omethylcytosine phosphorothiorate
  modified_base 2: mod_base = OTHER; note = 2'-fluorocytosine
  modified_base 13: mod_base = OTHER; note = Adenosine phosphorothiorate
  modified_base 17: mod_base = OTHER; note = Guanosine phosphorothiorate
  modified_base 28: mod_base = OTHER; note = 2'-fluoroguanosine
  modified_base 30: mod_base = OTHER; note = 2'-fluoroadenosine
  modified_base 34: mod_base = OTHER; note = 2'-fluorocytosine
  modified_base 38: mod_base = OTHER; note = 2'-fluorouridine
  modified_base 39: mod_base = OTHER; note = Cytosine phosphorothiorate
  modified_base 43: mod_base = OTHER; note = 2'-Omethyluridine
  modified_base 46: mod_base = OTHER; note = Adenosine phosphorothiorate
  modified_base 47: mod_base = OTHER; note = 2'-fluorocytosine
  modified_base 50: mod_base = OTHER; note = 2'-Omethyladenosine phosphorothiorate
  modified_base 51: mod_base = OTHER; note = 2'-Omethyluridine
  modified_base 54: mod_base = OTHER; note = 2'-Omethylcytosine
  modified_base 55: mod_base = OTHER; note = 2'-Omethylcytosine
  modified_base 57: mod_base = OTHER; note = 2'-Omethylcytosine
  modified_base 61: mod_base = OTHER; note = 2'-fluoroguanosine
  modified_base 65: mod_base = OTHER; note = Cytosine phosphorothiorate

SEQ ID NO: 8334 - RNA, 75 nt, synthetic construct; identical to SEQ ID NO: 3299
  source 1..75: mol_type = other RNA
  modified_base 1: mod_base = OTHER; note = 2'-fluorocytosine phosphorothiorate
  modified_base 2: mod_base = OTHER; note = 2'-Omethylcytosine phosphorothiorate
  modified_base 3: mod_base = OTHER; note = 2'-Omethyluridine phosphorothiorate
  modified_base 4: mod_base = OTHER; note = Guanosine phosphorothiorate
  modified_base 14: mod_base = OTHER; note = 2'-fluoroguanosine
  modified_base 15: mod_base = OTHER; note = 2'-Omethyluridine
  modified_base 19: mod_base = OTHER; note = 2'-fluorouridine
  modified_base 23: mod_base = OTHER; note = Guanosine phosphorothiorate
  modified_base 25: mod_base = OTHER; note = 2'-fluoroadenosine
  modified_base 27: mod_base = OTHER; note = 2'-fluorocytosine phosphorothiorate
  modified_base 29: mod_base = OTHER; note = Guanosine phosphorothiorate
  modified_base 40: mod_base = OTHER; note = 2'-Omethyluridine
  modified_base 42: mod_base = OTHER; note = 2'-fluoroadenosine
  modified_base 46: mod_base = OTHER; note = 2'-Omethyluridine phosphorothiorate
  modified_base 62: mod_base = OTHER; note = 2'-fluorocytosine
  modified_base 63: mod_base = OTHER; note = 2'-Omethyluridine phosphorothiorate
  modified_base 71: mod_base = OTHER; note = 2'-fluorocytosine phosphorothiorate
  modified_base 73: mod_base = OTHER; note = Cytosine phosphorothiorate
  modified_base 74: mod_base = OTHER; note = Cytosine phosphorothiorate

SEQ ID NO: 8335 - RNA, 75 nt, synthetic construct; identical to SEQ ID NO: 1045
  source 1..75: mol_type = other RNA
  modified_base 1: mod_base = OTHER; note = 2'-Omethylguanosine phosphorothiorate
  modified_base 2: mod_base = OTHER; note = 2'-Omethylguanosine phosphorothiorate
  modified_base 12: mod_base = OTHER; note = Guanosine phosphorothiorate
  modified_base 22: mod_base = OTHER; note = 2'-fluoroguanosine
  modified_base 26: mod_base = OTHER; note = Uridine phosphorothiorate
  modified_base 27: mod_base = OTHER; note = Cytosine phosphorothiorate
  modified_base 45: mod_base = OTHER; note = Guanosine phosphorothiorate
  modified_base 62: mod_base = OTHER; note = 2'-fluorocytosine
  modified_base 73: mod_base = OTHER; note = Cytosine phosphorothiorate
  modified_base 74: mod_base = OTHER; note = 2'-Omethylcytosine phosphorothiorate
  modified_base 75: mod_base = OTHER; note = 2'-Omethyladenosine

SEQ ID NO: 8336 - RNA, 74 nt, synthetic construct; identical to SEQ ID NO: 766
  source 1..74: mol_type = other RNA
  modified_base 1: mod_base = OTHER; note = 2'-Omethylguanosine phosphorothiorate
  modified_base 2: mod_base = OTHER; note = 2'-Omethylguanosine
  modified_base 3: mod_base = OTHER; note = 2'-Omethylcytosine
  modified_base 4: mod_base = OTHER; note = 2'-Omethyluridine
  modified_base 5: mod_base = OTHER; note = 2'-Omethylcytosine
  modified_base 6: mod_base = OTHER; note = 2'-Omethylcytosine
  modified_base 54: mod_base = OTHER; note = 2'-Omethyluridine phosphorothiorate
  modified_base 56: mod_base = OTHER; note = 2'-Omethylcytosine
  modified_base 57: mod_base = OTHER; note = 2'-fluoroguanosine
  modified_base 59: mod_base = OTHER; note = 2'-Omethylguanosine
  modified_base 73: mod_base = OTHER; note = 2'-Omethylguanosine phosphorothiorate

SEQ ID NO: 8337 - RNA, 76 nt, synthetic construct; identical to SEQ ID NO: 625
  source 1..76: mol_type = other RNA
  modified_base 1: mod_base = OTHER; note = 2'-Omethylguanosine phosphorothiorate
  modified_base 2: mod_base = OTHER; note = 2'-Omethylguanosine
  modified_base 17: mod_base = OTHER; note = 2'-Omethylguanosine
  modified_base 33: mod_base = OTHER; note = 2'-fluorouridine
  modified_base 35: mod_base = OTHER; note = Cytosine phosphorothiorate
  modified_base 37: mod_base = OTHER; note = Adenosine phosphorothiorate
  modified_base 52: mod_base = OTHER; note = 2'-Omethylguanosine
  modified_base 57: mod_base = OTHER; note = 2'-Omethylguanosine
  modified_base 62: mod_base = OTHER; note = 2'-Omethylcytosine
  modified_base 68: mod_base = OTHER; note = 2'-Omethylguanosine
  modified_base 73: mod_base = OTHER; note = 2'-Omethylguanosine
  modified_base 75: mod_base = OTHER; note = 2'-fluorocytosine phosphorothiorate

SEQ ID NO: 8338 - RNA, 75 nt, synthetic construct; identical to SEQ ID NO: 1045
  source 1..75: mol_type = other RNA
  modified_base 4: mod_base = OTHER; note = 2'-fluorouridine phosphorothiorate
  modified_base 12: mod_base = OTHER; note = Guanosine phosphorothiorate
  modified_base 22: mod_base = OTHER; note = 2'-fluoroguanosine
  modified_base 24: mod_base = OTHER; note = 2'-fluoroadenosine phosphorothiorate
  modified_base 25: mod_base = OTHER; note = 2'-fluorocytosine
  modified_base 36: mod_base = OTHER; note = 2'-fluoroadenosine
  modified_base 40: mod_base = OTHER; note = 2'-Omethylcytosine
  modified_base 49: mod_base = OTHER; note = 2'-fluorocytosine phosphorothiorate
  modified_base 53: mod_base = OTHER; note = 2'-fluorouridine phosphorothiorate
  modified_base 63: mod_base = OTHER; note = 2'-fluoroguanosine
  modified_base 64: mod_base = OTHER; note = Guanosine phosphorothiorate
  modified_base 65: mod_base = OTHER; note = 2'-fluorouridine
  modified_base 68: mod_base = OTHER; note = 2'-fluoroadenosine
  modified_base 72: mod_base = OTHER; note = Uridine phosphorothiorate

SEQ ID NO: 8339 - RNA, 75 nt, synthetic construct; identical to SEQ ID NO: 3336
  source 1..75: mol_type = other RNA
  modified_base 1: mod_base = OTHER; note = 2'-fluorocytosine phosphorothiorate
  modified_base 2: mod_base = OTHER; note = 2'-Omethylcytosine phosphorothiorate
  modified_base 10: mod_base = OTHER; note = 2'-fluorocytosine phosphorothiorate
  modified_base 14: mod_base = OTHER; note = Guanosine phosphorothiorate
  modified_base 20: mod_base = OTHER; note = 2'-fluoroadenosine
  modified_base 21: mod_base = OTHER; note = 2'-Omethylguanosine phosphorothiorate
  modified_base 25: mod_base = OTHER; note = 2'-fluoroadenosine
  modified_base 34: mod_base = OTHER; note = 2'-fluorouridine
  modified_base 35: mod_base = OTHER; note = 2'-fluoroadenosine
  modified_base 38: mod_base = OTHER; note = 2'-fluorouridine
  modified_base 40: mod_base = OTHER; note = 2'-fluorouridine
  modified_base 44: mod_base = OTHER; note = Guanosine phosphorothiorate
  modified_base 49: mod_base = OTHER; note = Adenosine phosphorothiorate
  modified_base 56: mod_base = OTHER; note = 2'-fluoroadenosine phosphorothiorate
  modified_base 60: mod_base = OTHER; note = 2'-Omethylcytosine phosphorothiorate
  modified_base 62: mod_base = OTHER; note = 2'-fluorocytosine
  modified_base 69: mod_base = OTHER; note = Guanosine phosphorothiorate
  modified_base 74: mod_base = OTHER; note = Cytosine phosphorothiorate
  modified_base 75: mod_base = OTHER; note = 2'-fluoroadenosine

SEQ ID NO: 8340 - RNA, 85 nt, synthetic construct; identical to SEQ ID NO: 3286
  source 1..85: mol_type = other RNA
  modified_base 1: mod_base = OTHER; note = 2'-Omethylcytosine
  modified_base 29: mod_base = OTHER; note = 2'-fluoroguanosine
  modified_base 33: mod_base = OTHER; note = Uridine phosphorothiorate
  modified_base 34: mod_base = OTHER; note = 2'-fluorouridine
  modified_base 38: mod_base = OTHER; note = 2'-Omethyluridine
  modified_base 46: mod_base = OTHER; note = 2'-Omethyladenosine
  modified_base 54: mod_base = OTHER; note = 2'-fluorocytosine
  modified_base 64: mod_base = OTHER; note = Uridine phosphorothiorate

SEQ ID NO: 8341 - RNA, 85 nt, synthetic construct; identical to SEQ ID NO: 3297
  source 1..85: mol_type = other RNA
  modified_base 1: mod_base = OTHER; note = 2'-Omethylguanosine
  modified_base 13: mod_base = OTHER; note = 2'-Omethylguanosine
  modified_base 17: mod_base = OTHER; note = 2'-Omethylguanosine
  modified_base 18: mod_base = OTHER; note = 2'-Omethylguanosine
  modified_base 25: mod_base = OTHER; note = 2'-Omethylcytosine
  modified_base 33: mod_base = OTHER; note = Uridine phosphorothiorate
  modified_base 34: mod_base = OTHER; note = 2'-Omethyluridine
  modified_base 35: mod_base = OTHER; note = Cytosine phosphorothiorate
  modified_base 37: mod_base = OTHER; note = Adenosine phosphorothiorate
  modified_base 38: mod_base = OTHER; note = Adenosine phosphorothiorate
  modified_base 41: mod_base = OTHER; note = 2'-fluorocytosine
  modified_base 42: mod_base = OTHER; note = 2'-Omethyladenosine
  modified_base 43: mod_base = OTHER; note = 2'-Omethyladenosine
  modified_base 44: mod_base = OTHER; note = 2'-fluorouridine
  modified_base 58: mod_base = OTHER; note = 2'-Omethylguanosine
  modified_base 59: mod_base = OTHER; note = 2'-Omethylcytosine
  modified_base 61: mod_base = OTHER; note = 2'-Omethylguanosine
  modified_base 63: mod_base = OTHER; note = Uridine phosphorothiorate
  modified_base 64: mod_base = OTHER; note = Uridine phosphorothiorate
  modified_base 65: mod_base = OTHER; note = 2'-Omethylcytosine
  modified_base 66: mod_base = OTHER; note = Guanosine phosphorothiorate
  modified_base 67: mod_base = OTHER; note = Adenosine phosphorothiorate
  modified_base 68: mod_base = OTHER; note = 2'-Omethyladenosine
  modified_base 70: mod_base = OTHER; note = 2'-Omethylcytosine
  modified_base 74: mod_base = OTHER; note = 2'-Omethylcytosine
  modified_base 82: mod_base = OTHER; note = 2'-Omethylguanosine

SEQ ID NO: 8342 - DNA, 76 bp, synthetic construct; identical to SEQ ID NO: 1924
  source 1..76: mol_type = other DNA
  modified_base 1: mod_base = OTHER; note = 2'-Omethylguanosine
  modified_base 2: mod_base = OTHER; note = Guanosine phosphorothiorate
  modified_base 5: mod_base = OTHER; note = 2'-Omethylcytosine phosphorothiorate
  modified_base 6: mod_base = OTHER; note = 2'-O-(2-Methoxyethyl) 5-methylcytosine
  modified_base 8: mod_base = OTHER; note = Uridine phosphorothiorate
  modified_base 9: mod_base = OTHER; note = deoxyguanosine phosphorothiorate
  modified_base 10: mod_base = OTHER; note = 2'-Omethylguanosine phosphorothiorate
  modified_base 11: mod_base = OTHER; note = 2'-Omethylcytosine
  modified_base 12: mod_base = OTHER; note = Guanosine phosphorothiorate
  modified_base 13: mod_base = OTHER; note = 2'-fluorocytosine
  modified_base 14: mod_base = OTHER; note = Adenosine phosphorothiorate
  modified_base 15: mod_base = OTHER; note = 2'-Omethyladenosine
  modified_base 17: mod_base = OTHER; note = 2'-fluoroguanosine
  modified_base 19: mod_base = OTHER; note = Adenosine phosphorothiorate
  modified_base 21: mod_base = OTHER; note = 2'-Omethyladenosine
  modified_base 26: mod_base = OTHER; note = 2'-fluoroadenosine
  modified_base 27: mod_base = OTHER; note = Uridine phosphorothiorate
  modified_base 29: mod_base = OTHER; note = Guanosine phosphorothiorate
  modified_base 30: mod_base = OTHER; note = 2'-O-(2-Methoxyethyl) guanosine phosphorothiorate
  modified_base 31: mod_base = OTHER; note = 2'-fluoroadenosine phosphorothiorate
  modified_base 33: mod_base = OTHER; note = Uridine phosphorothiorate
  modified_base 35: mod_base = OTHER; note = Cytosine phosphorothiorate
  modified_base 37: mod_base = OTHER; note = Adenosine phosphorothiorate
  modified_base 38: mod_base = OTHER; note = Adenosine phosphorothiorate
  modified_base 39: mod_base = OTHER; note = 2'-fluorouridine phosphorothiorate
  modified_base 50: mod_base = OTHER; note = Cytosine phosphorothiorate
  modified_base 52: mod_base = OTHER; note = 2'-fluoroguanosine phosphorothiorate
  modified_base 57: mod_base = OTHER; note = 2'-fluoroguanosine
  modified_base 59: mod_base = OTHER; note = 2'-Omethylguanosine
  modified_base 66: mod_base = OTHER; note = Cytosine phosphorothiorate
  modified_base 67: mod_base = OTHER; note = 2'-Omethylguanosine
  modified_base 74: mod_base = OTHER; note = Cytosine phosphorothiorate
  modified_base 75: mod_base = OTHER; note = 2'-O-(2-Methoxyethyl) 5-methylcytosine phosphorothiorate
  modified_base 76: mod_base = OTHER; note = 2'-Omethyladenosine
  misc_feature 1..8: note = RNA
  misc_feature 9: note = DNA
  misc_feature 10..19: note = RNA
  misc_feature 20: note = DNA
  misc_feature 21..27: note = RNA
  misc_feature 28: note = DNA
  misc_feature 29..33: note = RNA
  misc_feature 34: note = DNA
  misc_feature 35: note = RNA
  misc_feature 36: note = DNA
  misc_feature 37..50: note = RNA
  misc_feature 51: note = DNA
  misc_feature 52..59: note = RNA
  misc_feature 60: note = DNA
  misc_feature 61..76: note = RNA

SEQ ID NO: 8343 - RNA, 75 nt, synthetic construct; identical to SEQ ID NO: 1045
  source 1..75: mol_type = other RNA
  modified_base 1: mod_base = OTHER; note = 2'-Omethylguanosine phosphorothiorate
  modified_base 2: mod_base = OTHER; note = 2'-Omethylguanosine phosphorothiorate
  modified_base 51: mod_base = OTHER; note = Adenosine phosphorothiorate
  modified_base 73: mod_base = OTHER; note = Cytosine phosphorothiorate
  modified_base 74: mod_base = OTHER; note = 2'-Omethylcytosine

SEQ ID NO: 8344 - RNA, 76 nt, synthetic construct; identical to SEQ ID NO: 625
  source 1..76: mol_type = other RNA
  modified_base 16: mod_base = OTHER; note = Thymine

SEQ ID NO: 8345 - RNA, 85 nt, synthetic construct; identical to SEQ ID NO: 3297
  source 1..85: mol_type = other RNA
  modified_base 1: mod_base = OTHER; note = 2'-Omethylguanosine phosphorothiorate
  modified_base 7: mod_base = OTHER; note = 2'-fluoroadenosine
  modified_base 14: mod_base = OTHER; note = 2'-Omethyladenosine phosphorothiorate
  modified_base 29: mod_base = OTHER; note = 2'-fluoroguanosine
  modified_base 49: mod_base = OTHER; note = 2'-fluorouridine
  modified_base 58: mod_base = OTHER; note = Guanosine phosphorothiorate

SEQ ID NO: 8346 - RNA, 76 nt, synthetic construct; identical to SEQ ID NO: 625
  source 1..76: mol_type = other RNA
  modified_base 1: mod_base = OTHER; note = 2'-Omethylguanosine
  modified_base 3: mod_base = OTHER; note = Cytosine phosphorothiorate
  modified_base 4: mod_base = OTHER; note = 2'-fluorouridine
  modified_base 6: mod_base = OTHER; note = 2'-fluorocytosine phosphorothiorate
  modified_base 11: mod_base = OTHER; note = Cytosine phosphorothiorate
  modified_base 12: mod_base = OTHER; note = 2'-Omethylguanosine
  modified_base 13: mod_base = OTHER; note = 2'-fluorocytosine
  modified_base 14: mod_base = OTHER; note = 2'-Omethyladenosine
  modified_base 15: mod_base = OTHER; note = 2'-Omethyladenosine phosphorothiorate
  modified_base 16: mod_base = OTHER; note = 2'-fluorouridine
  modified_base 17: mod_base = OTHER; note = Guanosine phosphorothiorate
  modified_base 18: mod_base = OTHER; note = 2'-fluoroguanosine
  modified_base 24: mod_base = OTHER; note = 2'-Omethylguanosine
  modified_base 25: mod_base = OTHER; note = 2'-Omethylcytosine
  modified_base 27: mod_base = OTHER; note = 2'-fluorouridine phosphorothiorate
  modified_base 28: mod_base = OTHER; note = 2'-fluorouridine
  modified_base 30: mod_base = OTHER; note = 2'-Omethylguanosine
  modified_base 33: mod_base = OTHER; note = 2'-fluorouridine
  modified_base 37: mod_base = OTHER; note = Adenosine phosphorothiorate
  modified_base 39: mod_base = OTHER; note = 2'-Omethyluridine
  modified_base 42: mod_base = OTHER; note = 2'-Omethyladenosine
  modified_base 43: mod_base = OTHER; note = 2'-Omethyladenosine
  modified_base 47: mod_base = OTHER; note = Uridine phosphorothiorate
  modified_base 48: mod_base = OTHER; note = 2'-fluorouridine phosphorothiorate
  modified_base 49: mod_base = OTHER; note = 2'-Omethylcytosine
  modified_base 52: mod_base = OTHER; note = Guanosine phosphorothiorate
  modified_base 53: mod_base = OTHER; note = 2'-fluoroguanosine
  modified_base 54: mod_base = OTHER; note = Uridine phosphorothiorate
  modified_base 56: mod_base = OTHER; note = 2'-fluorocytosine
  modified_base 59: mod_base = OTHER; note = 2'-Omethylguanosine
  modified_base 62: mod_base = OTHER; note = 2'-fluorocytosine phosphorothiorate
  modified_base 63: mod_base = OTHER; note = 2'-Omethylcytosine
  modified_base 64: mod_base = OTHER; note = 2'-Omethylguanosine
  modified_base 65: mod_base = OTHER; note = Guanosine phosphorothiorate
  modified_base 66: mod_base = OTHER; note = Cytosine phosphorothiorate
  modified_base 67: mod_base = OTHER; note = 2'-fluoroguanosine
  modified_base 68: mod_base = OTHER; note = Guanosine phosphorothiorate
  modified_base 69: mod_base = OTHER; note = 2'-fluoroadenosine
  modified_base 70: mod_base = OTHER; note = Guanosine phosphorothiorate
  modified_base 71: mod_base = OTHER; note = 2'-fluorouridine
  modified_base 73: mod_base = OTHER; note = 2'-fluoroguanosine

SEQ ID NO: 8347 - RNA, 74 nt, synthetic construct; identical to SEQ ID NO: 3293
  source 1..74: mol_type = other RNA
  modified_base 4: mod_base = OTHER; note = Uridine phosphorothiorate
  modified_base 7: mod_base = OTHER; note = 2'-fluorouridine
  modified_base 12: mod_base = OTHER; note = Cytosine phosphorothiorate
  modified_base 14: mod_base = OTHER; note = 2'-fluoroadenosine phosphorothiorate
  modified_base 26: mod_base = OTHER; note = 2'-Omethylcytosine phosphorothiorate
  modified_base 44: mod_base = OTHER; note = Guanosine phosphorothiorate
  modified_base 47: mod_base = OTHER; note = Guanosine phosphorothiorate
  modified_base 55: mod_base = OTHER; note = 2'-Omethyladenosine
  modified_base 62: mod_base = OTHER; note = 2'-fluoroguanosine
  modified_base 67: mod_base = OTHER; note = Guanosine phosphorothiorate
  modified_base 73: mod_base = OTHER; note = 2'-fluorocytosine

SEQ ID NO: 8348 - RNA, 76 nt, synthetic construct; identical to SEQ ID NO: 625
  source 1..76: mol_type = other RNA
  modified_base 48: mod_base = OTHER; note = 2'-fluorouridine
  modified_base 49: mod_base = OTHER; note = 2'-Omethylcytosine
  modified_base 50: mod_base = OTHER; note = 2'-Omethylcytosine
  modified_base 51: mod_base = OTHER; note = 2'-Omethylguanosine
  modified_base 52: mod_base = OTHER; note = 2'-Omethylguanosine
  modified_base 53: mod_base = OTHER; note = 2'-Omethylguanosine
  modified_base 54: mod_base = OTHER; note = 2'-Omethyluridine

SEQ ID NO: 8349 - RNA, 75 nt, synthetic construct; identical to SEQ ID NO: 3311
  source 1..75: mol_type = other RNA
  modified_base 1: mod_base = OTHER; note = 2'-Omethylguanosine phosphorothiorate
  modified_base 2: mod_base = OTHER; note = 2'-Omethylguanosine
  modified_base 17: mod_base = OTHER; note = 2'-fluoroguanosine phosphorothiorate
  modified_base 18: mod_base = OTHER; note = 2'-Omethylguanosine
  modified_base 19: mod_base = OTHER; note = 2'-fluorouridine
  modified_base 20: mod_base = OTHER; note = Adenosine phosphorothiorate
  modified_base 21: mod_base = OTHER; note = 2'-fluoroadenosine
  modified_base 22: mod_base = OTHER; note = 2'-Omethylguanosine
  modified_base 24: mod_base = OTHER; note = 2'-fluoroadenosine
  modified_base 25: mod_base = OTHER; note = Cytosine phosphorothiorate
  modified_base 39: mod_base = OTHER; note = Uridine phosphorothiorate
  modified_base 40: mod_base = OTHER; note = 2'-fluorocytosine
  modified_base 43: mod_base = OTHER; note = 2'-fluoroguanosine
  modified_base 50: mod_base = OTHER; note = Guanosine phosphorothiorate
  modified_base 51: mod_base = OTHER; note = Adenosine phosphorothiorate
  modified_base 52: mod_base = OTHER; note = 2'-fluoroguanosine
  modified_base 54: mod_base = OTHER; note = Uridine phosphorothiorate
  modified_base 57: mod_base = OTHER; note = 2'-fluoroadenosine
  modified_base 58: mod_base = OTHER; note = 2'-fluoroguanosine phosphorothiorate
  modified_base 59: mod_base = OTHER; note = Uridine phosphorothiorate
  modified_base 62: mod_base = OTHER; note = Cytosine phosphorothiorate
  modified_base 64: mod_base = OTHER; note = Guanosine phosphorothiorate
  modified_base 65: mod_base = OTHER; note = 2'-fluorouridine
  modified_base 67: mod_base = OTHER; note = Guanosine phosphorothiorate
  modified_base 68: mod_base = OTHER; note = 2'-fluoroadenosine
  modified_base 73: mod_base = OTHER; note = Cytosine phosphorothiorate
  modified_base 74: mod_base = OTHER; note = Cytosine phosphorothiorate

SEQ ID NO: 8350 - RNA, 85 nt, synthetic construct; identical to SEQ ID NO: 3297
  source 1..85: mol_type = other RNA
  modified_base 1: mod_base = OTHER; note = 2'-Omethylguanosine
  modified_base 9: mod_base = OTHER; note = 2'-fluoroguanosine
  modified_base 10: mod_base = OTHER; note = 2'-Omethylguanosine
  modified_base 13: mod_base = OTHER; note = 2'-Omethylguanosine
  modified_base 17: mod_base = OTHER; note = Guanosine phosphorothiorate
  modified_base 18: mod_base = OTHER; note = 2'-Omethylguanosine
  modified_base 19: mod_base = OTHER; note = Uridine phosphorothiorate
  modified_base 20: mod_base = OTHER; note = 2'-Omethyluridine
  modified_base 25: mod_base = OTHER; note = 2'-Omethylcytosine
  modified_base 29: mod_base = OTHER; note = 2'-Omethylguanosine
  modified_base 33: mod_base = OTHER; note = 2'-fluorouridine
  modified_base 35: mod_base = OTHER; note = Cytosine phosphorothiorate
  modified_base 37: mod_base = OTHER; note = Adenosine phosphorothiorate
  modified_base 38: mod_base = OTHER; note = Adenosine phosphorothiorate
  modified_base 41: mod_base = OTHER; note = 2'-fluorocytosine
  modified_base 43: mod_base = OTHER; note = 2'-Omethyladenosine
  modified_base 44: mod_base = OTHER; note = 2'-fluorouridine
  modified_base 56: mod_base = OTHER; note = Guanosine phosphorothiorate
  modified_base 59: mod_base = OTHER; note = 2'-Omethylcytosine
  modified_base 61: mod_base = OTHER; note = 2'-Omethylguanosine
  modified_base 63: mod_base = OTHER; note = Uridine phosphorothiorate
  modified_base 64: mod_base = OTHER; note = Uridine phosphorothiorate
  modified_base 65: mod_base = OTHER; note = 2'-Omethylcytosine
  modified_base 66: mod_base = OTHER; note = Guanosine phosphorothiorate
  modified_base 71: mod_base = OTHER; note = 2'-Omethylcytosine
  modified_base 72: mod_base = OTHER; note = 2'-fluorouridine
  modified_base 74: mod_base = OTHER; note = 2'-Omethylcytosine
  modified_base 80: mod_base = OTHER; note = 2'-Omethylguanosine
  modified_base 82: mod_base = OTHER; note = 2'-Omethylguanosine

SEQ ID NO: 8351 - RNA, 72 nt, synthetic construct; identical to SEQ ID NO: 3463
  source 1..72: mol_type = other RNA
  modified_base 54: mod_base = OTHER; note = Uridine phosphorothiorate

SEQ ID NO: 8352 - RNA, 76 nt, synthetic construct; identical to SEQ ID NO: 625
  source 1..76: mol_type = other RNA
  modified_base 1: mod_base = OTHER; note = 2'-Omethylguanosine
  modified_base 10: mod_base = OTHER; note = 2'-Omethylguanosine
  modified_base 13: mod_base = OTHER; note = 2'-Omethylcytosine
  modified_base 17: mod_base = OTHER; note = Guanosine phosphorothiorate
  modified_base 18: mod_base = OTHER; note = 2'-Omethylguanosine
  modified_base 19: mod_base = OTHER; note = Adenosine phosphorothiorate
  modified_base 20: mod_base = OTHER; note = 2'-Omethyluridine
  modified_base 25: mod_base = OTHER; note = 2'-Omethylcytosine
  modified_base 29: mod_base = OTHER; note = 2'-Omethylguanosine
  modified_base 33: mod_base = OTHER; note = 2'-fluorouridine
  modified_base 35: mod_base = OTHER; note = Cytosine phosphorothiorate
  modified_base 37: mod_base = OTHER; note = Adenosine phosphorothiorate
  modified_base 38: mod_base = OTHER; note = Adenosine phosphorothiorate
  modified_base 41: mod_base = OTHER; note = 2'-Omethylcytosine
  modified_base 43: mod_base = OTHER; note = 2'-Omethyladenosine
  modified_base 44: mod_base = OTHER; note = 2'-fluoroadenosine
  modified_base 46: mod_base = OTHER; note = 2'-Omethylguanosine phosphorothiorate
  modified_base 50: mod_base = OTHER; note = 2'-Omethylcytosine
  modified_base 52: mod_base = OTHER; note = 2'-Omethylguanosine
  modified_base 54: mod_base = OTHER; note = Uridine phosphorothiorate
  modified_base 55: mod_base = OTHER; note = Uridine phosphorothiorate
  modified_base 56: mod_base = OTHER; note = 2'-Omethylcytosine
  modified_base 57: mod_base = OTHER; note = Guanosine phosphorothiorate
  modified_base 62: mod_base = OTHER; note = 2'-Omethylcytosine
  modified_base 63: mod_base = OTHER; note = 2'-fluorocytosine
  modified_base 65: mod_base = OTHER; note = 2'-Omethylguanosine
  modified_base 71: mod_base = OTHER; note = 2'-Omethyluridine
  modified_base 73: mod_base = OTHER; note = 2'-Omethylguanosine

SEQ ID NO: 8353 - RNA, 76 nt, synthetic construct; identical to SEQ ID NO: 3490
  source 1..76: mol_type = other RNA
  modified_base 1: mod_base = OTHER; note = 2'-Omethylguanosine
  modified_base 19: mod_base = OTHER; note = 2'-Omethyladenosine
  modified_base 20: mod_base = OTHER; note = 2'-Omethyluridine
  modified_base 21: mod_base = OTHER; note = 2'-fluoroadenosine
  modified_base 22: mod_base = OTHER; note = 2'-Omethylguanosine
  modified_base 40: mod_base = OTHER; note = 2'-fluorouridine
  modified_base 41: mod_base = OTHER; note = 2'-Omethylcytosine
  modified_base 42: mod_base = OTHER; note = 2'-Omethyladenosine
  modified_base 43: mod_base = OTHER; note = 2'-Omethyladenosine
  modified_base 73: mod_base = OTHER; note = 2'-Omethylguanosine

SEQ ID NO: 8354 - RNA, 76 nt, synthetic construct; identical to SEQ ID NO: 3289
  source 1..76: mol_type = other RNA
  modified_base 1: mod_base = OTHER; note = 2'-Omethylguanosine phosphorothiorate
  modified_base 2: mod_base = OTHER; note = 2'-Omethylcytosine phosphorothiorate
  modified_base 74: mod_base = OTHER; note = 2'-Omethylcytosine phosphorothiorate
  modified_base 75: mod_base = OTHER; note = 2'-Omethylcytosine phosphorothiorate
  modified_base 76: mod_base = OTHER; note = 2'-Omethyladenosine

SEQ ID NO: 8355 - RNA, 74 nt, synthetic construct; identical to SEQ ID NO: 3293
  source 1..74: mol_type = other RNA
  modified_base 1: mod_base = OTHER; note = 2'-Omethyladenosine
  modified_base 2: mod_base = OTHER; note = 2'-Omethylcytosine phosphorothiorate
  modified_base 44: mod_base = OTHER; note = Guanosine phosphorothiorate
  modified_base 48: mod_base = OTHER; note = Cytosine phosphorothiorate
  modified_base 73: mod_base = OTHER; note = 2'-Omethylcytosine phosphorothiorate

SEQ ID NO: 8356 - RNA, 75 nt, synthetic construct; identical to SEQ ID NO: 1045
  source 1..75: mol_type = other RNA
  modified_base 1: mod_base = OTHER; note = 2'-Omethylguanosine phosphorothiorate
  modified_base 2: mod_base = OTHER; note = 2'-Omethylguanosine
  modified_base 3: mod_base = OTHER; note = 2'-Omethyluridine
  modified_base 4: mod_base = OTHER; note = 2'-Omethyluridine
  modified_base 5: mod_base = OTHER; note = 2'-Omethylcytosine
  modified_base 6: mod_base = OTHER; note = 2'-Omethylcytosine
  modified_base 27: mod_base = OTHER; note = 2'-Omethylcytosine
  modified_base 28: mod_base = OTHER; note = 2'-Omethyluridine
  modified_base 29: mod_base = OTHER; note = 2'-fluoroguanosine
  modified_base 30: mod_base = OTHER; note = 2'-Omethylguanosine
  modified_base 40: mod_base = OTHER; note = 2'-fluorocytosine
  modified_base 41: mod_base = OTHER; note = 2'-Omethylcytosine
  modified_base 42: mod_base = OTHER; note = 2'-Omethyladenosine
  modified_base 43: mod_base = OTHER; note = 2'-Omethylguanosine
  modified_base 72: mod_base = OTHER; note = 2'-Omethyluridine

SEQ ID NO: 8357 - RNA, 76 nt, synthetic construct; identical to SEQ ID NO: 3490
  source 1..76: mol_type = other RNA
  modified_base 1: mod_base = OTHER; note = 2'-Omethylguanosine
  modified_base 14: mod_base = OTHER; note = 2'-Omethyladenosine
  modified_base 15: mod_base = OTHER; note = 2'-fluoroadenosine
  modified_base 16: mod_base = OTHER; note = 2'-Omethyluridine
  modified_base 17: mod_base = OTHER; note = 2'-Omethylguanosine
  modified_base 18: mod_base = OTHER; note = 2'-Omethylguanosine
  modified_base 19: mod_base = OTHER; note = 2'-fluoroadenosine
  modified_base 20: mod_base = OTHER; note = 2'-Omethyluridine
  modified_base 33: mod_base = OTHER; note = 2'-fluorouridine
  modified_base 35: mod_base = OTHER; note = Cytosine phosphorothiorate
  modified_base 37: mod_base = OTHER; note = Adenosine phosphorothiorate
  modified_base 38: mod_base = OTHER; note = Adenosine phosphorothiorate
  modified_base 41: mod_base = OTHER; note = 2'-Omethylcytosine
  modified_base 42: mod_base = OTHER; note = 2'-Omethyladenosine
  modified_base 43: mod_base = OTHER; note = 2'-Omethyladenosine
  modified_base 44: mod_base = OTHER; note = 2'-Omethyladenosine
  modified_base 50: mod_base = OTHER; note = 2'-Omethylcytosine
  modified_base 52: mod_base = OTHER; note = 2'-Omethylguanosine
  modified_base 73: mod_base = OTHER; note = 2'-Omethylguanosine

SEQ ID NO: 8358 - RNA, 76 nt, synthetic construct; identical to SEQ ID NO: 625
  source 1..76: mol_type = other RNA
  modified_base 1: mod_base = OTHER; note = 2'-Omethylguanosine
  modified_base 2: mod_base = OTHER; note = 2'-Omethylguanosine
  modified_base 3: mod_base = OTHER; note = 2'-Omethylcytosine
  modified_base 4: mod_base = OTHER; note = 2'-Omethyluridine
  modified_base 5: mod_base = OTHER; note = 2'-Omethylcytosine
  modified_base 6: mod_base = OTHER; note = 2'-Omethylcytosine
  modified_base 10: mod_base = OTHER; note = 2'-Omethylguanosine
  modified_base 11: mod_base = OTHER; note = 2'-Omethylcytosine
  modified_base 12: mod_base = OTHER; note = 2'-Omethylguanosine
  modified_base 13: mod_base = OTHER; note = 2'-Omethylcytosine
  modified_base 14: mod_base = OTHER; note = 2'-Omethyladenosine
  modified_base 15: mod_base = OTHER; note = 2'-fluoroadenosine
  modified_base 16: mod_base = OTHER; note = 2'-Omethyluridine
  modified_base 17: mod_base = OTHER; note = 2'-Omethylguanosine
  modified_base 18: mod_base = OTHER; note = 2'-Omethylguanosine
  modified_base 19: mod_base = OTHER; note = 2'-fluoroadenosine
  modified_base 20: mod_base = OTHER; note = 2'-Omethyluridine
  modified_base 22: mod_base = OTHER; note = 2'-Omethylguanosine
  modified_base 23: mod_base = OTHER; note = 2'-Omethylcytosine
  modified_base 24: mod_base = OTHER; note = 2'-Omethylguanosine
  modified_base 25: mod_base = OTHER; note = 2'-Omethylcytosine
  modified_base 38: mod_base = OTHER; note = Adenosine phosphorothiorate
  modified_base 39: mod_base = OTHER; note = Uridine phosphorothiorate
  modified_base 40: mod_base = OTHER; note = 2'-fluorouridine
  modified_base 43: mod_base = OTHER; note = 2'-Omethyladenosine
  modified_base 44: mod_base = OTHER; note = 2'-Omethyladenosine
  modified_base 45: mod_base = OTHER; note = 2'-Omethylguanosine
  modified_base 46: mod_base = OTHER; note = 2'-fluoroguanosine
  modified_base 48: mod_base = OTHER; note = 2'-fluorouridine
  modified_base 49: mod_base = OTHER; note = 2'-Omethylcytosine
  modified_base 50: mod_base = OTHER; note = 2'-Omethylcytosine
  modified_base 54: mod_base = OTHER; note = 2'-Omethyluridine phosphorothiorate
  modified_base 55: mod_base = OTHER; note = Uridine phosphorothiorate
  modified_base 56: mod_base = OTHER; note = 2'-Omethylcytosine
  modified_base 57: mod_base = OTHER; note = 2'-fluoroguanosine
  modified_base 61: mod_base = OTHER; note = 2'-Omethylcytosine
  modified_base 62: mod_base = OTHER; note = 2'-Omethylcytosine
  modified_base 63: mod_base = OTHER; note = 2'-fluorocytosine
  modified_base 64: mod_base = OTHER; note = 2'-Omethylguanosine
  modified_base 65: mod_base = OTHER; note = 2'-Omethylguanosine
  modified_base 66: mod_base = OTHER; note = 2'-Omethylcytosine
  modified_base 67: mod_base = OTHER; note = 2'-Omethylguanosine
  modified_base 68: mod_base = OTHER; note = 2'-Omethylguanosine

SEQ ID NO: 8359 - RNA, 85 nt, synthetic construct; identical to SEQ ID NO: 3297
  source 1..85: mol_type = other RNA
  modified_base 1: mod_base = OTHER; note = 2'-Omethylguanosine phosphorothiorate
  modified_base 14: mod_base = OTHER; note = 2'-Omethyladenosine
  modified_base 28: mod_base = OTHER; note = 2'-fluorouridine phosphorothiorate
  modified_base 45: mod_base = OTHER; note = 2'-Omethylguanosine phosphorothiorate
  modified_base 61: mod_base = OTHER; note = Guanosine phosphorothiorate
  modified_base 80: mod_base = OTHER; note = 2'-fluoroguanosine phosphorothiorate

SEQ ID NO: 8360 - RNA, 76 nt, synthetic construct; identical to SEQ ID NO: 625
  source 1..76: mol_type = other RNA
  modified_base 1: mod_base = OTHER; note = 2'-Omethylguanosine
  modified_base 4: mod_base = OTHER; note = Uridine phosphorothiorate
  modified_base 6: mod_base = OTHER; note = Cytosine phosphorothiorate
  modified_base 11: mod_base = OTHER; note = 2'-fluorocytosine
  modified_base 12: mod_base = OTHER; note = 2'-Omethylguanosine
  modified_base 13: mod_base = OTHER; note = 2'-fluorocytosine
  modified_base 15: mod_base = OTHER; note = 2'-Omethyladenosine
  modified_base 17: mod_base = OTHER; note = 2'-Omethylguanosine
  modified_base 19: mod_base = OTHER; note = Adenosine phosphorothiorate
  modified_base 20: mod_base = OTHER; note = 2'-fluorouridine
  modified_base 30: mod_base = OTHER; note = 2'-Omethylguanosine
  modified_base 31: mod_base = OTHER; note = 2'-fluoroadenosine
  modified_base 37: mod_base = OTHER; note = Adenosine phosphorothiorate
  modified_base 41: mod_base = OTHER; note = 2'-Omethylcytosine phosphorothiorate
  modified_base 42: mod_base = OTHER; note = 2'-Omethyladenosine
  modified_base 43: mod_base = OTHER; note = 2'-Omethyladenosine
  modified_base 46: mod_base = OTHER; note = 2'-fluoroguanosine
  modified_base 47: mod_base = OTHER; note = 2'-Omethyluridine
  modified_base 49: mod_base = OTHER; note = 2'-fluorocytosine
  modified_base 50: mod_base = OTHER; note = 2'-Omethylcytosine
  modified_base 51: mod_base = OTHER; note = 2'-Omethylguanosine
  modified_base 52: mod_base = OTHER; note = 2'-Omethylguanosine
  modified_base 53: mod_base = OTHER; note = Guanosine phosphorothiorate
  modified_base 57: mod_base = OTHER; note = 2'-Omethylguanosine
  modified_base 61: mod_base = OTHER; note = 2'-Omethylcytosine
  modified_base 62: mod_base = OTHER; note = 2'-Omethylcytosine
  modified_base 63: mod_base = OTHER; note = 2'-fluorocytosine
  modified_base 64: mod_base = OTHER; note = 2'-Omethylguanosine
  modified_base 65: mod_base = OTHER; note = 2'-Omethylguanosine
  modified_base 68: mod_base = OTHER; note = 2'-fluoroguanosine
  modified_base 70: mod_base = OTHER; note = 2'-Omethylguanosine
  modified_base 72: mod_base = OTHER; note = Cytosine phosphorothiorate
  modified_base 73: mod_base = OTHER; note = 2'-Omethylguanosine
  modified_base 74: mod_base = OTHER; note = Cytosine phosphorothiorate

SEQ ID NO: 8361 - RNA, 75 nt, synthetic construct; identical to SEQ ID NO: 1045
  source 1..75: mol_type = other RNA
  modified_base 1: mod_base = OTHER; note = 2'-Omethylguanosine phosphorothiorate
  modified_base 2: mod_base = OTHER; note = 2'-Omethylguanosine phosphorothiorate
  modified_base 3: mod_base = OTHER; note = 2'-Omethyluridine
  modified_base 4: mod_base = OTHER; note = 2'-Omethyluridine
  modified_base 5: mod_base = OTHER; note = 2'-Omethylcytosine
  modified_base 6: mod_base = OTHER; note = 2'-Omethylcytosine
  modified_base 10: mod_base = OTHER; note = 2'-Omethylguanosine
  modified_base 11: mod_base = OTHER; note = 2'-Omethyluridine
  modified_base 12: mod_base = OTHER; note = 2'-Omethylguanosine
  modified_base 13: mod_base = OTHER; note = 2'-Omethyluridine
  modified_base 14: mod_base = OTHER; note = 2'-Omethyladenosine
  modified_base 15: mod_base = OTHER; note = 2'-fluoroadenosine
  modified_base 16: mod_base = OTHER; note = 2'-Omethyluridine
  modified_base 17: mod_base = OTHER; note = 2'-Omethylguanosine
  modified_base 18: mod_base = OTHER; note = 2'-Omethylguanosine
  modified_base 19: mod_base = OTHER; note = 2'-fluorouridine
  modified_base 20: mod_base = OTHER; note = 2'-Omethyladenosine
  modified_base 22: mod_base = OTHER; note = 2'-Omethylguanosine
  modified_base 23: mod_base = OTHER; note = 2'-Omethylcytosine
  modified_base 24: mod_base = OTHER; note = 2'-Omethyladenosine
  modified_base 25: mod_base = OTHER; note = 2'-Omethylcytosine
  modified_base 33: mod_base = OTHER; note = 2'-fluorouridine
  modified_base 35: mod_base = OTHER; note = Uridine phosphorothiorate
  modified_base 37: mod_base = OTHER; note = Adenosine phosphorothiorate
  modified_base 38: mod_base = OTHER; note = Adenosine phosphorothiorate
  modified_base 44: mod_base = OTHER; note = 2'-Omethylcytosine
  modified_base 45: mod_base = OTHER; note = 2'-Omethylguanosine
  modified_base 46: mod_base = OTHER; note = 2'-fluoroadenosine
  modified_base 47: mod_base = OTHER; note = 2'-fluorouridine
  modified_base 55: mod_base = OTHER; note = 2'-Omethylcytosine
  modified_base 58: mod_base = OTHER; note = 2'-Omethylguanosine
  modified_base 60: mod_base = OTHER; note = 2'-Omethylcytosine
  modified_base 61: mod_base = OTHER; note = 2'-Omethyluridine
  modified_base 62: mod_base = OTHER; note = 2'-fluorocytosine
  modified_base 63: mod_base = OTHER; note = 2'-Omethylguanosine
  modified_base 64: mod_base = OTHER; note = 2'-Omethylguanosine
  modified_base 65: mod_base = OTHER; note = 2'-Omethyluridine
  modified_base 66: mod_base = OTHER; note = 2'-Omethylguanosine
  modified_base 67: mod_base = OTHER; note = 2'-Omethylguanosine
  modified_base 72: mod_base = OTHER; note = 2'-Omethyluridine

SEQ ID NO: 8362 - RNA, 86 nt, synthetic construct; identical to SEQ ID NO: 3290
  source 1..86: mol_type = other RNA
  modified_base 1: mod_base = OTHER; note = 2'-Omethyladenosine phosphorothiorate
  modified_base 2: mod_base = OTHER; note = 2'-Omethylcytosine
  modified_base 84: mod_base = OTHER; note = Cytosine phosphorothiorate
  modified_base 85: mod_base = OTHER; note = 2'-Omethylcytosine

SEQ ID NO: 8363 - RNA, 76 nt, synthetic construct
  source 1..76: mol_type = other RNA
ggcggattggcgcaatggatagcgcattggacttcaaattcaaaggttacgggttcgagtcccgtatccgtcgcca

SEQ ID NO: 8364 - RNA, 76 nt, synthetic construct; identical to SEQ ID NO: 3295
  source 1..76: mol_type = other RNA
  modified_base 1: mod_base = OTHER; note = 2'-Omethylcytosine
  modified_base 2: mod_base = OTHER; note = 2'-fluorocytosine phosphorothiorate
  modified_base 3: mod_base = OTHER; note = 2'-fluorouridine
  modified_base 5: mod_base = OTHER; note = 2'-Omethylcytosine phosphorothiorate
  modified_base 7: mod_base = OTHER; note = 2'-Omethyladenosine phosphorothiorate
  modified_base 8: mod_base = OTHER; note = 2'-fluorouridine phosphorothiorate
  modified_base 10: mod_base = OTHER; note = 2'-fluoroguanosine
  modified_base 11: mod_base = OTHER; note = 2'-fluorocytosine
  modified_base 17: mod_base = OTHER; note = 2'-Omethyluridine
  modified_base 21: mod_base = OTHER; note = 2'-Omethyladenosine
  modified_base 25: mod_base = OTHER; note = 2'-Omethylcytosine phosphorothiorate
  modified_base 38: mod_base = OTHER; note = 2'-Omethyladenosine phosphorothiorate
  modified_base 41: mod_base = OTHER; note = 2'-Omethylcytosine phosphorothiorate
  modified_base 49: mod_base = OTHER; note = 2'-Omethylguanosine
  modified_base 53: mod_base = OTHER; note = 2'-Omethylguanosine
  modified_base 57: mod_base = OTHER; note = Guanosine phosphorothiorate
  modified_base 67: mod_base = OTHER; note = 2'-fluorocytosine
  modified_base 74: mod_base = OTHER; note = 2'-Omethylcytosine phosphorothiorate
  modified_base 75: mod_base = OTHER; note = 2'-fluorocytosine

SEQ ID NO: 8365 - RNA, 85 nt, synthetic construct; identical to SEQ ID NO: 3286
  source 1..85: mol_type = other RNA
  modified_base 1: mod_base = OTHER; note = 2'-Omethylcytosine phosphorothiorate
  modified_base 3: mod_base = OTHER; note = 2'-Omethyladenosine
  modified_base 17: mod_base = OTHER; note = Guanosine phosphorothiorate
  modified_base 35: mod_base = OTHER; note = Adenosine phosphorothiorate
  modified_base 43: mod_base = OTHER; note = 2'-Omethyluridine
  modified_base 46: mod_base = OTHER; note = 2'-Omethyladenosine
  modified_base 59: mod_base = OTHER; note = 2'-Omethyluridine
  modified_base 84: mod_base = OTHER; note = Cytosine phosphorothiorate

SEQ ID NO: 8366 - RNA, 76 nt, synthetic construct; identical to SEQ ID NO: 625
  source 1..76: mol_type = other RNA
  modified_base 3: mod_base = OTHER; note = Cytosine phosphorothiorate
  modified_base 5: mod_base = OTHER; note = 2'-Omethylcytosine
  modified_base 6: mod_base = OTHER; note = 2'-fluorocytosine
  modified_base 10: mod_base = OTHER; note = 2'-Omethylguanosine phosphorothiorate
  modified_base 11: mod_base = OTHER; note = 2'-fluorocytosine
  modified_base 14: mod_base = OTHER; note = Adenosine phosphorothiorate
  modified_base 15: mod_base = OTHER; note = 2'-Omethyladenosine
  modified_base 19: mod_base = OTHER; note = Adenosine phosphorothiorate
  modified_base 20: mod_base = OTHER; note = 2'-fluorouridine
  modified_base 22: mod_base = OTHER; note = Guanosine phosphorothiorate
  modified_base 24: mod_base = OTHER; note = Guanosine phosphorothiorate
  modified_base 25: mod_base = OTHER; note = 2'-fluorocytosine phosphorothiorate
  modified_base 27: mod_base = OTHER; note = 2'-Omethyluridine
  modified_base 28: mod_base = OTHER; note = 2'-fluorouridine
  modified_base 32: mod_base = OTHER; note = 2'-fluorocytosine
  modified_base 36: mod_base = OTHER; note = Adenosine phosphorothiorate
  modified_base 38: mod_base = OTHER; note = 2'-fluoroadenosine
  modified_base 39: mod_base = OTHER; note = Uridine phosphorothiorate
  modified_base 40: mod_base = OTHER; note = Uridine phosphorothiorate
  modified_base 42: mod_base = OTHER; note = Adenosine phosphorothiorate
  modified_base 46: mod_base = OTHER; note = Guanosine phosphorothiorate
  modified_base 47: mod_base = OTHER; note = 2'-fluorouridine
  modified_base 50: mod_base = OTHER; note = Cytosine phosphorothiorate
  modified_base 51: mod_base = OTHER; note = 2'-Omethylguanosine
  modified_base 56: mod_base = OTHER; note = 2'-Omethylcytosine
  modified_base 59: mod_base = OTHER; note = Guanosine phosphorothiorate
  modified_base 64: mod_base = OTHER; note = 2'-fluoroguanosine
  modified_base 65: mod_base = OTHER; note = 2'-fluoroguanosine phosphorothiorate
  modified_base 66: mod_base = OTHER; note = 2'-fluorocytosine
  modified_base 67: mod_base = OTHER; note = 2'-fluoroguanosine phosphorothiorate
  modified_base 68: mod_base = OTHER; note = Guanosine phosphorothiorate
  modified_base 69: mod_base = OTHER; note = 2'-Omethyladenosine phosphorothiorate
  modified_base 70: mod_base = OTHER; note = 2'-Omethylguanosine
  modified_base 71: mod_base = OTHER; note = 2'-fluorouridine

SEQ ID NO: 8367 - RNA, 76 nt, synthetic construct; identical to SEQ ID NO: 3289
  source 1..76: mol_type = other RNA
  modified_base 1: mod_base = OTHER; note = 2'-Omethylguanosine
  modified_base 2: mod_base = OTHER; note = 2'-Omethylcytosine
  modified_base 3: mod_base = OTHER; note = 2'-Omethylcytosine
  modified_base 4: mod_base = OTHER; note = 2'-Omethyluridine
  modified_base 5: mod_base = OTHER; note = 2'-Omethylguanosine
  modified_base 6: mod_base = OTHER; note = 2'-Omethylguanosine
  modified_base 14: mod_base = OTHER; note = 2'-Omethyladenosine
  modified_base 15: mod_base = OTHER; note = 2'-Omethylguanosine
  modified_base 16: mod_base = OTHER; note = 2'-Omethyluridine
  modified_base 18: mod_base = OTHER; note = 2'-Omethylguanosine
  modified_base 19: mod_base = OTHER; note = 2'-Omethylguanosine
  modified_base 22: mod_base = OTHER; note = 2'-Omethylguanosine
  modified_base 23: mod_base = OTHER; note = 2'-Omethyladenosine
  modified_base 24: mod_base = OTHER; note = 2'-Omethylguanosine
  modified_base 25: mod_base = OTHER; note = 2'-Omethylcytosine
  modified_base 41: mod_base = OTHER; note = 2'-fluorouridine
  modified_base 42: mod_base = OTHER; note = 2'-Omethylguanosine
  modified_base 43: mod_base = OTHER; note = 2'-Omethyladenosine
  modified_base 44: mod_base = OTHER; note = 2'-fluoroguanosine
  modified_base 49: mod_base = OTHER; note = 2'-Omethylcytosine
  modified_base 50: mod_base = OTHER; note = 2'-Omethyladenosine
  modified_base 52: mod_base = OTHER; note = 2'-Omethylguanosine
  modified_base 54: mod_base = OTHER; note = 2'-Omethyluridine
  modified_base 55: mod_base = OTHER; note = Uridine phosphorothiorate
  modified_base 56: mod_base = OTHER; note = 2'-Omethylcytosine
  modified_base 57: mod_base = OTHER; note = 2'-fluoroadenosine
  modified_base 59: mod_base = OTHER; note = 2'-Omethylguanosine
  modified_base 61: mod_base = OTHER; note = 2'-Omethylcytosine
  modified_base 65: mod_base = OTHER; note = 2'-Omethylguanosine
  modified_base 73: mod_base = OTHER; note = 2'-Omethylguanosine

SEQ ID NO: 8368 - RNA, 76 nt, synthetic construct; identical to SEQ ID NO: 625
  source 1..76: mol_type = other RNA
  modified_base 1: mod_base = OTHER; note = 2'-fluoroguanosine
  modified_base 11: mod_base = OTHER; note = 2'-fluorocytosine phosphorothiorate
  modified_base 13: mod_base = OTHER; note = 2'-Omethylcytosine phosphorothiorate
  modified_base 18: mod_base = OTHER; note = 2'-Omethylguanosine
  modified_base 23: mod_base = OTHER; note = 2'-Omethylcytosine phosphorothiorate
  modified_base 27: mod_base = OTHER; note = 2'-Omethyluridine phosphorothiorate
  modified_base 29: mod_base = OTHER; note = Guanosine phosphorothiorate
  modified_base 30: mod_base = OTHER; note = 2'-Omethylguanosine
  modified_base 39: mod_base = OTHER; note = Uridine phosphorothiorate
  modified_base 40: mod_base = OTHER; note = 2'-fluorouridine
  modified_base 42: mod_base = OTHER; note = Adenosine phosphorothiorate
  modified_base 43: mod_base = OTHER; note = 2'-fluoroadenosine
  modified_base 45: mod_base = OTHER; note = 2'-fluoroguanosine phosphorothiorate
  modified_base 46: mod_base = OTHER; note = 2'-fluoroguanosine
  modified_base 47: mod_base = OTHER; note = Uridine phosphorothiorate
  modified_base 50: mod_base = OTHER; note = 2'-fluorocytosine
  modified_base 51: mod_base = OTHER; note = Guanosine phosphorothiorate
  modified_base 56: mod_base = OTHER; note = 2'-Omethylcytosine phosphorothiorate
  modified_base 57: mod_base = OTHER; note = 2'-fluoroguanosine
  modified_base 58: mod_base = OTHER; note = Adenosine phosphorothiorate
  modified_base 59: mod_base = OTHER; note = 2'-fluoroguanosine
  modified_base 60: mod_base = OTHER; note = 2'-Omethyluridine
  modified_base 64: mod_base = OTHER; note = Guanosine phosphorothiorate
  modified_base 65: mod_base = OTHER; note = 2'-Omethylguanosine phosphorothiorate
  modified_base 66: mod_base = OTHER; note = 2'-fluorocytosine
  modified_base 68: mod_base = OTHER; note = 2'-Omethylguanosine phosphorothiorate
  modified_base 70: mod_base = OTHER; note = 2'-fluoroguanosine
  modified_base 71: mod_base = OTHER; note = 2'-Omethyluridine
  modified_base 72: mod_base = OTHER; note = Cytosine phosphorothiorate
  modified_base 74: mod_base = OTHER; note = Cytosine phosphorothiorate
  modified_base 75: mod_base = OTHER; note = 2'-Omethylcytosine

SEQ ID NO: 8369 - RNA, 86 nt, synthetic construct; identical to SEQ ID NO: 3290
  source 1..86: mol_type = other RNA
  modified_base 53: mod_base = OTHER; note = Guanosine phosphorothiorate

SEQ ID NO: 8370 - RNA, 74 nt, synthetic construct; identical to SEQ ID NO: 766
  source 1..74: mol_type = other RNA
  modified_base 1: mod_base = OTHER; note = 2'-Omethylguanosine phosphorothiorate
  modified_base 2: mod_base = OTHER; note = 2'-Omethylguanosine
  modified_base 64: mod_base = OTHER; note = Guanosine phosphorothiorate
  modified_base 65: mod_base = OTHER; note = 2'-fluoroguanosine
  modified_base 73: mod_base = OTHER; note = 2'-Omethylguanosine phosphorothiorate

SEQ ID NO: 8371 - RNA, 76 nt, synthetic construct; identical to SEQ ID NO: 625
  source 1..76: mol_type = other RNA
  modified_base 1: mod_base = OTHER; note = 2'-Omethylguanosine
  modified_base 10: mod_base = OTHER; note = 2'-Omethylguanosine
  modified_base 13: mod_base = OTHER; note = 2'-Omethylcytosine
  modified_base 17: mod_base = OTHER; note = Guanosine phosphorothiorate
  modified_base 18: mod_base = OTHER; note = 2'-Omethylguanosine
  modified_base 19: mod_base = OTHER; note = Adenosine phosphorothiorate
  modified_base 20: mod_base = OTHER; note = 2'-Omethyluridine
  modified_base 25: mod_base = OTHER; note = 2'-Omethylcytosine
  modified_base 29: mod_base = OTHER; note = 2'-Omethylguanosine
  modified_base 33: mod_base = OTHER; note = 2'-fluorouridine
  modified_base 35: mod_base = OTHER; note = Cytosine phosphorothiorate
  modified_base 37: mod_base = OTHER; note = Adenosine phosphorothiorate
  modified_base 38: mod_base = OTHER; note = Adenosine phosphorothiorate
  modified_base 43: mod_base = OTHER; note = 2'-Omethyladenosine
  modified_base 44: mod_base = OTHER; note = 2'-fluoroadenosine
  modified_base 46: mod_base = OTHER; note = Guanosine phosphorothiorate
  modified_base 50: mod_base = OTHER; note = 2'-Omethylcytosine
  modified_base 52: mod_base = OTHER; note = 2'-Omethylguanosine
  modified_base 54: mod_base = OTHER; note = Uridine phosphorothiorate
  modified_base 55: mod_base = OTHER; note = Uridine phosphorothiorate
  modified_base 56: mod_base = OTHER; note = 2'-Omethylcytosine
  modified_base 57: mod_base = OTHER; note = Guanosine phosphorothiorate
  modified_base 62: mod_base = OTHER; note = 2'-Omethylcytosine
  modified_base 63: mod_base = OTHER; note = 2'-fluorocytosine
  modified_base 65: mod_base = OTHER; note = 2'-Omethylguanosine
  modified_base 71: mod_base = OTHER; note = 2'-fluorouridine phosphorothiorate
  modified_base 73: mod_base = OTHER; note = 2'-Omethylguanosine

SEQ ID NO: 8372 - RNA, 85 nt, synthetic construct; identical to SEQ ID NO: 3286
  source 1..85: mol_type = other RNA
  modified_base 1: mod_base = OTHER; note = 2'-Omethylcytosine phosphorothiorate
  modified_base 4: mod_base = OTHER; note = 2'-fluoroguanosine
  modified_base 12: mod_base = OTHER; note = Guanosine phosphorothiorate
  modified_base 24: mod_base = OTHER; note = 2'-fluorocytosine phosphorothiorate
  modified_base 28: mod_base = OTHER; note = 2'-fluoroguanosine
  modified_base 30: mod_base = OTHER; note = 2'-fluoroadenosine
  modified_base 32: mod_base = OTHER; note = 2'-fluorouridine
  modified_base 43: mod_base = OTHER; note = 2'-Omethyluridine
  modified_base 46: mod_base = OTHER; note = Adenosine phosphorothiorate
  modified_base 53: mod_base = OTHER; note = 2'-Omethyluridine
  modified_base 55: mod_base = OTHER; note = 2'-Omethylcytosine
  modified_base 57: mod_base = OTHER; note = 2'-fluorocytosine
  modified_base 64: mod_base = OTHER; note = Uridine phosphorothiorate
  modified_base 75: mod_base = OTHER; note = 2'-Omethyluridine
  modified_base 77: mod_base = OTHER; note = Cytosine phosphorothiorate
  modified_base 80: mod_base = OTHER; note = 2'-fluoroguanosine

SEQ ID NO: 8373 - RNA, 76 nt, synthetic construct; identical to SEQ ID NO: 625
  source 1..76: mol_type = other RNA
  modified_base 2: mod_base = OTHER; note = 2'-Omethylguanosine phosphorothiorate
  modified_base 5: mod_base = OTHER; note = 2'-Omethylcytosine
  modified_base 6: mod_base = OTHER; note = 2'-fluorocytosine
  modified_base 13: mod_base = OTHER; note = 2'-fluorocytosine
  modified_base 16: mod_base = OTHER; note = 2'-Omethyluridine
  modified_base 17: mod_base = OTHER; note = Guanosine phosphorothiorate
  modified_base 18: mod_base = OTHER; note = 2'-fluoroguanosine
  modified_base 20: mod_base = OTHER; note = 2'-Omethyluridine
  modified_base 27: mod_base = OTHER; note = Uridine phosphorothiorate
  modified_base 28: mod_base = OTHER; note = 2'-fluorouridine
  modified_base 30: mod_base = OTHER; note = 2'-fluoroguanosine
  modified_base 32: mod_base = OTHER; note = 2'-fluorocytosine
  modified_base 34: mod_base = OTHER; note = 2'-Omethyluridine
  modified_base 37: mod_base = OTHER; note = Adenosine phosphorothiorate
  modified_base 38: mod_base = OTHER; note = 2'-Omethyladenosine phosphorothiorate
  modified_base 39: mod_base = OTHER; note = 2'-fluorouridine
  modified_base 42: mod_base = OTHER; note = Adenosine phosphorothiorate
  modified_base 43: mod_base = OTHER; note = 2'-fluoroadenosine
  modified_base 45: mod_base = OTHER; note = 2'-Omethylguanosine
  modified_base 46: mod_base = OTHER; note = 2'-fluoroguanosine
  modified_base 47: mod_base = OTHER; note = Uridine phosphorothiorate
  modified_base 48: mod_base = OTHER; note = 2'-Omethyluridine
  modified_base 52: mod_base = OTHER; note = 2'-Omethylguanosine phosphorothiorate
  modified_base 56: mod_base = OTHER; note = 2'-fluorocytosine
  modified_base 57: mod_base = OTHER; note = 2'-Omethylguanosine
  modified_base 59: mod_base = OTHER; note = 2'-fluoroguanosine
  modified_base 64: mod_base = OTHER; note = 2'-fluoroguanosine
  modified_base 65: mod_base = OTHER; note = 2'-Omethylguanosine
  modified_base 67: mod_base = OTHER; note = Guanosine phosphorothiorate
  modified_base 68: mod_base = OTHER; note = 2'-Omethylguanosine
  modified_base 70: mod_base = OTHER; note = Guanosine phosphorothiorate
  modified_base 71: mod_base = OTHER; note = 2'-fluorouridine
  modified_base 72: mod_base = OTHER; note = 2'-fluorocytosine
  modified_base 73: mod_base = OTHER; note = Guanosine phosphorothiorate
  modified_base 76: mod_base = OTHER; note = 2'-Omethyladenosine

SEQ ID NO: 8374 - RNA, 75 nt, synthetic construct; identical to SEQ ID NO: 1045
  source 1..75: mol_type = other RNA
  modified_base 1: mod_base = OTHER; note = 2'-Omethylguanosine phosphorothiorate
  modified_base 2: mod_base = OTHER; note = Guanosine phosphorothiorate
  modified_base 5: mod_base = OTHER; note = 2'-Omethylcytosine phosphorothiorate
  modified_base 10: mod_base = OTHER; note = Guanosine phosphorothiorate
  modified_base 18: mod_base = OTHER; note = Guanosine phosphorothiorate
  modified_base 22: mod_base = OTHER; note = 2'-fluoroguanosine
  modified_base 25: mod_base = OTHER; note = 2'-fluorocytosine
  modified_base 38: mod_base = OTHER; note = 2'-fluoroadenosine phosphorothiorate
  modified_base 57: mod_base = OTHER; note = Adenosine phosphorothiorate
  modified_base 58: mod_base = OTHER; note = 2'-fluoroguanosine
  modified_base 61: mod_base = OTHER; note = Uridine phosphorothiorate
  modified_base 64: mod_base = OTHER; note = 2'-fluoroguanosine
  modified_base 67: mod_base = OTHER; note = Guanosine phosphorothiorate
  modified_base 68: mod_base = OTHER; note = 2'-fluoroadenosine
  modified_base 74: mod_base = OTHER; note = 2'-fluorocytosine phosphorothiorate

SEQ ID NO: 8375 - RNA, 76 nt, synthetic construct; identical to SEQ ID NO: 625
  source 1..76: mol_type = other RNA
  modified_base 1: mod_base = OTHER; note = 2'-Omethylguanosine
  modified_base 10: mod_base = OTHER; note = 2'-Omethylguanosine
  modified_base 13: mod_base = OTHER; note = 2'-Omethylcytosine
  modified_base 17: mod_base = OTHER; note = Guanosine phosphorothiorate
  modified_base 18: mod_base = OTHER; note = 2'-Omethylguanosine
  modified_base 19: mod_base = OTHER; note = Adenosine phosphorothiorate
  modified_base 20: mod_base = OTHER; note = 2'-Omethyluridine
  modified_base 25: mod_base = OTHER; note = 2'-Omethylcytosine
  modified_base 29: mod_base = OTHER; note = 2'-Omethylguanosine
  modified_base 33: mod_base = OTHER; note = 2'-fluorouridine
  modified_base 35: mod_base = OTHER; note = Cytosine phosphorothiorate
  modified_base 37: mod_base = OTHER; note = Adenosine phosphorothiorate
  modified_base 38: mod_base = OTHER; note = Adenosine phosphorothiorate
  modified_base 41: mod_base = OTHER; note = 2'-fluorocytosine phosphorothiorate
  modified_base 43: mod_base = OTHER; note = 2'-Omethyladenosine
  modified_base 44: mod_base = OTHER; note = 2'-fluoroadenosine
  modified_base 50: mod_base = OTHER; note = 2'-Omethylcytosine
  modified_base 52: mod_base = OTHER; note = 2'-Omethylguanosine
  modified_base 54: mod_base = OTHER; note = Uridine phosphorothiorate
  modified_base 55: mod_base = OTHER; note = Uridine phosphorothiorate
  modified_base 56: mod_base = OTHER; note = 2'-Omethylcytosine
  modified_base 57: mod_base = OTHER; note = Guanosine phosphorothiorate
  modified_base 62: mod_base = OTHER; note = 2'-Omethylcytosine
  modified_base 63: mod_base = OTHER; note = 2'-fluorocytosine
  modified_base 65: mod_base = OTHER; note = 2'-Omethylguanosine
  modified_base 71: mod_base = OTHER; note = 2'-Omethyluridine phosphorothiorate
  modified_base 73: mod_base = OTHER; note = 2'-Omethylguanosine

SEQ ID NO: 8376 - RNA, 75 nt, synthetic construct; identical to SEQ ID NO: 3311
  source 1..75: mol_type = other RNA
  modified_base 1: mod_base = OTHER; note = 2'-Omethylguanosine phosphorothiorate
  modified_base 2: mod_base = OTHER; note = 2'-Omethylguanosine phosphorothiorate
  modified_base 18: mod_base = OTHER; note = 2'-fluoroguanosine
  modified_base 19: mod_base = OTHER; note = 2'-Omethyluridine
  modified_base 21: mod_base = OTHER; note = 2'-fluoroadenosine
  modified_base 22: mod_base = OTHER; note = 2'-fluoroguanosine
  modified_base 24: mod_base = OTHER; note = 2'-fluoroadenosine
  modified_base 25: mod_base = OTHER; note = 2'-fluorocytosine
  modified_base 28: mod_base = OTHER; note = 2'-Omethyluridine
  modified_base 32: mod_base = OTHER; note = 2'-fluorocytosine
  modified_base 33: mod_base = OTHER; note = 2'-fluorouridine
  modified_base 34: mod_base = OTHER; note = 2'-fluorocytosine phosphorothiorate
  modified_base 44: mod_base = OTHER; note = 2'-fluorocytosine
  modified_base 45: mod_base = OTHER; note = 2'-fluoroguanosine
  modified_base 52: mod_base = OTHER; note = 2'-fluoroguanosine phosphorothiorate
  modified_base 58: mod_base = OTHER; note = 2'-fluoroguanosine
  modified_base 64: mod_base = OTHER; note = Guanosine phosphorothiorate
  modified_base 67: mod_base = OTHER; note = Guanosine phosphorothiorate
  modified_base 68: mod_base = OTHER; note = 2'-fluoroadenosine
  modified_base 74: mod_base = OTHER; note = Cytosine phosphorothiorate
  modified_base 75: mod_base = OTHER; note = 2'-Omethyladenosine

SEQ ID NO: 8377 - RNA, 76 nt, synthetic construct; identical to SEQ ID NO: 625
  source 1..76: mol_type = other RNA
  modified_base 1: mod_base = OTHER; note = 2'-Omethylguanosine
  modified_base 3: mod_base = OTHER; note = Cytosine phosphorothiorate
  modified_base 8: mod_base = OTHER; note = Uridine phosphorothiorate
  modified_base 10: mod_base = OTHER; note = 2'-Omethylguanosine
  modified_base 13: mod_base = OTHER; note = 2'-fluorocytosine
  modified_base 14: mod_base = OTHER; note = 2'-fluoroadenosine
  modified_base 15: mod_base = OTHER; note = 2'-fluoroadenosine
  modified_base 16: mod_base = OTHER; note = 2'-Omethyluridine
  modified_base 17: mod_base = OTHER; note = 2'-Omethylguanosine
  modified_base 25: mod_base = OTHER; note = 2'-Omethylcytosine
  modified_base 28: mod_base = OTHER; note = 2'-Omethyluridine
  modified_base 29: mod_base = OTHER; note = 2'-Omethylguanosine
  modified_base 30: mod_base = OTHER; note = Guanosine phosphorothiorate
  modified_base 31: mod_base = OTHER; note = 2'-Omethyladenosine
  modified_base 33: mod_base = OTHER; note = Uridine phosphorothiorate
  modified_base 34: mod_base = OTHER; note = 2'-fluorouridine phosphorothiorate
  modified_base 36: mod_base = OTHER; note = Adenosine phosphorothiorate
  modified_base 40: mod_base = OTHER; note = 2'-Omethyluridine
  modified_base 42: mod_base = OTHER; note = 2'-Omethyladenosine
  modified_base 43: mod_base = OTHER; note = 2'-Omethyladenosine
  modified_base 44: mod_base = OTHER; note = 2'-fluoroadenosine phosphorothiorate
  modified_base 46: mod_base = OTHER; note = 2'-Omethylguanosine
  modified_base 47: mod_base = OTHER; note = 2'-Omethyluridine
  modified_base 49: mod_base = OTHER; note = 2'-fluorocytosine
  modified_base 50: mod_base = OTHER; note = 2'-Omethylcytosine phosphorothiorate
  modified_base 51: mod_base = OTHER; note = 2'-Omethylguanosine phosphorothiorate
  modified_base 52: mod_base = OTHER; note = 2'-Omethylguanosine
  modified_base 54: mod_base = OTHER; note = 2'-Omethyluridine
  modified_base 59: mod_base = OTHER; note = 2'-fluoroguanosine
  modified_base 62: mod_base = OTHER; note = Cytosine phosphorothiorate
  modified_base 66: mod_base = OTHER; note = 2'-fluorocytosine
  modified_base 68: mod_base = OTHER; note = 2'-Omethylguanosine
  modified_base 69: mod_base = OTHER; note = 2'-Omethyladenosine phosphorothiorate
  modified_base 70: mod_base = OTHER; note = 2'-Omethylguanosine phosphorothiorate
  modified_base 71: mod_base = OTHER; note = 2'-Omethyluridine

SEQ ID NO: 8378 - RNA, 85 nt, synthetic construct; identical to SEQ ID NO: 3286
  source 1..85: mol_type = other RNA
  modified_base 1: mod_base = OTHER; note = 2'-Omethylcytosine phosphorothiorate
  modified_base 9: mod_base = OTHER; note = Guanosine phosphorothiorate
  modified_base 14: mod_base = OTHER; note = Guanosine phosphorothiorate
  modified_base 25: mod_base = OTHER; note = Guanosine phosphorothiorate
  modified_base 49: mod_base = OTHER; note = 2'-Omethyluridine
  modified_base 52: mod_base = OTHER; note = Guanosine phosphorothiorate
  modified_base 65: mod_base = OTHER; note = Cytosine phosphorothiorate
  modified_base 83: mod_base = OTHER; note = 2'-fluorocytosine
  modified_base 84: mod_base = OTHER; note = Cytosine phosphorothiorate

SEQ ID NO: 8379 - RNA, 74 nt, synthetic construct; identical to SEQ ID NO: 766
  source 1..74: mol_type = other RNA
  modified_base 1: mod_base = OTHER; note = 2'-Omethylguanosine phosphorothiorate
  modified_base 2: mod_base = OTHER; note = 2'-Omethylguanosine
  modified_base 3: mod_base = OTHER; note = 2'-Omethylcytosine
  modified_base 4: mod_base = OTHER; note = 2'-Omethyluridine
  modified_base 5: mod_base = OTHER; note = 2'-Omethylcytosine
  modified_base 6: mod_base = OTHER; note = 2'-Omethylcytosine
  modified_base 44: mod_base = OTHER; note = 2'-Omethyladenosine
  modified_base 45: mod_base = OTHER; note = 2'-Omethylguanosine
  modified_base 46: mod_base = OTHER; note = 2'-fluoroguanosine
  modified_base 48: mod_base = OTHER; note = 2'-fluorouridine
  modified_base 73: mod_base = OTHER; note = 2'-Omethylguanosine

SEQ ID NO: 8380 - RNA, 76 nt, synthetic construct; identical to SEQ ID NO: 3295
  source 1..76: mol_type = other RNA
  modified_base 1: mod_base = OTHER; note = 2'-fluorocytosine phosphorothiorate
  modified_base 2: mod_base = OTHER; note = 2'-fluorocytosine phosphorothiorate
  modified_base 3: mod_base = OTHER; note = 2'-Omethyluridine
  modified_base 7: mod_base = OTHER; note = Adenosine phosphorothiorate
  modified_base 8: mod_base = OTHER; note = 2'-fluorouridine
  modified_base 9: mod_base = OTHER; note = 2'-fluoroadenosine
  modified_base 12: mod_base = OTHER; note = 2'-Omethyluridine phosphorothiorate
  modified_base 17: mod_base = OTHER; note = 2'-Omethyluridine
  modified_base 21: mod_base = OTHER; note = 2'-fluoroadenosine phosphorothiorate
  modified_base 22: mod_base = OTHER; note = 2'-fluoroguanosine phosphorothiorate
  modified_base 26: mod_base = OTHER; note = Guanosine phosphorothiorate
  modified_base 34: mod_base = OTHER; note = 2'-fluorouridine phosphorothiorate
  modified_base 38: mod_base = OTHER; note = 2'-fluoroadenosine
  modified_base 42: mod_base = OTHER; note = 2'-fluorouridine phosphorothiorate
  modified_base 49: mod_base = OTHER; note = 2'-Omethylguanosine
  modified_base 52: mod_base = OTHER; note = 2'-Omethylguanosine
  modified_base 57: mod_base = OTHER; note = Guanosine phosphorothiorate
  modified_base 74: mod_base = OTHER; note = Cytosine phosphorothiorate
  modified_base 75: mod_base = OTHER; note = 2'-fluorocytosine
  modified_base 76: mod_base = OTHER; note = 2'-fluoroadenosine

SEQ ID NO: 8381 - RNA, 76 nt, synthetic construct; identical to SEQ ID NO: 625
  source 1..76: mol_type = other RNA
  modified_base 1: mod_base = OTHER; note = 2'-Omethylguanosine phosphorothiorate
  modified_base 2: mod_base = OTHER; note = 2'-Omethylguanosine
  modified_base 3: mod_base = OTHER; note = 2'-Omethylcytosine
  modified_base 4: mod_base = OTHER; note = 2'-Omethyluridine
  modified_base 5: mod_base = OTHER; note = 2'-Omethylcytosine
  modified_base 6: mod_base = OTHER; note = 2'-Omethylcytosine
  modified_base 10: mod_base = OTHER; note = 2'-Omethylguanosine
  modified_base 11: mod_base = OTHER; note = 2'-Omethylcytosine
  modified_base 12: mod_base = OTHER; note = 2'-Omethylguanosine
  modified_base 13: mod_base = OTHER; note = 2'-Omethylcytosine
  modified_base 22: mod_base = OTHER; note = 2'-Omethylguanosine
  modified_base 23: mod_base = OTHER; note = 2'-Omethylcytosine
  modified_base 24: mod_base = OTHER; note = 2'-Omethylguanosine
  modified_base 25: mod_base = OTHER; note = 2'-Omethylcytosine
  modified_base 40: mod_base = OTHER; note = 2'-fluorouridine
  modified_base 41: mod_base = OTHER; note = 2'-fluorocytosine
  modified_base 42: mod_base = OTHER; note = 2'-fluoroadenosine
  modified_base 43: mod_base = OTHER; note = 2'-fluoroadenosine
  modified_base 49: mod_base = OTHER; note = 2'-Omethylcytosine
  modified_base 50: mod_base = OTHER; note = 2'-Omethylcytosine
  modified_base 51: mod_base = OTHER; note = 2'-Omethylguanosine
  modified_base 52: mod_base = OTHER; note = 2'-Omethylguanosine
  modified_base 53: mod_base = OTHER; note = 2'-Omethylguanosine
  modified_base 54: mod_base = OTHER; note = Uridine phosphorothiorate
  modified_base 55: mod_base = OTHER; note = Uridine phosphorothiorate
  modified_base 56: mod_base = OTHER; note = Cytosine phosphorothiorate
  modified_base 57: mod_base = OTHER; note = Guanosine phosphorothiorate
  modified_base 61: mod_base = OTHER; note = 2'-Omethylcytosine
  modified_base 62: mod_base = OTHER; note = 2'-Omethylcytosine
  modified_base 63: mod_base = OTHER; note = 2'-fluorocytosine
  modified_base 64: mod_base = OTHER; note = 2'-Omethylguanosine
  modified_base 65: mod_base = OTHER; note = 2'-Omethylguanosine
  modified_base 66: mod_base = OTHER; note = 2'-Omethylcytosine
  modified_base 67: mod_base = OTHER; note = 2'-Omethylguanosine
  modified_base 68: mod_base = OTHER; note = 2'-Omethylguanosine
  modified_base 69: mod_base = OTHER; note = 2'-fluoroadenosine
  modified_base 71: mod_base = OTHER; note = 2'-Omethyluridine

SEQ ID NO: 8382 - RNA, 76 nt, synthetic construct; identical to SEQ ID NO: 625
  source 1..76: mol_type = other RNA
  modified_base 27: mod_base = OTHER; note = Uridine phosphorothiorate
  modified_base 28: mod_base = OTHER; note = Uridine phosphorothiorate
  modified_base 29: mod_base = OTHER; note = Guanosine phosphorothiorate
  modified_base 30: mod_base = OTHER; note = Guanosine phosphorothiorate
  modified_base 31: mod_base = OTHER; note = Adenosine phosphorothiorate

SEQ ID NO: 8383 - RNA, 76 nt, synthetic construct; identical to SEQ ID NO: 625
  source 1..76: mol_type = other RNA
  modified_base 1: mod_base = OTHER; note = 2'-fluoroguanosine phosphorothiorate
  modified_base 2: mod_base = OTHER; note = 2'-Omethylguanosine
  modified_base 6: mod_base = OTHER; note = 2'-fluorocytosine
  modified_base 7: mod_base = OTHER; note = Guanosine phosphorothiorate
  modified_base 8: mod_base = OTHER; note = Uridine phosphorothiorate
  modified_base 13: mod_base = OTHER; note = 2'-fluorocytosine
  modified_base 20: mod_base = OTHER; note = Uridine phosphorothiorate
  modified_base 22: mod_base = OTHER; note = 2'-Omethylguanosine
  modified_base 25: mod_base = OTHER; note = Cytosine phosphorothiorate
  modified_base 26: mod_base = OTHER; note = 2'-fluoroadenosine phosphorothiorate
  modified_base 27: mod_base = OTHER; note = 2'-Omethyluridine
  modified_base 29: mod_base = OTHER; note = 2'-Omethylguanosine
  modified_base 33: mod_base = OTHER; note = Uridine phosphorothiorate
  modified_base 34: mod_base = OTHER; note = 2'-Omethyluridine
  modified_base 39: mod_base = OTHER; note = 2'-Omethyluridine
  modified_base 42: mod_base = OTHER; note = 2'-fluoroadenosine
  modified_base 43: mod_base = OTHER; note = Adenosine phosphorothiorate
  modified_base 44: mod_base = OTHER; note = 2'-fluoroadenosine
  modified_base 45: mod_base = OTHER; note = 2'-fluoroguanosine phosphorothiorate
  modified_base 46: mod_base = OTHER; note = 2'-fluoroguanosine phosphorothiorate
  modified_base 47: mod_base = OTHER; note = 2'-Omethyluridine
  modified_base 48: mod_base = OTHER; note = Uridine phosphorothiorate
  modified_base 49: mod_base = OTHER; note = 2'-fluorocytosine phosphorothiorate
  modified_base 50: mod_base = OTHER; note = 2'-fluorocytosine phosphorothiorate
  modified_base 57: mod_base = OTHER; note = 2'-Omethylguanosine phosphorothiorate
  modified_base 58: mod_base = OTHER; note = 2'-fluoroadenosine
  modified_base 63: mod_base = OTHER; note = 2'-fluorocytosine
  modified_base 67: mod_base = OTHER; note = Guanosine phosphorothiorate
  modified_base 68: mod_base = OTHER; note = 2'-Omethylguanosine phosphorothiorate
  modified_base 69: mod_base = OTHER; note = 2'-Omethyladenosine
  modified_base 70: mod_base = OTHER; note = 2'-fluoroguanosine
  modified_base 75: mod_base = OTHER; note = 2'-Omethylcytosine

SEQ ID NO: 8384 - RNA, 76 nt, synthetic construct; identical to SEQ ID NO: 3318
  source 1..76: mol_type = other RNA
  modified_base 1: mod_base = OTHER; note = 2'-Omethylcytosine phosphorothiorate
  modified_base 2: mod_base = OTHER; note = 2'-Omethylcytosine phosphorothiorate
  modified_base 14: mod_base = OTHER; note = 2'-Omethyladenosine
  modified_base 18: mod_base = OTHER; note = 2'-Omethylguanosine
  modified_base 19: mod_base = OTHER; note = 2'-Omethylguanosine
  modified_base 22: mod_base = OTHER; note = 2'-Omethylguanosine
  modified_base 25: mod_base = OTHER; note = 2'-Omethylcytosine
  modified_base 27: mod_base = OTHER; note = 2'-Omethylguanosine
  modified_base 33: mod_base = OTHER; note = 2'-fluorouridine
  modified_base 41: mod_base = OTHER; note = 2'-Omethylcytosine phosphorothiorate
  modified_base 44: mod_base = OTHER; note = 2'-Omethyladenosine
  modified_base 45: mod_base = OTHER; note = 2'-Omethylguanosine
  modified_base 46: mod_base = OTHER; note = 2'-fluoroguanosine
  modified_base 47: mod_base = OTHER; note = 2'-fluorouridine
  modified_base 48: mod_base = OTHER; note = 2'-fluorocytosine
  modified_base 52: mod_base = OTHER; note = 2'-Omethylguanosine
  modified_base 55: mod_base = OTHER; note = Uridine phosphorothiorate
  modified_base 71: mod_base = OTHER; note = 2'-Omethylguanosine
  modified_base 73: mod_base = OTHER; note = 2'-Omethyladenosine

SEQ ID NO: 8385 - RNA, 76 nt, synthetic construct; identical to SEQ ID NO: 3318
  source 1..76: mol_type = other RNA
  modified_base 1: mod_base = OTHER; note = 2'-Omethylcytosine
  modified_base 2: mod_base = OTHER; note = 2'-Omethylcytosine
  modified_base 3: mod_base = OTHER; note = 2'-Omethyluridine
  modified_base 4: mod_base = OTHER; note = 2'-Omethyluridine
  modified_base 5: mod_base = OTHER; note = 2'-Omethylcytosine
  modified_base 6: mod_base = OTHER; note = 2'-Omethylguanosine
  modified_base 14: mod_base = OTHER; note = 2'-Omethyladenosine
  modified_base 15: mod_base = OTHER; note = 2'-Omethylguanosine
  modified_base 16: mod_base = OTHER; note = 2'-Omethyluridine
  modified_base 18: mod_base = OTHER; note = 2'-Omethylguanosine
  modified_base 19: mod_base = OTHER; note = 2'-Omethylguanosine
  modified_base 25: mod_base = OTHER; note = 2'-Omethylcytosine
  modified_base 41: mod_base = OTHER; note = 2'-Omethylcytosine
  modified_base 42: mod_base = OTHER; note = 2'-Omethyluridine
  modified_base 43: mod_base = OTHER; note = 2'-Omethyluridine
  modified_base 44: mod_base = OTHER; note = 2'-Omethyladenosine
  modified_base 49: mod_base = OTHER; note = 2'-Omethylguanosine
  modified_base 50: mod_base = OTHER; note = 2'-Omethylcytosine
  modified_base 52: mod_base = OTHER; note = 2'-Omethylguanosine
  modified_base 54: mod_base = OTHER; note = 2'-Omethyluridine
  modified_base 55: mod_base = OTHER; note = Uridine phosphorothiorate
  modified_base 56: mod_base = OTHER; note = 2'-Omethylcytosine
  modified_base 57: mod_base = OTHER; note = 2'-fluoroguanosine
  modified_base 59: mod_base = OTHER; note = 2'-Omethyladenosine
  modified_base 61: mod_base = OTHER; note = 2'-Omethylcytosine
  modified_base 65: mod_base = OTHER; note = 2'-Omethylcytosine
  modified_base 73: mod_base = OTHER; note = 2'-Omethyladenosine

SEQ ID NO: 8386 - RNA, 76 nt, synthetic construct; identical to SEQ ID NO: 625
  source 1..76: mol_type = other RNA
  modified_base 2: mod_base = OTHER; note = 2'-fluoroguanosine
  modified_base 3: mod_base = OTHER; note = Cytosine phosphorothiorate
  modified_base 4: mod_base = OTHER; note = 2'-Omethyluridine phosphorothiorate
  modified_base 5: mod_base = OTHER; note = 2'-fluorocytosine
  modified_base 6: mod_base = OTHER; note = 2'-fluorocytosine
  modified_base 13: mod_base = OTHER; note = 2'-fluorocytosine
  modified_base 14: mod_base = OTHER; note = 2'-fluoroadenosine
  modified_base 15: mod_base = OTHER; note = Adenosine phosphorothiorate
  modified_base 16: mod_base = OTHER; note = 2'-fluorouridine
  modified_base 17: mod_base = OTHER; note = 2'-Omethylguanosine
  modified_base 19: mod_base = OTHER; note = Adenosine phosphorothiorate
  modified_base 20: mod_base = OTHER; note = 2'-fluorouridine
  modified_base 22: mod_base = OTHER; note = 2'-fluoroguanosine
  modified_base 23: mod_base = OTHER; note = 2'-fluorocytosine
  modified_base 26: mod_base = OTHER; note = 2'-Omethyladenosine
  modified_base 31: mod_base = OTHER; note = 2'-Omethyladenosine
  modified_base 33: mod_base = OTHER; note = Uridine phosphorothiorate
  modified_base 39: mod_base = OTHER; note = 2'-fluorouridine phosphorothiorate
  modified_base 40: mod_base = OTHER; note = 2'-fluorouridine
  modified_base 41: mod_base = OTHER; note = Cytosine phosphorothiorate
  modified_base 42: mod_base = OTHER; note = 2'-Omethyladenosine
  modified_base 43: mod_base = OTHER; note = Adenosine phosphorothiorate
  modified_base 45: mod_base = OTHER; note = 2'-fluoroguanosine phosphorothiorate
  modified_base 46: mod_base = OTHER; note = 2'-fluoroguanosine
  modified_base 50: mod_base = OTHER; note = 2'-fluorocytosine
  modified_base 53: mod_base = OTHER; note = Guanosine phosphorothiorate
  modified_base 56: mod_base = OTHER; note = 2'-fluorocytosine
  modified_base 57: mod_base = OTHER; note = Guanosine phosphorothiorate
  modified_base 58: mod_base = OTHER; note = Adenosine phosphorothiorate
  modified_base 61: mod_base = OTHER; note = 2'-fluorocytosine
  modified_base 62: mod_base = OTHER; note = 2'-fluorocytosine
  modified_base 63: mod_base = OTHER; note = 2'-fluorocytosine
  modified_base 65: mod_base = OTHER; note = 2'-fluoroguanosine
  modified_base 71: mod_base = OTHER; note = Uridine phosphorothiorate
  modified_base 72: mod_base = OTHER; note = 2'-fluorocytosine
  modified_base 75: mod_base = OTHER; note = 2'-fluorocytosine

SEQ ID NO: 8387 - DNA, 73 bp, synthetic construct; identical to SEQ ID NO: 3380
  source 1..73: mol_type = other DNA
  modified_base 1: mod_base = OTHER; note = 2'-Omethylguanosine phosphorothiorate
  modified_base 2: mod_base = OTHER; note = 2'-Omethylguanosine phosphorothiorate
  modified_base 45: mod_base = OTHER; note = Guanosine phosphorothiorate
  modified_base 65: mod_base = OTHER; note = 2'-Omethylguanosine
  misc_feature 1..45: note = RNA
  misc_feature 46: note = DNA
  misc_feature 47..73: note = RNA

SEQ ID NO: 8388 - RNA, 85 nt, synthetic construct; identical to SEQ ID NO: 3310
  source 1..85: mol_type = other RNA
  modified_base 1: mod_base = OTHER; note = 2'-Omethylcytosine phosphorothiorate
  modified_base 2: mod_base = OTHER; note = 2'-fluorocytosine phosphorothiorate
  modified_base 14: mod_base = OTHER; note = Guanosine phosphorothiorate
  modified_base 67: mod_base = OTHER; note = Adenosine phosphorothiorate
  modified_base 84: mod_base = OTHER; note = Cytosine phosphorothiorate
  modified_base 85: mod_base = OTHER; note = 2'-Omethyladenosine

SEQ ID NO: 8389 - RNA, 87 nt, synthetic construct
  source 1..87: mol_type = other RNA
gccccgatggccgagcggtctaaggcgtgagacttcagttctcattgggtaacaccagcgtgggttcgaatcccgctcggggcacca

SEQ ID NO: 8390 - RNA, 76 nt, synthetic construct; identical to SEQ ID NO: 625
  source 1..76: mol_type = other RNA
  modified_base 1: mod_base = OTHER; note = 2'-Omethylguanosine phosphorothiorate
  modified_base 2: mod_base = OTHER; note = 2'-Omethylguanosine
  modified_base 3: mod_base = OTHER; note = 2'-Omethylcytosine
  modified_base 4: mod_base = OTHER; note = 2'-Omethyluridine
  modified_base 5: mod_base = OTHER; note = 2'-Omethylcytosine
  modified_base 6: mod_base = OTHER; note = 2'-Omethylcytosine
  modified_base 13: mod_base = OTHER; note = 2'-Omethylcytosine
  modified_base 33: mod_base = OTHER; note = 2'-fluorouridine
  modified_base 35: mod_base = OTHER; note = Cytosine phosphorothiorate
  modified_base 37: mod_base = OTHER; note = Adenosine phosphorothiorate
  modified_base 38: mod_base = OTHER; note = Adenosine phosphorothiorate
  modified_base 48: mod_base = OTHER; note = 2'-fluorouridine
  modified_base 49: mod_base = OTHER; note = 2'-Omethylcytosine
  modified_base 50: mod_base = OTHER; note = 2'-Omethylcytosine
  modified_base 51: mod_base = OTHER; note = 2'-Omethylguanosine
  modified_base 52: mod_base = OTHER; note = 2'-Omethylguanosine
  modified_base 53: mod_base = OTHER; note = 2'-Omethylguanosine
  modified_base 54: mod_base = OTHER; note = 2'-Omethyluridine
  modified_base 56: mod_base = OTHER; note = 2'-Omethylcytosine
  modified_base 57: mod_base = OTHER; note = 2'-Omethylguanosine
  modified_base 61: mod_base = OTHER; note = 2'-Omethylcytosine
  modified_base 62: mod_base = OTHER; note = 2'-Omethylcytosine
  modified_base 63: mod_base = OTHER; note = 2'-fluorocytosine
  modified_base 64: mod_base = OTHER; note = 2'-Omethylguanosine
  modified_base 65: mod_base = OTHER; note = 2'-Omethylguanosine
  modified_base 66: mod_base = OTHER; note = 2'-Omethylcytosine
  modified_base 67: mod_base = OTHER; note = 2'-Omethylguanosine
  modified_base 68: mod_base = OTHER; note = 2'-fluoroguanosine
  modified_base 73: mod_base = OTHER; note = 2'-Omethylguanosine
  modified_base 75: mod_base = OTHER; note = 2'-fluorocytosine phosphorothiorate

SEQ ID NO: 8391 - RNA, 85 nt, synthetic construct; identical to SEQ ID NO: 3297
  source 1..85: mol_type = other RNA
  modified_base 1: mod_base = OTHER; note = 2'-Omethylguanosine
  modified_base 2: mod_base = OTHER; note = 2'-Omethylcytosine
  modified_base 3: mod_base = OTHER; note = 2'-Omethyluridine
  modified_base 4: mod_base = OTHER; note = 2'-Omethylguanosine
  modified_base 5: mod_base = OTHER; note = 2'-Omethyluridine
  modified_base 6: mod_base = OTHER; note = 2'-Omethylguanosine
  modified_base 10: mod_base = OTHER; note = 2'-Omethylguanosine
  modified_base 11: mod_base = OTHER; note = 2'-Omethylcytosine
  modified_base 12: mod_base = OTHER; note = 2'-Omethylcytosine
  modified_base 13: mod_base = OTHER; note = 2'-Omethylguanosine
  modified_base 22: mod_base = OTHER; note = 2'-Omethyladenosine
  modified_base 23: mod_base = OTHER; note = 2'-Omethylguanosine
  modified_base 24: mod_base = OTHER; note = 2'-Omethylguanosine
  modified_base 25: mod_base = OTHER; note = 2'-Omethylcytosine
  modified_base 58: mod_base = OTHER; note = 2'-Omethylguanosine
  modified_base 59: mod_base = OTHER; note = 2'-Omethylcytosine
  modified_base 60: mod_base = OTHER; note = 2'-Omethyladenosine
  modified_base 61: mod_base = OTHER; note = 2'-Omethylguanosine
  modified_base 62: mod_base = OTHER; note = 2'-Omethylguanosine
  modified_base 82: mod_base = OTHER; note = 2'-Omethylguanosine

SEQ ID NO: 8392 - RNA, 85 nt, synthetic construct; identical to SEQ ID NO: 3297
  source 1..85: mol_type = other RNA
  modified_base 3: mod_base = OTHER; note = Uridine phosphorothiorate
  modified_base 16: mod_base = OTHER; note = 2'-Omethyluridine
  modified_base 35: mod_base = OTHER; note = 2'-fluorocytosine
  modified_base 50: mod_base = OTHER; note = 2'-Omethylcytosine phosphorothiorate
  modified_base 61: mod_base = OTHER; note = 2'-fluoroguanosine
  modified_base 62: mod_base = OTHER; note = 2'-Omethylguanosine
  modified_base 82: mod_base = OTHER; note = 2'-Omethylguanosine

SEQ ID NO: 8393 - RNA, 76 nt, synthetic construct; identical to SEQ ID NO: 625
  source 1..76: mol_type = other RNA
  modified_base 1: mod_base = OTHER; note = 2'-Omethylguanosine phosphorothiorate
  modified_base 2: mod_base = OTHER; note = 2'-Omethylguanosine
  modified_base 3: mod_base = OTHER; note = 2'-Omethylcytosine
  modified_base 4: mod_base = OTHER; note = 2'-Omethyluridine
  modified_base 5: mod_base = OTHER; note = 2'-Omethylcytosine
  modified_base 6: mod_base = OTHER; note = 2'-Omethylcytosine
  modified_base 10: mod_base = OTHER; note = 2'-Omethylguanosine
  modified_base 11: mod_base = OTHER; note = 2'-Omethylcytosine
  modified_base 12: mod_base = OTHER; note = 2'-Omethylguanosine
  modified_base 13: mod_base = OTHER; note = 2'-Omethylcytosine
  modified_base 16: mod_base = OTHER; note = 2'-Omethyluridine
  modified_base 17: mod_base = OTHER; note = 2'-Omethylguanosine
  modified_base 18: mod_base = OTHER; note = 2'-Omethylguanosine
  modified_base 22: mod_base = OTHER; note = 2'-Omethylguanosine
  modified_base 23: mod_base = OTHER; note = 2'-Omethylcytosine
  modified_base 24: mod_base = OTHER; note = 2'-Omethylguanosine
  modified_base 25: mod_base = OTHER; note = 2'-Omethylcytosine
  modified_base 40: mod_base = OTHER; note = 2'-fluorouridine
  modified_base 41: mod_base = OTHER; note = 2'-fluorocytosine
  modified_base 42: mod_base = OTHER; note = 2'-fluoroadenosine
  modified_base 43: mod_base = OTHER; note = 2'-fluoroadenosine
  modified_base 49: mod_base = OTHER; note = 2'-Omethylcytosine
  modified_base 50: mod_base = OTHER; note = 2'-Omethylcytosine
  modified_base 51: mod_base = OTHER; note = 2'-Omethylguanosine
  modified_base 52: mod_base = OTHER; note = 2'-Omethylguanosine
  modified_base 53: mod_base = OTHER; note = 2'-Omethylguanosine
  modified_base 54: mod_base = OTHER; note = 2'-Omethyluridine phosphorothiorate
  modified_base 55: mod_base = OTHER; note = Uridine phosphorothiorate
  modified_base 56: mod_base = OTHER; note = 2'-Omethylcytosine
  modified_base 57: mod_base = OTHER; note = 2'-fluoroguanosine
  modified_base 59: mod_base = OTHER; note = 2'-Omethylguanosine
  modified_base 61: mod_base = OTHER; note = 2'-Omethylcytosine
  modified_base 62: mod_base = OTHER; note = 2'-Omethylcytosine
  modified_base 63: mod_base = OTHER; note = 2'-Omethylcytosine
  modified_base 64: mod_base = OTHER; note = 2'-Omethylguanosine
  modified_base 65: mod_base = OTHER; note = 2'-Omethylguanosine
  modified_base 66: mod_base = OTHER; note = 2'-Omethylcytosine
  modified_base 67: mod_base = OTHER; note = 2'-Omethylguanosine
  modified_base 68: mod_base = OTHER; note = 2'-Omethylguanosine
  modified_base 69: mod_base = OTHER; note = 2'-Omethyladenosine
  modified_base 73: mod_base = OTHER; note = 2'-Omethylguanosine

SEQ ID NO: 8394 - RNA, 86 nt, synthetic construct; identical to SEQ ID NO: 3290
  source 1..86: mol_type = other RNA
  modified_base 1: mod_base = OTHER; note = 2'-Omethyladenosine phosphorothiorate
  modified_base 2: mod_base = OTHER; note = 2'-Omethylcytosine
  modified_base 3: mod_base = OTHER; note = 2'-Omethylcytosine
  modified_base 4: mod_base = OTHER; note = 2'-Omethyladenosine
  modified_base 5: mod_base = OTHER; note = 2'-Omethylguanosine
  modified_base 6: mod_base = OTHER; note = 2'-Omethylguanosine
  modified_base 43: mod_base = OTHER; note = 2'-Omethyladenosine
  modified_base 44: mod_base = OTHER; note = 2'-Omethyluridine
  modified_base 57: mod_base = OTHER; note = 2'-fluoroguanosine
  modified_base 58: mod_base = OTHER; note = 2'-Omethylcytosine
  modified_base 59: mod_base = OTHER; note = 2'-Omethylguanosine
  modified_base 83: mod_base = OTHER; note = 2'-Omethyladenosine

SEQ ID NO: 8395 - RNA, 76 nt, synthetic construct; identical to SEQ ID NO: 625
  source 1..76: mol_type = other RNA
  modified_base 2: mod_base = OTHER; note = 2'-Omethylguanosine
  modified_base 3: mod_base = OTHER; note = Cytosine phosphorothiorate
  modified_base 4: mod_base = OTHER; note = 2'-Omethyluridine phosphorothiorate
  modified_base 5: mod_base = OTHER; note = 2'-fluorocytosine
  modified_base 12: mod_base = OTHER; note = Guanosine phosphorothiorate
  modified_base 13: mod_base = OTHER; note = 2'-fluorocytosine phosphorothiorate
  modified_base 14: mod_base = OTHER; note = 2'-Omethyladenosine
  modified_base 20: mod_base = OTHER; note = 2'-fluorouridine
  modified_base 22: mod_base = OTHER; note = Guanosine phosphorothiorate
  modified_base 23: mod_base = OTHER; note = 2'-fluorocytosine phosphorothiorate
  modified_base 24: mod_base = OTHER; note = 2'-Omethylguanosine
  modified_base 27: mod_base = OTHER; note = 2'-fluorouridine
  modified_base 31: mod_base = OTHER; note = 2'-fluoroadenosine
  modified_base 33: mod_base = OTHER; note = 2'-fluorouridine
  modified_base 38: mod_base = OTHER; note = 2'-Omethyladenosine
  modified_base 42: mod_base = OTHER; note = 2'-Omethyladenosine
  modified_base 43: mod_base = OTHER; note = Adenosine phosphorothiorate
  modified_base 45: mod_base = OTHER; note = 2'-Omethylguanosine
  modified_base 46: mod_base = OTHER; note = 2'-fluoroguanosine phosphorothiorate
  modified_base 51: mod_base = OTHER; note = Guanosine phosphorothiorate
  modified_base 54: mod_base = OTHER; note = Uridine phosphorothiorate
  modified_base 57: mod_base = OTHER; note = 2'-fluoroguanosine
  modified_base 59: mod_base = OTHER; note = 2'-fluoroguanosine
  modified_base 60: mod_base = OTHER; note = Uridine phosphorothiorate
  modified_base 63: mod_base = OTHER; note = 2'-Omethylcytosine
  modified_base 64: mod_base = OTHER; note = 2'-Omethylguanosine phosphorothiorate
  modified_base 65: mod_base = OTHER; note = 2'-Omethylguanosine phosphorothiorate
  modified_base 66: mod_base = OTHER; note = 2'-fluorocytosine
  modified_base 68: mod_base = OTHER; note = 2'-fluoroguanosine
  modified_base 69: mod_base = OTHER; note = Adenosine phosphorothiorate
  modified_base 70: mod_base = OTHER; note = Guanosine phosphorothiorate
  modified_base 71: mod_base = OTHER; note = 2'-fluorouridine
  modified_base 74: mod_base = OTHER; note = Cytosine phosphorothiorate
  modified_base 75: mod_base = OTHER; note = 2'-Omethylcytosine

SEQ ID NO: 8396 - RNA, 76 nt, synthetic construct; identical to SEQ ID NO: 625
  source 1..76: mol_type = other RNA
  modified_base 4: mod_base = OTHER; note = 2'-Omethyluridine
  modified_base 10: mod_base = OTHER; note = 2'-Omethylguanosine phosphorothiorate
  modified_base 11: mod_base = OTHER; note = 2'-Omethylcytosine
  modified_base 13: mod_base = OTHER; note = 2'-fluorocytosine
  modified_base 21: mod_base = OTHER; note = Adenosine phosphorothiorate
  modified_base 22: mod_base = OTHER; note = 2'-fluoroguanosine
  modified_base 23: mod_base = OTHER; note = 2'-fluorocytosine
  modified_base 24: mod_base = OTHER; note = 2'-Omethylguanosine
  modified_base 26: mod_base = OTHER; note = 2'-fluoroadenosine phosphorothiorate
  modified_base 27: mod_base = OTHER; note = 2'-Omethyluridine
  modified_base 28: mod_base = OTHER; note = 2'-Omethyluridine
  modified_base 30: mod_base = OTHER; note = 2'-fluoroguanosine
  modified_base 33: mod_base = OTHER; note = 2'-fluorouridine
  modified_base 36: mod_base = OTHER; note = Adenosine phosphorothiorate
  modified_base 39: mod_base = OTHER; note = 2'-fluorouridine
  modified_base 40: mod_base = OTHER; note = 2'-Omethyluridine
  modified_base 41: mod_base = OTHER; note = Cytosine phosphorothiorate
  modified_base 42: mod_base = OTHER; note = 2'-Omethyladenosine
  modified_base 44: mod_base = OTHER; note = 2'-Omethyladenosine
  modified_base 45: mod_base = OTHER; note = 2'-Omethylguanosine
  modified_base 48: mod_base = OTHER; note = 2'-Omethyluridine
  modified_base 50: mod_base = OTHER; note = 2'-fluorocytosine
  modified_base 51: mod_base = OTHER; note = Guanosine phosphorothiorate
  modified_base 52: mod_base = OTHER; note = 2'-fluoroguanosine
  modified_base 53: mod_base = OTHER; note = 2'-fluoroguanosine
  modified_base 54: mod_base = OTHER; note = 2'-Omethyluridine
  modified_base 57: mod_base = OTHER; note = 2'-fluoroguanosine
  modified_base 58: mod_base = OTHER; note = 2'-fluoroadenosine phosphorothiorate
  modified_base 59: mod_base = OTHER; note = 2'-fluoroguanosine phosphorothiorate
  modified_base 60: mod_base = OTHER; note = 2'-fluorouridine
  modified_base 61: mod_base = OTHER; note = 2'-Omethylcytosine
  modified_base 63: mod_base = OTHER; note = 2'-Omethylcytosine
  modified_base 64: mod_base = OTHER; note = 2'-fluoroguanosine
  modified_base 66: mod_base = OTHER; note = Cytosine phosphorothiorate
  modified_base 67: mod_base = OTHER; note = 2'-fluoroguanosine
  modified_base 70: mod_base = OTHER; note = 2'-fluoroguanosine
  modified_base 72: mod_base = OTHER; note = 2'-Omethylcytosine
  modified_base 74: mod_base = OTHER; note = 2'-fluorocytosine
  modified_base 76: mod_base = OTHER; note = 2'-Omethyladenosine

SEQ ID NO: 8397 - RNA, 76 nt, synthetic construct; identical to SEQ ID NO: 625
  source 1..76: mol_type = other RNA
  modified_base 1: mod_base = OTHER; note = 2'-Omethylguanosine phosphorothiorate
  modified_base 4: mod_base = OTHER; note = Uridine phosphorothiorate
  modified_base 5: mod_base = OTHER; note = Cytosine phosphorothiorate
  modified_base 6: mod_base = OTHER; note = 2'-Omethylcytosine phosphorothiorate
  modified_base 10: mod_base = OTHER; note = Guanosine phosphorothiorate
  modified_base 11: mod_base = OTHER; note = 2'-Omethylcytosine
  modified_base 12: mod_base = OTHER; note = 2'-fluoroguanosine
  modified_base 17: mod_base = OTHER; note = 2'-Omethylguanosine
  modified_base 22: mod_base = OTHER; note = 2'-fluoroguanosine
  modified_base 27: mod_base = OTHER; note = 2'-fluorouridine
  modified_base 30: mod_base = OTHER; note = 2'-Omethylguanosine
  modified_base 34: mod_base = OTHER; note = 2'-Omethyluridine phosphorothiorate
  modified_base 37: mod_base = OTHER; note = Adenosine phosphorothiorate
  modified_base 38: mod_base = OTHER; note = 2'-fluoroadenosine
  modified_base 39: mod_base = OTHER; note = 2'-fluorouridine
  modified_base 40: mod_base = OTHER; note = 2'-Omethyluridine
  modified_base 41: mod_base = OTHER; note = 2'-fluorocytosine
  modified_base 42: mod_base = OTHER; note = 2'-Omethyladenosine
  modified_base 43: mod_base = OTHER; note = 2'-Omethyladenosine
  modified_base 44: mod_base = OTHER; note = 2'-fluoroadenosine
  modified_base 46: mod_base = OTHER; note = 2'-Omethylguanosine
  modified_base 47: mod_base = OTHER; note = 2'-fluorouridine
  modified_base 48: mod_base = OTHER; note = 2'-fluorouridine
  modified_base 49: mod_base = OTHER; note = 2'-fluorocytosine
  modified_base 51: mod_base = OTHER; note = Guanosine phosphorothiorate
  modified_base 52: mod_base = OTHER; note = 2'-fluoroguanosine
  modified_base 56: mod_base = OTHER; note = Cytosine phosphorothiorate
  modified_base 61: mod_base = OTHER; note = Cytosine phosphorothiorate
  modified_base 62: mod_base = OTHER; note = 2'-Omethylcytosine
  modified_base 63: mod_base = OTHER; note = 2'-Omethylcytosine
  modified_base 64: mod_base = OTHER; note = Guanosine phosphorothiorate
  modified_base 65: mod_base = OTHER; note = 2'-Omethylguanosine
  modified_base 66: mod_base = OTHER; note = 2'-Omethylcytosine
  modified_base 67: mod_base = OTHER; note = Guanosine phosphorothiorate
  modified_base 68: mod_base = OTHER; note = 2'-Omethylguanosine phosphorothiorate
  modified_base 69: mod_base = OTHER; note = 2'-Omethyladenosine phosphorothiorate
  modified_base 73: mod_base = OTHER; note = Guanosine phosphorothiorate
  modified_base 74: mod_base = OTHER; note = 2'-fluorocytosine

SEQ ID NO: 8398 - RNA, 75 nt, synthetic construct; identical to SEQ ID NO: 3336
  source 1..75: mol_type = other RNA
  modified_base 1: mod_base = OTHER; note = 2'-Omethylcytosine phosphorothiorate
  modified_base 15: mod_base = OTHER; note = 2'-Omethyluridine
  modified_base 25: mod_base = OTHER; note = 2'-fluoroadenosine
  modified_base 26: mod_base = OTHER; note = 2'-fluorouridine
  modified_base 41: mod_base = OTHER; note = 2'-fluoroguanosine
  modified_base 46: mod_base = OTHER; note = 2'-fluorouridine
  modified_base 47: mod_base = OTHER; note = 2'-Omethylcytosine phosphorothiorate
  modified_base 60: mod_base = OTHER; note = 2'-fluorocytosine
  modified_base 73: mod_base = OTHER; note = Cytosine phosphorothiorate
  modified_base 74: mod_base = OTHER; note = 2'-Omethylcytosine

SEQ ID NO: 8399 - RNA, 85 nt, synthetic construct; identical to SEQ ID NO: 3297
  source 1..85: mol_type = other RNA
  modified_base 1: mod_base = OTHER; note = 2'-Omethylguanosine phosphorothiorate
  modified_base 2: mod_base = OTHER; note = 2'-Omethylcytosine
  modified_base 15: mod_base = OTHER; note = 2'-Omethylguanosine
  modified_base 23: mod_base = OTHER; note = Guanosine phosphorothiorate
  modified_base 35: mod_base = OTHER; note = 2'-fluorocytosine phosphorothiorate
  modified_base 61: mod_base = OTHER; note = 2'-Omethylguanosine
  modified_base 72: mod_base = OTHER; note = 2'-fluorouridine
  modified_base 80: mod_base = OTHER; note = 2'-fluoroguanosine

SEQ ID NO: 8400 - RNA, 76 nt, synthetic construct
  source 1..76: mol_type = other RNA
ggctccgtggcgcaacggatagcgcattggacttcaaattcaaaggttcggggttcgagtccccgcggagtcgcca

SEQ ID NO: 8401 - RNA, 76 nt, synthetic construct; identical to SEQ ID NO: 3289
  source 1..76: mol_type = other RNA
  modified_base 1: mod_base = OTHER; note = 2'-Omethylguanosine
  modified_base 10: mod_base = OTHER; note = 2'-Omethylguanosine
  modified_base 11: mod_base = OTHER; note = 2'-Omethylcytosine
  modified_base 12: mod_base = OTHER; note = 2'-Omethyluridine
  modified_base 13: mod_base = OTHER; note = 2'-Omethylcytosine
  modified_base 14: mod_base = OTHER; note = 2'-Omethyladenosine
  modified_base 15: mod_base = OTHER; note = 2'-Omethylguanosine
  modified_base 16: mod_base = OTHER; note = 2'-Omethyluridine
  modified_base 18: mod_base = OTHER; note = 2'-Omethylguanosine
  modified_base 19: mod_base = OTHER; note = 2'-Omethylguanosine
  modified_base 20: mod_base = OTHER; note = Uridine phosphorothiorate
  modified_base 21: mod_base = OTHER; note = Adenosine phosphorothiorate
  modified_base 25: mod_base = OTHER; note = 2'-Omethylcytosine
  modified_base 33: mod_base = OTHER; note = 2'-fluorouridine
  modified_base 34: mod_base = OTHER; note = 2'-Omethyluridine
  modified_base 35: mod_base = OTHER; note = Uridine phosphorothiorate
  modified_base 37: mod_base = OTHER; note = Adenosine phosphorothiorate
  modified_base 38: mod_base = OTHER; note = Adenosine phosphorothiorate
  modified_base 41: mod_base = OTHER; note = 2'-fluorouridine
  modified_base 42: mod_base = OTHER; note = 2'-Omethylguanosine
  modified_base 43: mod_base = OTHER; note = 2'-Omethyladenosine
  modified_base 44: mod_base = OTHER; note = 2'-fluoroguanosine
  modified_base 49: mod_base = OTHER; note = 2'-Omethylcytosine
  modified_base 50: mod_base = OTHER; note = 2'-Omethyladenosine
  modified_base 52: mod_base = OTHER; note = 2'-Omethylguanosine
  modified_base 54: mod_base = OTHER; note = Uridine phosphorothiorate
  modified_base 55: mod_base = OTHER; note = Uridine phosphorothiorate
  modified_base 61: mod_base = OTHER; note = 2'-Omethylcytosine
  modified_base 65: mod_base = OTHER; note = 2'-Omethylguanosine
  modified_base 73: mod_base = OTHER; note = 2'-Omethylguanosine

SEQ ID NO: 8402 - RNA, 76 nt, synthetic construct; identical to SEQ ID NO: 625
  source 1..76: mol_type = other RNA
  modified_base 1: mod_base = OTHER; note = 2'-Omethylguanosine phosphorothiorate
  modified_base 2: mod_base = OTHER; note = 2'-Omethylguanosine phosphorothiorate
  modified_base 3: mod_base = OTHER; note = 2'-Omethylcytosine phosphorothiorate
  modified_base 4: mod_base = OTHER; note = 2'-Omethyluridine phosphorothiorate
  modified_base 5: mod_base = OTHER; note = 2'-Omethylcytosine phosphorothiorate
  modified_base 6: mod_base = OTHER; note = 2'-Omethylcytosine phosphorothiorate
  modified_base 10: mod_base = OTHER; note = 2'-Omethylguanosine
  modified_base 11: mod_base = OTHER; note = 2'-Omethylcytosine
  modified_base 12: mod_base = OTHER; note = 2'-Omethylguanosine
  modified_base 13: mod_base = OTHER; note = 2'-Omethylcytosine
  modified_base 40: mod_base = OTHER; note = 2'-fluorouridine
  modified_base 41: mod_base = OTHER; note = 2'-fluorocytosine
  modified_base 42: mod_base = OTHER; note = 2'-fluoroadenosine
  modified_base 43: mod_base = OTHER; note = 2'-fluoroadenosine
  modified_base 49: mod_base = OTHER; note = 2'-Omethylcytosine
  modified_base 50: mod_base = OTHER; note = 2'-Omethylcytosine
  modified_base 51: mod_base = OTHER; note = 2'-Omethylguanosine
  modified_base 52: mod_base = OTHER; note = 2'-Omethylguanosine
  modified_base 53: mod_base = OTHER; note = 2'-Omethylguanosine

SEQ ID NO: 8403 - RNA, 75 nt, synthetic construct; identical to SEQ ID NO: 3336
  source 1..75: mol_type = other RNA
  modified_base 1: mod_base = OTHER; note = 2'-Omethylcytosine phosphorothiorate
  modified_base 2: mod_base = OTHER; note = Cytosine phosphorothiorate
  modified_base 4: mod_base = OTHER; note = Guanosine phosphorothiorate
  modified_base 6: mod_base = OTHER; note = 2'-Omethylguanosine
  modified_base 14: mod_base = OTHER; note = 2'-fluoroguanosine
  modified_base 19: mod_base = OTHER; note = 2'-fluorouridine
  modified_base 23: mod_base = OTHER; note = 2'-fluoroguanosine
  modified_base 29: mod_base = OTHER; note = 2'-fluoroguanosine
  modified_base 40: mod_base = OTHER; note = 2'-fluorouridine
  modified_base 45: mod_base = OTHER; note = 2'-fluoroguanosine
  modified_base 47: mod_base = OTHER; note = Cytosine phosphorothiorate
  modified_base 49: mod_base = OTHER; note = Adenosine phosphorothiorate
  modified_base 59: mod_base = OTHER; note = Uridine phosphorothiorate
  modified_base 64: mod_base = OTHER; note = 2'-fluoroguanosine
  modified_base 68: mod_base = OTHER; note = 2'-Omethyladenosine
  modified_base 72: mod_base = OTHER; note = Guanosine phosphorothiorate
  modified_base 74: mod_base = OTHER; note = 2'-Omethylcytosine

SEQ ID NO: 8404 - RNA, 74 nt, synthetic construct; identical to SEQ ID NO: 3293
  source 1..74: mol_type = other RNA
  modified_base 1: mod_base = OTHER; note = 2'-Omethyladenosine phosphorothiorate
  modified_base 8: mod_base = OTHER; note = 2'-fluoroguanosine
  modified_base 12: mod_base = OTHER; note = 2'-Omethylcytosine
  modified_base 26: mod_base = OTHER; note = 2'-fluorocytosine
  modified_base 43: mod_base = OTHER; note = 2'-fluoroguanosine
  modified_base 50: mod_base = OTHER; note = Uridine phosphorothiorate
  modified_base 73: mod_base = OTHER; note = 2'-Omethylcytosine phosphorothiorate

SEQ ID NO: 8405 - RNA, 76 nt, synthetic construct; identical to SEQ ID NO: 625
  source 1..76: mol_type = other RNA
  modified_base 32: mod_base = OTHER; note = Cytosine phosphorothiorate
  modified_base 33: mod_base = OTHER; note = Uridine phosphorothiorate
  modified_base 34: mod_base = OTHER; note = Uridine phosphorothiorate
  modified_base 35: mod_base = OTHER; note = Cytosine phosphorothiorate
  modified_base 36: mod_base = OTHER; note = Adenosine phosphorothiorate
  modified_base 37: mod_base = OTHER; note = Adenosine phosphorothiorate
  modified_base 38: mod_base = OTHER; note = Adenosine phosphorothiorate

SEQ ID NO: 8406 - RNA, 85 nt, synthetic construct; identical to SEQ ID NO: 3297
  source 1..85: mol_type = other RNA
  modified_base 1: mod_base = OTHER; note = 2'-Omethylguanosine phosphorothiorate
  modified_base 2: mod_base = OTHER; note = 2'-Omethylcytosine
  modified_base 27: mod_base = OTHER; note = 2'-fluorouridine
  modified_base 36: mod_base = OTHER; note = 2'-fluoroadenosine
  modified_base 37: mod_base = OTHER; note = 2'-fluoroadenosine
  modified_base 47: mod_base = OTHER; note = 2'-Omethylguanosine phosphorothiorate
  modified_base 53: mod_base = OTHER; note = Cytosine phosphorothiorate
  modified_base 59: mod_base = OTHER; note = 2'-Omethylcytosine
  modified_base 73: mod_base = OTHER; note = Guanosine phosphorothiorate

SEQ ID NO: 8407 - RNA, 86 nt, synthetic construct; identical to SEQ ID NO: 3290
  source 1..86: mol_type = other RNA
  modified_base 6: mod_base = OTHER; note = 2'-fluoroguanosine

SEQ ID NO: 8408 - RNA, 76 nt, synthetic construct; identical to SEQ ID NO: 625
  source 1..76: mol_type = other RNA
  modified_base 1: mod_base = OTHER; note = 2'-Omethylguanosine phosphorothiorate
  modified_base 2: mod_base = OTHER; note = 2'-Omethylguanosine phosphorothiorate
  modified_base 3: mod_base = OTHER; note = 2'-Omethylcytosine phosphorothiorate
  modified_base 4: mod_base = OTHER; note = 2'-Omethyluridine phosphorothiorate
  modified_base 5: mod_base = OTHER; note = 2'-Omethylcytosine phosphorothiorate
  modified_base 6: mod_base = OTHER; note = 2'-Omethylcytosine phosphorothiorate
  modified_base 10: mod_base = OTHER; note = 2'-Omethylguanosine
  modified_base 11: mod_base = OTHER; note = 2'-Omethylcytosine
  modified_base 12: mod_base = OTHER; note = 2'-Omethylguanosine
  modified_base 13: mod_base = OTHER; note = 2'-Omethylcytosine
  modified_base 22: mod_base = OTHER; note = 2'-Omethylguanosine
  modified_base 23: mod_base = OTHER; note = 2'-Omethylcytosine
  modified_base 24: mod_base = OTHER; note = 2'-Omethylguanosine
  modified_base 25: mod_base = OTHER; note = 2'-Omethylcytosine
  modified_base 40: mod_base = OTHER; note = 2'-fluorouridine
  modified_base 41: mod_base = OTHER; note = 2'-fluorocytosine
  modified_base 42: mod_base = OTHER; note = 2'-fluoroadenosine
  modified_base 43: mod_base = OTHER; note = 2'-fluoroadenosine
  modified_base 44: mod_base = OTHER; note = 2'-Omethyladenosine
  modified_base 45: mod_base = OTHER; note = 2'-Omethylguanosine
  modified_base 46: mod_base = OTHER; note = 2'-Omethylguanosine
  modified_base 49: mod_base = OTHER; note = 2'-Omethylcytosine
  modified_base 50: mod_base = OTHER; note = 2'-Omethylcytosine
  modified_base 51: mod_base = OTHER; note = 2'-Omethylguanosine
  modified_base 52: mod_base = OTHER; note = 2'-Omethylguanosine
  modified_base 53: mod_base = OTHER; note = 2'-Omethylguanosine
  modified_base 54: mod_base = OTHER; note = Uridine phosphorothiorate
  modified_base 55: mod_base = OTHER; note = Uridine phosphorothiorate
  modified_base 56: mod_base = OTHER; note = Cytosine phosphorothiorate
  modified_base 57: mod_base = OTHER; note = Guanosine phosphorothiorate

SEQ ID NO: 8409 - RNA, 76 nt, synthetic construct; identical to SEQ ID NO: 625
  source 1..76: mol_type = other RNA
  modified_base 1: mod_base = OTHER; note = 2'-fluoroguanosine
  modified_base 5: mod_base = OTHER; note = 2'-fluorocytosine
  modified_base 10: mod_base = OTHER; note = 2'-Omethylguanosine
  modified_base 13: mod_base = OTHER; note = 2'-fluorocytosine
  modified_base 14: mod_base = OTHER; note = Adenosine phosphorothiorate
  modified_base 15: mod_base = OTHER; note = 2'-fluoroadenosine
  modified_base 24: mod_base = OTHER; note = Guanosine phosphorothiorate
  modified_base 25: mod_base = OTHER; note = 2'-Omethylcytosine
  modified_base 29: mod_base = OTHER; note = 2'-fluoroguanosine
  modified_base 33: mod_base = OTHER; note = 2'-fluorouridine
  modified_base 34: mod_base = OTHER; note = 2'-fluorouridine
  modified_base 37: mod_base = OTHER; note = Adenosine phosphorothiorate
  modified_base 38: mod_base = OTHER; note = 2'-Omethyladenosine
  modified_base 40: mod_base = OTHER; note = Uridine phosphorothiorate
  modified_base 41: mod_base = OTHER; note = 2'-fluorocytosine
  modified_base 42: mod_base = OTHER; note = 2'-Omethyladenosine
  modified_base 45: mod_base = OTHER; note = 2'-Omethylguanosine phosphorothiorate
  modified_base 46: mod_base = OTHER; note = Guanosine phosphorothiorate
  modified_base 47: mod_base = OTHER; note = 2'-fluorouridine
  modified_base 48: mod_base = OTHER; note = 2'-Omethyluridine
  modified_base 49: mod_base = OTHER; note = 2'-fluorocytosine
  modified_base 50: mod_base = OTHER; note = 2'-fluorocytosine
  modified_base 52: mod_base = OTHER; note = 2'-fluoroguanosine phosphorothiorate
  modified_base 53: mod_base = OTHER; note = 2'-fluoroguanosine
  modified_base 55: mod_base = OTHER; note = Uridine phosphorothiorate
  modified_base 56: mod_base = OTHER; note = 2'-fluorocytosine
  modified_base 57: mod_base = OTHER; note = Guanosine phosphorothiorate
  modified_base 59: mod_base = OTHER; note = 2'-fluoroguanosine
  modified_base 60: mod_base = OTHER; note = Uridine phosphorothiorate
  modified_base 61: mod_base = OTHER; note = 2'-fluorocytosine
  modified_base 63: mod_base = OTHER; note = Cytosine phosphorothiorate
  modified_base 64: mod_base = OTHER; note = 2'-Omethylguanosine
  modified_base 65: mod_base = OTHER; note = Guanosine phosphorothiorate
  modified_base 68: mod_base = OTHER; note = 2'-Omethylguanosine phosphorothiorate
  modified_base 69: mod_base = OTHER; note = 2'-Omethyladenosine
  modified_base 71: mod_base = OTHER; note = 2'-fluorouridine
  modified_base 75: mod_base = OTHER; note = 2'-fluorocytosine

SEQ ID NO: 8410 - DNA, 76 bp, synthetic construct; identical to SEQ ID NO: 1924
  source 1..76: mol_type = other DNA
  modified_base 1: mod_base = OTHER; note = 2'-Omethylguanosine phosphorothiorate
  modified_base 2: mod_base = OTHER; note = Guanosine phosphorothiorate
  modified_base 4: mod_base = OTHER; note = 2'-Omethyluridine
  modified_base 5: mod_base = OTHER; note = 2'-fluorocytosine
  modified_base 9: mod_base = OTHER; note = 2'-Omethylguanosine
  modified_base 11: mod_base = OTHER; note = 2'-O-(2-Methoxyethyl) 5-methylcytosine
  modified_base 15: mod_base = OTHER; note = 2'-Omethyladenosine
  modified_base 16: mod_base = OTHER; note = 2'-O-(2-Methoxyethyl) thymine
  modified_base 17: mod_base = OTHER; note = 2'-fluoroguanosine
  modified_base 18: mod_base = OTHER; note = Guanosine phosphorothiorate
  modified_base 19: mod_base = OTHER; note = 2'-Omethyladenosine phosphorothiorate
  modified_base 20: mod_base = OTHER; note = 2'-Omethyluridine phosphorothiorate
  modified_base 21: mod_base = OTHER; note = 2'-fluoroadenosine
  modified_base 22: mod_base = OTHER; note = Guanosine phosphorothiorate
  modified_base 23: mod_base = OTHER; note = 2'-fluorocytosine phosphorothiorate
  modified_base 24: mod_base = OTHER; note = 2'-fluoroguanosine
  modified_base 26: mod_base = OTHER; note = Adenosine phosphorothiorate
  modified_base 27: mod_base = OTHER; note = 2'-Omethyluridine phosphorothiorate
  modified_base 28: mod_base = OTHER; note = 2'-O-(2-Methoxyethyl) thymine phosphorothiorate
  modified_base 32: mod_base = OTHER; note = Cytosine phosphorothiorate
  modified_base 33: mod_base = OTHER; note = 2'-O-(2-Methoxyethyl) thymine
  modified_base 34: mod_base = OTHER; note = Uridine phosphorothiorate
  modified_base 35: mod_base = OTHER; note = 2'-Omethylcytosine
  modified_base 39: mod_base = OTHER; note = Uridine phosphorothiorate
  modified_base 42: mod_base = OTHER; note = 2'-fluoroadenosine phosphorothiorate
  modified_base 43: mod_base = OTHER; note = 2'-Omethyladenosine
  modified_base 44: mod_base = OTHER; note = Adenosine phosphorothiorate
  modified_base 47: mod_base = OTHER; note = 2'-fluorouridine
  modified_base 49: mod_base = OTHER; note = 2'-fluorocytosine
  modified_base 50: mod_base = OTHER; note = 2'-O-(2-Methoxyethyl) 5-methylcytosine
  modified_base 51: mod_base = OTHER; note = Guanosine phosphorothiorate
  modified_base 56: mod_base = OTHER; note = 2'-fluorocytosine
  modified_base 64: mod_base = OTHER; note = 2'-Omethylguanosine phosphorothiorate
  modified_base 65: mod_base = OTHER; note = 2'-fluoroguanosine
  modified_base 66: mod_base = OTHER; note = Cytosine phosphorothiorate
  modified_base 69: mod_base = OTHER; note = Adenosine phosphorothiorate
  modified_base 73: mod_base = OTHER; note = Guanosine phosphorothiorate
  modified_base 74: mod_base = OTHER; note = deoxycytosine phosphorothiorate
  modified_base 75: mod_base = OTHER; note = 2'-fluorocytosine
  misc_feature 1..51: note = RNA
  misc_feature 52: note = DNA
  misc_feature 53..59: note = RNA
  misc_feature 60: note = DNA
  misc_feature 61..73: note = RNA
  misc_feature 74: note = DNA
  misc_feature 75..76: note = RNA

SEQ ID NO: 8411 - RNA, 75 nt, synthetic construct; identical to SEQ ID NO: 3306
  source 1..75: mol_type = other RNA
  modified_base 1: mod_base = OTHER; note = 2'-Omethylguanosine
  modified_base 2: mod_base = OTHER; note = 2'-Omethyladenosine
  modified_base 3: mod_base = OTHER; note = 2'-Omethylcytosine
  modified_base 4: mod_base = OTHER; note = 2'-Omethylcytosine
  modified_base 5: mod_base = OTHER; note = 2'-Omethyluridine
  modified_base 6: mod_base = OTHER; note = 2'-Omethylcytosine
  modified_base 14: mod_base = OTHER; note = 2'-Omethyladenosine
  modified_base 15: mod_base = OTHER; note = 2'-fluoroadenosine
  modified_base 16: mod_base = OTHER; note = 2'-Omethylcytosine
  modified_base 17: mod_base = OTHER; note = 2'-Omethylguanosine
  modified_base 18: mod_base = OTHER; note = 2'-Omethylguanosine
  modified_base 19: mod_base = OTHER; note = 2'-fluorouridine
  modified_base 21: mod_base = OTHER; note = 2'-Omethylguanosine
  modified_base 22: mod_base = OTHER; note = 2'-Omethylcytosine
  modified_base 23: mod_base = OTHER; note = 2'-Omethylguanosine
  modified_base 24: mod_base = OTHER; note = 2'-Omethylcytosine
  modified_base 72: mod_base = OTHER; note = 2'-Omethyladenosine

SEQ ID NO: 8412 - RNA, 86 nt, synthetic construct; identical to SEQ ID NO: 3290
  source 1..86: mol_type = other RNA
  modified_base 1: mod_base = OTHER; note = 2'-Omethyladenosine
  modified_base 10: mod_base = OTHER; note = 2'-Omethylguanosine
  modified_base 13: mod_base = OTHER; note = 2'-Omethylguanosine
  modified_base 16: mod_base = OTHER; note = Uridine phosphorothiorate
  modified_base 17: mod_base = OTHER; note = Guanosine phosphorothiorate
  modified_base 18: mod_base = OTHER; note = 2'-Omethylguanosine phosphorothiorate
  modified_base 19: mod_base = OTHER; note = Uridine phosphorothiorate
  modified_base 20: mod_base = OTHER; note = 2'-Omethyluridine phosphorothiorate
  modified_base 25: mod_base = OTHER; note = 2'-Omethylcytosine
  modified_base 29: mod_base = OTHER; note = 2'-Omethylguanosine
  modified_base 33: mod_base = OTHER; note = 2'-fluorouridine
  modified_base 35: mod_base = OTHER; note = Cytosine phosphorothiorate
  modified_base 37: mod_base = OTHER; note = Guanosine phosphorothiorate
  modified_base 38: mod_base = OTHER; note = Adenosine phosphorothiorate
  modified_base 41: mod_base = OTHER; note = 2'-fluorocytosine
  modified_base 42: mod_base = OTHER; note = Adenosine phosphorothiorate
  modified_base 43: mod_base = OTHER; note = 2'-Omethyladenosine
  modified_base 44: mod_base = OTHER; note = 2'-fluorouridine
  modified_base 57: mod_base = OTHER; note = Guanosine phosphorothiorate
  modified_base 60: mod_base = OTHER; note = 2'-Omethyluridine
  modified_base 62: mod_base = OTHER; note = 2'-Omethylguanosine
  modified_base 64: mod_base = OTHER; note = Uridine phosphorothiorate
  modified_base 65: mod_base = OTHER; note = Uridine phosphorothiorate
  modified_base 66: mod_base = OTHER; note = 2'-Omethylcytosine
  modified_base 67: mod_base = OTHER; note = Guanosine phosphorothiorate
  modified_base 68: mod_base = OTHER; note = Adenosine phosphorothiorate
  modified_base 72: mod_base = OTHER; note = 2'-Omethylcytosine
  modified_base 73: mod_base = OTHER; note = 2'-fluorocytosine
  modified_base 75: mod_base = OTHER; note = 2'-Omethylcytosine
  modified_base 81: mod_base = OTHER; note = 2'-Omethylguanosine
  modified_base 83: mod_base = OTHER; note = 2'-Omethyladenosine

SEQ ID NO: 8413 - RNA, 76 nt, synthetic construct
  source 1..76: mol_type = other RNA
ggctctgtggcgcaatggatagcgcataggacttcaaattctaaggttccgggttcgagtcccggcagagtcgcca

SEQ ID NO: 8414 - RNA, 85 nt, synthetic construct; identical to SEQ ID NO: 3310
  source 1..85: mol_type = other RNA
  modified_base 1: mod_base = OTHER; note = 2'-Omethylcytosine
  modified_base 30: mod_base = OTHER; note = 2'-fluoroadenosine
  modified_base 34: mod_base = OTHER; note = 2'-fluorouridine
  modified_base 38: mod_base = OTHER; note = Uridine phosphorothiorate
  modified_base 54: mod_base = OTHER; note = 2'-fluorocytosine
  modified_base 62: mod_base = OTHER; note = Guanosine phosphorothiorate
  modified_base 76: mod_base = OTHER; note = 2'-fluorocytosine
  modified_base 84: mod_base = OTHER; note = 2'-Omethylcytosine

SEQ ID NO: 8415 - RNA, 76 nt, synthetic construct
  source 1..76: mol_type = other RNA
ggctacgtggcgcaatggatagcgcataggacttcaaattctaaggttccgggttcgagtcccggcgtagtcgcca

SEQ ID NO: 8416 - RNA, 75 nt, synthetic construct; identical to SEQ ID NO: 3306
  source 1..75: mol_type = other RNA
  modified_base 1: mod_base = OTHER; note = 2'-Omethylguanosine phosphorothiorate
  modified_base 2: mod_base = OTHER; note = 2'-Omethyladenosine
  modified_base 3: mod_base = OTHER; note = 2'-Omethylcytosine
  modified_base 4: mod_base = OTHER; note = 2'-Omethylcytosine
  modified_base 5: mod_base = OTHER; note = 2'-Omethyluridine
  modified_base 6: mod_base = OTHER; note = 2'-Omethylcytosine
  modified_base 26: mod_base = OTHER; note = 2'-Omethyluridine
  modified_base 27: mod_base = OTHER; note = 2'-Omethylcytosine
  modified_base 28: mod_base = OTHER; note = 2'-Omethyluridine
  modified_base 29: mod_base = OTHER; note = 2'-fluoroguanosine
  modified_base 39: mod_base = OTHER; note = 2'-fluorocytosine
  modified_base 40: mod_base = OTHER; note = 2'-Omethyladenosine
  modified_base 41: mod_base = OTHER; note = 2'-Omethylguanosine
  modified_base 42: mod_base = OTHER; note = 2'-Omethyladenosine
  modified_base 72: mod_base = OTHER; note = 2'-Omethyladenosine

SEQ ID NO: 8417 - RNA, 76 nt, synthetic construct; identical to SEQ ID NO: 625
  source 1..76: mol_type = other RNA
  modified_base 1: mod_base = OTHER; note = 2'-fluoroguanosine phosphorothiorate
  modified_base 3: mod_base = OTHER; note = Cytosine phosphorothiorate
  modified_base 4: mod_base = OTHER; note = 2'-Omethyluridine phosphorothiorate
  modified_base 5: mod_base = OTHER; note = Cytosine phosphorothiorate
  modified_base 6: mod_base = OTHER; note = 2'-Omethylcytosine
  modified_base 10: mod_base = OTHER; note = 2'-fluoroguanosine
  modified_base 14: mod_base = OTHER; note = 2'-fluoroadenosine
  modified_base 18: mod_base = OTHER; note = 2'-fluoroguanosine
  modified_base 19: mod_base = OTHER; note = Adenosine phosphorothiorate
  modified_base 20: mod_base = OTHER; note = 2'-fluorouridine
  modified_base 22: mod_base = OTHER; note = 2'-Omethylguanosine
  modified_base 23: mod_base = OTHER; note = 2'-fluorocytosine
  modified_base 24: mod_base = OTHER; note = 2'-Omethylguanosine
  modified_base 26: mod_base = OTHER; note = 2'-fluoroadenosine
  modified_base 27: mod_base = OTHER; note = Uridine phosphorothiorate
  modified_base 28: mod_base = OTHER; note = 2'-fluorouridine
  modified_base 30: mod_base = OTHER; note = 2'-fluoroguanosine
  modified_base 31: mod_base = OTHER; note = 2'-fluoroadenosine
  modified_base 33: mod_base = OTHER; note = Uridine phosphorothiorate
  modified_base 34: mod_base = OTHER; note = 2'-fluorouridine phosphorothiorate
  modified_base 36: mod_base = OTHER; note = Adenosine phosphorothiorate
  modified_base 41: mod_base = OTHER; note = Cytosine phosphorothiorate
  modified_base 42: mod_base = OTHER; note = 2'-fluoroadenosine
  modified_base 44: mod_base = OTHER; note = Adenosine phosphorothiorate
  modified_base 45: mod_base = OTHER; note = 2'-fluoroguanosine
  modified_base 47: mod_base = OTHER; note = Uridine phosphorothiorate
  modified_base 50: mod_base = OTHER; note = 2'-Omethylcytosine
  modified_base 51: mod_base = OTHER; note = 2'-Omethylguanosine
  modified_base 53: mod_base = OTHER; note = Guanosine phosphorothiorate
  modified_base 58: mod_base = OTHER; note = Adenosine phosphorothiorate
  modified_base 59: mod_base = OTHER; note = 2'-fluoroguanosine
  modified_base 61: mod_base = OTHER; note = 2'-fluorocytosine
  modified_base 63: mod_base = OTHER; note = Cytosine phosphorothiorate
  modified_base 68: mod_base = OTHER; note = 2'-Omethylguanosine
  modified_base 69: mod_base = OTHER; note = Adenosine phosphorothiorate
  modified_base 71: mod_base = OTHER; note = 2'-fluorouridine
  modified_base 74: mod_base = OTHER; note = 2'-fluorocytosine phosphorothiorate
  modified_base 75: mod_base = OTHER; note = 2'-Omethylcytosine

SEQ ID NO: 8418 - RNA, 85 nt, synthetic construct; identical to SEQ ID NO: 3317
  source 1..85: mol_type = other RNA
  modified_base 1: mod_base = OTHER; note = 2'-Omethylguanosine phosphorothiorate
  modified_base 2: mod_base = OTHER; note = Cytosine phosphorothiorate
  modified_base 25: mod_base = OTHER; note = 2'-fluorocytosine phosphorothiorate
  modified_base 30: mod_base = OTHER; note = Guanosine phosphorothiorate
  modified_base 52: mod_base = OTHER; note = 2'-Omethylcytosine phosphorothiorate
  modified_base 58: mod_base = OTHER; note = Guanosine phosphorothiorate
  modified_base 62: mod_base = OTHER; note = 2'-Omethylguanosine
  modified_base 80: mod_base = OTHER; note = 2'-Omethylguanosine
  modified_base 83: mod_base = OTHER; note = Cytosine phosphorothiorate

SEQ ID NO: 8419 - RNA, 86 nt, synthetic construct; identical to SEQ ID NO: 3290
  source 1..86: mol_type = other RNA
  modified_base 18: mod_base = OTHER; note = 2'-Omethylguanosine
  modified_base 39: mod_base = OTHER; note = 2'-Omethyluridine

SEQ ID NO: 8420 - RNA, 76 nt, synthetic construct; identical to SEQ ID NO: 3289
  source 1..76: mol_type = other RNA
  modified_base 1: mod_base = OTHER; note = Guanosine phosphorothiorate
  modified_base 2: mod_base = OTHER; note = Cytosine phosphorothiorate
  modified_base 3: mod_base = OTHER; note = Cytosine phosphorothiorate
  modified_base 50: mod_base = OTHER; note = Adenosine phosphorothiorate
  modified_base 51: mod_base = OTHER; note = Guanosine phosphorothiorate
  modified_base 63: mod_base = OTHER; note = Cytosine phosphorothiorate
  modified_base 64: mod_base = OTHER; note = Uridine phosphorothiorate
  modified_base 65: mod_base = OTHER; note = Guanosine phosphorothiorate
  modified_base 66: mod_base = OTHER; note = Uridine phosphorothiorate
  modified_base 67: mod_base = OTHER; note = Cytosine phosphorothiorate
  modified_base 69: mod_base = OTHER; note = Adenosine phosphorothiorate
  modified_base 70: mod_base = OTHER; note = Guanosine phosphorothiorate
  modified_base 74: mod_base = OTHER; note = Cytosine phosphorothiorate
  modified_base 75: mod_base = OTHER; note = Cytosine phosphorothiorate

SEQ ID NO: 8421 - RNA, 85 nt, synthetic construct; identical to SEQ ID NO: 3288
  source 1..85: mol_type = other RNA
  modified_base 1: mod_base = OTHER; note = 2'-Omethylcytosine phosphorothiorate
  modified_base 2: mod_base = OTHER; note = 2'-Omethylcytosine
  modified_base 6: mod_base = OTHER; note = 2'-fluoroadenosine phosphorothiorate
  modified_base 26: mod_base = OTHER; note = 2'-fluorouridine
  modified_base 27: mod_base = OTHER; note = 2'-fluorouridine
  modified_base 28: mod_base = OTHER; note = 2'-fluoroguanosine
  modified_base 30: mod_base = OTHER; note = 2'-fluoroadenosine
  modified_base 32: mod_base = OTHER; note = 2'-fluorouridine
  modified_base 34: mod_base = OTHER; note = 2'-fluorocytosine phosphorothiorate
  modified_base 35: mod_base = OTHER; note = 2'-fluoroadenosine phosphorothiorate
  modified_base 43: mod_base = OTHER; note = 2'-Omethyluridine
  modified_base 44: mod_base = OTHER; note = Guanosine phosphorothiorate
  modified_base 51: mod_base = OTHER; note = 2'-Omethyluridine
  modified_base 54: mod_base = OTHER; note = 2'-Omethylcytosine
  modified_base 56: mod_base = OTHER; note = 2'-fluoroguanosine
  modified_base 57: mod_base = OTHER; note = 2'-Omethylcytosine
  modified_base 58: mod_base = OTHER; note = 2'-Omethylguanosine
  modified_base 62: mod_base = OTHER; note = Guanosine phosphorothiorate
  modified_base 75: mod_base = OTHER; note = 2'-fluorouridine
  modified_base 76: mod_base = OTHER; note = Cytosine phosphorothiorate
  modified_base 84: mod_base = OTHER; note = Cytosine phosphorothiorate

SEQ ID NO: 8422 - RNA, 76 nt, synthetic construct; identical to SEQ ID NO: 625
  source 1..76: mol_type = other RNA
  modified_base 1: mod_base = OTHER; note = 2'-Omethylguanosine phosphorothiorate
  modified_base 2: mod_base = OTHER; note = 2'-Omethylguanosine phosphorothiorate
  modified_base 3: mod_base = OTHER; note = 2'-Omethylcytosine
  modified_base 4: mod_base = OTHER; note = 2'-Omethyluridine
  modified_base 5: mod_base = OTHER; note = 2'-Omethylcytosine
  modified_base 6: mod_base = OTHER; note = 2'-Omethylcytosine
  modified_base 10: mod_base = OTHER; note = 2'-Omethylguanosine
  modified_base 11: mod_base = OTHER; note = 2'-Omethylcytosine
  modified_base 12: mod_base = OTHER; note = 2'-Omethylguanosine
  modified_base 13: mod_base = OTHER; note = 2'-Omethylcytosine
  modified_base 16: mod_base = OTHER; note = 2'-Omethyluridine
  modified_base 17: mod_base = OTHER; note = 2'-Omethylguanosine
  modified_base 18: mod_base = OTHER; note = 2'-Omethylguanosine
  modified_base 20: mod_base = OTHER; note = 2'-Omethyluridine
  modified_base 22: mod_base = OTHER; note = 2'-Omethylguanosine
  modified_base 23: mod_base = OTHER; note = 2'-Omethylcytosine
  modified_base 24: mod_base = OTHER; note = 2'-Omethylguanosine
  modified_base 25: mod_base = OTHER; note = 2'-Omethylcytosine
  modified_base 33: mod_base = OTHER; note = 2'-fluorouridine
  modified_base 35: mod_base = OTHER; note = Cytosine phosphorothiorate
  modified_base 37: mod_base = OTHER; note = Adenosine phosphorothiorate
  modified_base 38: mod_base = OTHER; note = Adenosine phosphorothiorate
  modified_base 41: mod_base = OTHER; note = 2'-fluorocytosine
  modified_base 42: mod_base = OTHER; note = 2'-Omethyladenosine
  modified_base 43: mod_base = OTHER; note = 2'-Omethyladenosine
  modified_base 44: mod_base = OTHER; note = 2'-fluoroadenosine
  modified_base 49: mod_base = OTHER; note = 2'-Omethylcytosine
  modified_base 50: mod_base = OTHER; note = 2'-Omethylcytosine
  modified_base 52: mod_base = OTHER; note = 2'-Omethylguanosine
  modified_base 54: mod_base = OTHER; note = 2'-Omethyluridine
  modified_base 55: mod_base = OTHER; note = Uridine phosphorothiorate
  modified_base 56: mod_base = OTHER; note = 2'-Omethylcytosine
  modified_base 57: mod_base = OTHER; note = 2'-fluoroguanosine
  modified_base 59: mod_base = OTHER; note = 2'-Omethylguanosine
  modified_base 61: mod_base = OTHER; note = 2'-Omethylcytosine
  modified_base 65: mod_base = OTHER; note = 2'-Omethylguanosine
  modified_base 75: mod_base = OTHER; note = Cytosine phosphorothiorate
  modified_base 76: mod_base = OTHER; note = 2'-Omethyladenosine

SEQ ID NO: 8423 - RNA, 76 nt, synthetic construct; identical to SEQ ID NO: 625
  source 1..76: mol_type = other RNA
  modified_base 1: mod_base = OTHER; note = 2'-Omethylguanosine
  modified_base 2: mod_base = OTHER; note = 2'-Omethylguanosine
  modified_base 3: mod_base = OTHER; note = 2'-Omethylcytosine
  modified_base 4: mod_base = OTHER; note = 2'-Omethyluridine
  modified_base 5: mod_base = OTHER; note = 2'-Omethylcytosine
  modified_base 6: mod_base = OTHER; note = 2'-Omethylcytosine
  modified_base 7: mod_base = OTHER; note = 2'-Omethylguanosine phosphorothiorate
  modified_base 10: mod_base = OTHER; note = 2'-Omethylguanosine
  modified_base 11: mod_base = OTHER; note = 2'-Omethylcytosine
  modified_base 12: mod_base = OTHER; note = 2'-Omethylguanosine
  modified_base 13: mod_base = OTHER; note = 2'-Omethylcytosine
  modified_base 14: mod_base = OTHER; note = 2'-Omethyladenosine
  modified_base 15: mod_base = OTHER; note = 2'-Omethyladenosine
  modified_base 16: mod_base = OTHER; note = 2'-Omethyluridine
  modified_base 17: mod_base = OTHER; note = Guanosine phosphorothiorate
  modified_base 18: mod_base = OTHER; note = 2'-fluoroguanosine phosphorothiorate
  modified_base 19: mod_base = OTHER; note = 2'-Omethyladenosine
  modified_base 20: mod_base = OTHER; note = Uridine phosphorothiorate
  modified_base 21: mod_base = OTHER; note = 2'-fluoroadenosine phosphorothiorate
  modified_base 23: mod_base = OTHER; note = 2'-Omethylcytosine
  modified_base 24: mod_base = OTHER; note = 2'-Omethylguanosine
  modified_base 25: mod_base = OTHER; note = 2'-Omethylcytosine
  modified_base 26: mod_base = OTHER; note = Adenosine phosphorothiorate
  modified_base 29: mod_base = OTHER; note = 2'-fluoroguanosine phosphorothiorate
  modified_base 30: mod_base = OTHER; note = 2'-Omethylguanosine
  modified_base 31: mod_base = OTHER; note = 2'-Omethyladenosine phosphorothiorate
  modified_base 32: mod_base = OTHER; note = 2'-Omethylcytosine phosphorothiorate
  modified_base 33: mod_base = OTHER; note = 2'-fluorouridine
  modified_base 35: mod_base = OTHER; note = 2'-Omethylcytosine phosphorothiorate
  modified_base 36: mod_base = OTHER; note = 2'-Omethyladenosine phosphorothiorate
  modified_base 37: mod_base = OTHER; note = Adenosine phosphorothiorate
  modified_base 38: mod_base = OTHER; note = Adenosine phosphorothiorate
  modified_base 40: mod_base = OTHER; note = 2'-Omethyluridine
  modified_base 41: mod_base = OTHER; note = 2'-fluorocytosine
  modified_base 44: mod_base = OTHER; note = 2'-Omethyladenosine
  modified_base 48: mod_base = OTHER; note = 2'-fluorouridine
  modified_base 49: mod_base = OTHER; note = 2'-Omethylcytosine
  modified_base 50: mod_base = OTHER; note = 2'-Omethylcytosine
  modified_base 52: mod_base = OTHER; note = 2'-Omethylguanosine
  modified_base 54: mod_base = OTHER; note = Uridine phosphorothiorate
  modified_base 55: mod_base = OTHER; note = Uridine phosphorothiorate
  modified_base 56: mod_base = OTHER; note = Cytosine phosphorothiorate
  modified_base 57: mod_base = OTHER; note = 2'-Omethylguanosine
  modified_base 60: mod_base = OTHER; note = 2'-Omethyluridine phosphorothiorate
  modified_base 61: mod_base = OTHER; note = 2'-Omethylcytosine
  modified_base 62: mod_base = OTHER; note = 2'-Omethylcytosine
  modified_base 63: mod_base = OTHER; note = 2'-fluorocytosine
  modified_base 64: mod_base = OTHER; note = 2'-Omethylguanosine
  modified_base 65: mod_base = OTHER; note = 2'-Omethylguanosine phosphorothiorate
  modified_base 66: mod_base = OTHER; note = 2'-Omethylcytosine phosphorothiorate
  modified_base 67: mod_base = OTHER; note = 2'-Omethylguanosine phosphorothiorate
  modified_base 68: mod_base = OTHER; note = 2'-Omethylguanosine
  modified_base 69: mod_base = OTHER; note = 2'-fluoroadenosine
  modified_base 70: mod_base = OTHER; note = 2'-Omethylguanosine
  modified_base 71: mod_base = OTHER; note = 2'-Omethyluridine phosphorothiorate
  modified_base 72: mod_base = OTHER; note = 2'-Omethylcytosine phosphorothiorate
  modified_base 73: mod_base = OTHER; note = 2'-Omethylguanosine
  modified_base 74: mod_base = OTHER; note = 2'-fluorocytosine phosphorothiorate
  modified_base 75: mod_base = OTHER; note = 2'-fluorocytosine phosphorothiorate
  modified_base 76: mod_base = OTHER; note = 2'-fluoroadenosine

SEQ ID NO: 8424 - RNA, 76 nt, synthetic construct; identical to SEQ ID NO: 625
  source 1..76: mol_type = other RNA
  modified_base 1: mod_base = OTHER; note = 2'-Omethylguanosine
  modified_base 2: mod_base = OTHER; note = Guanosine phosphorothiorate
  modified_base 3: mod_base = OTHER; note = 2'-fluorocytosine phosphorothiorate
  modified_base 4: mod_base = OTHER; note = 2'-fluorouridine phosphorothiorate
  modified_base 8: mod_base = OTHER; note = Uridine phosphorothiorate
  modified_base 12: mod_base = OTHER; note = 2'-fluoroguanosine
  modified_base 14: mod_base = OTHER; note = 2'-Omethyladenosine phosphorothiorate
  modified_base 15: mod_base = OTHER; note = 2'-Omethyladenosine
  modified_base 16: mod_base = OTHER; note = 2'-fluorouridine phosphorothiorate
  modified_base 22: mod_base = OTHER; note = 2'-Omethylguanosine
  modified_base 27: mod_base = OTHER; note = Uridine phosphorothiorate
  modified_base 31: mod_base = OTHER; note = 2'-fluoroadenosine
  modified_base 32: mod_base = OTHER; note = 2'-fluorocytosine
  modified_base 33: mod_base = OTHER; note = Uridine phosphorothiorate
  modified_base 34: mod_base = OTHER; note = 2'-fluorouridine
  modified_base 39: mod_base = OTHER; note = 2'-fluorouridine
  modified_base 40: mod_base = OTHER; note = 2'-Omethyluridine
  modified_base 43: mod_base = OTHER; note = 2'-fluoroadenosine
  modified_base 44: mod_base = OTHER; note = 2'-fluoroadenosine
  modified_base 45: mod_base = OTHER; note = Guanosine phosphorothiorate
  modified_base 46: mod_base = OTHER; note = 2'-fluoroguanosine
  modified_base 47: mod_base = OTHER; note = 2'-Omethyluridine
  modified_base 49: mod_base = OTHER; note = Cytosine phosphorothiorate
  modified_base 57: mod_base = OTHER; note = 2'-fluoroguanosine
  modified_base 58: mod_base = OTHER; note = 2'-fluoroadenosine
  modified_base 59: mod_base = OTHER; note = 2'-fluoroguanosine
  modified_base 62: mod_base = OTHER; note = 2'-fluorocytosine
  modified_base 63: mod_base = OTHER; note = 2'-Omethylcytosine
  modified_base 64: mod_base = OTHER; note = 2'-fluoroguanosine phosphorothiorate
  modified_base 65: mod_base = OTHER; note = Guanosine phosphorothiorate
  modified_base 66: mod_base = OTHER; note = 2'-fluorocytosine
  modified_base 68: mod_base = OTHER; note = 2'-fluoroguanosine
  modified_base 70: mod_base = OTHER; note = 2'-Omethylguanosine
  modified_base 71: mod_base = OTHER; note = 2'-Omethyluridine
  modified_base 72: mod_base = OTHER; note = Cytosine phosphorothiorate
  modified_base 73: mod_base = OTHER; note = 2'-Omethylguanosine

SEQ ID NO: 8425 - RNA, 86 nt, synthetic construct; identical to SEQ ID NO: 3290
  source 1..86: mol_type = other RNA
  modified_base 1: mod_base = OTHER; note = 2'-Omethyladenosine
  modified_base 19: mod_base = OTHER; note = 2'-Omethyluridine
  modified_base 20: mod_base = OTHER; note = 2'-Omethyluridine
  modified_base 21: mod_base = OTHER; note = 2'-fluoroadenosine
  modified_base 22: mod_base = OTHER; note = 2'-Omethyladenosine
  modified_base 40: mod_base = OTHER; note = 2'-fluorocytosine
  modified_base 41: mod_base = OTHER; note = 2'-Omethylcytosine
  modified_base 42: mod_base = OTHER; note = 2'-Omethyladenosine
  modified_base 43: mod_base = OTHER; note = 2'-Omethyladenosine
  modified_base 83: mod_base = OTHER; note = 2'-Omethyladenosine

SEQ ID NO: 8426 - RNA, 85 nt, synthetic construct; identical to SEQ ID NO: 3310
  source 1..85: mol_type = other RNA
  modified_base 1: mod_base = OTHER; note = 2'-Omethylcytosine
  modified_base 11: mod_base = OTHER; note = Cytosine phosphorothiorate
  modified_base 26: mod_base = OTHER; note = 2'-fluorouridine
  modified_base 30: mod_base = OTHER; note = 2'-fluoroadenosine
  modified_base 34: mod_base = OTHER; note = 2'-fluorouridine
  modified_base 43: mod_base = OTHER; note = 2'-Omethyluridine
  modified_base 45: mod_base = OTHER; note = 2'-Omethylguanosine
  modified_base 52: mod_base = OTHER; note = Guanosine phosphorothiorate
  modified_base 56: mod_base = OTHER; note = 2'-Omethylguanosine
  modified_base 58: mod_base = OTHER; note = 2'-Omethylguanosine
  modified_base 64: mod_base = OTHER; note = Uridine phosphorothiorate
  modified_base 73: mod_base = OTHER; note = 2'-fluoroadenosine
  modified_base 83: mod_base = OTHER; note = Cytosine phosphorothiorate
  modified_base 84: mod_base = OTHER; note = Cytosine phosphorothiorate

SEQ ID NO: 8427 - RNA, 85 nt, synthetic construct; identical to SEQ ID NO: 3286
  source 1..85: mol_type = other RNA
  modified_base 1: mod_base = OTHER; note = 2'-Omethylcytosine
  modified_base 3: mod_base = OTHER; note = 2'-fluoroadenosine
  modified_base 11: mod_base = OTHER; note = Cytosine phosphorothiorate
  modified_base 30: mod_base = OTHER; note = 2'-fluoroadenosine
  modified_base 46: mod_base = OTHER; note = 2'-Omethyladenosine
  modified_base 49: mod_base = OTHER; note = Uridine phosphorothiorate
  modified_base 54: mod_base = OTHER; note = 2'-fluorocytosine
  modified_base 55: mod_base = OTHER; note = 2'-Omethylcytosine
  modified_base 58: mod_base = OTHER; note = Guanosine phosphorothiorate
  modified_base 72: mod_base = OTHER; note = 2'-fluorocytosine
  modified_base 84: mod_base = OTHER; note = 2'-fluorocytosine phosphorothiorate

SEQ ID NO: 8428 - RNA, 76 nt, synthetic construct; identical to SEQ ID NO: 625
  source 1..76: mol_type = other RNA
  modified_base 4: mod_base = OTHER; note = 2'-fluorouridine
  modified_base 5: mod_base = OTHER; note = 2'-Omethylcytosine
  modified_base 6: mod_base = OTHER; note = Cytosine phosphorothiorate
  modified_base 10: mod_base = OTHER; note = Guanosine phosphorothiorate
  modified_base 11: mod_base = OTHER; note = 2'-fluorocytosine
  modified_base 12: mod_base = OTHER; note = 2'-fluoroguanosine
  modified_base 13: mod_base = OTHER; note = 2'-Omethylcytosine phosphorothiorate
  modified_base 16: mod_base = OTHER; note = Uridine phosphorothiorate
  modified_base 19: mod_base = OTHER; note = Adenosine phosphorothiorate
  modified_base 22: mod_base = OTHER; note = 2'-Omethylguanosine phosphorothiorate
  modified_base 26: mod_base = OTHER; note = 2'-fluoroadenosine
  modified_base 27: mod_base = OTHER; note = 2'-Omethyluridine
  modified_base 29: mod_base = OTHER; note = Guanosine phosphorothiorate
  modified_base 30: mod_base = OTHER; note = Guanosine phosphorothiorate
  modified_base 33: mod_base = OTHER; note = 2'-fluorouridine
  modified_base 38: mod_base = OTHER; note = 2'-fluoroadenosine
  modified_base 43: mod_base = OTHER; note = 2'-fluoroadenosine
  modified_base 45: mod_base = OTHER; note = Guanosine phosphorothiorate
  modified_base 46: mod_base = OTHER; note = Guanosine phosphorothiorate
  modified_base 47: mod_base = OTHER; note = 2'-fluorouridine phosphorothiorate
  modified_base 48: mod_base = OTHER; note = 2'-Omethyluridine
  modified_base 49: mod_base = OTHER; note = 2'-fluorocytosine phosphorothiorate
  modified_base 50: mod_base = OTHER; note = 2'-Omethylcytosine
  modified_base 52: mod_base = OTHER; note = Guanosine phosphorothiorate
  modified_base 53: mod_base = OTHER; note = 2'-Omethylguanosine
  modified_base 54: mod_base = OTHER; note = 2'-Omethyluridine phosphorothiorate
  modified_base 55: mod_base = OTHER; note = Uridine phosphorothiorate
  modified_base 56: mod_base = OTHER; note = 2'-fluorocytosine
  modified_base 57: mod_base = OTHER; note = Guanosine phosphorothiorate
  modified_base 58: mod_base = OTHER; note = 2'-fluoroadenosine
  modified_base 63: mod_base = OTHER; note = 2'-Omethylcytosine
  modified_base 65: mod_base = OTHER; note = 2'-fluoroguanosine phosphorothiorate
  modified_base 66: mod_base = OTHER; note = 2'-fluorocytosine
  modified_base 68: mod_base = OTHER; note = 2'-Omethylguanosine
  modified_base 69: mod_base = OTHER; note = 2'-fluoroadenosine
  modified_base 72: mod_base = OTHER; note = 2'-Omethylcytosine
  modified_base 73: mod_base = OTHER; note = 2'-fluoroguanosine phosphorothiorate
  modified_base 74: mod_base = OTHER; note = 2'-Omethylcytosine

SEQ ID NO: 8429 - RNA, 76 nt, synthetic construct; identical to SEQ ID NO: 3318
  source 1..76: mol_type = other RNA
  modified_base 1: mod_base = OTHER; note = 2'-Omethylcytosine phosphorothiorate
  modified_base 2: mod_base = OTHER; note = 2'-Omethylcytosine
  modified_base 3: mod_base = OTHER; note = 2'-Omethyluridine
  modified_base 4: mod_base = OTHER; note = 2'-Omethyluridine
  modified_base 5: mod_base = OTHER; note = 2'-Omethylcytosine
  modified_base 6: mod_base = OTHER; note = 2'-Omethylguanosine
  modified_base 16: mod_base = OTHER; note = 2'-Omethyluridine
  modified_base 18: mod_base = OTHER; note = 2'-Omethylguanosine
  modified_base 19: mod_base = OTHER; note = 2'-Omethylguanosine
  modified_base 54: mod_base = OTHER; note = 2'-Omethyluridine phosphorothiorate
  modified_base 55: mod_base = OTHER; note = Uridine phosphorothiorate
  modified_base 56: mod_base = OTHER; note = 2'-Omethylcytosine
  modified_base 57: mod_base = OTHER; note = 2'-fluoroguanosine
  modified_base 59: mod_base = OTHER; note = 2'-Omethyladenosine
  modified_base 73: mod_base = OTHER; note = 2'-Omethyladenosine

SEQ ID NO: 8430 - RNA, 76 nt, synthetic construct; identical to SEQ ID NO: 3289
  source 1..76: mol_type = other RNA
  modified_base 52: mod_base = OTHER; note = 2'-Omethylguanosine
  modified_base 62: mod_base = OTHER; note = 2'-Omethylcytosine

SEQ ID NO: 8431 - DNA, 76 bp, synthetic construct; identical to SEQ ID NO: 1924
  source 1..76: mol_type = other DNA
  modified_base 1: mod_base = OTHER; note = 2'-Omethylguanosine
  modified_base 2: mod_base = OTHER; note = Guanosine phosphorothiorate
  modified_base 3: mod_base = OTHER; note = 2'-fluorocytosine
  modified_base 4: mod_base = OTHER; note = Uridine phosphorothiorate
  modified_base 5: mod_base = OTHER; note = 2'-fluorocytosine
  modified_base 8: mod_base = OTHER; note = Uridine phosphorothiorate
  modified_base 9: mod_base = OTHER; note = 2'-Omethylguanosine
  modified_base 13: mod_base = OTHER; note = 2'-Omethylcytosine phosphorothiorate
  modified_base 15: mod_base = OTHER; note = Adenosine phosphorothiorate
  modified_base 16: mod_base = OTHER; note = 2'-O-(2-Methoxyethyl) thymine
  modified_base 21: mod_base = OTHER; note = 2'-O-(2-Methoxyethyl) adenosine
  modified_base 22: mod_base = OTHER; note = Guanosine phosphorothiorate
  modified_base 24: mod_base = OTHER; note = Guanosine phosphorothiorate
  modified_base 25: mod_base = OTHER; note = 2'-Omethylcytosine
  modified_base 27: mod_base = OTHER; note = deoxyuridine phosphorothiorate
  modified_base 31: mod_base = OTHER; note = 2'-Omethyladenosine phosphorothiorate
  modified_base 32: mod_base = OTHER; note = 2'-O-(2-Methoxyethyl) 5-methylcytosine
  modified_base 33: mod_base = OTHER; note = Uridine phosphorothiorate
  modified_base 34: mod_base = OTHER; note = 2'-O-(2-Methoxyethyl) thymine phosphorothiorate
  modified_base 36: mod_base = OTHER; note = Adenosine phosphorothiorate
  modified_base 37: mod_base = OTHER; note = Adenosine phosphorothiorate
  modified_base 38: mod_base = OTHER; note = 2'-fluoroadenosine
  modified_base 39: mod_base = OTHER; note = Uridine phosphorothiorate
  modified_base 41: mod_base = OTHER; note = 2'-O-(2-Methoxyethyl) 5-methylcytosine
  modified_base 43: mod_base = OTHER; note = Adenosine phosphorothiorate
  modified_base 45: mod_base = OTHER; note = Guanosine phosphorothiorate
  modified_base 47: mod_base = OTHER; note = Uridine phosphorothiorate
  modified_base 48: mod_base = OTHER; note = 2'-Omethyluridine
  modified_base 58: mod_base = OTHER; note = Adenosine phosphorothiorate
  modified_base 60: mod_base = OTHER; note = Uridine phosphorothiorate
  modified_base 61: mod_base = OTHER; note = Cytosine phosphorothiorate
  modified_base 73: mod_base = OTHER; note = Guanosine phosphorothiorate
  modified_base 74: mod_base = OTHER; note = deoxycytosine phosphorothiorate
  modified_base 75: mod_base = OTHER; note = Cytosine phosphorothiorate
  modified_base 76: mod_base = OTHER; note = 2'-Omethyladenosine
  misc_feature 1..26: note = RNA
  misc_feature 27: note = DNA
  misc_feature 28..39: note = RNA
  misc_feature 40: note = DNA
  misc_feature 41..43: note = RNA
  misc_feature 44: note = DNA
  misc_feature 45..50: note = RNA
  misc_feature 51: note = DNA
  misc_feature 52: note = RNA
  misc_feature 53: note = DNA
  misc_feature 54..73: note = RNA
  misc_feature 74: note = DNA
  misc_feature 75..76: note = RNA

SEQ ID NO: 8432 - RNA, 86 nt, synthetic construct; identical to SEQ ID NO: 3290
  source 1..86: mol_type = other RNA
  modified_base 1: mod_base = OTHER; note = 2'-Omethyladenosine
  modified_base 2: mod_base = OTHER; note = 2'-Omethylcytosine
  modified_base 3: mod_base = OTHER; note = 2'-Omethylcytosine
  modified_base 4: mod_base = OTHER; note = 2'-Omethyladenosine
  modified_base 5: mod_base = OTHER; note = 2'-Omethylguanosine
  modified_base 6: mod_base = OTHER; note = 2'-Omethylguanosine
  modified_base 10: mod_base = OTHER; note = 2'-Omethylguanosine
  modified_base 11: mod_base = OTHER; note = 2'-Omethylcytosine
  modified_base 12: mod_base = OTHER; note = 2'-Omethylcytosine
  modified_base 13: mod_base = OTHER; note = 2'-Omethylguanosine
  modified_base 22: mod_base = OTHER; note = 2'-Omethyladenosine
  modified_base 23: mod_base = OTHER; note = 2'-Omethylguanosine
  modified_base 24: mod_base = OTHER; note = 2'-Omethylguanosine
  modified_base 25: mod_base = OTHER; note = 2'-Omethylcytosine
  modified_base 59: mod_base = OTHER; note = 2'-Omethylguanosine
  modified_base 60: mod_base = OTHER; note = 2'-Omethyluridine
  modified_base 61: mod_base = OTHER; note = 2'-Omethylguanosine
  modified_base 62: mod_base = OTHER; note = 2'-Omethylguanosine
  modified_base 63: mod_base = OTHER; note = 2'-Omethylguanosine
  modified_base 76: mod_base = OTHER; note = 2'-Omethyluridine
  modified_base 77: mod_base = OTHER; note = 2'-Omethylcytosine
  modified_base 78: mod_base = OTHER; note = 2'-Omethylcytosine
  modified_base 83: mod_base = OTHER; note = 2'-Omethyladenosine

SEQ ID NO: 8433 - RNA, 76 nt, synthetic construct
  source 1..76: mol_type = other RNA
gggtgagtggcgcaatggatagcgcattggacttcaaattcaaaggttccgggttcgagtcccggctcactcgcca

SEQ ID NO: 8434 - RNA, 85 nt, synthetic construct; identical to SEQ ID NO: 3297
  source 1..85: mol_type = other RNA
  modified_base 1: mod_base = OTHER; note = 2'-Omethylguanosine phosphorothiorate
  modified_base 2: mod_base = OTHER; note = 2'-Omethylcytosine
  modified_base 5: mod_base = OTHER; note = 2'-fluorouridine phosphorothiorate
  modified_base 18: mod_base = OTHER; note = 2'-fluoroguanosine
  modified_base 19: mod_base = OTHER; note = Uridine phosphorothiorate
  modified_base 43: mod_base = OTHER; note = 2'-Omethyladenosine phosphorothiorate
  modified_base 51: mod_base = OTHER; note = 2'-Omethyluridine
  modified_base 82: mod_base = OTHER; note = 2'-Omethylguanosine
  modified_base 84: mod_base = OTHER; note = 2'-fluorocytosine phosphorothiorate

SEQ ID NO: 8435 - RNA, 85 nt, synthetic construct; identical to SEQ ID NO: 3288
  source 1..85: mol_type = other RNA
  modified_base 1: mod_base = OTHER; note = 2'-Omethylcytosine
  modified_base 11: mod_base = OTHER; note = Cytosine phosphorothiorate
  modified_base 17: mod_base = OTHER; note = 2'-Omethylguanosine
  modified_base 26: mod_base = OTHER; note = 2'-Omethyluridine
  modified_base 28: mod_base = OTHER; note = 2'-fluoroguanosine
  modified_base 32: mod_base = OTHER; note = 2'-fluorouridine
  modified_base 36: mod_base = OTHER; note = Guanosine phosphorothiorate
  modified_base 42: mod_base = OTHER; note = Adenosine phosphorothiorate
  modified_base 64: mod_base = OTHER; note = Uridine phosphorothiorate
  modified_base 84: mod_base = OTHER; note = 2'-Omethylcytosine

SEQ ID NO: 8436 - RNA, 76 nt, synthetic construct; identical to SEQ ID NO: 625
  source 1..76: mol_type = other RNA
  modified_base 1: mod_base = OTHER; note = 2'-Omethylguanosine phosphorothiorate
  modified_base 2: mod_base = OTHER; note = 2'-Omethylguanosine phosphorothiorate
  modified_base 3: mod_base = OTHER; note = 2'-Omethylcytosine
  modified_base 4: mod_base = OTHER; note = 2'-Omethyluridine
  modified_base 5: mod_base = OTHER; note = 2'-Omethylcytosine
  modified_base 6: mod_base = OTHER; note = 2'-Omethylcytosine
  modified_base 10: mod_base = OTHER; note = 2'-Omethylguanosine
  modified_base 11: mod_base = OTHER; note = 2'-Omethylcytosine
  modified_base 12: mod_base = OTHER; note = 2'-Omethylguanosine
  modified_base 13: mod_base = OTHER; note = 2'-Omethylcytosine
  modified_base 14: mod_base = OTHER; note = 2'-Omethyladenosine
  modified_base 15: mod_base = OTHER; note = 2'-fluoroadenosine
  modified_base 16: mod_base = OTHER; note = 2'-Omethyluridine
  modified_base 17: mod_base = OTHER; note = 2'-Omethylguanosine
  modified_base 18: mod_base = OTHER; note = 2'-Omethylguanosine
  modified_base 19: mod_base = OTHER; note = 2'-fluoroadenosine
  modified_base 20: mod_base = OTHER; note = 2'-Omethyluridine
  modified_base 22: mod_base = OTHER; note = 2'-Omethylguanosine
  modified_base 23: mod_base = OTHER; note = 2'-Omethylcytosine
  modified_base 24: mod_base = OTHER; note = 2'-Omethylguanosine
  modified_base 25: mod_base = OTHER; note = 2'-Omethylcytosine
  modified_base 33: mod_base = OTHER; note = 2'-fluorouridine
  modified_base 35: mod_base = OTHER; note = Cytosine phosphorothiorate
  modified_base 37: mod_base = OTHER; note = Adenosine phosphorothiorate
  modified_base 38: mod_base = OTHER; note = Adenosine phosphorothiorate
  modified_base 44: mod_base = OTHER; note = 2'-Omethyladenosine
  modified_base 45: mod_base = OTHER; note = 2'-Omethylguanosine
  modified_base 46: mod_base = OTHER; note = 2'-Omethylguanosine
  modified_base 49: mod_base = OTHER; note = 2'-Omethylcytosine
  modified_base 50: mod_base = OTHER; note = 2'-Omethylcytosine
  modified_base 51: mod_base = OTHER; note = 2'-Omethylguanosine
  modified_base 52: mod_base = OTHER; note = 2'-Omethylguanosine
  modified_base 53: mod_base = OTHER; note = 2'-Omethylguanosine
  modified_base 54: mod_base = OTHER; note = 2'-Omethyluridine
  modified_base 56: mod_base = OTHER; note = 2'-Omethylcytosine
  modified_base 59: mod_base = OTHER; note = 2'-Omethylguanosine
  modified_base 61: mod_base = OTHER; note = 2'-Omethylcytosine
  modified_base 62: mod_base = OTHER; note = 2'-Omethylcytosine
  modified_base 63: mod_base = OTHER; note = 2'-fluorocytosine
  modified_base 64: mod_base = OTHER; note = 2'-Omethylguanosine
  modified_base 65: mod_base = OTHER; note = 2'-Omethylguanosine
  modified_base 66: mod_base = OTHER; note = 2'-Omethylcytosine
  modified_base 67: mod_base = OTHER; note = 2'-Omethylguanosine
  modified_base 68: mod_base = OTHER; note = 2'-Omethylguanosine
  modified_base 73: mod_base = OTHER; note = 2'-Omethylguanosine

SEQ ID NO: 8437 - RNA, 86 nt, synthetic construct; identical to SEQ ID NO: 3290
  source 1..86: mol_type = other RNA
  modified_base 1: mod_base = OTHER; note = 2'-Omethyladenosine phosphorothiorate
  modified_base 2: mod_base = OTHER; note = 2'-Omethylcytosine phosphorothiorate
  modified_base 38: mod_base = OTHER; note = Adenosine phosphorothiorate
  modified_base 39: mod_base = OTHER; note = Uridine phosphorothiorate
  modified_base 40: mod_base = OTHER; note = 2'-fluorocytosine
  modified_base 62: mod_base = OTHER; note = 2'-fluoroguanosine
  modified_base 84: mod_base = OTHER; note = Cytosine phosphorothiorate
  modified_base 85: mod_base = OTHER; note = 2'-Omethylcytosine phosphorothiorate
  modified_base 86: mod_base = OTHER; note = 2'-Omethyladenosine

SEQ ID NO: 8438 - RNA, 86 nt, synthetic construct; identical to SEQ ID NO: 3290
  source 1..86: mol_type = other RNA
  modified_base 11: mod_base = OTHER; note = 2'-Omethylcytosine

SEQ ID NO: 8439 - RNA, 85 nt, synthetic construct; identical to SEQ ID NO: 3301
  source 1..85: mol_type = other RNA
  modified_base 1: mod_base = OTHER; note = 2'-Omethylguanosine phosphorothiorate
  modified_base 2: mod_base = OTHER; note = 2'-Omethylcytosine phosphorothiorate
  modified_base 4: mod_base = OTHER; note = 2'-Omethylguanosine phosphorothiorate
  modified_base 11: mod_base = OTHER; note = 2'-fluorocytosine
  modified_base 17: mod_base = OTHER; note = 2'-Omethylguanosine
  modified_base 18: mod_base = OTHER; note = 2'-fluoroguanosine
  modified_base 19: mod_base = OTHER; note = 2'-Omethyluridine
  modified_base 23: mod_base = OTHER; note = Guanosine phosphorothiorate
  modified_base 29: mod_base = OTHER; note = 2'-fluoroguanosine
  modified_base 33: mod_base = OTHER; note = 2'-fluorouridine
  modified_base 34: mod_base = OTHER; note = 2'-fluorouridine
  modified_base 35: mod_base = OTHER; note = 2'-Omethyluridine
  modified_base 37: mod_base = OTHER; note = Adenosine phosphorothiorate
  modified_base 44: mod_base = OTHER; note = 2'-fluorouridine
  modified_base 52: mod_base = OTHER; note = Cytosine phosphorothiorate
  modified_base 53: mod_base = OTHER; note = 2'-fluorocytosine
  modified_base 59: mod_base = OTHER; note = 2'-Omethylcytosine phosphorothiorate
  modified_base 68: mod_base = OTHER; note = Adenosine phosphorothiorate
  modified_base 74: mod_base = OTHER; note = 2'-fluorocytosine
  modified_base 83: mod_base = OTHER; note = 2'-fluorocytosine
  modified_base 84: mod_base = OTHER; note = 2'-Omethylcytosine

SEQ ID NO: 8440 - RNA, 85 nt, synthetic construct; identical to SEQ ID NO: 3297
  source 1..85: mol_type = other RNA
  modified_base 1: mod_base = OTHER; note = 2'-Omethylguanosine
  modified_base 2: mod_base = OTHER; note = 2'-Omethylcytosine
  modified_base 3: mod_base = OTHER; note = 2'-Omethyluridine
  modified_base 4: mod_base = OTHER; note = 2'-Omethylguanosine
  modified_base 5: mod_base = OTHER; note = 2'-Omethyluridine
  modified_base 6: mod_base = OTHER; note = 2'-Omethylguanosine
  modified_base 13: mod_base = OTHER; note = 2'-Omethylguanosine
  modified_base 14: mod_base = OTHER; note = 2'-Omethyladenosine
  modified_base 15: mod_base = OTHER; note = 2'-Omethylguanosine
  modified_base 16: mod_base = OTHER; note = 2'-Omethyluridine
  modified_base 17: mod_base = OTHER; note = 2'-Omethylguanosine
  modified_base 18: mod_base = OTHER; note = 2'-Omethylguanosine
  modified_base 19: mod_base = OTHER; note = Uridine phosphorothiorate
  modified_base 20: mod_base = OTHER; note = 2'-Omethyluridine
  modified_base 21: mod_base = OTHER; note = Adenosine phosphorothiorate
  modified_base 25: mod_base = OTHER; note = 2'-Omethylcytosine
  modified_base 33: mod_base = OTHER; note = 2'-fluorouridine
  modified_base 34: mod_base = OTHER; note = 2'-Omethyluridine
  modified_base 35: mod_base = OTHER; note = Cytosine phosphorothiorate
  modified_base 37: mod_base = OTHER; note = Adenosine phosphorothiorate
  modified_base 38: mod_base = OTHER; note = Adenosine phosphorothiorate
  modified_base 41: mod_base = OTHER; note = 2'-fluorocytosine
  modified_base 42: mod_base = OTHER; note = 2'-Omethyladenosine
  modified_base 43: mod_base = OTHER; note = 2'-Omethyladenosine
  modified_base 44: mod_base = OTHER; note = 2'-fluorouridine
  modified_base 58: mod_base = OTHER; note = 2'-Omethylguanosine
  modified_base 59: mod_base = OTHER; note = 2'-Omethylcytosine
  modified_base 60: mod_base = OTHER; note = 2'-Omethyladenosine
  modified_base 61: mod_base = OTHER; note = 2'-Omethylguanosine
  modified_base 62: mod_base = OTHER; note = 2'-Omethylguanosine
  modified_base 63: mod_base = OTHER; note = Uridine phosphorothiorate
  modified_base 64: mod_base = OTHER; note = Uridine phosphorothiorate
  modified_base 70: mod_base = OTHER; note = 2'-Omethylcytosine
  modified_base 74: mod_base = OTHER; note = 2'-Omethylcytosine
  modified_base 82: mod_base = OTHER; note = 2'-Omethylguanosine

SEQ ID NO: 8441 - RNA, 76 nt, synthetic construct; identical to SEQ ID NO: 625
  source 1..76: mol_type = other RNA
  modified_base 1: mod_base = OTHER; note = Guanosine phosphorothiorate
  modified_base 2: mod_base = OTHER; note = Guanosine phosphorothiorate
  modified_base 3: mod_base = OTHER; note = Cytosine phosphorothiorate
  modified_base 4: mod_base = OTHER; note = Uridine phosphorothiorate
  modified_base 5: mod_base = OTHER; note = Cytosine phosphorothiorate
  modified_base 6: mod_base = OTHER; note = Cytosine phosphorothiorate
  modified_base 7: mod_base = OTHER; note = Guanosine phosphorothiorate

SEQ ID NO: 8442 - RNA, 86 nt, synthetic construct; identical to SEQ ID NO: 3290
  source 1..86: mol_type = other RNA
  modified_base 28: mod_base = OTHER; note = 2'-fluorouridine

SEQ ID NO: 8443 - RNA, 76 nt, synthetic construct; identical to SEQ ID NO: 625
  source 1..76: mol_type = other RNA
  modified_base 1: mod_base = OTHER; note = 2'-Omethylguanosine phosphorothiorate
  modified_base 2: mod_base = OTHER; note = 2'-Omethylguanosine phosphorothiorate
  modified_base 3: mod_base = OTHER; note = 2'-Omethylcytosine
  modified_base 4: mod_base = OTHER; note = 2'-Omethyluridine
  modified_base 5: mod_base = OTHER; note = 2'-Omethylcytosine
  modified_base 6: mod_base = OTHER; note = 2'-Omethylcytosine
  modified_base 10: mod_base = OTHER; note = 2'-Omethylguanosine
  modified_base 11: mod_base = OTHER; note = 2'-Omethylcytosine
  modified_base 12: mod_base = OTHER; note = 2'-Omethylguanosine
  modified_base 13: mod_base = OTHER; note = 2'-Omethylcytosine
  modified_base 14: mod_base = OTHER; note = 2'-Omethyladenosine
  modified_base 15: mod_base = OTHER; note = 2'-Omethyladenosine
  modified_base 16: mod_base = OTHER; note = 2'-Omethyluridine
  modified_base 17: mod_base = OTHER; note = 2'-Omethylguanosine
  modified_base 18: mod_base = OTHER; note = 2'-Omethylguanosine
  modified_base 20: mod_base = OTHER; note = 2'-Omethyluridine
  modified_base 22: mod_base = OTHER; note = 2'-Omethylguanosine
  modified_base 23: mod_base = OTHER; note = 2'-Omethylcytosine
  modified_base 24: mod_base = OTHER; note = 2'-Omethylguanosine
  modified_base 25: mod_base = OTHER; note = 2'-Omethylcytosine
  modified_base 33: mod_base = OTHER; note = 2'-fluorouridine
  modified_base 35: mod_base = OTHER; note = Cytosine phosphorothiorate
  modified_base 37: mod_base = OTHER; note = Adenosine phosphorothiorate
  modified_base 38: mod_base = OTHER; note = Adenosine phosphorothiorate
  modified_base 49: mod_base = OTHER; note = 2'-Omethylcytosine
  modified_base 50: mod_base = OTHER; note = 2'-Omethylcytosine
  modified_base 52: mod_base = OTHER; note = 2'-Omethylguanosine
  modified_base 54: mod_base = OTHER; note = 2'-Omethyluridine
  modified_base 55: mod_base = OTHER; note = Uridine phosphorothiorate
  modified_base 56: mod_base = OTHER; note = 2'-Omethylcytosine
  modified_base 57: mod_base = OTHER; note = 2'-fluoroguanosine
  modified_base 59: mod_base = OTHER; note = 2'-Omethylguanosine
  modified_base 61: mod_base = OTHER; note = 2'-Omethylcytosine
  modified_base 65: mod_base = OTHER; note = 2'-Omethylguanosine
  modified_base 74: mod_base = OTHER; note = Cytosine phosphorothiorate
  modified_base 75: mod_base = OTHER; note = 2'-Omethylcytosine phosphorothiorate

SEQ ID NO: 8444 - RNA, 85 nt, synthetic construct; identical to SEQ ID NO: 3297
  source 1..85: mol_type = other RNA
  modified_base 1: mod_base = OTHER; note = 2'-Omethylguanosine phosphorothiorate
  modified_base 2: mod_base = OTHER; note = Cytosine phosphorothiorate
  modified_base 18: mod_base = OTHER; note = Guanosine phosphorothiorate
  modified_base 24: mod_base = OTHER; note = 2'-fluoroguanosine
  modified_base 37: mod_base = OTHER; note = Adenosine phosphorothiorate
  modified_base 53: mod_base = OTHER; note = 2'-Omethylcytosine
  modified_base 82: mod_base = OTHER; note = 2'-Omethylguanosine phosphorothiorate

SEQ ID NO: 8445 - RNA, 74 nt, synthetic construct; identical to SEQ ID NO: 3293
  source 1..74: mol_type = other RNA
  modified_base 1: mod_base = OTHER; note = 2'-fluoroadenosine phosphorothiorate
  modified_base 11: mod_base = OTHER; note = 2'-Omethylguanosine
  modified_base 34: mod_base = OTHER; note = 2'-fluoroadenosine
  modified_base 40: mod_base = OTHER; note = 2'-fluoroguanosine
  modified_base 46: mod_base = OTHER; note = Uridine phosphorothiorate
  modified_base 70: mod_base = OTHER; note = 2'-fluorocytosine
  modified_base 73: mod_base = OTHER; note = 2'-Omethylcytosine phosphorothiorate

SEQ ID NO: 8446 - RNA, 75 nt, synthetic construct; identical to SEQ ID NO: 3299
  source 1..75: mol_type = other RNA
  modified_base 1: mod_base = OTHER; note = 2'-Omethylcytosine phosphorothiorate
  modified_base 7: mod_base = OTHER; note = 2'-fluorouridine
  modified_base 19: mod_base = OTHER; note = 2'-fluorouridine
  modified_base 21: mod_base = OTHER; note = 2'-fluoroguanosine
  modified_base 46: mod_base = OTHER; note = 2'-fluorouridine
  modified_base 48: mod_base = OTHER; note = 2'-fluorocytosine
  modified_base 49: mod_base = OTHER; note = Adenosine phosphorothiorate
  modified_base 58: mod_base = OTHER; note = 2'-fluoroguanosine
  modified_base 63: mod_base = OTHER; note = 2'-Omethyluridine
  modified_base 73: mod_base = OTHER; note = Cytosine phosphorothiorate
  modified_base 74: mod_base = OTHER; note = 2'-Omethylcytosine

SEQ ID NO: 8447 - RNA, 76 nt, synthetic construct; identical to SEQ ID NO: 625
  source 1..76: mol_type = other RNA
  modified_base 1: mod_base = OTHER; note = 2'-Omethylguanosine phosphorothiorate
  modified_base 2: mod_base = OTHER; note = 2'-Omethylguanosine
  modified_base 3: mod_base = OTHER; note = 2'-Omethylcytosine
  modified_base 4: mod_base = OTHER; note = 2'-Omethyluridine
  modified_base 5: mod_base = OTHER; note = 2'-Omethylcytosine
  modified_base 6: mod_base = OTHER; note = 2'-Omethylcytosine
  modified_base 10: mod_base = OTHER; note = 2'-Omethylguanosine
  modified_base 11: mod_base = OTHER; note = 2'-Omethylcytosine
  modified_base 12: mod_base = OTHER; note = 2'-Omethylguanosine
  modified_base 13: mod_base = OTHER; note = 2'-Omethylcytosine
  modified_base 17: mod_base = OTHER; note = 2'-Omethylguanosine
  modified_base 22: mod_base = OTHER; note = 2'-Omethylguanosine
  modified_base 23: mod_base = OTHER; note = 2'-Omethylcytosine
  modified_base 24: mod_base = OTHER; note = 2'-Omethylguanosine
  modified_base 25: mod_base = OTHER; note = 2'-Omethylcytosine
  modified_base 33: mod_base = OTHER; note = 2'-fluorouridine
  modified_base 35: mod_base = OTHER; note = Cytosine phosphorothiorate
  modified_base 37: mod_base = OTHER; note = Adenosine phosphorothiorate
  modified_base 38: mod_base = OTHER; note = Adenosine phosphorothiorate
  modified_base 48: mod_base = OTHER; note = 2'-fluorouridine
  modified_base 49: mod_base = OTHER; note = 2'-Omethylcytosine
  modified_base 50: mod_base = OTHER; note = 2'-Omethylcytosine
  modified_base 51: mod_base = OTHER; note = 2'-Omethylguanosine
  modified_base 52: mod_base = OTHER; note = 2'-fluoroguanosine
  modified_base 53: mod_base = OTHER; note = 2'-Omethylguanosine
  modified_base 54: mod_base = OTHER; note = 2'-Omethyluridine
  modified_base 56: mod_base = OTHER; note = 2'-Omethylcytosine
  modified_base 57: mod_base = OTHER; note = 2'-fluoroguanosine
  modified_base 59: mod_base = OTHER; note = 2'-Omethylguanosine
  modified_base 61: mod_base = OTHER; note = 2'-Omethylcytosine
  modified_base 62: mod_base = OTHER; note = 2'-Omethylcytosine
  modified_base 63: mod_base = OTHER; note = 2'-fluorocytosine
  modified_base 64: mod_base = OTHER; note = 2'-Omethylguanosine
  modified_base 65: mod_base = OTHER; note = 2'-Omethylguanosine
  modified_base 66: mod_base = OTHER; note = 2'-Omethylcytosine
  modified_base 67: mod_base = OTHER; note = 2'-Omethylguanosine
  modified_base 68: mod_base = OTHER; note = 2'-Omethylguanosine
  modified_base 73: mod_base = OTHER; note = 2'-Omethylguanosine
  modified_base 75: mod_base = OTHER; note = 2'-fluorocytosine phosphorothiorate

SEQ ID NO: 8448 - RNA, 76 nt, synthetic construct; identical to SEQ ID NO: 3318
  source 1..76: mol_type = other RNA
  modified_base 1: mod_base = OTHER; note = 2'-Omethylcytosine
  modified_base 13: mod_base = OTHER; note = 2'-Omethylcytosine
  modified_base 14: mod_base = OTHER; note = 2'-Omethyladenosine
  modified_base 15: mod_base = OTHER; note = 2'-Omethylguanosine
  modified_base 16: mod_base = OTHER; note = 2'-Omethyluridine
  modified_base 18: mod_base = OTHER; note = 2'-Omethylguanosine
  modified_base 19: mod_base = OTHER; note = 2'-Omethylguanosine
  modified_base 20: mod_base = OTHER; note = Uridine phosphorothiorate
  modified_base 21: mod_base = OTHER; note = Adenosine phosphorothiorate
  modified_base 25: mod_base = OTHER; note = 2'-Omethylcytosine
  modified_base 33: mod_base = OTHER; note = 2'-fluorouridine
  modified_base 34: mod_base = OTHER; note = 2'-Omethylcytosine
  modified_base 35: mod_base = OTHER; note = Uridine phosphorothiorate
  modified_base 37: mod_base = OTHER; note = Guanosine phosphorothiorate
  modified_base 38: mod_base = OTHER; note = Adenosine phosphorothiorate
  modified_base 41: mod_base = OTHER; note = 2'-Omethylcytosine
  modified_base 42: mod_base = OTHER; note = 2'-Omethyluridine
  modified_base 43: mod_base = OTHER; note = 2'-Omethyluridine
  modified_base 44: mod_base = OTHER; note = 2'-Omethyladenosine
  modified_base 49: mod_base = OTHER; note = 2'-Omethylguanosine
  modified_base 50: mod_base = OTHER; note = 2'-Omethylcytosine
  modified_base 52: mod_base = OTHER; note = 2'-Omethylguanosine
  modified_base 54: mod_base = OTHER; note = Uridine phosphorothiorate
  modified_base 55: mod_base = OTHER; note = Uridine phosphorothiorate
  modified_base 61: mod_base = OTHER; note = 2'-Omethylcytosine
  modified_base 65: mod_base = OTHER; note = 2'-Omethylcytosine
  modified_base 73: mod_base = OTHER; note = 2'-Omethyladenosine

SEQ ID NO: 8449 - RNA, 85 nt, synthetic construct; identical to SEQ ID NO: 3297
  source 1..85: mol_type = other RNA
  modified_base 1: mod_base = OTHER; note = 2'-Omethylguanosine
  modified_base 2: mod_base = OTHER; note = 2'-Omethylcytosine
  modified_base 3: mod_base = OTHER; note = 2'-Omethyluridine
  modified_base 4: mod_base = OTHER; note = 2'-Omethylguanosine
  modified_base 5: mod_base = OTHER; note = 2'-Omethyluridine
  modified_base 6: mod_base = OTHER; note = 2'-Omethylguanosine
  modified_base 10: mod_base = OTHER; note = 2'-Omethylguanosine
  modified_base 11: mod_base = OTHER; note = 2'-Omethylcytosine
  modified_base 12: mod_base = OTHER; note = 2'-Omethylcytosine
  modified_base 13: mod_base = OTHER; note = 2'-Omethylguanosine
  modified_base 22: mod_base = OTHER; note = 2'-Omethyladenosine
  modified_base 23: mod_base = OTHER; note = 2'-Omethylguanosine
  modified_base 24: mod_base = OTHER; note = 2'-Omethylguanosine
  modified_base 25: mod_base = OTHER; note = 2'-Omethylcytosine
  modified_base 58: mod_base = OTHER; note = 2'-Omethylguanosine
  modified_base 59: mod_base = OTHER; note = 2'-Omethylcytosine
  modified_base 60: mod_base = OTHER; note = 2'-Omethyladenosine
  modified_base 61: mod_base = OTHER; note = 2'-Omethylguanosine
  modified_base 62: mod_base = OTHER; note = 2'-Omethylguanosine
  modified_base 75: mod_base = OTHER; note = 2'-Omethyluridine
  modified_base 76: mod_base = OTHER; note = 2'-Omethylcytosine
  modified_base 77: mod_base = OTHER; note = 2'-Omethyladenosine
  modified_base 82: mod_base = OTHER; note = 2'-Omethylguanosine

SEQ ID NO: 8450 - RNA, 75 nt, synthetic construct
  source 1..75: mol_type = other RNA
gctccgtggcgcaatggatagcgcattggacttcaaattcaaaggttccgggttcgagtcccggcggagtcgcca

SEQ ID NO: 8451 - RNA, 86 nt, synthetic construct; identical to SEQ ID NO: 3290
  source 1..86: mol_type = other RNA
  modified_base 1: mod_base = OTHER; note = 2'-Omethyladenosine phosphorothiorate
  modified_base 2: mod_base = OTHER; note = 2'-Omethylcytosine phosphorothiorate
  modified_base 85: mod_base = OTHER; note = 2'-Omethylcytosine phosphorothiorate
  modified_base 86: mod_base = OTHER; note = 2'-Omethyladenosine

SEQ ID NO: 8452 - RNA, 85 nt, synthetic construct; identical to SEQ ID NO: 3288
  source 1..85: mol_type = other RNA
  modified_base 1: mod_base = OTHER; note = 2'-Omethylcytosine phosphorothiorate
  modified_base 4: mod_base = OTHER; note = 2'-fluoroguanosine
  modified_base 12: mod_base = OTHER; note = Guanosine phosphorothiorate
  modified_base 24: mod_base = OTHER; note = 2'-fluorocytosine phosphorothiorate
  modified_base 28: mod_base = OTHER; note = 2'-fluoroguanosine
  modified_base 30: mod_base = OTHER; note = 2'-fluoroadenosine
  modified_base 32: mod_base = OTHER; note = 2'-fluorouridine
  modified_base 43: mod_base = OTHER; note = 2'-Omethyluridine
  modified_base 46: mod_base = OTHER; note = Adenosine phosphorothiorate
  modified_base 53: mod_base = OTHER; note = 2'-Omethyluridine
  modified_base 55: mod_base = OTHER; note = 2'-Omethylcytosine
  modified_base 57: mod_base = OTHER; note = 2'-fluorocytosine
  modified_base 64: mod_base = OTHER; note = Uridine phosphorothiorate
  modified_base 75: mod_base = OTHER; note = 2'-Omethyluridine
  modified_base 77: mod_base = OTHER; note = Cytosine phosphorothiorate
  modified_base 80: mod_base = OTHER; note = 2'-fluoroguanosine

SEQ ID NO: 8453 - RNA, 76 nt, synthetic construct; identical to SEQ ID NO: 625
  source 1..76: mol_type = other RNA
  modified_base 1: mod_base = OTHER; note = 2'-Omethylguanosine
  modified_base 2: mod_base = OTHER; note = 2'-Omethylguanosine
  modified_base 3: mod_base = OTHER; note = 2'-Omethylcytosine
  modified_base 4: mod_base = OTHER; note = 2'-Omethyluridine
  modified_base 5: mod_base = OTHER; note = 2'-Omethylcytosine
  modified_base 6: mod_base = OTHER; note = 2'-Omethylcytosine
  modified_base 10: mod_base = OTHER; note = 2'-Omethylguanosine
  modified_base 11: mod_base = OTHER; note = 2'-Omethylcytosine
  modified_base 12: mod_base = OTHER; note = 2'-Omethylguanosine
  modified_base 13: mod_base = OTHER; note = 2'-Omethylcytosine
  modified_base 14: mod_base = OTHER; note = 2'-Omethyladenosine
  modified_base 15: mod_base = OTHER; note = 2'-fluoroadenosine
  modified_base 16: mod_base = OTHER; note = 2'-Omethyluridine
  modified_base 17: mod_base = OTHER; note = 2'-Omethylguanosine
  modified_base 18: mod_base = OTHER; note = 2'-Omethylguanosine
  modified_base 19: mod_base = OTHER; note = 2'-fluoroadenosine
  modified_base 20: mod_base = OTHER; note = 2'-Omethyluridine
  modified_base 21: mod_base = OTHER; note = 2'-fluoroadenosine
  modified_base 22: mod_base = OTHER; note = 2'-Omethylguanosine
  modified_base 23: mod_base = OTHER; note = 2'-Omethylcytosine
  modified_base 24: mod_base = OTHER; note = 2'-Omethylguanosine
  modified_base 25: mod_base = OTHER; note = 2'-Omethylcytosine
  modified_base 33: mod_base = OTHER; note = 2'-fluorouridine
  modified_base 35: mod_base = OTHER; note = Cytosine phosphorothiorate
  modified_base 37: mod_base = OTHER; note = Adenosine phosphorothiorate
  modified_base 38: mod_base = OTHER; note = Adenosine phosphorothiorate
  modified_base 48: mod_base = OTHER; note = 2'-fluorouridine
  modified_base 49: mod_base = OTHER; note = 2'-Omethylcytosine
  modified_base 50: mod_base = OTHER; note = 2'-Omethylcytosine
  modified_base 51: mod_base = OTHER; note = 2'-Omethylguanosine
  modified_base 52: mod_base = OTHER; note = 2'-Omethylguanosine
  modified_base 53: mod_base = OTHER; note = 2'-Omethylguanosine
  modified_base 54: mod_base = OTHER; note = 2'-Omethyluridine
  modified_base 57: mod_base = OTHER; note = 2'-Omethylguanosine
  modified_base 61: mod_base = OTHER; note = 2'-Omethylcytosine
  modified_base 62: mod_base = OTHER; note = 2'-Omethylcytosine
  modified_base 63: mod_base = OTHER; note = 2'-fluorocytosine
  modified_base 64: mod_base = OTHER; note = 2'-Omethylguanosine
  modified_base 65: mod_base = OTHER; note = 2'-Omethylguanosine
  modified_base 66: mod_base = OTHER; note = 2'-Omethylcytosine
  modified_base 67: mod_base = OTHER; note = 2'-Omethylguanosine
  modified_base 68: mod_base = OTHER; note = 2'-Omethylguanosine
  modified_base 69: mod_base = OTHER; note = 2'-Omethyladenosine
  modified_base 70: mod_base = OTHER; note = 2'-fluoroguanosine
  modified_base 73: mod_base = OTHER; note = 2'-Omethylguanosine
  modified_base 75: mod_base = OTHER; note = 2'-fluorocytosine phosphorothiorate

SEQ ID NO: 8454 - RNA, 75 nt, synthetic construct; identical to SEQ ID NO: 3336
  source 1..75: mol_type = other RNA
  modified_base 10: mod_base = OTHER; note = 2'-fluorocytosine phosphorothiorate
  modified_base 15: mod_base = OTHER; note = Uridine phosphorothiorate
  modified_base 18: mod_base = OTHER; note = 2'-Omethylguanosine phosphorothiorate
  modified_base 19: mod_base = OTHER; note = 2'-fluorouridine
  modified_base 22: mod_base = OTHER; note = 2'-fluoroadenosine phosphorothiorate
  modified_base 25: mod_base = OTHER; note = Adenosine phosphorothiorate
  modified_base 27: mod_base = OTHER; note = 2'-fluorocytosine phosphorothiorate
  modified_base 29: mod_base = OTHER; note = 2'-Omethylguanosine phosphorothiorate
  modified_base 37: mod_base = OTHER; note = 2'-Omethyladenosine
  modified_base 39: mod_base = OTHER; note = 2'-fluorocytosine
  modified_base 42: mod_base = OTHER; note = Adenosine phosphorothiorate
  modified_base 47: mod_base = OTHER; note = 2'-fluorocytosine
  modified_base 48: mod_base = OTHER; note = 2'-Omethylcytosine phosphorothiorate
  modified_base 50: mod_base = OTHER; note = 2'-fluoroguanosine
  modified_base 52: mod_base = OTHER; note = 2'-fluoroguanosine phosphorothiorate
  modified_base 64: mod_base = OTHER; note = 2'-fluoroguanosine
  modified_base 71: mod_base = OTHER; note = Cytosine phosphorothiorate
  modified_base 73: mod_base = OTHER; note = Cytosine phosphorothiorate
  modified_base 74: mod_base = OTHER; note = 2'-Omethylcytosine

SEQ ID NO: 8455 - RNA, 76 nt, synthetic construct; identical to SEQ ID NO: 625
  source 1..76: mol_type = other RNA
  modified_base 1: mod_base = OTHER; note = 2'-Omethylguanosine phosphorothiorate
  modified_base 2: mod_base = OTHER; note = 2'-Omethylguanosine
  modified_base 3: mod_base = OTHER; note = 2'-Omethylcytosine
  modified_base 4: mod_base = OTHER; note = 2'-Omethyluridine
  modified_base 5: mod_base = OTHER; note = 2'-Omethylcytosine
  modified_base 6: mod_base = OTHER; note = 2'-Omethylcytosine
  modified_base 10: mod_base = OTHER; note = 2'-Omethylguanosine
  modified_base 11: mod_base = OTHER; note = 2'-Omethylcytosine
  modified_base 12: mod_base = OTHER; note = 2'-Omethylguanosine
  modified_base 13: mod_base = OTHER; note = 2'-Omethylcytosine
  modified_base 22: mod_base = OTHER; note = 2'-Omethylguanosine
  modified_base 23: mod_base = OTHER; note = 2'-Omethylcytosine
  modified_base 24: mod_base = OTHER; note = 2'-Omethylguanosine
  modified_base 25: mod_base = OTHER; note = 2'-Omethylcytosine
  modified_base 40: mod_base = OTHER; note = 2'-fluorouridine
  modified_base 41: mod_base = OTHER; note = 2'-fluorocytosine
  modified_base 42: mod_base = OTHER; note = 2'-fluoroadenosine
  modified_base 43: mod_base = OTHER; note = 2'-fluoroadenosine
  modified_base 49: mod_base = OTHER; note = 2'-Omethylcytosine
  modified_base 50: mod_base = OTHER; note = 2'-Omethylcytosine
  modified_base 51: mod_base = OTHER; note = 2'-Omethylguanosine
  modified_base 52: mod_base = OTHER; note = 2'-Omethylguanosine
  modified_base 53: mod_base = OTHER; note = 2'-Omethylguanosine
  modified_base 61: mod_base = OTHER; note = 2'-Omethylcytosine
  modified_base 62: mod_base = OTHER; note = 2'-Omethylcytosine
  modified_base 63: mod_base = OTHER; note = 2'-fluorocytosine
  modified_base 64: mod_base = OTHER; note = 2'-Omethylguanosine
  modified_base 65: mod_base = OTHER; note = 2'-Omethylguanosine
  modified_base 66: mod_base = OTHER; note = 2'-Omethylcytosine
  modified_base 67: mod_base = OTHER; note = 2'-Omethylguanosine
  modified_base 68: mod_base = OTHER; note = 2'-Omethylguanosine
  modified_base 69: mod_base = OTHER; note = 2'-Omethyladenosine

SEQ ID NO: 8456 - RNA, 85 nt, synthetic construct; identical to SEQ ID NO: 3301
  source 1..85: mol_type = other RNA
  modified_base 1: mod_base = OTHER; note = 2'-Omethylguanosine phosphorothiorate
  modified_base 2: mod_base = OTHER; note = Cytosine phosphorothiorate
  modified_base 3: mod_base = OTHER; note = 2'-Omethyluridine phosphorothiorate
  modified_base 4: mod_base = OTHER; note = Guanosine phosphorothiorate
  modified_base 12: mod_base = OTHER; note = 2'-fluorocytosine
  modified_base 15: mod_base = OTHER; note = 2'-Omethylguanosine phosphorothiorate
  modified_base 19: mod_base = OTHER; note = 2'-fluorouridine
  modified_base 23: mod_base = OTHER; note = 2'-Omethylguanosine
  modified_base 25: mod_base = OTHER; note = 2'-Omethylcytosine phosphorothiorate
  modified_base 27: mod_base = OTHER; note = 2'-fluorouridine
  modified_base 28: mod_base = OTHER; note = 2'-fluorouridine
  modified_base 30: mod_base = OTHER; note = 2'-fluoroguanosine
  modified_base 34: mod_base = OTHER; note = 2'-fluorouridine
  modified_base 35: mod_base = OTHER; note = 2'-fluorouridine
  modified_base 36: mod_base = OTHER; note = Adenosine phosphorothiorate
  modified_base 44: mod_base = OTHER; note = 2'-Omethyluridine
  modified_base 46: mod_base = OTHER; note = 2'-Omethylguanosine
  modified_base 56: mod_base = OTHER; note = 2'-fluoroguanosine
  modified_base 57: mod_base = OTHER; note = 2'-fluorocytosine
  modified_base 61: mod_base = OTHER; note = 2'-Omethylguanosine
  modified_base 71: mod_base = OTHER; note = 2'-fluorocytosine
  modified_base 73: mod_base = OTHER; note = Guanosine phosphorothiorate
  modified_base 74: mod_base = OTHER; note = 2'-fluorocytosine
  modified_base 76: mod_base = OTHER; note = Cytosine phosphorothiorate
  modified_base 80: mod_base = OTHER; note = 2'-fluoroguanosine
  modified_base 82: mod_base = OTHER; note = 2'-Omethylguanosine

SEQ ID NO: 8457 - RNA, 76 nt, synthetic construct; identical to SEQ ID NO: 625
  source 1..76: mol_type = other RNA
  modified_base 1: mod_base = OTHER; note = 2'-Omethylguanosine phosphorothiorate
  modified_base 2: mod_base = OTHER; note = 2'-Omethylguanosine phosphorothiorate
  modified_base 3: mod_base = OTHER; note = 2'-Omethylcytosine
  modified_base 4: mod_base = OTHER; note = 2'-Omethyluridine
  modified_base 5: mod_base = OTHER; note = 2'-Omethylcytosine
  modified_base 6: mod_base = OTHER; note = 2'-Omethylcytosine
  modified_base 16: mod_base = OTHER; note = 2'-Omethyluridine
  modified_base 17: mod_base = OTHER; note = 2'-Omethylguanosine
  modified_base 18: mod_base = OTHER; note = 2'-Omethylguanosine
  modified_base 20: mod_base = OTHER; note = 2'-Omethyluridine
  modified_base 25: mod_base = OTHER; note = 2'-Omethylcytosine
  modified_base 33: mod_base = OTHER; note = 2'-fluorouridine
  modified_base 35: mod_base = OTHER; note = Cytosine phosphorothiorate
  modified_base 37: mod_base = OTHER; note = Adenosine phosphorothiorate
  modified_base 38: mod_base = OTHER; note = Adenosine phosphorothiorate
  modified_base 41: mod_base = OTHER; note = 2'-Omethylcytosine
  modified_base 42: mod_base = OTHER; note = 2'-Omethyladenosine
  modified_base 43: mod_base = OTHER; note = 2'-Omethyladenosine
  modified_base 44: mod_base = OTHER; note = 2'-Omethyladenosine
  modified_base 49: mod_base = OTHER; note = 2'-Omethylcytosine
  modified_base 50: mod_base = OTHER; note = 2'-Omethylcytosine
  modified_base 52: mod_base = OTHER; note = 2'-Omethylguanosine
  modified_base 54: mod_base = OTHER; note = Uridine phosphorothiorate
  modified_base 55: mod_base = OTHER; note = Uridine phosphorothiorate
  modified_base 61: mod_base = OTHER; note = 2'-Omethylcytosine
  modified_base 65: mod_base = OTHER; note = 2'-Omethylguanosine
  modified_base 74: mod_base = OTHER; note = Cytosine phosphorothiorate
  modified_base 75: mod_base = OTHER; note = 2'-Omethylcytosine phosphorothiorate

SEQ ID NO: 8458 - RNA, 76 nt, synthetic construct; identical to SEQ ID NO: 3329
  source 1..76: mol_type = other RNA
  modified_base 1: mod_base = OTHER; note = 2'-Omethylguanosine phosphorothiorate
  modified_base 2: mod_base = OTHER; note = 2'-Omethylguanosine phosphorothiorate
  modified_base 3: mod_base = OTHER; note = 2'-Omethylcytosine
  modified_base 4: mod_base = OTHER; note = 2'-Omethylcytosine
  modified_base 5: mod_base = OTHER; note = 2'-Omethylcytosine
  modified_base 6: mod_base = OTHER; note = 2'-Omethylcytosine
  modified_base 10: mod_base = OTHER; note = 2'-Omethylguanosine
  modified_base 11: mod_base = OTHER; note = 2'-Omethylcytosine
  modified_base 12: mod_base = OTHER; note = 2'-Omethylguanosine
  modified_base 13: mod_base = OTHER; note = 2'-Omethylcytosine
  modified_base 17: mod_base = OTHER; note = 2'-Omethylguanosine
  modified_base 18: mod_base = OTHER; note = 2'-Omethylguanosine
  modified_base 22: mod_base = OTHER; note = 2'-Omethylguanosine
  modified_base 23: mod_base = OTHER; note = 2'-Omethylcytosine
  modified_base 24: mod_base = OTHER; note = 2'-Omethylguanosine
  modified_base 25: mod_base = OTHER; note = 2'-Omethylcytosine
  modified_base 33: mod_base = OTHER; note = 2'-fluorouridine
  modified_base 35: mod_base = OTHER; note = Cytosine phosphorothiorate
  modified_base 37: mod_base = OTHER; note = Adenosine phosphorothiorate
  modified_base 38: mod_base = OTHER; note = Adenosine phosphorothiorate
  modified_base 41: mod_base = OTHER; note = 2'-fluorocytosine
  modified_base 42: mod_base = OTHER; note = 2'-Omethyladenosine
  modified_base 43: mod_base = OTHER; note = 2'-Omethyladenosine
  modified_base 44: mod_base = OTHER; note = 2'-fluoroadenosine
  modified_base 49: mod_base = OTHER; note = 2'-Omethylcytosine
  modified_base 50: mod_base = OTHER; note = 2'-Omethylcytosine
  modified_base 51: mod_base = OTHER; note = 2'-Omethylguanosine
  modified_base 52: mod_base = OTHER; note = 2'-Omethylguanosine
  modified_base 53: mod_base = OTHER; note = 2'-Omethylguanosine
  modified_base 54: mod_base = OTHER; note = Uridine phosphorothiorate
  modified_base 55: mod_base = OTHER; note = Uridine phosphorothiorate
  modified_base 61: mod_base = OTHER; note = 2'-Omethylcytosine
  modified_base 62: mod_base = OTHER; note = 2'-Omethylcytosine
  modified_base 63: mod_base = OTHER; note = 2'-fluorocytosine
  modified_base 64: mod_base = OTHER; note = 2'-Omethylguanosine
  modified_base 65: mod_base = OTHER; note = 2'-Omethylguanosine
  modified_base 66: mod_base = OTHER; note = 2'-Omethyluridine
  modified_base 67: mod_base = OTHER; note = 2'-Omethylguanosine
  modified_base 68: mod_base = OTHER; note = 2'-Omethylguanosine
  modified_base 73: mod_base = OTHER; note = 2'-Omethylguanosine

SEQ ID NO: 8459 - RNA, 75 nt, synthetic construct; identical to SEQ ID NO: 3311
  source 1..75: mol_type = other RNA
  modified_base 2: mod_base = OTHER; note = 2'-Omethylguanosine
  modified_base 13: mod_base = OTHER; note = 2'-Omethyluridine
  modified_base 16: mod_base = OTHER; note = Uridine phosphorothiorate
  modified_base 19: mod_base = OTHER; note = 2'-fluorouridine
  modified_base 25: mod_base = OTHER; note = Cytosine phosphorothiorate
  modified_base 26: mod_base = OTHER; note = 2'-fluorouridine phosphorothiorate
  modified_base 44: mod_base = OTHER; note = 2'-fluorocytosine
  modified_base 51: mod_base = OTHER; note = 2'-fluoroadenosine phosphorothiorate
  modified_base 52: mod_base = OTHER; note = Guanosine phosphorothiorate
  modified_base 54: mod_base = OTHER; note = 2'-fluorouridine
  modified_base 59: mod_base = OTHER; note = 2'-fluorouridine phosphorothiorate
  modified_base 62: mod_base = OTHER; note = Cytosine phosphorothiorate
  modified_base 74: mod_base = OTHER; note = Cytosine phosphorothiorate

SEQ ID NO: 8460 - RNA, 85 nt, synthetic construct; identical to SEQ ID NO: 3286
  source 1..85: mol_type = other RNA
  modified_base 5: mod_base = OTHER; note = 2'-fluoroguanosine
  modified_base 27: mod_base = OTHER; note = 2'-fluorouridine
  modified_base 50: mod_base = OTHER; note = Adenosine phosphorothiorate
  modified_base 64: mod_base = OTHER; note = Uridine phosphorothiorate
  modified_base 74: mod_base = OTHER; note = 2'-fluorocytosine

SEQ ID NO: 8461 - RNA, 75 nt, synthetic construct; identical to SEQ ID NO: 3311
  source 1..75: mol_type = other RNA
  modified_base 1: mod_base = OTHER; note = 2'-Omethylguanosine phosphorothiorate
  modified_base 12: mod_base = OTHER; note = 2'-Omethylguanosine
  modified_base 23: mod_base = OTHER; note = Cytosine phosphorothiorate
  modified_base 24: mod_base = OTHER; note = 2'-fluoroadenosine
  modified_base 32: mod_base = OTHER; note = 2'-Omethylcytosine phosphorothiorate
  modified_base 36: mod_base = OTHER; note = 2'-fluoroadenosine
  modified_base 44: mod_base = OTHER; note = 2'-fluorocytosine
  modified_base 61: mod_base = OTHER; note = 2'-fluorouridine

SEQ ID NO: 8462 - RNA, 75 nt, synthetic construct; identical to SEQ ID NO: 1045
  source 1..75: mol_type = other RNA
  modified_base 1: mod_base = OTHER; note = 2'-Omethylguanosine
  modified_base 10: mod_base = OTHER; note = 2'-Omethylguanosine
  modified_base 13: mod_base = OTHER; note = 2'-Omethyluridine
  modified_base 16: mod_base = OTHER; note = Uridine phosphorothiorate
  modified_base 17: mod_base = OTHER; note = Guanosine phosphorothiorate
  modified_base 18: mod_base = OTHER; note = 2'-Omethylguanosine phosphorothiorate
  modified_base 19: mod_base = OTHER; note = Uridine phosphorothiorate
  modified_base 20: mod_base = OTHER; note = 2'-Omethyladenosine phosphorothiorate
  modified_base 25: mod_base = OTHER; note = 2'-Omethylcytosine
  modified_base 29: mod_base = OTHER; note = 2'-Omethylguanosine
  modified_base 33: mod_base = OTHER; note = 2'-fluorouridine phosphorothiorate
  modified_base 35: mod_base = OTHER; note = Uridine phosphorothiorate
  modified_base 37: mod_base = OTHER; note = Adenosine phosphorothiorate
  modified_base 38: mod_base = OTHER; note = Adenosine phosphorothiorate
  modified_base 41: mod_base = OTHER; note = 2'-fluorocytosine
  modified_base 42: mod_base = OTHER; note = Adenosine phosphorothiorate
  modified_base 43: mod_base = OTHER; note = 2'-Omethylguanosine
  modified_base 44: mod_base = OTHER; note = 2'-fluorocytosine
  modified_base 46: mod_base = OTHER; note = Adenosine phosphorothiorate
  modified_base 49: mod_base = OTHER; note = 2'-Omethylcytosine
  modified_base 51: mod_base = OTHER; note = 2'-Omethyladenosine
  modified_base 53: mod_base = OTHER; note = Uridine phosphorothiorate
  modified_base 54: mod_base = OTHER; note = Uridine phosphorothiorate
  modified_base 55: mod_base = OTHER; note = 2'-Omethylcytosine
  modified_base 56: mod_base = OTHER; note = Guanosine phosphorothiorate
  modified_base 59: mod_base = OTHER; note = Uridine phosphorothiorate
  modified_base 61: mod_base = OTHER; note = 2'-Omethyluridine
  modified_base 62: mod_base = OTHER; note = 2'-fluorocytosine
  modified_base 64: mod_base = OTHER; note = 2'-Omethylguanosine
  modified_base 70: mod_base = OTHER; note = 2'-Omethylcytosine
  modified_base 72: mod_base = OTHER; note = 2'-Omethyluridine

SEQ ID NO: 8463 - DNA, 76 bp, synthetic construct; identical to SEQ ID NO: 1924
  source 1..76: mol_type = other DNA
  modified_base 1: mod_base = OTHER; note = 2'-Omethylguanosine phosphorothiorate
  modified_base 2: mod_base = OTHER; note = 2'-Omethylguanosine
  modified_base 3: mod_base = OTHER; note = 2'-Omethylcytosine
  modified_base 4: mod_base = OTHER; note = 2'-Omethyluridine
  modified_base 5: mod_base = OTHER; note = 2'-Omethylcytosine
  modified_base 6: mod_base = OTHER; note = 2'-Omethylcytosine
  modified_base 43: mod_base = OTHER; note = 2'-Omethyladenosine
  modified_base 44: mod_base = OTHER; note = 2'-Omethyladenosine
  modified_base 45: mod_base = OTHER; note = 2'-Omethylguanosine
  modified_base 46: mod_base = OTHER; note = 2'-fluoroguanosine
  modified_base 48: mod_base = OTHER; note = 2'-Omethyluridine
  modified_base 49: mod_base = OTHER; note = 2'-Omethylcytosine
  modified_base 73: mod_base = OTHER; note = 2'-Omethylguanosine
  misc_feature 1..46: note = RNA
  misc_feature 47: note = DNA
  misc_feature 48..76: note = RNA

SEQ ID NO: 8464 - RNA, 76 nt, synthetic construct; identical to SEQ ID NO: 3316
  source 1..76: mol_type = other RNA
  modified_base 1: mod_base = OTHER; note = 2'-Omethyladenosine
  modified_base 14: mod_base = OTHER; note = 2'-Omethyladenosine
  modified_base 15: mod_base = OTHER; note = 2'-Omethyladenosine
  modified_base 16: mod_base = OTHER; note = 2'-Omethyluridine
  modified_base 17: mod_base = OTHER; note = 2'-Omethylguanosine
  modified_base 18: mod_base = OTHER; note = 2'-Omethylguanosine
  modified_base 19: mod_base = OTHER; note = Adenosine phosphorothiorate
  modified_base 20: mod_base = OTHER; note = 2'-Omethyluridine
  modified_base 21: mod_base = OTHER; note = Adenosine phosphorothiorate
  modified_base 33: mod_base = OTHER; note = 2'-fluorouridine
  modified_base 34: mod_base = OTHER; note = 2'-Omethyluridine
  modified_base 35: mod_base = OTHER; note = Cytosine phosphorothiorate
  modified_base 37: mod_base = OTHER; note = Adenosine phosphorothiorate
  modified_base 38: mod_base = OTHER; note = Adenosine phosphorothiorate
  modified_base 41: mod_base = OTHER; note = 2'-Omethylcytosine
  modified_base 42: mod_base = OTHER; note = 2'-Omethyladenosine
  modified_base 43: mod_base = OTHER; note = 2'-Omethyladenosine
  modified_base 44: mod_base = OTHER; note = 2'-Omethyladenosine
  modified_base 50: mod_base = OTHER; note = 2'-Omethylcytosine
  modified_base 52: mod_base = OTHER; note = 2'-Omethylguanosine
  modified_base 73: mod_base = OTHER; note = 2'-Omethylguanosine

SEQ ID NO: 8465 - RNA, 75 nt, synthetic construct; identical to SEQ ID NO: 3311
  source 1..75: mol_type = other RNA
  modified_base 1: mod_base = OTHER; note = 2'-Omethylguanosine phosphorothiorate
  modified_base 2: mod_base = OTHER; note = 2'-Omethylguanosine phosphorothiorate
  modified_base 8: mod_base = OTHER; note = 2'-fluorouridine
  modified_base 16: mod_base = OTHER; note = 2'-fluorouridine
  modified_base 19: mod_base = OTHER; note = 2'-fluorouridine
  modified_base 20: mod_base = OTHER; note = 2'-Omethyladenosine
  modified_base 22: mod_base = OTHER; note = Guanosine phosphorothiorate
  modified_base 23: mod_base = OTHER; note = 2'-fluorocytosine
  modified_base 31: mod_base = OTHER; note = 2'-Omethyladenosine
  modified_base 44: mod_base = OTHER; note = 2'-fluorocytosine
  modified_base 49: mod_base = OTHER; note = 2'-fluorocytosine
  modified_base 54: mod_base = OTHER; note = 2'-fluorouridine phosphorothiorate
  modified_base 55: mod_base = OTHER; note = 2'-fluorocytosine
  modified_base 61: mod_base = OTHER; note = 2'-fluorouridine
  modified_base 64: mod_base = OTHER; note = 2'-fluoroguanosine
  modified_base 65: mod_base = OTHER; note = Uridine phosphorothiorate
  modified_base 67: mod_base = OTHER; note = Guanosine phosphorothiorate
  modified_base 68: mod_base = OTHER; note = 2'-fluoroadenosine
  modified_base 72: mod_base = OTHER; note = 2'-fluorouridine phosphorothiorate
  modified_base 73: mod_base = OTHER; note = Cytosine phosphorothiorate
  modified_base 75: mod_base = OTHER; note = 2'-fluoroadenosine

SEQ ID NO: 8466 - RNA, 76 nt, synthetic construct; identical to SEQ ID NO: 625
  source 1..76: mol_type = other RNA
  modified_base 1: mod_base = OTHER; note = 2'-Omethylguanosine
  modified_base 10: mod_base = OTHER; note = 2'-Omethylguanosine
  modified_base 13: mod_base = OTHER; note = 2'-Omethylcytosine
  modified_base 17: mod_base = OTHER; note = Guanosine phosphorothiorate
  modified_base 18: mod_base = OTHER; note = 2'-Omethylguanosine
  modified_base 19: mod_base = OTHER; note = Adenosine phosphorothiorate
  modified_base 20: mod_base = OTHER; note = 2'-Omethyluridine
  modified_base 25: mod_base = OTHER; note = 2'-Omethylcytosine
  modified_base 29: mod_base = OTHER; note = 2'-Omethylguanosine
  modified_base 33: mod_base = OTHER; note = 2'-fluorouridine
  modified_base 35: mod_base = OTHER; note = Cytosine phosphorothiorate
  modified_base 37: mod_base = OTHER; note = Adenosine phosphorothiorate
  modified_base 38: mod_base = OTHER; note = Adenosine phosphorothiorate
  modified_base 41: mod_base = OTHER; note = 2'-fluorocytosine phosphorothiorate
  modified_base 43: mod_base = OTHER; note = 2'-Omethyladenosine
  modified_base 44: mod_base = OTHER; note = 2'-fluoroadenosine
  modified_base 50: mod_base = OTHER; note = 2'-Omethylcytosine
  modified_base 52: mod_base = OTHER; note = 2'-Omethylguanosine
  modified_base 55: mod_base = OTHER; note = Uridine phosphorothiorate
  modified_base 56: mod_base = OTHER; note = 2'-Omethylcytosine
  modified_base 57: mod_base = OTHER; note = Guanosine phosphorothiorate
  modified_base 62: mod_base = OTHER; note = 2'-Omethylcytosine
  modified_base 63: mod_base = OTHER; note = 2'-fluorocytosine
  modified_base 65: mod_base = OTHER; note = 2'-Omethylguanosine
  modified_base 71: mod_base = OTHER; note = 2'-Omethyluridine
  modified_base 73: mod_base = OTHER; note = 2'-Omethylguanosine

SEQ ID NO: 8467 - RNA, 85 nt, synthetic construct; identical to SEQ ID NO: 3297
  source 1..85: mol_type = other RNA
  modified_base 1: mod_base = OTHER; note = 2'-Omethylguanosine
  modified_base 13: mod_base = OTHER; note = 2'-Omethylguanosine
  modified_base 17: mod_base = OTHER; note = 2'-Omethylguanosine
  modified_base 18: mod_base = OTHER; note = 2'-Omethylguanosine
  modified_base 25: mod_base = OTHER; note = 2'-Omethylcytosine
  modified_base 33: mod_base = OTHER; note = 2'-fluorouridine
  modified_base 34: mod_base = OTHER; note = 2'-Omethyluridine
  modified_base 35: mod_base = OTHER; note = Cytosine phosphorothiorate
  modified_base 37: mod_base = OTHER; note = Adenosine phosphorothiorate
  modified_base 38: mod_base = OTHER; note = Adenosine phosphorothiorate
  modified_base 41: mod_base = OTHER; note = 2'-fluorocytosine
  modified_base 42: mod_base = OTHER; note = 2'-Omethyladenosine
  modified_base 43: mod_base = OTHER; note = 2'-Omethyladenosine
  modified_base 44: mod_base = OTHER; note = 2'-fluorouridine
  modified_base 58: mod_base = OTHER; note = 2'-Omethylguanosine
  modified_base 59: mod_base = OTHER; note = 2'-Omethylcytosine
  modified_base 60: mod_base = OTHER; note = 2'-Omethyladenosine
  modified_base 61: mod_base = OTHER; note = 2'-Omethylguanosine
  modified_base 62: mod_base = OTHER; note = 2'-Omethylguanosine
  modified_base 63: mod_base = OTHER; note = Uridine phosphorothiorate
  modified_base 64: mod_base = OTHER; note = Uridine phosphorothiorate
  modified_base 70: mod_base = OTHER; note = 2'-Omethylcytosine
  modified_base 74: mod_base = OTHER; note = 2'-Omethylcytosine
  modified_base 82: mod_base = OTHER; note = 2'-Omethylguanosine

SEQ ID NO: 8468 - RNA, 86 nt, synthetic construct; identical to SEQ ID NO: 3290
  source 1..86: mol_type = other RNA
  modified_base 44: mod_base = OTHER; note = Uridine phosphorothiorate

SEQ ID NO: 8469 - RNA, 73 nt, synthetic construct; identical to SEQ ID NO: 935
  source 1..73: mol_type = other RNA
  modified_base 1: mod_base = OTHER; note = 2'-Omethylguanosine phosphorothiorate
  modified_base 2: mod_base = OTHER; note = 2'-Omethylguanosine
  modified_base 16: mod_base = OTHER; note = Uridine phosphorothiorate
  modified_base 17: mod_base = OTHER; note = 2'-O-(2-Methoxyethyl) guanosine
  modified_base 25: mod_base = OTHER; note = 2'-fluorocytosine
  modified_base 30: mod_base = OTHER; note = Guanosine phosphorothiorate
  modified_base 44: mod_base = OTHER; note = 2'-fluoroadenosine
  modified_base 52: mod_base = OTHER; note = Guanosine phosphorothiorate
  modified_base 73: mod_base = OTHER; note = 2'-Omethylguanosine

SEQ ID NO: 8470 - RNA, 86 nt, synthetic construct; identical to SEQ ID NO: 3290
  source 1..86: mol_type = other RNA
  modified_base 1: mod_base = OTHER; note = 2'-Omethyladenosine phosphorothiorate
  modified_base 2: mod_base = OTHER; note = 2'-Omethylcytosine
  modified_base 57: mod_base = OTHER; note = 2'-fluoroguanosine
  modified_base 69: mod_base = OTHER; note = 2'-Omethyladenosine
  modified_base 85: mod_base = OTHER; note = Cytosine phosphorothiorate
  modified_base 86: mod_base = OTHER; note = 2'-Omethyladenosine

SEQ ID NO: 8471 - RNA, 76 nt, synthetic construct; identical to SEQ ID NO: 625
  source 1..76: mol_type = other RNA
  modified_base 1: mod_base = OTHER; note = 2'-Omethylguanosine phosphorothiorate
  modified_base 2: mod_base = OTHER; note = 2'-Omethylguanosine phosphorothiorate
  modified_base 13: mod_base = OTHER; note = 2'-fluorocytosine
  modified_base 14: mod_base = OTHER; note = 2'-fluoroadenosine
  modified_base 54: mod_base = OTHER; note = 2'-fluorouridine
  modified_base 59: mod_base = OTHER; note = 2'-Omethylguanosine
  modified_base 73: mod_base = OTHER; note = Guanosine phosphorothiorate
  modified_base 75: mod_base = OTHER; note = Cytosine phosphorothiorate
  modified_base 76: mod_base = OTHER; note = 2'-Omethyladenosine

SEQ ID NO: 8472 - RNA, 86 nt, synthetic construct; identical to SEQ ID NO: 3290
  source 1..86: mol_type = other RNA
  modified_base 7: mod_base = OTHER; note = 2'-Omethyladenosine

SEQ ID NO: 8473 - RNA, 76 nt, synthetic construct; identical to SEQ ID NO: 625
  source 1..76: mol_type = other RNA
  modified_base 1: mod_base = OTHER; note = 2'-Omethylguanosine phosphorothiorate
  modified_base 2: mod_base = OTHER; note = 2'-Omethylguanosine
  modified_base 33: mod_base = OTHER; note = 2'-fluorouridine
  modified_base 35: mod_base = OTHER; note = Cytosine phosphorothiorate
  modified_base 37: mod_base = OTHER; note = Adenosine phosphorothiorate
  modified_base 38: mod_base = OTHER; note = Adenosine phosphorothiorate
  modified_base 52: mod_base = OTHER; note = 2'-fluoroguanosine
  modified_base 56: mod_base = OTHER; note = 2'-Omethylcytosine
  modified_base 59: mod_base = OTHER; note = 2'-Omethylguanosine
  modified_base 62: mod_base = OTHER; note = 2'-Omethylcytosine
  modified_base 63: mod_base = OTHER; note = 2'-fluorocytosine
  modified_base 73: mod_base = OTHER; note = 2'-Omethylguanosine
  modified_base 75: mod_base = OTHER; note = 2'-fluorocytosine phosphorothiorate

SEQ ID NO: 8474 - RNA, 74 nt, synthetic construct; identical to SEQ ID NO: 3293
  source 1..74: mol_type = other RNA
  modified_base 1: mod_base = OTHER; note = 2'-fluoroadenosine
  modified_base 11: mod_base = OTHER; note = 2'-Omethylguanosine phosphorothiorate
  modified_base 27: mod_base = OTHER; note = 2'-Omethyluridine phosphorothiorate
  modified_base 35: mod_base = OTHER; note = Guanosine phosphorothiorate
  modified_base 43: mod_base = OTHER; note = Guanosine phosphorothiorate
  modified_base 48: mod_base = OTHER; note = Cytosine phosphorothiorate
  modified_base 72: mod_base = OTHER; note = Cytosine phosphorothiorate
  modified_base 73: mod_base = OTHER; note = 2'-Omethylcytosine

SEQ ID NO: 8475 - RNA, 85 nt, synthetic construct; identical to SEQ ID NO: 3288
  source 1..85: mol_type = other RNA
  modified_base 1: mod_base = OTHER; note = 2'-Omethylcytosine
  modified_base 23: mod_base = OTHER; note = 2'-fluoroguanosine
  modified_base 26: mod_base = OTHER; note = 2'-fluorouridine phosphorothiorate
  modified_base 27: mod_base = OTHER; note = 2'-fluorouridine
  modified_base 30: mod_base = OTHER; note = 2'-fluoroadenosine
  modified_base 34: mod_base = OTHER; note = 2'-fluorocytosine
  modified_base 35: mod_base = OTHER; note = 2'-fluoroadenosine phosphorothiorate
  modified_base 39: mod_base = OTHER; note = Cytosine phosphorothiorate
  modified_base 45: mod_base = OTHER; note = 2'-Omethylguanosine
  modified_base 46: mod_base = OTHER; note = Adenosine phosphorothiorate
  modified_base 47: mod_base = OTHER; note = 2'-fluorocytosine
  modified_base 51: mod_base = OTHER; note = 2'-fluorouridine
  modified_base 52: mod_base = OTHER; note = Guanosine phosphorothiorate
  modified_base 53: mod_base = OTHER; note = 2'-fluorouridine
  modified_base 56: mod_base = OTHER; note = 2'-fluoroguanosine phosphorothiorate
  modified_base 57: mod_base = OTHER; note = 2'-Omethylcytosine phosphorothiorate
  modified_base 60: mod_base = OTHER; note = 2'-fluoroguanosine phosphorothiorate
  modified_base 64: mod_base = OTHER; note = 2'-fluorouridine phosphorothiorate
  modified_base 76: mod_base = OTHER; note = 2'-fluorocytosine phosphorothiorate
  modified_base 84: mod_base = OTHER; note = 2'-Omethylcytosine phosphorothiorate

SEQ ID NO: 8476 - RNA, 85 nt, synthetic construct; identical to SEQ ID NO: 3317
  source 1..85: mol_type = other RNA
  modified_base 1: mod_base = OTHER; note = 2'-Omethylguanosine phosphorothiorate
  modified_base 2: mod_base = OTHER; note = 2'-Omethylcytosine
  modified_base 21: mod_base = OTHER; note = 2'-Omethyladenosine
  modified_base 30: mod_base = OTHER; note = Guanosine phosphorothiorate
  modified_base 50: mod_base = OTHER; note = 2'-Omethylcytosine
  modified_base 61: mod_base = OTHER; note = 2'-Omethylguanosine
  modified_base 64: mod_base = OTHER; note = 2'-fluorouridine
  modified_base 82: mod_base = OTHER; note = 2'-Omethylguanosine

SEQ ID NO: 8477 - RNA, 75 nt, synthetic construct; identical to SEQ ID NO: 1045
  source 1..75: mol_type = other RNA
  modified_base 1: mod_base = OTHER; note = Guanosine phosphorothiorate
  modified_base 10: mod_base = OTHER; note = Guanosine phosphorothiorate
  modified_base 11: mod_base = OTHER; note = 2'-fluorouridine
  modified_base 27: mod_base = OTHER; note = 2'-Omethylcytosine phosphorothiorate
  modified_base 43: mod_base = OTHER; note = 2'-fluoroguanosine
  modified_base 67: mod_base = OTHER; note = 2'-fluoroguanosine
  modified_base 73: mod_base = OTHER; note = Cytosine phosphorothiorate
  modified_base 75: mod_base = OTHER; note = 2'-fluoroadenosine

SEQ ID NO: 8478 - RNA, 76 nt, synthetic construct; identical to SEQ ID NO: 3675
  source 1..76: mol_type = other RNA
  modified_base 1: mod_base = OTHER; note = 2'-Omethylguanosine phosphorothiorate
  modified_base 2: mod_base = OTHER; note = 2'-Omethylcytosine phosphorothiorate
  modified_base 74: mod_base = OTHER; note = Cytosine phosphorothiorate
  modified_base 75: mod_base = OTHER; note = 2'-Omethylcytosine

SEQ ID NO: 8479 - RNA, 76 nt, synthetic construct; identical to SEQ ID NO: 3325
  source 1..76: mol_type = other RNA

SEQ ID NO: 8480 - DNA, 73 bp, synthetic construct; identical to SEQ ID NO: 3380
  source 1..73: mol_type = other DNA
  modified_base 1: mod_base = OTHER; note = 2'-Omethylguanosine phosphorothiorate
  modified_base 2: mod_base = OTHER; note = 2'-Omethylguanosine phosphorothiorate
  modified_base 52: mod_base = OTHER; note = 2'-Omethylguanosine
  modified_base 63: mod_base = OTHER; note = Cytosine phosphorothiorate
  modified_base 72: mod_base = OTHER; note = Cytosine phosphorothiorate
  misc_feature 1..63: note = RNA
  misc_feature 64: note = DNA
  misc_feature 65..73: note = RNA

SEQ ID NO: 8481 - RNA, 76 nt, synthetic construct; identical to SEQ ID NO: 3318
  source 1..76: mol_type = other RNA
  modified_base 1: mod_base = OTHER; note = 2'-Omethylcytosine
  modified_base 20: mod_base = OTHER; note = 2'-Omethyluridine
  modified_base 22: mod_base = OTHER; note = 2'-Omethylguanosine
  modified_base 40: mod_base = OTHER; note = 2'-fluorocytosine
  modified_base 41: mod_base = OTHER; note = 2'-Omethylcytosine
  modified_base 42: mod_base = OTHER; note = 2'-Omethyluridine
  modified_base 43: mod_base = OTHER; note = 2'-Omethyluridine
  modified_base 73: mod_base = OTHER; note = 2'-Omethyladenosine

SEQ ID NO: 8482 - RNA, 85 nt, synthetic construct; identical to SEQ ID NO: 3297
  source 1..85: mol_type = other RNA
  modified_base 1: mod_base = OTHER; note = 2'-Omethylguanosine phosphorothiorate
  modified_base 19: mod_base = OTHER; note = 2'-Omethyluridine phosphorothiorate
  modified_base 48: mod_base = OTHER; note = 2'-Omethylguanosine
  modified_base 54: mod_base = OTHER; note = Cytosine phosphorothiorate
  modified_base 57: mod_base = OTHER; note = Cytosine phosphorothiorate
  modified_base 72: mod_base = OTHER; note = 2'-fluorouridine
  modified_base 80: mod_base = OTHER; note = Guanosine phosphorothiorate

SEQ ID NO: 8483 - RNA, 76 nt, synthetic construct; identical to SEQ ID NO: 625
  source 1..76: mol_type = other RNA
  modified_base 2: mod_base = OTHER; note = 2'-fluoroguanosine
  modified_base 4: mod_base = OTHER; note = 2'-fluorouridine
  modified_base 5: mod_base = OTHER; note = Cytosine phosphorothiorate
  modified_base 7: mod_base = OTHER; note = Guanosine phosphorothiorate
  modified_base 10: mod_base = OTHER; note = 2'-fluoroguanosine
  modified_base 11: mod_base = OTHER; note = 2'-fluorocytosine
  modified_base 12: mod_base = OTHER; note = Guanosine phosphorothiorate
  modified_base 13: mod_base = OTHER; note = 2'-Omethylcytosine
  modified_base 14: mod_base = OTHER; note = 2'-Omethyladenosine
  modified_base 15: mod_base = OTHER; note = 2'-fluoroadenosine
  modified_base 16: mod_base = OTHER; note = 2'-fluorouridine
  modified_base 17: mod_base = OTHER; note = 2'-Omethylguanosine
  modified_base 18: mod_base = OTHER; note = 2'-fluoroguanosine
  modified_base 19: mod_base = OTHER; note = Adenosine phosphorothiorate
  modified_base 20: mod_base = OTHER; note = 2'-Omethyluridine
  modified_base 23: mod_base = OTHER; note = 2'-Omethylcytosine
  modified_base 24: mod_base = OTHER; note = 2'-fluoroguanosine
  modified_base 25: mod_base = OTHER; note = 2'-fluorocytosine
  modified_base 27: mod_base = OTHER; note = Uridine phosphorothiorate
  modified_base 28: mod_base = OTHER; note = 2'-fluorouridine
  modified_base 29: mod_base = OTHER; note = 2'-fluoroguanosine
  modified_base 39: mod_base = OTHER; note = Uridine phosphorothiorate
  modified_base 41: mod_base = OTHER; note = Cytosine phosphorothiorate
  modified_base 44: mod_base = OTHER; note = 2'-Omethyladenosine
  modified_base 45: mod_base = OTHER; note = Guanosine phosphorothiorate
  modified_base 46: mod_base = OTHER; note = 2'-fluoroguanosine phosphorothiorate
  modified_base 50: mod_base = OTHER; note = Cytosine phosphorothiorate
  modified_base 56: mod_base = OTHER; note = 2'-Omethylcytosine
  modified_base 57: mod_base = OTHER; note = 2'-fluoroguanosine
  modified_base 58: mod_base = OTHER; note = 2'-fluoroadenosine
  modified_base 59: mod_base = OTHER; note = 2'-fluoroguanosine
  modified_base 62: mod_base = OTHER; note = Cytosine phosphorothiorate
  modified_base 63: mod_base = OTHER; note = 2'-Omethylcytosine
  modified_base 72: mod_base = OTHER; note = 2'-Omethylcytosine phosphorothiorate

SEQ ID NO: 8484 - RNA, 86 nt, synthetic construct; identical to SEQ ID NO: 3290
  source 1..86: mol_type = other RNA
  modified_base 60: mod_base = OTHER; note = 2'-fluorouridine

SEQ ID NO: 8485 - RNA, 76 nt, synthetic construct; identical to SEQ ID NO: 625
  source 1..76: mol_type = other RNA
  modified_base 2: mod_base = OTHER; note = 2'-Omethylguanosine
  modified_base 3: mod_base = OTHER; note = 2'-Omethylcytosine
  modified_base 5: mod_base = OTHER; note = 2'-fluorocytosine phosphorothiorate
  modified_base 6: mod_base = OTHER; note = 2'-Omethylcytosine
  modified_base 9: mod_base = OTHER; note = Guanosine phosphorothiorate
  modified_base 10: mod_base = OTHER; note = 2'-Omethylguanosine
  modified_base 12: mod_base = OTHER; note = 2'-Omethylguanosine
  modified_base 13: mod_base = OTHER; note = Cytosine phosphorothiorate
  modified_base 14: mod_base = OTHER; note = 2'-Omethyladenosine
  modified_base 15: mod_base = OTHER; note = 2'-fluoroadenosine phosphorothiorate
  modified_base 16: mod_base = OTHER; note = 2'-fluorouridine phosphorothiorate
  modified_base 17: mod_base = OTHER; note = 2'-Omethylguanosine
  modified_base 18: mod_base = OTHER; note = 2'-fluoroguanosine phosphorothiorate
  modified_base 20: mod_base = OTHER; note = Uridine phosphorothiorate
  modified_base 22: mod_base = OTHER; note = 2'-Omethylguanosine
  modified_base 24: mod_base = OTHER; note = 2'-fluoroguanosine
  modified_base 27: mod_base = OTHER; note = 2'-fluorouridine
  modified_base 28: mod_base = OTHER; note = Uridine phosphorothiorate
  modified_base 29: mod_base = OTHER; note = 2'-Omethylguanosine
  modified_base 39: mod_base = OTHER; note = 2'-Omethyluridine phosphorothiorate
  modified_base 41: mod_base = OTHER; note = Cytosine phosphorothiorate
  modified_base 42: mod_base = OTHER; note = 2'-Omethyladenosine
  modified_base 46: mod_base = OTHER; note = 2'-Omethylguanosine
  modified_base 49: mod_base = OTHER; note = 2'-fluorocytosine
  modified_base 50: mod_base = OTHER; note = 2'-fluorocytosine
  modified_base 53: mod_base = OTHER; note = 2'-fluoroguanosine
  modified_base 54: mod_base = OTHER; note = Uridine phosphorothiorate
  modified_base 55: mod_base = OTHER; note = Uridine phosphorothiorate
  modified_base 56: mod_base = OTHER; note = 2'-Omethylcytosine
  modified_base 57: mod_base = OTHER; note = 2'-fluoroguanosine
  modified_base 59: mod_base = OTHER; note = Guanosine phosphorothiorate
  modified_base 60: mod_base = OTHER; note = 2'-fluorouridine
  modified_base 61: mod_base = OTHER; note = Cytosine phosphorothiorate
  modified_base 62: mod_base = OTHER; note = 2'-Omethylcytosine
  modified_base 64: mod_base = OTHER; note = 2'-fluoroguanosine
  modified_base 71: mod_base = OTHER; note = 2'-fluorouridine
  modified_base 72: mod_base = OTHER; note = 2'-Omethylcytosine
  modified_base 76: mod_base = OTHER; note = 2'-Omethyladenosine

SEQ ID NO: 8486 - RNA, 85 nt, synthetic construct; identical to SEQ ID NO: 3317
  source 1..85: mol_type = other RNA
  modified_base 1: mod_base = OTHER; note = 2'-Omethylguanosine phosphorothiorate
  modified_base 2: mod_base = OTHER; note = 2'-Omethylcytosine
  modified_base 15: mod_base = OTHER; note = 2'-Omethylguanosine
  modified_base 22: mod_base = OTHER; note = 2'-fluoroadenosine
  modified_base 34: mod_base = OTHER; note = 2'-fluorocytosine
  modified_base 44: mod_base = OTHER; note = Uridine phosphorothiorate
  modified_base 51: mod_base = OTHER; note = 2'-fluorouridine phosphorothiorate
  modified_base 61: mod_base = OTHER; note = 2'-Omethylguanosine phosphorothiorate
  modified_base 81: mod_base = OTHER; note = 2'-Omethylcytosine phosphorothiorate

SEQ ID NO: 8487 - RNA, 76 nt, synthetic construct; identical to SEQ ID NO: 3289
  source 1..76: mol_type = other RNA
  modified_base 1: mod_base = OTHER; note = 2'-Omethylguanosine
  modified_base 10: mod_base = OTHER; note = 2'-Omethylguanosine
  modified_base 11: mod_base = OTHER; note = 2'-Omethylcytosine
  modified_base 12: mod_base = OTHER; note = 2'-Omethyluridine
  modified_base 13: mod_base = OTHER; note = 2'-Omethylcytosine
  modified_base 14: mod_base = OTHER; note = 2'-Omethyladenosine
  modified_base 15: mod_base = OTHER; note = 2'-Omethylguanosine
  modified_base 16: mod_base = OTHER; note = 2'-Omethyluridine
  modified_base 18: mod_base = OTHER; note = 2'-Omethylguanosine
  modified_base 19: mod_base = OTHER; note = 2'-Omethylguanosine
  modified_base 20: mod_base = OTHER; note = Uridine phosphorothiorate
  modified_base 21: mod_base = OTHER; note = Adenosine phosphorothiorate
  modified_base 22: mod_base = OTHER; note = 2'-Omethylguanosine
  modified_base 23: mod_base = OTHER; note = 2'-Omethyladenosine
  modified_base 24: mod_base = OTHER; note = 2'-Omethylguanosine
  modified_base 25: mod_base = OTHER; note = 2'-Omethylcytosine
  modified_base 33: mod_base = OTHER; note = 2'-fluorouridine
  modified_base 34: mod_base = OTHER; note = 2'-Omethyluridine
  modified_base 35: mod_base = OTHER; note = Uridine phosphorothiorate
  modified_base 37: mod_base = OTHER; note = Adenosine phosphorothiorate
  modified_base 38: mod_base = OTHER; note = Adenosine phosphorothiorate
  modified_base 41: mod_base = OTHER; note = 2'-Omethyluridine
  modified_base 42: mod_base = OTHER; note = 2'-Omethylguanosine
  modified_base 43: mod_base = OTHER; note = 2'-Omethyladenosine
  modified_base 44: mod_base = OTHER; note = 2'-Omethylguanosine
  modified_base 49: mod_base = OTHER; note = 2'-Omethylcytosine
  modified_base 50: mod_base = OTHER; note = 2'-Omethyladenosine
  modified_base 52: mod_base = OTHER; note = 2'-Omethylguanosine
  modified_base 54: mod_base = OTHER; note = Uridine phosphorothiorate
  modified_base 55: mod_base = OTHER; note = Uridine phosphorothiorate
  modified_base 61: mod_base = OTHER; note = 2'-Omethylcytosine
  modified_base 65: mod_base = OTHER; note = 2'-Omethylguanosine
  modified_base 73: mod_base = OTHER; note = 2'-Omethylguanosine

SEQ ID NO: 8488 - RNA, 76 nt, synthetic construct; identical to SEQ ID NO: 3318
  source 1..76: mol_type = other RNA
  modified_base 1: mod_base = OTHER; note = 2'-Omethylcytosine
  modified_base 18: mod_base = OTHER; note = 2'-Omethylguanosine
  modified_base 19: mod_base = OTHER; note = 2'-Omethylguanosine
  modified_base 33: mod_base = OTHER; note = Uridine phosphorothiorate
  modified_base 34: mod_base = OTHER; note = 2'-Omethylcytosine
  modified_base 35: mod_base = OTHER; note = Uridine phosphorothiorate
  modified_base 37: mod_base = OTHER; note = Guanosine phosphorothiorate
  modified_base 38: mod_base = OTHER; note = Adenosine phosphorothiorate
  modified_base 41: mod_base = OTHER; note = 2'-fluorocytosine
  modified_base 42: mod_base = OTHER; note = 2'-Omethyluridine
  modified_base 43: mod_base = OTHER; note = 2'-Omethyluridine
  modified_base 44: mod_base = OTHER; note = 2'-fluoroadenosine
  modified_base 50: mod_base = OTHER; note = 2'-Omethylcytosine
  modified_base 52: mod_base = OTHER; note = 2'-Omethylguanosine
  modified_base 73: mod_base = OTHER; note = 2'-Omethyladenosine

SEQ ID NO: 8489 - RNA, 76 nt, synthetic construct; identical to SEQ ID NO: 625
  source 1..76: mol_type = other RNA
  modified_base 1: mod_base = OTHER; note = 2'-Omethylguanosine
  modified_base 10: mod_base = OTHER; note = 2'-Omethylguanosine
  modified_base 13: mod_base = OTHER; note = 2'-Omethylcytosine
  modified_base 17: mod_base = OTHER; note = Guanosine phosphorothiorate
  modified_base 18: mod_base = OTHER; note = 2'-Omethylguanosine
  modified_base 19: mod_base = OTHER; note = Adenosine phosphorothiorate
  modified_base 20: mod_base = OTHER; note = 2'-Omethyluridine
  modified_base 25: mod_base = OTHER; note = 2'-Omethylcytosine
  modified_base 29: mod_base = OTHER; note = 2'-Omethylguanosine
  modified_base 33: mod_base = OTHER; note = 2'-fluorouridine
  modified_base 35: mod_base = OTHER; note = Cytosine phosphorothiorate
  modified_base 37: mod_base = OTHER; note = Adenosine phosphorothiorate
  modified_base 38: mod_base = OTHER; note = Adenosine phosphorothiorate
  modified_base 41: mod_base = OTHER; note = 2'-Omethylcytosine
  modified_base 43: mod_base = OTHER; note = 2'-Omethyladenosine
  modified_base 44: mod_base = OTHER; note = 2'-fluoroadenosine
  modified_base 46: mod_base = OTHER; note = Guanosine phosphorothiorate
  modified_base 50: mod_base = OTHER; note = 2'-Omethylcytosine
  modified_base 52: mod_base = OTHER; note = 2'-Omethylguanosine
  modified_base 54: mod_base = OTHER; note = Uridine phosphorothiorate
  modified_base 55: mod_base = OTHER; note = Uridine phosphorothiorate
  modified_base 56: mod_base = OTHER; note = 2'-Omethylcytosine
  modified_base 57: mod_base = OTHER; note = Guanosine phosphorothiorate
  modified_base 62: mod_base = OTHER; note = 2'-Omethylcytosine
  modified_base 63: mod_base = OTHER; note = 2'-fluorocytosine
  modified_base 65: mod_base = OTHER; note = 2'-Omethylguanosine phosphorothiorate
  modified_base 71: mod_base = OTHER; note = 2'-Omethyluridine
  modified_base 73: mod_base = OTHER; note = 2'-Omethylguanosine

SEQ ID NO: 8490 - RNA, 85 nt, synthetic construct; identical to SEQ ID NO: 3288
  source 1..85: mol_type = other RNA
  modified_base 1: mod_base = OTHER; note = 2'-Omethylcytosine
  modified_base 2: mod_base = OTHER; note = 2'-fluorocytosine
  modified_base 27: mod_base = OTHER; note = 2'-fluorouridine
  modified_base 51: mod_base = OTHER; note = 2'-Omethyluridine
  modified_base 56: mod_base = OTHER; note = 2'-fluoroguanosine
  modified_base 57: mod_base = OTHER; note = 2'-Omethylcytosine
  modified_base 73: mod_base = OTHER; note = Adenosine phosphorothiorate
  modified_base 84: mod_base = OTHER; note = 2'-fluorocytosine

SEQ ID NO: 8491 - RNA, 76 nt, synthetic construct; identical to SEQ ID NO: 3295
  source 1..76: mol_type = other RNA
  modified_base 1: mod_base = OTHER; note = 2'-Omethylcytosine
  modified_base 2: mod_base = OTHER; note = 2'-fluorocytosine phosphorothiorate
  modified_base 5: mod_base = OTHER; note = 2'-fluorocytosine phosphorothiorate
  modified_base 6: mod_base = OTHER; note = 2'-fluoroguanosine phosphorothiorate
  modified_base 21: mod_base = OTHER; note = 2'-fluoroadenosine phosphorothiorate
  modified_base 26: mod_base = OTHER; note = 2'-Omethylguanosine
  modified_base 31: mod_base = OTHER; note = 2'-fluoroadenosine phosphorothiorate
  modified_base 53: mod_base = OTHER; note = 2'-Omethylguanosine phosphorothiorate
  modified_base 58: mod_base = OTHER; note = 2'-fluoroadenosine phosphorothiorate
  modified_base 59: mod_base = OTHER; note = 2'-fluoroadenosine phosphorothiorate
  modified_base 76: mod_base = OTHER; note = 2'-Omethyladenosine

SEQ ID NO: 8492 - RNA, 76 nt, synthetic construct; identical to SEQ ID NO: 3318
  source 1..76: mol_type = other RNA
  modified_base 1: mod_base = OTHER; note = 2'-Omethylcytosine phosphorothiorate
  modified_base 2: mod_base = OTHER; note = 2'-Omethylcytosine
  modified_base 3: mod_base = OTHER; note = 2'-Omethyluridine
  modified_base 4: mod_base = OTHER; note = 2'-Omethyluridine
  modified_base 5: mod_base = OTHER; note = 2'-Omethylcytosine
  modified_base 6: mod_base = OTHER; note = 2'-Omethylguanosine
  modified_base 16: mod_base = OTHER; note = 2'-Omethyluridine
  modified_base 18: mod_base = OTHER; note = 2'-Omethylguanosine
  modified_base 19: mod_base = OTHER; note = 2'-Omethylguanosine
  modified_base 33: mod_base = OTHER; note = 2'-fluorouridine
  modified_base 35: mod_base = OTHER; note = Uridine phosphorothiorate
  modified_base 37: mod_base = OTHER; note = Guanosine phosphorothiorate
  modified_base 38: mod_base = OTHER; note = Adenosine phosphorothiorate
  modified_base 44: mod_base = OTHER; note = 2'-Omethyladenosine
  modified_base 45: mod_base = OTHER; note = 2'-Omethylguanosine
  modified_base 46: mod_base = OTHER; note = 2'-fluoroguanosine
  modified_base 47: mod_base = OTHER; note = 2'-fluorouridine
  modified_base 48: mod_base = OTHER; note = 2'-fluorocytosine
  modified_base 49: mod_base = OTHER; note = 2'-Omethylguanosine
  modified_base 50: mod_base = OTHER; note = 2'-Omethylcytosine
  modified_base 51: mod_base = OTHER; note = 2'-Omethyluridine
  modified_base 52: mod_base = OTHER; note = 2'-Omethylguanosine
  modified_base 53: mod_base = OTHER; note = 2'-Omethylguanosine
  modified_base 54: mod_base = OTHER; note = 2'-Omethyluridine
  modified_base 56: mod_base = OTHER; note = 2'-Omethylcytosine
  modified_base 59: mod_base = OTHER; note = 2'-Omethyladenosine
  modified_base 61: mod_base = OTHER; note = 2'-Omethylcytosine
  modified_base 62: mod_base = OTHER; note = 2'-Omethylcytosine
  modified_base 63: mod_base = OTHER; note = 2'-fluoroguanosine
  modified_base 64: mod_base = OTHER; note = 2'-Omethylguanosine
  modified_base 65: mod_base = OTHER; note = 2'-Omethylcytosine
  modified_base 66: mod_base = OTHER; note = 2'-Omethyluridine
  modified_base 67: mod_base = OTHER; note = 2'-Omethylcytosine
  modified_base 68: mod_base = OTHER; note = 2'-Omethylguanosine
  modified_base 73: mod_base = OTHER; note = 2'-Omethyladenosine

SEQ ID NO: 8493 - RNA, 76 nt, synthetic construct; identical to SEQ ID NO: 3342
  source 1..76: mol_type = other RNA
  modified_base 1: mod_base = OTHER; note = 2'-Omethylguanosine
  modified_base 2: mod_base = OTHER; note = 2'-Omethylguanosine
  modified_base 3: mod_base = OTHER; note = 2'-Omethylcytosine
  modified_base 4: mod_base = OTHER; note = 2'-Omethyluridine
  modified_base 5: mod_base = OTHER; note = 2'-Omethylcytosine
  modified_base 6: mod_base = OTHER; note = 2'-Omethylcytosine
  modified_base 14: mod_base = OTHER; note = 2'-Omethyladenosine
  modified_base 17: mod_base = OTHER; note = 2'-Omethylguanosine
  modified_base 18: mod_base = OTHER; note = 2'-Omethylguanosine
  modified_base 20: mod_base = OTHER; note = 2'-Omethyluridine
  modified_base 22: mod_base = OTHER; note = 2'-Omethylguanosine
  modified_base 25: mod_base = OTHER; note = 2'-Omethylcytosine
  modified_base 27: mod_base = OTHER; note = 2'-Omethyluridine
  modified_base 33: mod_base = OTHER; note = 2'-fluorouridine
  modified_base 71: mod_base = OTHER; note = 2'-Omethyluridine
  modified_base 73: mod_base = OTHER; note = 2'-Omethylguanosine

SEQ ID NO: 8494 - DNA, 76 bp, synthetic construct; identical to SEQ ID NO: 1924
  source 1..76: mol_type = other DNA
  modified_base 1: mod_base = OTHER; note = 2'-Omethylguanosine phosphorothiorate
  modified_base 2: mod_base = OTHER; note = 2'-Omethylguanosine phosphorothiorate
  modified_base 5: mod_base = OTHER; note = 2'-fluorocytosine phosphorothiorate
  modified_base 6: mod_base = OTHER; note = 2'-O-(2-Methoxyethyl) 5-methylcytosine
  modified_base 9: mod_base = OTHER; note = Guanosine phosphorothiorate
  modified_base 11: mod_base = OTHER; note = Cytosine phosphorothiorate
  modified_base 12: mod_base = OTHER; note = Guanosine phosphorothiorate
  modified_base 13: mod_base = OTHER; note = Cytosine phosphorothiorate
  modified_base 15: mod_base = OTHER; note = Adenosine phosphorothiorate
  modified_base 19: mod_base = OTHER; note = Adenosine phosphorothiorate
  modified_base 21: mod_base = OTHER; note = 2'-fluoroadenosine phosphorothiorate
  modified_base 22: mod_base = OTHER; note = Guanosine phosphorothiorate
  modified_base 23: mod_base = OTHER; note = Cytosine phosphorothiorate
  modified_base 24: mod_base = OTHER; note = deoxyguanosine phosphorothiorate
  modified_base 25: mod_base = OTHER; note = 2'-Omethylcytosine
  modified_base 27: mod_base = OTHER; note = Uridine phosphorothiorate
  modified_base 28: mod_base = OTHER; note = 2'-Omethyluridine
  modified_base 29: mod_base = OTHER; note = 2'-O-(2-Methoxyethyl) guanosine phosphorothiorate
  modified_base 30: mod_base = OTHER; note = 2'-Omethylguanosine
  modified_base 32: mod_base = OTHER; note = 2'-fluorocytosine
  modified_base 37: mod_base = OTHER; note = Adenosine phosphorothiorate
  modified_base 38: mod_base = OTHER; note = deoxyadenosine phosphorothiorate
  modified_base 39: mod_base = OTHER; note = deoxyuridine phosphorothiorate
  modified_base 40: mod_base = OTHER; note = 2'-fluorouridine
  modified_base 41: mod_base = OTHER; note = Cytosine phosphorothiorate
  modified_base 42: mod_base = OTHER; note = 2'-Omethyladenosine phosphorothiorate
  modified_base 47: mod_base = OTHER; note = Uridine phosphorothiorate
  modified_base 48: mod_base = OTHER; note = 2'-O-(2-Methoxyethyl) thymine
  modified_base 49: mod_base = OTHER; note = deoxycytosine phosphorothiorate
  modified_base 50: mod_base = OTHER; note = Cytosine phosphorothiorate
  modified_base 51: mod_base = OTHER; note = 2'-O-(2-Methoxyethyl) guanosine
  modified_base 52: mod_base = OTHER; note = 2'-fluoroguanosine phosphorothiorate
  modified_base 55: mod_base = OTHER; note = Uridine phosphorothiorate
  modified_base 56: mod_base = OTHER; note = 2'-fluorocytosine phosphorothiorate
  modified_base 57: mod_base = OTHER; note = 2'-Omethylguanosine
  modified_base 59: mod_base = OTHER; note = Guanosine phosphorothiorate
  modified_base 60: mod_base = OTHER; note = 2'-Omethyluridine
  modified_base 61: mod_base = OTHER; note = Cytosine phosphorothiorate
  modified_base 62: mod_base = OTHER; note = 2'-O-(2-Methoxyethyl) 5-methylcytosine
  modified_base 63: mod_base = OTHER; note = 2'-fluorocytosine phosphorothiorate
  modified_base 64: mod_base = OTHER; note = 2'-Omethylguanosine
  modified_base 65: mod_base = OTHER; note = 2'-fluoroguanosine
  modified_base 70: mod_base = OTHER; note = 2'-Omethylguanosine
  modified_base 75: mod_base = OTHER; note = Cytosine phosphorothiorate
  misc_feature 1..23: note = RNA
  misc_feature 24: note = DNA
  misc_feature 25..37: note = RNA
  misc_feature 38..39: note = DNA
  misc_feature 40..42: note = RNA
  misc_feature 43: note = DNA
  misc_feature 44..48: note = RNA
  misc_feature 49: note = DNA
  misc_feature 50..73: note = RNA
  misc_feature 74: note = DNA
  misc_feature 75: note = RNA
  misc_feature 76: note = DNA

SEQ ID NO: 8495 - RNA, 76 nt, synthetic construct; identical to SEQ ID NO: 625
  source 1..76: mol_type = other RNA
  modified_base 1: mod_base = OTHER; note = 2'-fluoroguanosine
  modified_base 2: mod_base = OTHER; note = 2'-Omethylguanosine
  modified_base 4: mod_base = OTHER; note = Uridine phosphorothiorate
  modified_base 5: mod_base = OTHER; note = 2'-Omethylcytosine
  modified_base 10: mod_base = OTHER; note = 2'-fluoroguanosine phosphorothiorate
  modified_base 12: mod_base = OTHER; note = Guanosine phosphorothiorate
  modified_base 13: mod_base = OTHER; note = 2'-Omethylcytosine
  modified_base 17: mod_base = OTHER; note = Guanosine phosphorothiorate
  modified_base 22: mod_base = OTHER; note = 2'-fluoroguanosine
  modified_base 23: mod_base = OTHER; note = 2'-fluorocytosine
  modified_base 25: mod_base = OTHER; note = 2'-fluorocytosine
  modified_base 28: mod_base = OTHER; note = 2'-Omethyluridine
  modified_base 29: mod_base = OTHER; note = Guanosine phosphorothiorate
  modified_base 30: mod_base = OTHER; note = Guanosine phosphorothiorate
  modified_base 31: mod_base = OTHER; note = 2'-fluoroadenosine
  modified_base 32: mod_base = OTHER; note = 2'-fluorocytosine
  modified_base 38: mod_base = OTHER; note = 2'-fluoroadenosine
  modified_base 39: mod_base = OTHER; note = 2'-fluorouridine phosphorothiorate
  modified_base 45: mod_base = OTHER; note = 2'-Omethylguanosine phosphorothiorate
  modified_base 46: mod_base = OTHER; note = 2'-Omethylguanosine
  modified_base 48: mod_base = OTHER; note = Uridine phosphorothiorate
  modified_base 49: mod_base = OTHER; note = 2'-fluorocytosine phosphorothiorate
  modified_base 50: mod_base = OTHER; note = 2'-fluorocytosine
  modified_base 52: mod_base = OTHER; note = 2'-fluoroguanosine
  modified_base 56: mod_base = OTHER; note = 2'-fluorocytosine phosphorothiorate
  modified_base 63: mod_base = OTHER; note = 2'-fluorocytosine phosphorothiorate
  modified_base 66: mod_base = OTHER; note = Cytosine phosphorothiorate
  modified_base 69: mod_base = OTHER; note = 2'-Omethyladenosine phosphorothiorate
  modified_base 70: mod_base = OTHER; note = 2'-fluoroguanosine
  modified_base 71: mod_base = OTHER; note = Uridine phosphorothiorate

SEQ ID NO: 8496 - RNA, 86 nt, synthetic construct; identical to SEQ ID NO: 3290
  source 1..86: mol_type = other RNA
  modified_base 61: mod_base = OTHER; note = 2'-fluoroguanosine

SEQ ID NO: 8497 - RNA, 86 nt, synthetic construct; identical to SEQ ID NO: 3290
  source 1..86: mol_type = other RNA
  modified_base 1: mod_base = OTHER; note = 2'-Omethyladenosine phosphorothiorate
  modified_base 2: mod_base = OTHER; note = 2'-Omethylcytosine phosphorothiorate
  modified_base 62: mod_base = OTHER; note = Guanosine phosphorothiorate
  modified_base 84: mod_base = OTHER; note = Cytosine phosphorothiorate
  modified_base 85: mod_base = OTHER; note = 2'-Omethylcytosine

SEQ ID NO: 8498 - RNA, 75 nt, synthetic construct; identical to SEQ ID NO: 1045
  source 1..75: mol_type = other RNA
  modified_base 2: mod_base = OTHER; note = 2'-Omethylguanosine phosphorothiorate
  modified_base 5: mod_base = OTHER; note = 2'-Omethylcytosine
  modified_base 16: mod_base = OTHER; note = 2'-Omethyluridine phosphorothiorate
  modified_base 17: mod_base = OTHER; note = 2'-Omethylguanosine phosphorothiorate
  modified_base 18: mod_base = OTHER; note = 2'-Omethylguanosine
  modified_base 39: mod_base = OTHER; note = 2'-Omethyluridine phosphorothiorate
  modified_base 41: mod_base = OTHER; note = 2'-Omethylcytosine
  modified_base 44: mod_base = OTHER; note = 2'-Omethylcytosine phosphorothiorate
  modified_base 47: mod_base = OTHER; note = 2'-fluorouridine
  modified_base 48: mod_base = OTHER; note = 2'-Omethylcytosine phosphorothiorate
  modified_base 50: mod_base = OTHER; note = 2'-Omethylguanosine
  modified_base 53: mod_base = OTHER; note = 2'-Omethyluridine
  modified_base 60: mod_base = OTHER; note = Cytosine phosphorothiorate
  modified_base 61: mod_base = OTHER; note = 2'-Omethyluridine
  modified_base 66: mod_base = OTHER; note = 2'-fluoroguanosine phosphorothiorate
  modified_base 72: mod_base = OTHER; note = 2'-Omethyluridine

SEQ ID NO: 8499 - RNA, 76 nt, synthetic construct; identical to SEQ ID NO: 625
  source 1..76: mol_type = other RNA
  modified_base 71: mod_base = OTHER; note = Thymine

SEQ ID NO: 8500 - RNA, 85 nt, synthetic construct; identical to SEQ ID NO: 3317
  source 1..85: mol_type = other RNA
  modified_base 1: mod_base = OTHER; note = 2'-Omethylguanosine phosphorothiorate
  modified_base 2: mod_base = OTHER; note = 2'-Omethylcytosine
  modified_base 17: mod_base = OTHER; note = 2'-fluoroguanosine phosphorothiorate
  modified_base 34: mod_base = OTHER; note = 2'-fluorocytosine
  modified_base 47: mod_base = OTHER; note = 2'-Omethylguanosine phosphorothiorate
  modified_base 55: mod_base = OTHER; note = 2'-fluorocytosine
  modified_base 61: mod_base = OTHER; note = 2'-Omethylguanosine phosphorothiorate
  modified_base 74: mod_base = OTHER; note = Cytosine phosphorothiorate
  modified_base 82: mod_base = OTHER; note = 2'-Omethylguanosine

SEQ ID NO: 8501 - DNA, 76 bp, synthetic construct; identical to SEQ ID NO: 1924
  source 1..76: mol_type = other DNA
  modified_base 1: mod_base = OTHER; note = 2'-Omethylguanosine
  modified_base 2: mod_base = OTHER; note = 2'-O-(2-Methoxyethyl) guanosine phosphorothiorate
  modified_base 3: mod_base = OTHER; note = 2'-Omethylcytosine
  modified_base 8: mod_base = OTHER; note = 2'-fluorouridine
  modified_base 11: mod_base = OTHER; note = 2'-fluorocytosine
  modified_base 12: mod_base = OTHER; note = 2'-O-(2-Methoxyethyl) guanosine phosphorothiorate
  modified_base 13: mod_base = OTHER; note = 2'-Omethylcytosine
  modified_base 14: mod_base = OTHER; note = Adenosine phosphorothiorate
  modified_base 15: mod_base = OTHER; note = 2'-fluoroadenosine
  modified_base 19: mod_base = OTHER; note = 2'-O-(2-Methoxyethyl) adenosine
  modified_base 21: mod_base = OTHER; note = 2'-fluoroadenosine
  modified_base 23: mod_base = OTHER; note = Cytosine phosphorothiorate
  modified_base 25: mod_base = OTHER; note = Cytosine phosphorothiorate
  modified_base 26: mod_base = OTHER; note = 2'-O-(2-Methoxyethyl) adenosine
  modified_base 28: mod_base = OTHER; note = 2'-O-(2-Methoxyethyl) thymine phosphorothiorate
  modified_base 30: mod_base = OTHER; note = 2'-Omethylguanosine
  modified_base 31: mod_base = OTHER; note = Adenosine phosphorothiorate
  modified_base 32: mod_base = OTHER; note = 2'-O-(2-Methoxyethyl) 5-methylcytosine phosphorothiorate
  modified_base 35: mod_base = OTHER; note = 2'-fluorocytosine
  modified_base 38: mod_base = OTHER; note = deoxyadenosine phosphorothiorate
  modified_base 39: mod_base = OTHER; note = 2'-Omethyluridine
  modified_base 40: mod_base = OTHER; note = 2'-O-(2-Methoxyethyl) thymine
  modified_base 44: mod_base = OTHER; note = Adenosine phosphorothiorate
  modified_base 45: mod_base = OTHER; note = 2'-O-(2-Methoxyethyl) guanosine phosphorothiorate
  modified_base 46: mod_base = OTHER; note = deoxyguanosine phosphorothiorate
  modified_base 47: mod_base = OTHER; note = 2'-O-(2-Methoxyethyl) thymine
  modified_base 52: mod_base = OTHER; note = 2'-O-(2-Methoxyethyl) guanosine
  modified_base 55: mod_base = OTHER; note = Uridine phosphorothiorate
  modified_base 62: mod_base = OTHER; note = 2'-fluorocytosine
  modified_base 64: mod_base = OTHER; note = Guanosine phosphorothiorate
  modified_base 68: mod_base = OTHER; note = 2'-O-(2-Methoxyethyl) guanosine phosphorothiorate
  modified_base 72: mod_base = OTHER; note = 2'-fluorocytosine
  modified_base 73: mod_base = OTHER; note = Guanosine phosphorothiorate
  modified_base 74: mod_base = OTHER; note = 2'-fluorocytosine phosphorothiorate
  misc_feature 1..28: note = RNA
  misc_feature 29: note = DNA
  misc_feature 30..37: note = RNA
  misc_feature 38: note = DNA
  misc_feature 39..45: note = RNA
  misc_feature 46: note = DNA
  misc_feature 47..62: note = RNA
  misc_feature 63: note = DNA
  misc_feature 64..76: note = RNA

SEQ ID NO: 8502 - RNA, 76 nt, synthetic construct; identical to SEQ ID NO: 3318
  source 1..76: mol_type = other RNA
  modified_base 52: mod_base = OTHER; note = 2'-Omethylguanosine
  modified_base 62: mod_base = OTHER; note = 2'-Omethylcytosine

SEQ ID NO: 8503 - RNA, 86 nt, synthetic construct; identical to SEQ ID NO: 3290
  source 1..86: mol_type = other RNA
  modified_base 82: mod_base = OTHER; note = Uridine phosphorothiorate

SEQ ID NO: 8504 - RNA, 76 nt, synthetic construct; identical to SEQ ID NO: 625
  source 1..76: mol_type = other RNA
  modified_base 1: mod_base = OTHER; note = 2'-fluoroguanosine
  modified_base 2: mod_base = OTHER; note = 2'-fluoroguanosine
  modified_base 3: mod_base = OTHER; note = 2'-fluorocytosine
  modified_base 6: mod_base = OTHER; note = 2'-Omethylcytosine phosphorothiorate
  modified_base 8: mod_base = OTHER; note = Uridine phosphorothiorate
  modified_base 11: mod_base = OTHER; note = 2'-fluorocytosine
  modified_base 12: mod_base = OTHER; note = 2'-Omethylguanosine
  modified_base 13: mod_base = OTHER; note = 2'-fluorocytosine
  modified_base 14: mod_base = OTHER; note = 2'-fluoroadenosine
  modified_base 15: mod_base = OTHER; note = 2'-Omethyladenosine
  modified_base 20: mod_base = OTHER; note = 2'-Omethyluridine
  modified_base 21: mod_base = OTHER; note = Adenosine phosphorothiorate
  modified_base 29: mod_base = OTHER; note = Guanosine phosphorothiorate
  modified_base 30: mod_base = OTHER; note = 2'-Omethylguanosine
  modified_base 31: mod_base = OTHER; note = 2'-fluoroadenosine
  modified_base 33: mod_base = OTHER; note = 2'-fluorouridine
  modified_base 38: mod_base = OTHER; note = 2'-fluoroadenosine
  modified_base 41: mod_base = OTHER; note = 2'-Omethylcytosine
  modified_base 45: mod_base = OTHER; note = 2'-fluoroguanosine phosphorothiorate
  modified_base 46: mod_base = OTHER; note = 2'-fluoroguanosine
  modified_base 47: mod_base = OTHER; note = 2'-Omethyluridine
  modified_base 52: mod_base = OTHER; note = 2'-Omethylguanosine
  modified_base 53: mod_base = OTHER; note = 2'-fluoroguanosine phosphorothiorate
  modified_base 54: mod_base = OTHER; note = 2'-Omethyluridine
  modified_base 57: mod_base = OTHER; note = 2'-fluoroguanosine
  modified_base 58: mod_base = OTHER; note = Adenosine phosphorothiorate
  modified_base 59: mod_base = OTHER; note = 2'-fluoroguanosine
  modified_base 60: mod_base = OTHER; note = 2'-fluorouridine
  modified_base 62: mod_base = OTHER; note = Cytosine phosphorothiorate
  modified_base 63: mod_base = OTHER; note = 2'-Omethylcytosine
  modified_base 65: mod_base = OTHER; note = 2'-fluoroguanosine phosphorothiorate
  modified_base 66: mod_base = OTHER; note = 2'-fluorocytosine
  modified_base 68: mod_base = OTHER; note = Guanosine phosphorothiorate
  modified_base 69: mod_base = OTHER; note = 2'-Omethyladenosine phosphorothiorate
  modified_base 70: mod_base = OTHER; note = 2'-Omethylguanosine
  modified_base 71: mod_base = OTHER; note = 2'-Omethyluridine
  modified_base 72: mod_base = OTHER; note = Cytosine phosphorothiorate
  modified_base 76: mod_base = OTHER; note = 2'-Omethyladenosine

SEQ ID NO: 8505 - RNA, 76 nt, synthetic construct
  source 1..76: mol_type = other RNA
ggctccgtggcgcaatggatagcgcattggacttcaaattcaaaggttccgggttgagtacccggcggagtcgcca

SEQ ID NO: 8506 - RNA, 75 nt, synthetic construct; identical to SEQ ID NO: 1045
  source 1..75: mol_type = other RNA
  modified_base 1: mod_base = OTHER; note = 2'-Omethylguanosine
  modified_base 13: mod_base = OTHER; note = 2'-Omethyluridine
  modified_base 17: mod_base = OTHER; note = 2'-Omethylguanosine
  modified_base 18: mod_base = OTHER; note = 2'-Omethylguanosine
  modified_base 25: mod_base = OTHER; note = 2'-Omethylcytosine
  modified_base 33: mod_base = OTHER; note = Uridine phosphorothiorate
  modified_base 34: mod_base = OTHER; note = 2'-Omethyluridine
  modified_base 35: mod_base = OTHER; note = Uridine phosphorothiorate
  modified_base 37: mod_base = OTHER; note = Adenosine phosphorothiorate
  modified_base 38: mod_base = OTHER; note = Adenosine phosphorothiorate
  modified_base 41: mod_base = OTHER; note = 2'-fluorocytosine
  modified_base 42: mod_base = OTHER; note = 2'-Omethyladenosine
  modified_base 43: mod_base = OTHER; note = 2'-Omethylguanosine
  modified_base 44: mod_base = OTHER; note = 2'-fluorocytosine
  modified_base 48: mod_base = OTHER; note = 2'-Omethylcytosine
  modified_base 49: mod_base = OTHER; note = 2'-Omethylcytosine
  modified_base 51: mod_base = OTHER; note = 2'-Omethyladenosine
  modified_base 53: mod_base = OTHER; note = Uridine phosphorothiorate
  modified_base 54: mod_base = OTHER; note = Uridine phosphorothiorate
  modified_base 55: mod_base = OTHER; note = 2'-Omethylcytosine
  modified_base 56: mod_base = OTHER; note = Guanosine phosphorothiorate
  modified_base 57: mod_base = OTHER; note = Adenosine phosphorothiorate
  modified_base 58: mod_base = OTHER; note = 2'-Omethylguanosine
  modified_base 60: mod_base = OTHER; note = 2'-Omethylcytosine
  modified_base 64: mod_base = OTHER; note = 2'-Omethylguanosine
  modified_base 72: mod_base = OTHER; note = 2'-Omethyluridine

SEQ ID NO: 8507 - RNA, 76 nt, synthetic construct; identical to SEQ ID NO: 625
  source 1..76: mol_type = other RNA
  modified_base 1: mod_base = OTHER; note = Guanosine phosphorothiorate
  modified_base 2: mod_base = OTHER; note = 2'-Omethylguanosine
  modified_base 3: mod_base = OTHER; note = Cytosine phosphorothiorate
  modified_base 4: mod_base = OTHER; note = 2'-fluorouridine phosphorothiorate
  modified_base 5: mod_base = OTHER; note = 2'-fluorocytosine
  modified_base 7: mod_base = OTHER; note = Guanosine phosphorothiorate
  modified_base 11: mod_base = OTHER; note = 2'-Omethylcytosine
  modified_base 13: mod_base = OTHER; note = 2'-fluorocytosine
  modified_base 16: mod_base = OTHER; note = 2'-fluorouridine
  modified_base 18: mod_base = OTHER; note = 2'-fluoroguanosine phosphorothiorate
  modified_base 20: mod_base = OTHER; note = 2'-fluorouridine
  modified_base 23: mod_base = OTHER; note = 2'-fluorocytosine
  modified_base 26: mod_base = OTHER; note = 2'-fluoroadenosine phosphorothiorate
  modified_base 27: mod_base = OTHER; note = 2'-Omethyluridine
  modified_base 28: mod_base = OTHER; note = 2'-fluorouridine
  modified_base 29: mod_base = OTHER; note = 2'-fluoroguanosine
  modified_base 31: mod_base = OTHER; note = 2'-Omethyladenosine
  modified_base 32: mod_base = OTHER; note = 2'-fluorocytosine
  modified_base 33: mod_base = OTHER; note = Uridine phosphorothiorate
  modified_base 39: mod_base = OTHER; note = 2'-Omethyluridine
  modified_base 42: mod_base = OTHER; note = 2'-fluoroadenosine
  modified_base 43: mod_base = OTHER; note = 2'-Omethyladenosine
  modified_base 48: mod_base = OTHER; note = 2'-Omethyluridine
  modified_base 50: mod_base = OTHER; note = 2'-fluorocytosine
  modified_base 54: mod_base = OTHER; note = 2'-fluorouridine
  modified_base 55: mod_base = OTHER; note = Uridine phosphorothiorate
  modified_base 56: mod_base = OTHER; note = 2'-fluorocytosine phosphorothiorate
  modified_base 66: mod_base = OTHER; note = Cytosine phosphorothiorate
  modified_base 67: mod_base = OTHER; note = 2'-Omethylguanosine
  modified_base 70: mod_base = OTHER; note = 2'-Omethylguanosine
  modified_base 72: mod_base = OTHER; note = 2'-Omethylcytosine
  modified_base 73: mod_base = OTHER; note = 2'-Omethylguanosine
  modified_base 74: mod_base = OTHER; note = 2'-Omethylcytosine
  modified_base 76: mod_base = OTHER; note = 2'-Omethyladenosine

SEQ ID NO: 8508 - RNA, 75 nt, synthetic construct; identical to SEQ ID NO: 3311
  source 1..75: mol_type = other RNA
  modified_base 1: mod_base = OTHER; note = 2'-Omethylguanosine phosphorothiorate
  modified_base 2: mod_base = OTHER; note = 2'-Omethylguanosine phosphorothiorate
  modified_base 14: mod_base = OTHER; note = 2'-Omethyladenosine
  modified_base 23: mod_base = OTHER; note = 2'-fluorocytosine
  modified_base 25: mod_base = OTHER; note = 2'-fluorocytosine
  modified_base 36: mod_base = OTHER; note = 2'-fluoroadenosine
  modified_base 38: mod_base = OTHER; note = 2'-Omethyladenosine
  modified_base 48: mod_base = OTHER; note = 2'-fluorocytosine
  modified_base 60: mod_base = OTHER; note = 2'-fluorocytosine
  modified_base 64: mod_base = OTHER; note = 2'-fluoroguanosine
  modified_base 67: mod_base = OTHER; note = Guanosine phosphorothiorate
  modified_base 68: mod_base = OTHER; note = 2'-fluoroadenosine
  modified_base 74: mod_base = OTHER; note = Cytosine phosphorothiorate

SEQ ID NO: 8509 - DNA, 76 bp, synthetic construct; identical to SEQ ID NO: 1924
  source 1..76: mol_type = other DNA
  misc_feature 1..25: note = RNA
  misc_feature 26: note = DNA
  misc_feature 27..76: note = RNA

SEQ ID NO: 8510 - RNA, 86 nt, synthetic construct; identical to SEQ ID NO: 3290
  source 1..86: mol_type = other RNA
  modified_base 35: mod_base = OTHER; note = 2'-Omethylcytosine

SEQ ID NO: 8511 - RNA, 85 nt, synthetic construct; identical to SEQ ID NO: 3297
  source 1..85: mol_type = other RNA
  modified_base 1: mod_base = OTHER; note = 2'-Omethylguanosine
  modified_base 33: mod_base = OTHER; note = 2'-fluorouridine
  modified_base 35: mod_base = OTHER; note = Cytosine phosphorothiorate
  modified_base 37: mod_base = OTHER; note = Adenosine phosphorothiorate
  modified_base 38: mod_base = OTHER; note = Adenosine phosphorothiorate
  modified_base 82: mod_base = OTHER; note = 2'-Omethylguanosine

SEQ ID NO: 8512 - RNA, 76 nt, synthetic construct; identical to SEQ ID NO: 625
  source 1..76: mol_type = other RNA
  modified_base 1: mod_base = OTHER; note = 2'-Omethylguanosine phosphorothiorate
  modified_base 2: mod_base = OTHER; note = 2'-Omethylguanosine phosphorothiorate
  modified_base 3: mod_base = OTHER; note = 2'-Omethylcytosine
  modified_base 4: mod_base = OTHER; note = 2'-Omethyluridine
  modified_base 5: mod_base = OTHER; note = 2'-Omethylcytosine
  modified_base 6: mod_base = OTHER; note = 2'-Omethylcytosine
  modified_base 10: mod_base = OTHER; note = 2'-Omethylguanosine
  modified_base 11: mod_base = OTHER; note = 2'-Omethylcytosine
  modified_base 12: mod_base = OTHER; note = 2'-Omethylguanosine
  modified_base 13: mod_base = OTHER; note = 2'-Omethylcytosine
  modified_base 14: mod_base = OTHER; note = 2'-Omethyladenosine
  modified_base 15: mod_base = OTHER; note = 2'-fluoroadenosine
  modified_base 16: mod_base = OTHER; note = 2'-Omethyluridine
  modified_base 17: mod_base = OTHER; note = 2'-Omethylguanosine
  modified_base 18: mod_base = OTHER; note = 2'-Omethylguanosine
  modified_base 19: mod_base = OTHER; note = 2'-fluoroadenosine
  modified_base 20: mod_base = OTHER; note = 2'-Omethyluridine
  modified_base 21: mod_base = OTHER; note = 2'-fluoroadenosine
  modified_base 22: mod_base = OTHER; note = 2'-Omethylguanosine
  modified_base 23: mod_base = OTHER; note = 2'-Omethylcytosine
  modified_base 24: mod_base = OTHER; note = 2'-Omethylguanosine
  modified_base 25: mod_base = OTHER; note = 2'-Omethylcytosine
  modified_base 38: mod_base = OTHER; note = Adenosine phosphorothiorate
  modified_base 39: mod_base = OTHER; note = Uridine phosphorothiorate
  modified_base 40: mod_base = OTHER; note = 2'-fluorouridine
  modified_base 43: mod_base = OTHER; note = 2'-Omethyladenosine
  modified_base 44: mod_base = OTHER; note = 2'-Omethyladenosine
  modified_base 45: mod_base = OTHER; note = 2'-Omethylguanosine
  modified_base 46: mod_base = OTHER; note = 2'-fluoroguanosine
  modified_base 48: mod_base = OTHER; note = 2'-fluorouridine
  modified_base 49: mod_base = OTHER; note = 2'-Omethylcytosine
  modified_base 50: mod_base = OTHER; note = 2'-Omethylcytosine
  modified_base 54: mod_base = OTHER; note = Uridine phosphorothiorate
  modified_base 55: mod_base = OTHER; note = Uridine phosphorothiorate
  modified_base 56: mod_base = OTHER; note = 2'-Omethylcytosine
  modified_base 57: mod_base = OTHER; note = Guanosine phosphorothiorate
  modified_base 61: mod_base = OTHER; note = 2'-Omethylcytosine
  modified_base 62: mod_base = OTHER; note = 2'-Omethylcytosine
  modified_base 63: mod_base = OTHER; note = 2'-fluorocytosine
  modified_base 64: mod_base = OTHER; note = 2'-Omethylguanosine
  modified_base 65: mod_base = OTHER; note = 2'-Omethylguanosine
  modified_base 66: mod_base = OTHER; note = 2'-Omethylcytosine
  modified_base 67: mod_base = OTHER; note = 2'-Omethylguanosine
  modified_base 68: mod_base = OTHER; note = 2'-Omethylguanosine
  modified_base 69: mod_base = OTHER; note = 2'-fluoroadenosine

SEQ ID NO: 8513 - RNA, 76 nt, synthetic construct; identical to SEQ ID NO: 3332
  source 1..76: mol_type = other RNA
  modified_base 1: mod_base = OTHER; note = 2'-Omethylguanosine phosphorothiorate
  modified_base 2: mod_base = OTHER; note = 2'-Omethylguanosine phosphorothiorate
  modified_base 3: mod_base = OTHER; note = 2'-Omethylcytosine
  modified_base 4: mod_base = OTHER; note = 2'-Omethylcytosine
  modified_base 5: mod_base = OTHER; note = 2'-Omethylcytosine
  modified_base 6: mod_base = OTHER; note = 2'-Omethylcytosine
  modified_base 10: mod_base = OTHER; note = 2'-Omethylguanosine
  modified_base 11: mod_base = OTHER; note = 2'-Omethylcytosine
  modified_base 12: mod_base = OTHER; note = 2'-Omethylguanosine
  modified_base 13: mod_base = OTHER; note = 2'-Omethylcytosine
  modified_base 22: mod_base = OTHER; note = 2'-Omethylguanosine
  modified_base 23: mod_base = OTHER; note = 2'-Omethylcytosine
  modified_base 24: mod_base = OTHER; note = 2'-Omethylguanosine
  modified_base 25: mod_base = OTHER; note = 2'-Omethylcytosine
  modified_base 49: mod_base = OTHER; note = 2'-Omethylguanosine
  modified_base 50: mod_base = OTHER; note = 2'-Omethylcytosine
  modified_base 51: mod_base = OTHER; note = 2'-Omethylguanosine
  modified_base 52: mod_base = OTHER; note = 2'-Omethylguanosine
  modified_base 53: mod_base = OTHER; note = 2'-Omethylguanosine
  modified_base 54: mod_base = OTHER; note = 2'-Omethyluridine
  modified_base 61: mod_base = OTHER; note = 2'-Omethylcytosine
  modified_base 62: mod_base = OTHER; note = 2'-Omethylcytosine
  modified_base 63: mod_base = OTHER; note = 2'-fluorocytosine
  modified_base 64: mod_base = OTHER; note = 2'-Omethylguanosine
  modified_base 65: mod_base = OTHER; note = 2'-Omethylcytosine
  modified_base 66: mod_base = OTHER; note = 2'-Omethylcytosine
  modified_base 67: mod_base = OTHER; note = 2'-Omethylguanosine
  modified_base 68: mod_base = OTHER; note = 2'-Omethylguanosine
  modified_base 73: mod_base = OTHER; note = 2'-Omethylguanosine

SEQ ID NO: 8514 - RNA, 76 nt, synthetic construct; identical to SEQ ID NO: 625
  source 1..76: mol_type = other RNA
  modified_base 1: mod_base = OTHER; note = 2'-Omethylguanosine phosphorothiorate
  modified_base 2: mod_base = OTHER; note = 2'-Omethylguanosine phosphorothiorate
  modified_base 3: mod_base = OTHER; note = 2'-Omethylcytosine
  modified_base 4: mod_base = OTHER; note = 2'-Omethyluridine
  modified_base 5: mod_base = OTHER; note = 2'-Omethylcytosine
  modified_base 6: mod_base = OTHER; note = 2'-Omethylcytosine
  modified_base 10: mod_base = OTHER; note = 2'-Omethylguanosine
  modified_base 11: mod_base = OTHER; note = 2'-Omethylcytosine
  modified_base 12: mod_base = OTHER; note = 2'-Omethylguanosine
  modified_base 13: mod_base = OTHER; note = 2'-Omethylcytosine
  modified_base 14: mod_base = OTHER; note = 2'-Omethyladenosine
  modified_base 15: mod_base = OTHER; note = 2'-Omethyladenosine
  modified_base 16: mod_base = OTHER; note = 2'-Omethyluridine
  modified_base 17: mod_base = OTHER; note = 2'-Omethylguanosine
  modified_base 18: mod_base = OTHER; note = 2'-Omethylguanosine
  modified_base 20: mod_base = OTHER; note = 2'-Omethyluridine
  modified_base 22: mod_base = OTHER; note = 2'-Omethylguanosine
  modified_base 23: mod_base = OTHER; note = 2'-Omethylcytosine
  modified_base 24: mod_base = OTHER; note = 2'-Omethylguanosine
  modified_base 25: mod_base = OTHER; note = 2'-Omethylcytosine
  modified_base 33: mod_base = OTHER; note = 2'-fluorouridine
  modified_base 35: mod_base = OTHER; note = Cytosine phosphorothiorate
  modified_base 37: mod_base = OTHER; note = Adenosine phosphorothiorate
  modified_base 38: mod_base = OTHER; note = Adenosine phosphorothiorate
  modified_base 49: mod_base = OTHER; note = 2'-Omethylcytosine
  modified_base 50: mod_base = OTHER; note = 2'-Omethylcytosine
  modified_base 52: mod_base = OTHER; note = 2'-Omethylguanosine
  modified_base 54: mod_base = OTHER; note = 2'-Omethyluridine
  modified_base 55: mod_base = OTHER; note = Uridine phosphorothiorate
  modified_base 56: mod_base = OTHER; note = 2'-Omethylcytosine
  modified_base 57: mod_base = OTHER; note = 2'-fluoroguanosine
  modified_base 59: mod_base = OTHER; note = 2'-Omethylguanosine
  modified_base 61: mod_base = OTHER; note = 2'-Omethylcytosine
  modified_base 65: mod_base = OTHER; note = 2'-Omethylguanosine
  modified_base 74: mod_base = OTHER; note = Cytosine phosphorothiorate
  modified_base 75: mod_base = OTHER; note = 2'-Omethylcytosine

SEQ ID NO: 8515 - RNA, 85 nt, synthetic construct; identical to SEQ ID NO: 3317
  source 1..85: mol_type = other RNA
  modified_base 1: mod_base = OTHER; note = 2'-Omethylguanosine phosphorothiorate
  modified_base 7: mod_base = OTHER; note = 2'-Omethyladenosine phosphorothiorate
  modified_base 14: mod_base = OTHER; note = 2'-Omethyladenosine phosphorothiorate
  modified_base 22: mod_base = OTHER; note = Adenosine phosphorothiorate
  modified_base 24: mod_base = OTHER; note = 2'-fluoroguanosine
  modified_base 56: mod_base = OTHER; note = 2'-Omethylguanosine
  modified_base 58: mod_base = OTHER; note = Guanosine phosphorothiorate
  modified_base 73: mod_base = OTHER; note = 2'-fluoroguanosine
  modified_base 82: mod_base = OTHER; note = 2'-Omethylguanosine

SEQ ID NO: 8516 - RNA, 76 nt, synthetic construct; identical to SEQ ID NO: 3316
  source 1..76: mol_type = other RNA
  modified_base 1: mod_base = OTHER; note = 2'-Omethyladenosine phosphorothiorate
  modified_base 2: mod_base = OTHER; note = 2'-Omethylcytosine phosphorothiorate
  modified_base 52: mod_base = OTHER; note = Guanosine phosphorothiorate
  modified_base 74: mod_base = OTHER; note = Cytosine phosphorothiorate
  modified_base 75: mod_base = OTHER; note = 2'-Omethylcytosine

SEQ ID NO: 8517 - RNA, 74 nt, synthetic construct; identical to SEQ ID NO: 3293
  source 1..74: mol_type = other RNA
  modified_base 35: mod_base = OTHER; note = Guanosine phosphorothiorate
  modified_base 42: mod_base = OTHER; note = Adenosine phosphorothiorate
  modified_base 59: mod_base = OTHER; note = 2'-fluorocytosine
  modified_base 73: mod_base = OTHER; note = Cytosine phosphorothiorate
  modified_base 74: mod_base = OTHER; note = 2'-fluoroadenosine

SEQ ID NO: 8518 - RNA, 85 nt, synthetic construct; identical to SEQ ID NO: 3317
  source 1..85: mol_type = other RNA
  modified_base 1: mod_base = OTHER; note = 2'-Omethylguanosine phosphorothiorate
  modified_base 2: mod_base = OTHER; note = 2'-Omethylcytosine phosphorothiorate
  modified_base 3: mod_base = OTHER; note = Uridine phosphorothiorate
  modified_base 14: mod_base = OTHER; note = 2'-Omethyladenosine phosphorothiorate
  modified_base 20: mod_base = OTHER; note = 2'-fluorouridine phosphorothiorate
  modified_base 21: mod_base = OTHER; note = Adenosine phosphorothiorate
  modified_base 25: mod_base = OTHER; note = Cytosine phosphorothiorate
  modified_base 27: mod_base = OTHER; note = Uridine phosphorothiorate
  modified_base 36: mod_base = OTHER; note = 2'-fluoroadenosine
  modified_base 37: mod_base = OTHER; note = 2'-fluoroadenosine
  modified_base 38: mod_base = OTHER; note = 2'-Omethyladenosine
  modified_base 49: mod_base = OTHER; note = 2'-Omethyluridine
  modified_base 50: mod_base = OTHER; note = 2'-Omethylcytosine
  modified_base 57: mod_base = OTHER; note = 2'-Omethylcytosine phosphorothiorate
  modified_base 59: mod_base = OTHER; note = 2'-Omethylcytosine
  modified_base 62: mod_base = OTHER; note = 2'-Omethylguanosine
  modified_base 67: mod_base = OTHER; note = 2'-Omethyladenosine
  modified_base 74: mod_base = OTHER; note = Cytosine phosphorothiorate
  modified_base 81: mod_base = OTHER; note = 2'-Omethylcytosine phosphorothiorate
  modified_base 84: mod_base = OTHER; note = 2'-fluorocytosine

SEQ ID NO: 8519 - RNA, 76 nt, synthetic construct; identical to SEQ ID NO: 625
  source 1..76: mol_type = other RNA
  modified_base 1: mod_base = OTHER; note = 2'-Omethylguanosine phosphorothiorate
  modified_base 2: mod_base = OTHER; note = 2'-Omethylguanosine phosphorothiorate
  modified_base 3: mod_base = OTHER; note = 2'-Omethylcytosine
  modified_base 4: mod_base = OTHER; note = 2'-Omethyluridine
  modified_base 5: mod_base = OTHER; note = 2'-Omethylcytosine
  modified_base 6: mod_base = OTHER; note = 2'-Omethylcytosine
  modified_base 14: mod_base = OTHER; note = 2'-Omethyladenosine
  modified_base 15: mod_base = OTHER; note = 2'-Omethyladenosine
  modified_base 16: mod_base = OTHER; note = 2'-Omethyluridine
  modified_base 17: mod_base = OTHER; note = 2'-Omethylguanosine
  modified_base 18: mod_base = OTHER; note = 2'-Omethylguanosine
  modified_base 20: mod_base = OTHER; note = 2'-Omethyluridine
  modified_base 25: mod_base = OTHER; note = 2'-Omethylcytosine
  modified_base 33: mod_base = OTHER; note = 2'-fluorouridine
  modified_base 35: mod_base = OTHER; note = Cytosine phosphorothiorate
  modified_base 37: mod_base = OTHER; note = Adenosine phosphorothiorate
  modified_base 38: mod_base = OTHER; note = Adenosine phosphorothiorate
  modified_base 49: mod_base = OTHER; note = 2'-Omethylcytosine
  modified_base 50: mod_base = OTHER; note = 2'-Omethylcytosine
  modified_base 52: mod_base = OTHER; note = 2'-Omethylguanosine
  modified_base 54: mod_base = OTHER; note = 2'-Omethyluridine
  modified_base 55: mod_base = OTHER; note = Uridine phosphorothiorate
  modified_base 56: mod_base = OTHER; note = 2'-Omethylcytosine
  modified_base 57: mod_base = OTHER; note = 2'-fluoroguanosine
  modified_base 59: mod_base = OTHER; note = 2'-Omethylguanosine
  modified_base 61: mod_base = OTHER; note = 2'-Omethylcytosine
  modified_base 62: mod_base = OTHER; note = 2'-Omethylcytosine
  modified_base 63: mod_base = OTHER; note = 2'-fluorocytosine
  modified_base 64: mod_base = OTHER; note = 2'-Omethylguanosine
  modified_base 65: mod_base = OTHER; note = 2'-Omethylguanosine
  modified_base 74: mod_base = OTHER; note = Cytosine phosphorothiorate
  modified_base 75: mod_base = OTHER; note = 2'-Omethylcytosine phosphorothiorate

SEQ ID NO: 8520 - DNA, 76 bp, synthetic construct; identical to SEQ ID NO: 1924
  source 1..76: mol_type = other DNA
  modified_base 1: mod_base = OTHER; note = 2'-Omethylguanosine
  modified_base 2: mod_base = OTHER; note = 2'-fluoroguanosine
  modified_base 4: mod_base = OTHER; note = Uridine phosphorothiorate
  modified_base 5: mod_base = OTHER; note = Cytosine phosphorothiorate
  modified_base 6: mod_base = OTHER; note = Cytosine phosphorothiorate
  modified_base 7: mod_base = OTHER; note = 2'-Omethylguanosine
  modified_base 8: mod_base = OTHER; note = 2'-fluorouridine
  modified_base 9: mod_base = OTHER; note = 2'-Omethylguanosine
  modified_base 10: mod_base = OTHER; note = 2'-O-(2-Methoxyethyl) guanosine
  modified_base 11: mod_base = OTHER; note = 2'-fluorocytosine
  modified_base 14: mod_base = OTHER; note = 2'-O-(2-Methoxyethyl) adenosine
  modified_base 15: mod_base = OTHER; note = 2'-Omethyladenosine
  modified_base 16: mod_base = OTHER; note = 2'-O-(2-Methoxyethyl) thymine
  modified_base 17: mod_base = OTHER; note = 2'-O-(2-Methoxyethyl) guanosine
  modified_base 18: mod_base = OTHER; note = Guanosine phosphorothiorate
  modified_base 19: mod_base = OTHER; note = 2'-Omethyladenosine
  modified_base 20: mod_base = OTHER; note = Uridine phosphorothiorate
  modified_base 21: mod_base = OTHER; note = 2'-O-(2-Methoxyethyl) adenosine
  modified_base 22: mod_base = OTHER; note = 2'-fluoroguanosine
  modified_base 23: mod_base = OTHER; note = 2'-fluorocytosine
  modified_base 26: mod_base = OTHER; note = 2'-O-(2-Methoxyethyl) adenosine
  modified_base 27: mod_base = OTHER; note = 2'-O-(2-Methoxyethyl) thymine
  modified_base 28: mod_base = OTHER; note = 2'-O-(2-Methoxyethyl) thymine
  modified_base 30: mod_base = OTHER; note = 2'-O-(2-Methoxyethyl) guanosine
  modified_base 31: mod_base = OTHER; note = 2'-O-(2-Methoxyethyl) adenosine
  modified_base 32: mod_base = OTHER; note = Cytosine phosphorothiorate
  modified_base 33: mod_base = OTHER; note = 2'-O-(2-Methoxyethyl) thymine
  modified_base 34: mod_base = OTHER; note = 2'-O-(2-Methoxyethyl) thymine
  modified_base 35: mod_base = OTHER; note = Cytosine phosphorothiorate
  modified_base 36: mod_base = OTHER; note = Adenosine phosphorothiorate
  modified_base 37: mod_base = OTHER; note = 2'-O-(2-Methoxyethyl) adenosine
  modified_base 38: mod_base = OTHER; note = 2'-O-(2-Methoxyethyl) adenosine
  modified_base 40: mod_base = OTHER; note = Uridine phosphorothiorate
  modified_base 42: mod_base = OTHER; note = 2'-O-(2-Methoxyethyl) adenosine
  modified_base 44: mod_base = OTHER; note = Adenosine phosphorothiorate
  modified_base 45: mod_base = OTHER; note = Guanosine phosphorothiorate
  modified_base 46: mod_base = OTHER; note = Guanosine phosphorothiorate
  modified_base 47: mod_base = OTHER; note = Uridine phosphorothiorate
  modified_base 48: mod_base = OTHER; note = Uridine phosphorothiorate
  modified_base 50: mod_base = OTHER; note = Cytosine phosphorothiorate
  modified_base 52: mod_base = OTHER; note = 2'-O-(2-Methoxyethyl) guanosine
  modified_base 53: mod_base = OTHER; note = Guanosine phosphorothiorate
  modified_base 54: mod_base = OTHER; note = Uridine phosphorothiorate
  modified_base 55: mod_base = OTHER; note = 2'-fluorouridine
  modified_base 63: mod_base = OTHER; note = 2'-fluorocytosine
  modified_base 65: mod_base = OTHER; note = Guanosine phosphorothiorate
  modified_base 67: mod_base = OTHER; note = Guanosine phosphorothiorate
  modified_base 68: mod_base = OTHER; note = Guanosine phosphorothiorate
  modified_base 70: mod_base = OTHER; note = 2'-Omethylguanosine
  modified_base 73: mod_base = OTHER; note = 2'-fluoroguanosine
  misc_feature 1..68: note = RNA
  misc_feature 69: note = DNA
  misc_feature 70..76: note = RNA

SEQ ID NO: 8521 - RNA, 75 nt, synthetic construct; identical to SEQ ID NO: 3306
  source 1..75: mol_type = other RNA
  modified_base 51: mod_base = OTHER; note = 2'-Omethyluridine
  modified_base 64: mod_base = OTHER; note = 2'-Omethyluridine

SEQ ID NO: 8522 - RNA, 76 nt, synthetic construct; identical to SEQ ID NO: 3289
  source 1..76: mol_type = other RNA
  modified_base 1: mod_base = OTHER; note = 2'-Omethylguanosine
  modified_base 16: mod_base = OTHER; note = 2'-Omethyluridine
  modified_base 18: mod_base = OTHER; note = 2'-Omethylguanosine
  modified_base 19: mod_base = OTHER; note = 2'-Omethylguanosine
  modified_base 73: mod_base = OTHER; note = 2'-Omethylguanosine

SEQ ID NO: 8523 - RNA, 75 nt, synthetic construct; identical to SEQ ID NO: 3311
  source 1..75: mol_type = other RNA
  modified_base 1: mod_base = OTHER; note = 2'-Omethylguanosine phosphorothiorate
  modified_base 2: mod_base = OTHER; note = 2'-Omethylguanosine phosphorothiorate
  modified_base 11: mod_base = OTHER; note = Uridine phosphorothiorate
  modified_base 13: mod_base = OTHER; note = 2'-fluorouridine
  modified_base 20: mod_base = OTHER; note = 2'-Omethyladenosine phosphorothiorate
  modified_base 21: mod_base = OTHER; note = 2'-fluoroadenosine
  modified_base 22: mod_base = OTHER; note = 2'-fluoroguanosine
  modified_base 25: mod_base = OTHER; note = 2'-fluorocytosine phosphorothiorate
  modified_base 28: mod_base = OTHER; note = 2'-fluorouridine
  modified_base 29: mod_base = OTHER; note = 2'-fluoroguanosine
  modified_base 36: mod_base = OTHER; note = 2'-fluoroadenosine
  modified_base 41: mod_base = OTHER; note = Cytosine phosphorothiorate
  modified_base 48: mod_base = OTHER; note = 2'-fluorocytosine phosphorothiorate
  modified_base 61: mod_base = OTHER; note = 2'-Omethyluridine
  modified_base 62: mod_base = OTHER; note = Cytosine phosphorothiorate
  modified_base 63: mod_base = OTHER; note = 2'-fluoroguanosine phosphorothiorate
  modified_base 65: mod_base = OTHER; note = 2'-fluorouridine
  modified_base 68: mod_base = OTHER; note = 2'-fluoroadenosine
  modified_base 72: mod_base = OTHER; note = Uridine phosphorothiorate
  modified_base 73: mod_base = OTHER; note = Cytosine phosphorothiorate
  modified_base 74: mod_base = OTHER; note = 2'-fluorocytosine phosphorothiorate

SEQ ID NO: 8524 - RNA, 76 nt, synthetic construct; identical to SEQ ID NO: 3329
  source 1..76: mol_type = other RNA

SEQ ID NO: 8525 - RNA, 76 nt, synthetic construct; identical to SEQ ID NO: 3318
  source 1..76: mol_type = other RNA
  modified_base 1: mod_base = OTHER; note = 2'-Omethylcytosine phosphorothiorate
  modified_base 2: mod_base = OTHER; note = 2'-Omethylcytosine
  modified_base 3: mod_base = OTHER; note = 2'-Omethyluridine
  modified_base 4: mod_base = OTHER; note = 2'-Omethyluridine
  modified_base 5: mod_base = OTHER; note = 2'-Omethylcytosine
  modified_base 6: mod_base = OTHER; note = 2'-Omethylguanosine
  modified_base 27: mod_base = OTHER; note = 2'-Omethylguanosine
  modified_base 28: mod_base = OTHER; note = 2'-Omethyladenosine
  modified_base 29: mod_base = OTHER; note = 2'-fluoroguanosine
  modified_base 30: mod_base = OTHER; note = 2'-Omethylguanosine
  modified_base 40: mod_base = OTHER; note = 2'-fluorocytosine
  modified_base 41: mod_base = OTHER; note = 2'-Omethylcytosine
  modified_base 42: mod_base = OTHER; note = 2'-Omethyluridine
  modified_base 43: mod_base = OTHER; note = 2'-Omethyluridine
  modified_base 73: mod_base = OTHER; note = 2'-Omethyladenosine

SEQ ID NO: 8526 - RNA, 73 nt, synthetic construct; identical to SEQ ID NO: 935
  source 1..73: mol_type = other RNA
  modified_base 1: mod_base = OTHER; note = 2'-Omethylguanosine
  modified_base 16: mod_base = OTHER; note = 2'-Omethyluridine
  modified_base 73: mod_base = OTHER; note = 2'-Omethylguanosine

SEQ ID NO: 8527 - RNA, 75 nt, synthetic construct; identical to SEQ ID NO: 1045
  source 1..75: mol_type = other RNA
  modified_base 1: mod_base = OTHER; note = Guanosine phosphorothiorate
  modified_base 2: mod_base = OTHER; note = 2'-Omethylguanosine phosphorothiorate
  modified_base 13: mod_base = OTHER; note = Uridine phosphorothiorate
  modified_base 19: mod_base = OTHER; note = Uridine phosphorothiorate
  modified_base 20: mod_base = OTHER; note = 2'-fluoroadenosine
  modified_base 36: mod_base = OTHER; note = 2'-fluoroadenosine
  modified_base 42: mod_base = OTHER; note = 2'-fluoroadenosine
  modified_base 45: mod_base = OTHER; note = 2'-fluoroguanosine
  modified_base 51: mod_base = OTHER; note = Adenosine phosphorothiorate
  modified_base 59: mod_base = OTHER; note = 2'-fluorouridine
  modified_base 65: mod_base = OTHER; note = Uridine phosphorothiorate
  modified_base 66: mod_base = OTHER; note = 2'-fluoroguanosine
  modified_base 74: mod_base = OTHER; note = Cytosine phosphorothiorate
  modified_base 75: mod_base = OTHER; note = 2'-Omethyladenosine

SEQ ID NO: 8528 - DNA, 76 bp, synthetic construct; identical to SEQ ID NO: 1924
  source 1..76: mol_type = other DNA
  modified_base 1: mod_base = OTHER; note = 2'-Omethylguanosine phosphorothiorate
  modified_base 3: mod_base = OTHER; note = 2'-Omethylcytosine phosphorothiorate
  modified_base 6: mod_base = OTHER; note = 2'-fluorocytosine
  modified_base 9: mod_base = OTHER; note = Guanosine phosphorothiorate
  modified_base 10: mod_base = OTHER; note = 2'-Omethylguanosine
  modified_base 15: mod_base = OTHER; note = Adenosine phosphorothiorate
  modified_base 16: mod_base = OTHER; note = 2'-Omethyluridine phosphorothiorate
  modified_base 17: mod_base = OTHER; note = 2'-O-(2-Methoxyethyl) guanosine
  modified_base 21: mod_base = OTHER; note = 2'-O-(2-Methoxyethyl) adenosine
  modified_base 22: mod_base = OTHER; note = Guanosine phosphorothiorate
  modified_base 28: mod_base = OTHER; note = Uridine phosphorothiorate
  modified_base 29: mod_base = OTHER; note = 2'-fluoroguanosine
  modified_base 30: mod_base = OTHER; note = 2'-fluoroguanosine
  modified_base 31: mod_base = OTHER; note = 2'-fluoroadenosine
  modified_base 33: mod_base = OTHER; note = Uridine phosphorothiorate
  modified_base 38: mod_base = OTHER; note = Adenosine phosphorothiorate
  modified_base 39: mod_base = OTHER; note = 2'-fluorouridine
  modified_base 43: mod_base = OTHER; note = 2'-O-(2-Methoxyethyl) adenosine
  modified_base 44: mod_base = OTHER; note = Adenosine phosphorothiorate
  modified_base 45: mod_base = OTHER; note = 2'-Omethylguanosine
  modified_base 46: mod_base = OTHER; note = 2'-Omethylguanosine
  modified_base 52: mod_base = OTHER; note = 2'-O-(2-Methoxyethyl) guanosine phosphorothiorate
  modified_base 55: mod_base = OTHER; note = Uridine phosphorothiorate
  modified_base 58: mod_base = OTHER; note = Adenosine phosphorothiorate
  modified_base 59: mod_base = OTHER; note = 2'-O-(2-Methoxyethyl) guanosine phosphorothiorate
  modified_base 60: mod_base = OTHER; note = 2'-O-(2-Methoxyethyl) thymine
  modified_base 62: mod_base = OTHER; note = Cytosine phosphorothiorate
  modified_base 69: mod_base = OTHER; note = 2'-Omethyladenosine
  modified_base 72: mod_base = OTHER; note = Cytosine phosphorothiorate
  modified_base 73: mod_base = OTHER; note = Guanosine phosphorothiorate
  modified_base 75: mod_base = OTHER; note = Cytosine phosphorothiorate
  misc_feature 1..33: note = RNA
  misc_feature 34: note = DNA
  misc_feature 35..40: note = RNA
  misc_feature 41: note = DNA
  misc_feature 42..49: note = RNA
  misc_feature 50: note = DNA
  misc_feature 51..62: note = RNA
  misc_feature 63: note = DNA
  misc_feature 64: note = RNA
  misc_feature 65: note = DNA
  misc_feature 66..75: note = RNA
  misc_feature 76: note = DNA

SEQ ID NO: 8529 - RNA, 76 nt, synthetic construct; identical to SEQ ID NO: 3675
  source 1..76: mol_type = other RNA
  modified_base 1: mod_base = OTHER; note = 2'-Omethylguanosine phosphorothiorate
  modified_base 2: mod_base = OTHER; note = 2'-Omethylcytosine phosphorothiorate
  modified_base 13: mod_base = OTHER; note = 2'-fluorocytosine
  modified_base 14: mod_base = OTHER; note = 2'-fluoroadenosine
  modified_base 54: mod_base = OTHER; note = 2'-fluorouridine
  modified_base 59: mod_base = OTHER; note = 2'-Omethylguanosine
  modified_base 75: mod_base = OTHER; note = Cytosine phosphorothiorate
  modified_base 76: mod_base = OTHER; note = 2'-Omethyladenosine

SEQ ID NO: 8530 - RNA, 75 nt, synthetic construct; identical to SEQ ID NO: 3299
  source 1..75: mol_type = other RNA
  modified_base 3: mod_base = OTHER; note = Uridine phosphorothiorate
  modified_base 8: mod_base = OTHER; note = 2'-fluoroadenosine phosphorothiorate
  modified_base 10: mod_base = OTHER; note = 2'-fluorocytosine
  modified_base 15: mod_base = OTHER; note = 2'-fluorouridine phosphorothiorate
  modified_base 21: mod_base = OTHER; note = Guanosine phosphorothiorate
  modified_base 26: mod_base = OTHER; note = 2'-fluorouridine
  modified_base 28: mod_base = OTHER; note = 2'-fluoroadenosine
  modified_base 37: mod_base = OTHER; note = 2'-fluoroadenosine
  modified_base 38: mod_base = OTHER; note = 2'-fluorouridine
  modified_base 39: mod_base = OTHER; note = 2'-Omethylcytosine phosphorothiorate
  modified_base 46: mod_base = OTHER; note = 2'-Omethyluridine phosphorothiorate
  modified_base 47: mod_base = OTHER; note = 2'-fluorocytosine
  modified_base 49: mod_base = OTHER; note = 2'-Omethyladenosine
  modified_base 50: mod_base = OTHER; note = 2'-Omethylguanosine phosphorothiorate
  modified_base 58: mod_base = OTHER; note = Guanosine phosphorothiorate
  modified_base 68: mod_base = OTHER; note = 2'-fluoroadenosine phosphorothiorate
  modified_base 69: mod_base = OTHER; note = Guanosine phosphorothiorate
  modified_base 73: mod_base = OTHER; note = Cytosine phosphorothiorate
  modified_base 74: mod_base = OTHER; note = Cytosine phosphorothiorate

SEQ ID NO: 8531 - RNA, 76 nt, synthetic construct; identical to SEQ ID NO: 625
  source 1..76: mol_type = other RNA
  modified_base 27: mod_base = OTHER; note = Uridine phosphorothiorate
  modified_base 28: mod_base = OTHER; note = Uridine phosphorothiorate
  modified_base 29: mod_base = OTHER; note = Guanosine phosphorothiorate
  modified_base 30: mod_base = OTHER; note = Guanosine phosphorothiorate
  modified_base 31: mod_base = OTHER; note = Adenosine phosphorothiorate
  modified_base 39: mod_base = OTHER; note = Uridine phosphorothiorate
  modified_base 40: mod_base = OTHER; note = Uridine phosphorothiorate
  modified_base 41: mod_base = OTHER; note = Cytosine phosphorothiorate
  modified_base 42: mod_base = OTHER; note = Adenosine phosphorothiorate
  modified_base 43: mod_base = OTHER; note = Adenosine phosphorothiorate

SEQ ID NO: 8532 - RNA, 76 nt, synthetic construct; identical to SEQ ID NO: 3295
  source 1..76: mol_type = other RNA
  modified_base 1: mod_base = OTHER; note = 2'-Omethylcytosine
  modified_base 2: mod_base = OTHER; note = 2'-Omethylcytosine
  modified_base 4: mod_base = OTHER; note = 2'-fluorouridine
  modified_base 8: mod_base = OTHER; note = 2'-Omethyluridine
  modified_base 13: mod_base = OTHER; note = Cytosine phosphorothiorate
  modified_base 14: mod_base = OTHER; note = 2'-fluoroadenosine phosphorothiorate
  modified_base 20: mod_base = OTHER; note = 2'-Omethyluridine
  modified_base 26: mod_base = OTHER; note = 2'-fluoroguanosine
  modified_base 28: mod_base = OTHER; note = 2'-Omethyladenosine phosphorothiorate
  modified_base 43: mod_base = OTHER; note = 2'-Omethyluridine
  modified_base 47: mod_base = OTHER; note = 2'-Omethyluridine
  modified_base 52: mod_base = OTHER; note = 2'-fluoroguanosine phosphorothiorate
  modified_base 75: mod_base = OTHER; note = Cytosine phosphorothiorate
  modified_base 76: mod_base = OTHER; note = 2'-fluoroadenosine

SEQ ID NO: 8533 - RNA, 76 nt, synthetic construct; identical to SEQ ID NO: 625
  source 1..76: mol_type = other RNA
  modified_base 1: mod_base = OTHER; note = 2'-Omethylguanosine
  modified_base 17: mod_base = OTHER; note = 2'-Omethylguanosine
  modified_base 18: mod_base = OTHER; note = 2'-Omethylguanosine
  modified_base 27: mod_base = OTHER; note = Thymine
  modified_base 33: mod_base = OTHER; note = 2'-fluorouridine
  modified_base 50: mod_base = OTHER; note = 2'-Omethylcytosine
  modified_base 52: mod_base = OTHER; note = 2'-Omethylguanosine
  modified_base 55: mod_base = OTHER; note = Uridine phosphorothiorate
  modified_base 73: mod_base = OTHER; note = 2'-Omethylguanosine

SEQ ID NO: 8534 - RNA, 76 nt, synthetic construct; identical to SEQ ID NO: 625
  source 1..76: mol_type = other RNA
  modified_base 2: mod_base = OTHER; note = 2'-Omethylguanosine
  modified_base 10: mod_base = OTHER; note = 2'-Omethylguanosine
  modified_base 11: mod_base = OTHER; note = 2'-fluorocytosine
  modified_base 13: mod_base = OTHER; note = 2'-fluorocytosine
  modified_base 15: mod_base = OTHER; note = 2'-Omethyladenosine phosphorothiorate
  modified_base 16: mod_base = OTHER; note = 2'-fluorouridine
  modified_base 17: mod_base = OTHER; note = Guanosine phosphorothiorate
  modified_base 18: mod_base = OTHER; note = 2'-fluoroguanosine
  modified_base 23: mod_base = OTHER; note = 2'-Omethylcytosine
  modified_base 24: mod_base = OTHER; note = 2'-fluoroguanosine phosphorothiorate
  modified_base 30: mod_base = OTHER; note = 2'-fluoroguanosine phosphorothiorate
  modified_base 32: mod_base = OTHER; note = 2'-fluorocytosine
  modified_base 34: mod_base = OTHER; note = 2'-fluorouridine
  modified_base 39: mod_base = OTHER; note = Uridine phosphorothiorate
  modified_base 40: mod_base = OTHER; note = 2'-fluorouridine
  modified_base 42: mod_base = OTHER; note = 2'-fluoroadenosine
  modified_base 44: mod_base = OTHER; note = 2'-fluoroadenosine
  modified_base 46: mod_base = OTHER; note = 2'-fluoroguanosine
  modified_base 47: mod_base = OTHER; note = 2'-Omethyluridine phosphorothiorate
  modified_base 48: mod_base = OTHER; note = 2'-fluorouridine phosphorothiorate
  modified_base 49: mod_base = OTHER; note = 2'-Omethylcytosine
  modified_base 50: mod_base = OTHER; note = Cytosine phosphorothiorate
  modified_base 51: mod_base = OTHER; note = 2'-Omethylguanosine
  modified_base 54: mod_base = OTHER; note = Uridine phosphorothiorate
  modified_base 55: mod_base = OTHER; note = Uridine phosphorothiorate
  modified_base 57: mod_base = OTHER; note = 2'-fluoroguanosine
  modified_base 59: mod_base = OTHER; note = 2'-Omethylguanosine phosphorothiorate
  modified_base 60: mod_base = OTHER; note = 2'-Omethyluridine
  modified_base 66: mod_base = OTHER; note = 2'-fluorocytosine
  modified_base 67: mod_base = OTHER; note = 2'-Omethylguanosine
  modified_base 68: mod_base = OTHER; note = 2'-fluoroguanosine
  modified_base 71: mod_base = OTHER; note = 2'-Omethyluridine
  modified_base 72: mod_base = OTHER; note = 2'-Omethylcytosine
  modified_base 74: mod_base = OTHER; note = Cytosine phosphorothiorate
  modified_base 75: mod_base = OTHER; note = 2'-fluorocytosine

SEQ ID NO: 8535 - RNA, 75 nt, synthetic construct; identical to SEQ ID NO: 3336
  source 1..75: mol_type = other RNA
  modified_base 1: mod_base = OTHER; note = 2'-Omethylcytosine phosphorothiorate
  modified_base 2: mod_base = OTHER; note = Cytosine phosphorothiorate
  modified_base 4: mod_base = OTHER; note = Guanosine phosphorothiorate
  modified_base 12: mod_base = OTHER; note = 2'-Omethylcytosine
  modified_base 14: mod_base = OTHER; note = 2'-fluoroguanosine
  modified_base 16: mod_base = OTHER; note = 2'-fluorocytosine
  modified_base 24: mod_base = OTHER; note = Cytosine phosphorothiorate
  modified_base 28: mod_base = OTHER; note = 2'-fluoroadenosine
  modified_base 29: mod_base = OTHER; note = 2'-fluoroguanosine
  modified_base 35: mod_base = OTHER; note = Adenosine phosphorothiorate
  modified_base 37: mod_base = OTHER; note = 2'-Omethyladenosine phosphorothiorate
  modified_base 45: mod_base = OTHER; note = Guanosine phosphorothiorate
  modified_base 47: mod_base = OTHER; note = 2'-fluorocytosine phosphorothiorate
  modified_base 53: mod_base = OTHER; note = 2'-Omethyluridine phosphorothiorate
  modified_base 54: mod_base = OTHER; note = 2'-fluorouridine phosphorothiorate
  modified_base 71: mod_base = OTHER; note = 2'-fluorocytosine phosphorothiorate
  modified_base 74: mod_base = OTHER; note = 2'-Omethylcytosine
  modified_base 75: mod_base = OTHER; note = 2'-fluoroadenosine

SEQ ID NO: 8536 - RNA, 86 nt, synthetic construct; identical to SEQ ID NO: 3290
  source 1..86: mol_type = other RNA
  modified_base 59: mod_base = OTHER; note = 2'-Omethylguanosine
  modified_base 83: mod_base = OTHER; note = 2'-Omethyladenosine

SEQ ID NO: 8537 - RNA, 86 nt, synthetic construct; identical to SEQ ID NO: 3290
  source 1..86: mol_type = other RNA
  modified_base 8: mod_base = OTHER; note = 2'-fluorouridine

SEQ ID NO: 8538 - RNA, 85 nt, synthetic construct; identical to SEQ ID NO: 3297
  source 1..85: mol_type = other RNA
  modified_base 1: mod_base = OTHER; note = 2'-Omethylguanosine
  modified_base 2: mod_base = OTHER; note = 2'-Omethylcytosine
  modified_base 3: mod_base = OTHER; note = 2'-Omethyluridine
  modified_base 4: mod_base = OTHER; note = 2'-Omethylguanosine
  modified_base 5: mod_base = OTHER; note = 2'-Omethyluridine
  modified_base 6: mod_base = OTHER; note = 2'-Omethylguanosine
  modified_base 14: mod_base = OTHER; note = 2'-Omethyladenosine
  modified_base 15: mod_base = OTHER; note = 2'-Omethylguanosine
  modified_base 16: mod_base = OTHER; note = 2'-Omethyluridine
  modified_base 17: mod_base = OTHER; note = 2'-Omethylguanosine
  modified_base 18: mod_base = OTHER; note = 2'-Omethylguanosine
  modified_base 20: mod_base = OTHER; note = 2'-Omethyluridine
  modified_base 25: mod_base = OTHER; note = 2'-Omethylcytosine
  modified_base 41: mod_base = OTHER; note = 2'-Omethylcytosine
  modified_base 42: mod_base = OTHER; note = 2'-Omethyladenosine
  modified_base 43: mod_base = OTHER; note = 2'-Omethyladenosine
  modified_base 44: mod_base = OTHER; note = 2'-Omethyluridine
  modified_base 58: mod_base = OTHER; note = 2'-Omethylguanosine
  modified_base 59: mod_base = OTHER; note = 2'-Omethylcytosine
  modified_base 61: mod_base = OTHER; note = 2'-Omethylguanosine
  modified_base 63: mod_base = OTHER; note = 2'-Omethyluridine
  modified_base 64: mod_base = OTHER; note = Uridine phosphorothiorate
  modified_base 65: mod_base = OTHER; note = 2'-Omethylcytosine
  modified_base 66: mod_base = OTHER; note = 2'-fluoroguanosine
  modified_base 68: mod_base = OTHER; note = 2'-Omethyladenosine
  modified_base 70: mod_base = OTHER; note = 2'-Omethylcytosine
  modified_base 74: mod_base = OTHER; note = 2'-Omethylcytosine
  modified_base 82: mod_base = OTHER; note = 2'-Omethylguanosine

SEQ ID NO: 8539 - RNA, 76 nt, synthetic construct; identical to SEQ ID NO: 3289
  source 1..76: mol_type = other RNA
  modified_base 1: mod_base = OTHER; note = 2'-Omethylguanosine
  modified_base 2: mod_base = OTHER; note = 2'-Omethylcytosine
  modified_base 3: mod_base = OTHER; note = 2'-Omethylcytosine
  modified_base 4: mod_base = OTHER; note = 2'-Omethyluridine
  modified_base 5: mod_base = OTHER; note = 2'-Omethylguanosine
  modified_base 6: mod_base = OTHER; note = 2'-Omethylguanosine
  modified_base 16: mod_base = OTHER; note = 2'-Omethyluridine
  modified_base 18: mod_base = OTHER; note = 2'-Omethylguanosine
  modified_base 19: mod_base = OTHER; note = 2'-Omethylguanosine
  modified_base 25: mod_base = OTHER; note = 2'-Omethylcytosine
  modified_base 33: mod_base = OTHER; note = 2'-fluorouridine
  modified_base 35: mod_base = OTHER; note = Uridine phosphorothiorate
  modified_base 37: mod_base = OTHER; note = Adenosine phosphorothiorate
  modified_base 38: mod_base = OTHER; note = Adenosine phosphorothiorate
  modified_base 41: mod_base = OTHER; note = 2'-Omethyluridine
  modified_base 44: mod_base = OTHER; note = 2'-Omethylguanosine
  modified_base 45: mod_base = OTHER; note = 2'-Omethylguanosine
  modified_base 46: mod_base = OTHER; note = 2'-fluoroguanosine
  modified_base 47: mod_base = OTHER; note = 2'-fluorouridine
  modified_base 48: mod_base = OTHER; note = 2'-fluorocytosine
  modified_base 49: mod_base = OTHER; note = 2'-Omethylcytosine
  modified_base 50: mod_base = OTHER; note = 2'-Omethyladenosine
  modified_base 51: mod_base = OTHER; note = 2'-Omethylguanosine
  modified_base 52: mod_base = OTHER; note = 2'-Omethylguanosine
  modified_base 53: mod_base = OTHER; note = 2'-Omethylguanosine
  modified_base 54: mod_base = OTHER; note = 2'-Omethyluridine
  modified_base 56: mod_base = OTHER; note = 2'-Omethylcytosine
  modified_base 59: mod_base = OTHER; note = 2'-Omethylguanosine
  modified_base 73: mod_base = OTHER; note = 2'-Omethylguanosine

SEQ ID NO: 8540 - RNA, 86 nt, synthetic construct; identical to SEQ ID NO: 3290
  source 1..86: mol_type = other RNA
  modified_base 1: mod_base = OTHER; note = 2'-Omethyladenosine phosphorothiorate
  modified_base 2: mod_base = OTHER; note = 2'-Omethylcytosine phosphorothiorate
  modified_base 3: mod_base = OTHER; note = 2'-Omethylcytosine
  modified_base 4: mod_base = OTHER; note = 2'-Omethyladenosine
  modified_base 5: mod_base = OTHER; note = 2'-Omethylguanosine
  modified_base 6: mod_base = OTHER; note = 2'-Omethylguanosine
  modified_base 76: mod_base = OTHER; note = 2'-Omethyluridine
  modified_base 77: mod_base = OTHER; note = 2'-Omethylcytosine
  modified_base 78: mod_base = OTHER; note = 2'-Omethylcytosine
  modified_base 79: mod_base = OTHER; note = 2'-Omethyluridine
  modified_base 81: mod_base = OTHER; note = 2'-Omethylguanosine
  modified_base 82: mod_base = OTHER; note = 2'-fluorouridine
  modified_base 83: mod_base = OTHER; note = 2'-Omethyladenosine

SEQ ID NO: 8541 - RNA, 76 nt, synthetic construct; identical to SEQ ID NO: 625
  source 1..76: mol_type = other RNA
  modified_base 1: mod_base = OTHER; note = 2'-Omethylguanosine
  modified_base 2: mod_base = OTHER; note = 2'-Omethylguanosine
  modified_base 3: mod_base = OTHER; note = 2'-Omethylcytosine
  modified_base 4: mod_base = OTHER; note = 2'-Omethyluridine
  modified_base 5: mod_base = OTHER; note = 2'-Omethylcytosine
  modified_base 6: mod_base = OTHER; note = 2'-Omethylcytosine
  modified_base 7: mod_base = OTHER; note = Guanosine phosphorothiorate
  modified_base 10: mod_base = OTHER; note = 2'-Omethylguanosine
  modified_base 11: mod_base = OTHER; note = 2'-Omethylcytosine
  modified_base 12: mod_base = OTHER; note = Guanosine phosphorothiorate
  modified_base 13: mod_base = OTHER; note = 2'-Omethylcytosine phosphorothiorate
  modified_base 14: mod_base = OTHER; note = 2'-Omethyladenosine
  modified_base 15: mod_base = OTHER; note = Adenosine phosphorothiorate
  modified_base 16: mod_base = OTHER; note = 2'-Omethyluridine
  modified_base 17: mod_base = OTHER; note = 2'-Omethylguanosine
  modified_base 18: mod_base = OTHER; note = 2'-Omethylguanosine
  modified_base 19: mod_base = OTHER; note = Adenosine phosphorothiorate
  modified_base 20: mod_base = OTHER; note = 2'-Omethyluridine
  modified_base 21: mod_base = OTHER; note = 2'-fluoroadenosine phosphorothiorate
  modified_base 22: mod_base = OTHER; note = 2'-Omethylguanosine phosphorothiorate
  modified_base 23: mod_base = OTHER; note = 2'-Omethylcytosine
  modified_base 24: mod_base = OTHER; note = 2'-Omethylguanosine
  modified_base 25: mod_base = OTHER; note = 2'-Omethylcytosine
  modified_base 26: mod_base = OTHER; note = Adenosine phosphorothiorate
  modified_base 28: mod_base = OTHER; note = 2'-Omethyluridine phosphorothiorate
  modified_base 29: mod_base = OTHER; note = 2'-fluoroguanosine phosphorothiorate
  modified_base 30: mod_base = OTHER; note = 2'-Omethylguanosine phosphorothiorate
  modified_base 31: mod_base = OTHER; note = 2'-Omethyladenosine phosphorothiorate
  modified_base 32: mod_base = OTHER; note = 2'-Omethylcytosine phosphorothiorate
  modified_base 33: mod_base = OTHER; note = 2'-fluorouridine
  modified_base 34: mod_base = OTHER; note = 2'-Omethyluridine phosphorothiorate
  modified_base 35: mod_base = OTHER; note = Cytosine phosphorothiorate
  modified_base 36: mod_base = OTHER; note = 2'-Omethyladenosine phosphorothiorate
  modified_base 37: mod_base = OTHER; note = Adenosine phosphorothiorate
  modified_base 38: mod_base = OTHER; note = Adenosine phosphorothiorate
  modified_base 39: mod_base = OTHER; note = 2'-Omethyluridine phosphorothiorate
  modified_base 40: mod_base = OTHER; note = 2'-Omethyluridine
  modified_base 41: mod_base = OTHER; note = 2'-fluorocytosine
  modified_base 43: mod_base = OTHER; note = Adenosine phosphorothiorate
  modified_base 44: mod_base = OTHER; note = 2'-Omethyladenosine
  modified_base 45: mod_base = OTHER; note = 2'-Omethylguanosine phosphorothiorate
  modified_base 47: mod_base = OTHER; note = Uridine phosphorothiorate
  modified_base 48: mod_base = OTHER; note = 2'-fluorouridine
  modified_base 49: mod_base = OTHER; note = 2'-Omethylcytosine
  modified_base 50: mod_base = OTHER; note = 2'-Omethylcytosine
  modified_base 51: mod_base = OTHER; note = 2'-Omethylguanosine
  modified_base 52: mod_base = OTHER; note = 2'-Omethylguanosine
  modified_base 53: mod_base = OTHER; note = 2'-Omethylguanosine
  modified_base 55: mod_base = OTHER; note = Uridine phosphorothiorate
  modified_base 56: mod_base = OTHER; note = Cytosine phosphorothiorate
  modified_base 57: mod_base = OTHER; note = 2'-Omethylguanosine
  modified_base 59: mod_base = OTHER; note = 2'-Omethylguanosine
  modified_base 60: mod_base = OTHER; note = 2'-Omethyluridine phosphorothiorate
  modified_base 61: mod_base = OTHER; note = 2'-Omethylcytosine
  modified_base 62: mod_base = OTHER; note = 2'-Omethylcytosine
  modified_base 63: mod_base = OTHER; note = 2'-fluorocytosine
  modified_base 64: mod_base = OTHER; note = 2'-Omethylguanosine
  modified_base 65: mod_base = OTHER; note = 2'-Omethylguanosine phosphorothiorate
  modified_base 66: mod_base = OTHER; note = 2'-Omethylcytosine
  modified_base 67: mod_base = OTHER; note = 2'-Omethylguanosine phosphorothiorate
  modified_base 68: mod_base = OTHER; note = 2'-fluoroguanosine
  modified_base 69: mod_base = OTHER; note = 2'-fluoroadenosine
  modified_base 70: mod_base = OTHER; note = Guanosine phosphorothiorate
  modified_base 71: mod_base = OTHER; note = 2'-Omethyluridine phosphorothiorate
  modified_base 72: mod_base = OTHER; note = 2'-Omethylcytosine
  modified_base 73: mod_base = OTHER; note = 2'-Omethylguanosine
  modified_base 74: mod_base = OTHER; note = 2'-fluorocytosine phosphorothiorate
  modified_base 76: mod_base = OTHER; note = 2'-Omethyladenosine

SEQ ID NO: 8542 - RNA, 75 nt, synthetic construct; identical to SEQ ID NO: 3299
  source 1..75: mol_type = other RNA
  modified_base 1: mod_base = OTHER; note = 2'-Omethylcytosine phosphorothiorate
  modified_base 7: mod_base = OTHER; note = 2'-fluorouridine phosphorothiorate
  modified_base 12: mod_base = OTHER; note = 2'-fluorocytosine
  modified_base 21: mod_base = OTHER; note = 2'-fluoroguanosine
  modified_base 23: mod_base = OTHER; note = 2'-fluoroguanosine
  modified_base 24: mod_base = OTHER; note = 2'-Omethylcytosine phosphorothiorate
  modified_base 27: mod_base = OTHER; note = Cytosine phosphorothiorate
  modified_base 39: mod_base = OTHER; note = 2'-Omethylcytosine phosphorothiorate
  modified_base 49: mod_base = OTHER; note = Adenosine phosphorothiorate
  modified_base 51: mod_base = OTHER; note = Guanosine phosphorothiorate
  modified_base 54: mod_base = OTHER; note = Uridine phosphorothiorate
  modified_base 64: mod_base = OTHER; note = Guanosine phosphorothiorate
  modified_base 71: mod_base = OTHER; note = 2'-Omethylcytosine phosphorothiorate
  modified_base 72: mod_base = OTHER; note = Guanosine phosphorothiorate

SEQ ID NO: 8543 - RNA, 76 nt, synthetic construct; identical to SEQ ID NO: 3318
  source 1..76: mol_type = other RNA
  modified_base 1: mod_base = OTHER; note = 2'-Omethylcytosine
  modified_base 13: mod_base = OTHER; note = 2'-Omethylcytosine
  modified_base 18: mod_base = OTHER; note = 2'-Omethylguanosine
  modified_base 19: mod_base = OTHER; note = 2'-Omethylguanosine
  modified_base 25: mod_base = OTHER; note = 2'-Omethylcytosine
  modified_base 33: mod_base = OTHER; note = Uridine phosphorothiorate
  modified_base 34: mod_base = OTHER; note = 2'-Omethylcytosine
  modified_base 35: mod_base = OTHER; note = Uridine phosphorothiorate
  modified_base 37: mod_base = OTHER; note = Guanosine phosphorothiorate
  modified_base 38: mod_base = OTHER; note = Adenosine phosphorothiorate
  modified_base 41: mod_base = OTHER; note = 2'-Omethylcytosine
  modified_base 42: mod_base = OTHER; note = 2'-Omethyluridine
  modified_base 43: mod_base = OTHER; note = 2'-Omethyluridine
  modified_base 44: mod_base = OTHER; note = 2'-Omethyladenosine
  modified_base 49: mod_base = OTHER; note = 2'-Omethylguanosine
  modified_base 50: mod_base = OTHER; note = 2'-Omethylcytosine
  modified_base 52: mod_base = OTHER; note = 2'-Omethylguanosine
  modified_base 54: mod_base = OTHER; note = Uridine phosphorothiorate
  modified_base 55: mod_base = OTHER; note = Uridine phosphorothiorate
  modified_base 56: mod_base = OTHER; note = 2'-Omethylcytosine
  modified_base 57: mod_base = OTHER; note = Guanosine phosphorothiorate
  modified_base 58: mod_base = OTHER; note = Adenosine phosphorothiorate
  modified_base 59: mod_base = OTHER; note = 2'-Omethyladenosine
  modified_base 61: mod_base = OTHER; note = 2'-Omethylcytosine
  modified_base 65: mod_base = OTHER; note = 2'-Omethylcytosine
  modified_base 73: mod_base = OTHER; note = 2'-Omethyladenosine

SEQ ID NO: 8544 - RNA, 76 nt, synthetic construct; identical to SEQ ID NO: 3329
  source 1..76: mol_type = other RNA
  modified_base 1: mod_base = OTHER; note = 2'-Omethylguanosine
  modified_base 19: mod_base = OTHER; note = 2'-Omethyladenosine
  modified_base 20: mod_base = OTHER; note = 2'-Omethyluridine
  modified_base 21: mod_base = OTHER; note = 2'-fluoroadenosine
  modified_base 22: mod_base = OTHER; note = 2'-Omethylguanosine
  modified_base 40: mod_base = OTHER; note = 2'-fluorouridine
  modified_base 41: mod_base = OTHER; note = 2'-Omethylcytosine
  modified_base 42: mod_base = OTHER; note = 2'-Omethyladenosine
  modified_base 43: mod_base = OTHER; note = 2'-Omethyladenosine
  modified_base 73: mod_base = OTHER; note = 2'-Omethylguanosine

SEQ ID NO: 8545 - RNA, 75 nt, synthetic construct; identical to SEQ ID NO: 1045
  source 1..75: mol_type = other RNA
  modified_base 1: mod_base = OTHER; note = 2'-Omethylguanosine phosphorothiorate
  modified_base 2: mod_base = OTHER; note = 2'-Omethylguanosine phosphorothiorate
  modified_base 3: mod_base = OTHER; note = 2'-Omethyluridine phosphorothiorate
  modified_base 17: mod_base = OTHER; note = 2'-fluoroguanosine phosphorothiorate
  modified_base 20: mod_base = OTHER; note = 2'-Omethyladenosine
  modified_base 22: mod_base = OTHER; note = 2'-Omethylguanosine
  modified_base 23: mod_base = OTHER; note = 2'-Omethylcytosine
  modified_base 28: mod_base = OTHER; note = 2'-Omethyluridine phosphorothiorate
  modified_base 33: mod_base = OTHER; note = 2'-fluorouridine phosphorothiorate
  modified_base 38: mod_base = OTHER; note = 2'-Omethyladenosine
  modified_base 43: mod_base = OTHER; note = 2'-Omethylguanosine
  modified_base 56: mod_base = OTHER; note = Guanosine phosphorothiorate
  modified_base 63: mod_base = OTHER; note = 2'-Omethylguanosine
  modified_base 66: mod_base = OTHER; note = 2'-Omethylguanosine phosphorothiorate
  modified_base 67: mod_base = OTHER; note = 2'-Omethylguanosine
  modified_base 72: mod_base = OTHER; note = 2'-Omethyluridine
  modified_base 74: mod_base = OTHER; note = 2'-Omethylcytosine phosphorothiorate

SEQ ID NO: 8546 - RNA, 76 nt, synthetic construct; identical to SEQ ID NO: 625
  source 1..76: mol_type = other RNA
  modified_base 1: mod_base = OTHER; note = 2'-Omethylguanosine phosphorothiorate
  modified_base 2: mod_base = OTHER; note = 2'-Omethylguanosine phosphorothiorate
  modified_base 3: mod_base = OTHER; note = 2'-Omethylcytosine
  modified_base 4: mod_base = OTHER; note = 2'-Omethyluridine
  modified_base 5: mod_base = OTHER; note = 2'-Omethylcytosine
  modified_base 6: mod_base = OTHER; note = 2'-Omethylcytosine
  modified_base 10: mod_base = OTHER; note = 2'-Omethylguanosine
  modified_base 11: mod_base = OTHER; note = 2'-Omethylcytosine
  modified_base 12: mod_base = OTHER; note = 2'-Omethylguanosine
  modified_base 13: mod_base = OTHER; note = 2'-Omethylcytosine
  modified_base 14: mod_base = OTHER; note = 2'-Omethyladenosine
  modified_base 15: mod_base = OTHER; note = 2'-fluoroadenosine
  modified_base 16: mod_base = OTHER; note = 2'-Omethyluridine
  modified_base 17: mod_base = OTHER; note = 2'-Omethylguanosine
  modified_base 18: mod_base = OTHER; note = 2'-Omethylguanosine
  modified_base 19: mod_base = OTHER; note = 2'-fluoroadenosine
  modified_base 20: mod_base = OTHER; note = 2'-Omethyluridine
  modified_base 22: mod_base = OTHER; note = 2'-Omethylguanosine
  modified_base 23: mod_base = OTHER; note = 2'-Omethylcytosine
  modified_base 24: mod_base = OTHER; note = 2'-Omethylguanosine
  modified_base 25: mod_base = OTHER; note = 2'-Omethylcytosine
  modified_base 38: mod_base = OTHER; note = Adenosine phosphorothiorate
  modified_base 39: mod_base = OTHER; note = Uridine phosphorothiorate
  modified_base 40: mod_base = OTHER; note = 2'-fluorouridine
  modified_base 43: mod_base = OTHER; note = 2'-Omethyladenosine
  modified_base 44: mod_base = OTHER; note = 2'-Omethyladenosine
  modified_base 45: mod_base = OTHER; note = 2'-Omethylguanosine
  modified_base 46: mod_base = OTHER; note = 2'-fluoroguanosine
  modified_base 48: mod_base = OTHER; note = 2'-fluorouridine
  modified_base 49: mod_base = OTHER; note = 2'-Omethylcytosine
  modified_base 50: mod_base = OTHER; note = 2'-Omethylcytosine
  modified_base 54: mod_base = OTHER; note = Uridine phosphorothiorate
  modified_base 55: mod_base = OTHER; note = Uridine phosphorothiorate
  modified_base 56: mod_base = OTHER; note = 2'-Omethylcytosine
  modified_base 57: mod_base = OTHER; note = Guanosine phosphorothiorate
  modified_base 61: mod_base = OTHER; note = 2'-Omethylcytosine
  modified_base 62: mod_base = OTHER; note = 2'-Omethylcytosine
  modified_base 63: mod_base = OTHER; note = 2'-fluorocytosine
  modified_base 64: mod_base = OTHER; note = 2'-Omethylguanosine
  modified_base 65: mod_base = OTHER; note = 2'-Omethylguanosine
  modified_base 66: mod_base = OTHER; note = 2'-Omethylcytosine
  modified_base 67: mod_base = OTHER; note = 2'-Omethylguanosine
  modified_base 68: mod_base = OTHER; note = 2'-Omethylguanosine
  modified_base 69: mod_base = OTHER; note = 2'-fluoroadenosine

SEQ ID NO: 8547 - RNA, 75 nt, synthetic construct; identical to SEQ ID NO: 3306
  source 1..75: mol_type = other RNA
  modified_base 1: mod_base = OTHER; note = 2'-Omethylguanosine
  modified_base 16: mod_base = OTHER; note = 2'-Omethylcytosine
  modified_base 17: mod_base = OTHER; note = 2'-Omethylguanosine
  modified_base 18: mod_base = OTHER; note = 2'-Omethylguanosine
  modified_base 53: mod_base = OTHER; note = 2'-Omethyluridine
  modified_base 55: mod_base = OTHER; note = 2'-Omethylcytosine
  modified_base 56: mod_base = OTHER; note = 2'-fluoroadenosine
  modified_base 58: mod_base = OTHER; note = 2'-Omethyladenosine
  modified_base 72: mod_base = OTHER; note = 2'-Omethyladenosine

SEQ ID NO: 8548 - RNA, 76 nt, synthetic construct; identical to SEQ ID NO: 625
  source 1..76: mol_type = other RNA
  modified_base 1: mod_base = OTHER; note = 2'-Omethylguanosine phosphorothiorate
  modified_base 2: mod_base = OTHER; note = 2'-Omethylguanosine
  modified_base 10: mod_base = OTHER; note = 2'-Omethylguanosine
  modified_base 11: mod_base = OTHER; note = 2'-Omethylcytosine
  modified_base 12: mod_base = OTHER; note = 2'-Omethylguanosine
  modified_base 13: mod_base = OTHER; note = 2'-Omethylcytosine
  modified_base 17: mod_base = OTHER; note = 2'-Omethylguanosine
  modified_base 22: mod_base = OTHER; note = 2'-Omethylguanosine
  modified_base 23: mod_base = OTHER; note = 2'-Omethylcytosine
  modified_base 24: mod_base = OTHER; note = 2'-Omethylguanosine
  modified_base 25: mod_base = OTHER; note = 2'-Omethylcytosine
  modified_base 33: mod_base = OTHER; note = 2'-fluorouridine
  modified_base 35: mod_base = OTHER; note = Cytosine phosphorothiorate
  modified_base 37: mod_base = OTHER; note = Adenosine phosphorothiorate
  modified_base 38: mod_base = OTHER; note = Adenosine phosphorothiorate
  modified_base 52: mod_base = OTHER; note = 2'-Omethylguanosine
  modified_base 62: mod_base = OTHER; note = 2'-Omethylcytosine
  modified_base 63: mod_base = OTHER; note = 2'-fluorocytosine
  modified_base 65: mod_base = OTHER; note = 2'-Omethylguanosine
  modified_base 68: mod_base = OTHER; note = 2'-Omethylguanosine
  modified_base 73: mod_base = OTHER; note = 2'-Omethylguanosine
  modified_base 75: mod_base = OTHER; note = 2'-fluorocytosine phosphorothiorate

SEQ ID NO: 8549 - DNA, 76 bp, synthetic construct; identical to SEQ ID NO: 1924
  source 1..76: mol_type = other DNA
  modified_base 1: mod_base = OTHER; note = 2'-Omethylguanosine phosphorothiorate
  modified_base 4: mod_base = OTHER; note = 2'-fluorouridine
  modified_base 5: mod_base = OTHER; note = 2'-O-(2-Methoxyethyl) 5-methylcytosine
  modified_base 12: mod_base = OTHER; note = Guanosine phosphorothiorate
  modified_base 13: mod_base = OTHER; note = deoxycytosine phosphorothiorate
  modified_base 16: mod_base = OTHER; note = Uridine phosphorothiorate
  modified_base 17: mod_base = OTHER; note = 2'-O-(2-Methoxyethyl) guanosine
  modified_base 21: mod_base = OTHER; note = Adenosine phosphorothiorate
  modified_base 30: mod_base = OTHER; note = Guanosine phosphorothiorate
  modified_base 34: mod_base = OTHER; note = Uridine phosphorothiorate
  modified_base 39: mod_base = OTHER; note = 2'-O-(2-Methoxyethyl) thymine
  modified_base 40: mod_base = OTHER; note = 2'-Omethyluridine
  modified_base 41: mod_base = OTHER; note = Cytosine phosphorothiorate
  modified_base 42: mod_base = OTHER; note = 2'-Omethyladenosine
  modified_base 44: mod_base = OTHER; note = 2'-Omethyladenosine phosphorothiorate
  modified_base 45: mod_base = OTHER; note = 2'-O-(2-Methoxyethyl) guanosine phosphorothiorate
  modified_base 46: mod_base = OTHER; note = 2'-fluoroguanosine
  modified_base 50: mod_base = OTHER; note = 2'-fluorocytosine
  modified_base 52: mod_base = OTHER; note = 2'-Omethylguanosine phosphorothiorate
  modified_base 53: mod_base = OTHER; note = 2'-Omethylguanosine
  modified_base 54: mod_base = OTHER; note = 2'-fluorouridine
  modified_base 62: mod_base = OTHER; note = deoxycytosine phosphorothiorate
  modified_base 64: mod_base = OTHER; note = Guanosine phosphorothiorate
  modified_base 65: mod_base = OTHER; note = Guanosine phosphorothiorate
  modified_base 66: mod_base = OTHER; note = 2'-fluorocytosine
  modified_base 71: mod_base = OTHER; note = Uridine phosphorothiorate
  modified_base 74: mod_base = OTHER; note = Cytosine phosphorothiorate
  modified_base 75: mod_base = OTHER; note = 2'-Omethylcytosine
  modified_base 76: mod_base = OTHER; note = 2'-fluoroadenosine
  misc_feature 1..5: note = RNA
  misc_feature 6: note = DNA
  misc_feature 7..12: note = RNA
  misc_feature 13: note = DNA
  misc_feature 14..30: note = RNA
  misc_feature 31: note = DNA
  misc_feature 32..50: note = RNA
  misc_feature 51: note = DNA
  misc_feature 52..61: note = RNA
  misc_feature 62..63: note = DNA
  misc_feature 64..76: note = RNA

SEQ ID NO: 8550 - RNA, 85 nt, synthetic construct; identical to SEQ ID NO: 3301
  source 1..85: mol_type = other RNA
  modified_base 1: mod_base = OTHER; note = 2'-Omethylguanosine phosphorothiorate
  modified_base 2: mod_base = OTHER; note = Cytosine phosphorothiorate
  modified_base 3: mod_base = OTHER; note = 2'-Omethyluridine phosphorothiorate
  modified_base 4: mod_base = OTHER; note = 2'-Omethylguanosine phosphorothiorate
  modified_base 14: mod_base = OTHER; note = 2'-fluoroadenosine phosphorothiorate
  modified_base 21: mod_base = OTHER; note = Adenosine phosphorothiorate
  modified_base 22: mod_base = OTHER; note = 2'-Omethyladenosine
  modified_base 27: mod_base = OTHER; note = 2'-fluorouridine
  modified_base 29: mod_base = OTHER; note = Guanosine phosphorothiorate
  modified_base 37: mod_base = OTHER; note = 2'-fluoroadenosine
  modified_base 41: mod_base = OTHER; note = 2'-fluorocytosine phosphorothiorate
  modified_base 45: mod_base = OTHER; note = 2'-Omethylguanosine phosphorothiorate
  modified_base 56: mod_base = OTHER; note = 2'-fluoroguanosine
  modified_base 57: mod_base = OTHER; note = 2'-fluorocytosine
  modified_base 61: mod_base = OTHER; note = 2'-Omethylguanosine
  modified_base 71: mod_base = OTHER; note = 2'-fluorocytosine
  modified_base 80: mod_base = OTHER; note = 2'-Omethylguanosine phosphorothiorate
  modified_base 82: mod_base = OTHER; note = 2'-fluoroguanosine phosphorothiorate

SEQ ID NO: 8551 - RNA, 75 nt, synthetic construct; identical to SEQ ID NO: 3299
  source 1..75: mol_type = other RNA
  modified_base 4: mod_base = OTHER; note = 2'-Omethylguanosine
  modified_base 7: mod_base = OTHER; note = 2'-Omethyluridine phosphorothiorate
  modified_base 16: mod_base = OTHER; note = 2'-Omethylcytosine
  modified_base 21: mod_base = OTHER; note = 2'-fluoroguanosine
  modified_base 22: mod_base = OTHER; note = 2'-fluoroadenosine
  modified_base 23: mod_base = OTHER; note = 2'-Omethylguanosine phosphorothiorate
  modified_base 26: mod_base = OTHER; note = Uridine phosphorothiorate
  modified_base 29: mod_base = OTHER; note = 2'-Omethylguanosine phosphorothiorate
  modified_base 35: mod_base = OTHER; note = 2'-Omethyladenosine
  modified_base 39: mod_base = OTHER; note = 2'-Omethylcytosine phosphorothiorate
  modified_base 47: mod_base = OTHER; note = 2'-fluorocytosine
  modified_base 48: mod_base = OTHER; note = 2'-fluorocytosine
  modified_base 49: mod_base = OTHER; note = 2'-Omethyladenosine
  modified_base 54: mod_base = OTHER; note = 2'-fluorouridine
  modified_base 60: mod_base = OTHER; note = 2'-Omethylcytosine phosphorothiorate
  modified_base 71: mod_base = OTHER; note = Cytosine phosphorothiorate
  modified_base 73: mod_base = OTHER; note = Cytosine phosphorothiorate
  modified_base 74: mod_base = OTHER; note = 2'-fluorocytosine phosphorothiorate

SEQ ID NO: 8552 - RNA, 76 nt, synthetic construct; identical to SEQ ID NO: 625
  source 1..76: mol_type = other RNA
  modified_base 1: mod_base = OTHER; note = 2'-Omethylguanosine
  modified_base 2: mod_base = OTHER; note = 2'-Omethylguanosine
  modified_base 3: mod_base = OTHER; note = 2'-Omethylcytosine
  modified_base 4: mod_base = OTHER; note = 2'-Omethyluridine
  modified_base 5: mod_base = OTHER; note = 2'-Omethylcytosine
  modified_base 6: mod_base = OTHER; note = 2'-Omethylcytosine
  modified_base 10: mod_base = OTHER; note = 2'-Omethylguanosine
  modified_base 11: mod_base = OTHER; note = 2'-Omethylcytosine
  modified_base 12: mod_base = OTHER; note = 2'-Omethylguanosine
  modified_base 13: mod_base = OTHER; note = 2'-Omethylcytosine
  modified_base 16: mod_base = OTHER; note = 2'-Omethyluridine
  modified_base 17: mod_base = OTHER; note = 2'-Omethylguanosine
  modified_base 18: mod_base = OTHER; note = 2'-Omethylguanosine
  modified_base 20: mod_base = OTHER; note = 2'-Omethyluridine
  modified_base 21: mod_base = OTHER; note = 2'-fluoroadenosine phosphorothiorate
  modified_base 22: mod_base = OTHER; note = Guanosine phosphorothiorate
  modified_base 23: mod_base = OTHER; note = 2'-Omethylcytosine
  modified_base 24: mod_base = OTHER; note = 2'-Omethylguanosine phosphorothiorate
  modified_base 26: mod_base = OTHER; note = Adenosine phosphorothiorate
  modified_base 28: mod_base = OTHER; note = 2'-Omethyluridine phosphorothiorate
  modified_base 29: mod_base = OTHER; note = 2'-fluoroguanosine phosphorothiorate
  modified_base 30: mod_base = OTHER; note = Guanosine phosphorothiorate
  modified_base 31: mod_base = OTHER; note = 2'-Omethyladenosine phosphorothiorate
  modified_base 32: mod_base = OTHER; note = 2'-Omethylcytosine phosphorothiorate
  modified_base 33: mod_base = OTHER; note = 2'-fluorouridine
  modified_base 34: mod_base = OTHER; note = 2'-Omethyluridine phosphorothiorate
  modified_base 35: mod_base = OTHER; note = 2'-Omethylcytosine phosphorothiorate
  modified_base 37: mod_base = OTHER; note = 2'-Omethyladenosine phosphorothiorate
  modified_base 38: mod_base = OTHER; note = Adenosine phosphorothiorate
  modified_base 39: mod_base = OTHER; note = Uridine phosphorothiorate
  modified_base 40: mod_base = OTHER; note = 2'-Omethyluridine
  modified_base 41: mod_base = OTHER; note = 2'-Omethylcytosine
  modified_base 42: mod_base = OTHER; note = Adenosine phosphorothiorate
  modified_base 44: mod_base = OTHER; note = 2'-Omethyladenosine phosphorothiorate
  modified_base 45: mod_base = OTHER; note = Guanosine phosphorothiorate
  modified_base 48: mod_base = OTHER; note = 2'-Omethyluridine phosphorothiorate
  modified_base 49: mod_base = OTHER; note = 2'-Omethylcytosine
  modified_base 50: mod_base = OTHER; note = 2'-Omethylcytosine
  modified_base 51: mod_base = OTHER; note = 2'-Omethylguanosine
  modified_base 52: mod_base = OTHER; note = 2'-Omethylguanosine
  modified_base 53: mod_base = OTHER; note = 2'-Omethylguanosine phosphorothiorate
  modified_base 55: mod_base = OTHER; note = Uridine phosphorothiorate
  modified_base 56: mod_base = OTHER; note = Cytosine phosphorothiorate
  modified_base 57: mod_base = OTHER; note = 2'-Omethylguanosine
  modified_base 59: mod_base = OTHER; note = 2'-Omethylguanosine
  modified_base 61: mod_base = OTHER; note = 2'-Omethylcytosine phosphorothiorate
  modified_base 62: mod_base = OTHER; note = 2'-Omethylcytosine
  modified_base 63: mod_base = OTHER; note = 2'-fluorocytosine
  modified_base 64: mod_base = OTHER; note = 2'-Omethylguanosine
  modified_base 65: mod_base = OTHER; note = 2'-Omethylguanosine
  modified_base 66: mod_base = OTHER; note = 2'-Omethylcytosine
  modified_base 67: mod_base = OTHER; note = 2'-Omethylguanosine phosphorothiorate
  modified_base 68: mod_base = OTHER; note = 2'-Omethylguanosine
  modified_base 69: mod_base = OTHER; note = 2'-fluoroadenosine
  modified_base 72: mod_base = OTHER; note = 2'-Omethylcytosine
  modified_base 73: mod_base = OTHER; note = 2'-Omethylguanosine
  modified_base 74: mod_base = OTHER; note = 2'-fluorocytosine phosphorothiorate
  modified_base 75: mod_base = OTHER; note = 2'-fluorocytosine phosphorothiorate
  modified_base 76: mod_base = OTHER; note = 2'-fluoroadenosine

SEQ ID NO: 8553 - RNA, 76 nt, synthetic construct; identical to SEQ ID NO: 625
  source 1..76: mol_type = other RNA
  modified_base 10: mod_base = OTHER; note = 2'-fluoroguanosine
  modified_base 11: mod_base = OTHER; note = 2'-fluorocytosine
  modified_base 12: mod_base = OTHER; note = 2'-fluoroguanosine
  modified_base 13: mod_base = OTHER; note = 2'-fluorocytosine

SEQ ID NO: 8554 - RNA, 76 nt, synthetic construct; identical to SEQ ID NO: 625
  source 1..76: mol_type = other RNA
  modified_base 1: mod_base = OTHER; note = Guanosine phosphorothiorate
  modified_base 2: mod_base = OTHER; note = 2'-Omethylguanosine
  modified_base 4: mod_base = OTHER; note = 2'-fluorouridine
  modified_base 5: mod_base = OTHER; note = 2'-fluorocytosine
  modified_base 6: mod_base = OTHER; note = Cytosine phosphorothiorate
  modified_base 11: mod_base = OTHER; note = 2'-Omethylcytosine
  modified_base 12: mod_base = OTHER; note = 2'-fluoroguanosine
  modified_base 13: mod_base = OTHER; note = Cytosine phosphorothiorate
  modified_base 14: mod_base = OTHER; note = 2'-fluoroadenosine
  modified_base 15: mod_base = OTHER; note = 2'-Omethyladenosine
  modified_base 18: mod_base = OTHER; note = 2'-fluoroguanosine
  modified_base 20: mod_base = OTHER; note = 2'-Omethyluridine
  modified_base 23: mod_base = OTHER; note = 2'-fluorocytosine
  modified_base 24: mod_base = OTHER; note = 2'-Omethylguanosine
  modified_base 26: mod_base = OTHER; note = 2'-fluoroadenosine
  modified_base 37: mod_base = OTHER; note = Adenosine phosphorothiorate
  modified_base 39: mod_base = OTHER; note = 2'-Omethyluridine
  modified_base 41: mod_base = OTHER; note = 2'-fluorocytosine
  modified_base 45: mod_base = OTHER; note = Guanosine phosphorothiorate
  modified_base 50: mod_base = OTHER; note = 2'-fluorocytosine phosphorothiorate
  modified_base 51: mod_base = OTHER; note = 2'-Omethylguanosine
  modified_base 52: mod_base = OTHER; note = 2'-Omethylguanosine
  modified_base 54: mod_base = OTHER; note = Uridine phosphorothiorate
  modified_base 57: mod_base = OTHER; note = 2'-Omethylguanosine phosphorothiorate
  modified_base 59: mod_base = OTHER; note = 2'-fluoroguanosine
  modified_base 61: mod_base = OTHER; note = 2'-fluorocytosine
  modified_base 64: mod_base = OTHER; note = 2'-fluoroguanosine phosphorothiorate
  modified_base 65: mod_base = OTHER; note = 2'-fluoroguanosine
  modified_base 69: mod_base = OTHER; note = 2'-Omethyladenosine
  modified_base 70: mod_base = OTHER; note = Guanosine phosphorothiorate
  modified_base 71: mod_base = OTHER; note = 2'-fluorouridine
  modified_base 72: mod_base = OTHER; note = 2'-fluorocytosine
  modified_base 73: mod_base = OTHER; note = 2'-Omethylguanosine phosphorothiorate
  modified_base 74: mod_base = OTHER; note = 2'-fluorocytosine
  modified_base 75: mod_base = OTHER; note = Cytosine phosphorothiorate
  modified_base 76: mod_base = OTHER; note = 2'-Omethyladenosine

SEQ ID NO: 8555 - RNA, 86 nt, synthetic construct; identical to SEQ ID NO: 3290
  source 1..86: mol_type = other RNA
  modified_base 49: mod_base = OTHER; note = Adenosine phosphorothiorate

SEQ ID NO: 8556 - RNA, 76 nt, synthetic construct; identical to SEQ ID NO: 3295
  source 1..76: mol_type = other RNA
  modified_base 1: mod_base = OTHER; note = 2'-Omethylcytosine phosphorothiorate
  modified_base 2: mod_base = OTHER; note = 2'-Omethylcytosine
  modified_base 3: mod_base = OTHER; note = 2'-Omethyluridine
  modified_base 6: mod_base = OTHER; note = 2'-Omethylguanosine
  modified_base 7: mod_base = OTHER; note = 2'-fluoroadenosine phosphorothiorate
  modified_base 8: mod_base = OTHER; note = 2'-Omethyluridine phosphorothiorate
  modified_base 9: mod_base = OTHER; note = 2'-fluoroadenosine
  modified_base 14: mod_base = OTHER; note = 2'-Omethyladenosine
  modified_base 17: mod_base = OTHER; note = 2'-Omethyluridine
  modified_base 23: mod_base = OTHER; note = 2'-Omethyladenosine
  modified_base 25: mod_base = OTHER; note = Cytosine phosphorothiorate
  modified_base 27: mod_base = OTHER; note = Guanosine phosphorothiorate
  modified_base 29: mod_base = OTHER; note = 2'-fluoroguanosine
  modified_base 38: mod_base = OTHER; note = 2'-Omethyladenosine
  modified_base 39: mod_base = OTHER; note = 2'-fluorouridine
  modified_base 45: mod_base = OTHER; note = Guanosine phosphorothiorate
  modified_base 46: mod_base = OTHER; note = 2'-fluoroguanosine phosphorothiorate
  modified_base 49: mod_base = OTHER; note = 2'-fluoroguanosine phosphorothiorate
  modified_base 53: mod_base = OTHER; note = 2'-Omethylguanosine
  modified_base 67: mod_base = OTHER; note = 2'-fluorocytosine
  modified_base 75: mod_base = OTHER; note = 2'-fluorocytosine
  modified_base 76: mod_base = OTHER; note = 2'-Omethyladenosine

SEQ ID NO: 8557 - RNA, 76 nt, synthetic construct; identical to SEQ ID NO: 3289
  source 1..76: mol_type = other RNA
  modified_base 1: mod_base = OTHER; note = 2'-Omethylguanosine
  modified_base 2: mod_base = OTHER; note = 2'-Omethylcytosine
  modified_base 3: mod_base = OTHER; note = 2'-Omethylcytosine
  modified_base 4: mod_base = OTHER; note = 2'-Omethyluridine
  modified_base 5: mod_base = OTHER; note = 2'-Omethylguanosine
  modified_base 6: mod_base = OTHER; note = 2'-Omethylguanosine
  modified_base 10: mod_base = OTHER; note = 2'-Omethylguanosine
  modified_base 11: mod_base = OTHER; note = 2'-Omethylcytosine
  modified_base 12: mod_base = OTHER; note = 2'-Omethyluridine
  modified_base 13: mod_base = OTHER; note = 2'-Omethylcytosine
  modified_base 14: mod_base = OTHER; note = 2'-Omethyladenosine
  modified_base 15: mod_base = OTHER; note = 2'-fluoroguanosine
  modified_base 16: mod_base = OTHER; note = 2'-Omethyluridine
  modified_base 18: mod_base = OTHER; note = 2'-Omethylguanosine
  modified_base 19: mod_base = OTHER; note = 2'-Omethylguanosine
  modified_base 22: mod_base = OTHER; note = 2'-Omethylguanosine
  modified_base 23: mod_base = OTHER; note = 2'-Omethyladenosine
  modified_base 24: mod_base = OTHER; note = 2'-Omethylguanosine
  modified_base 25: mod_base = OTHER; note = 2'-Omethylcytosine
  modified_base 33: mod_base = OTHER; note = 2'-fluorouridine
  modified_base 35: mod_base = OTHER; note = Uridine phosphorothiorate
  modified_base 37: mod_base = OTHER; note = Adenosine phosphorothiorate
  modified_base 38: mod_base = OTHER; note = Adenosine phosphorothiorate
  modified_base 41: mod_base = OTHER; note = 2'-Omethyluridine
  modified_base 42: mod_base = OTHER; note = 2'-Omethylguanosine
  modified_base 43: mod_base = OTHER; note = 2'-Omethyladenosine
  modified_base 44: mod_base = OTHER; note = 2'-Omethylguanosine
  modified_base 49: mod_base = OTHER; note = 2'-Omethylcytosine
  modified_base 50: mod_base = OTHER; note = 2'-Omethyladenosine
  modified_base 52: mod_base = OTHER; note = 2'-Omethylguanosine
  modified_base 54: mod_base = OTHER; note = 2'-Omethyluridine
  modified_base 55: mod_base = OTHER; note = Uridine phosphorothiorate
  modified_base 56: mod_base = OTHER; note = 2'-Omethylcytosine
  modified_base 57: mod_base = OTHER; note = 2'-fluoroadenosine
  modified_base 59: mod_base = OTHER; note = 2'-Omethylguanosine
  modified_base 61: mod_base = OTHER; note = 2'-Omethylcytosine
  modified_base 65: mod_base = OTHER; note = 2'-Omethylguanosine
  modified_base 73: mod_base = OTHER; note = 2'-Omethylguanosine

SEQ ID NO: 8558 - RNA, 76 nt, synthetic construct; identical to SEQ ID NO: 625
  source 1..76: mol_type = other RNA
  modified_base 10: mod_base = OTHER; note = 2'-O-(2-Methoxyethyl) guanosine
  modified_base 11: mod_base = OTHER; note = 2'-O-(2-Methoxyethyl) cytosine
  modified_base 12: mod_base = OTHER; note = 2'-O-(2-Methoxyethyl) guanosine
  modified_base 13: mod_base = OTHER; note = 2'-O-(2-Methoxyethyl) cytosine
  modified_base 22: mod_base = OTHER; note = 2'-O-(2-Methoxyethyl) guanosine
  modified_base 23: mod_base = OTHER; note = 2'-O-(2-Methoxyethyl) cytosine
  modified_base 24: mod_base = OTHER; note = 2'-O-(2-Methoxyethyl) guanosine
  modified_base 25: mod_base = OTHER; note = 2'-O-(2-Methoxyethyl) cytosine

SEQ ID NO: 8559 - RNA, 86 nt, synthetic construct; identical to SEQ ID NO: 3290
  source 1..86: mol_type = other RNA
  modified_base 33: mod_base = OTHER; note = Uridine phosphorothiorate

SEQ ID NO: 8560 - RNA, 85 nt, synthetic construct; identical to SEQ ID NO: 3301
  source 1..85: mol_type = other RNA
  modified_base 1: mod_base = OTHER; note = 2'-Omethylguanosine phosphorothiorate
  modified_base 2: mod_base = OTHER; note = 2'-Omethylcytosine
  modified_base 3: mod_base = OTHER; note = Uridine phosphorothiorate
  modified_base 4: mod_base = OTHER; note = Guanosine phosphorothiorate
  modified_base 17: mod_base = OTHER; note = 2'-Omethylguanosine phosphorothiorate
  modified_base 21: mod_base = OTHER; note = 2'-Omethyladenosine
  modified_base 26: mod_base = OTHER; note = Guanosine phosphorothiorate
  modified_base 27: mod_base = OTHER; note = Uridine phosphorothiorate
  modified_base 33: mod_base = OTHER; note = 2'-fluorouridine
  modified_base 37: mod_base = OTHER; note = 2'-Omethyladenosine
  modified_base 44: mod_base = OTHER; note = Uridine phosphorothiorate
  modified_base 46: mod_base = OTHER; note = 2'-Omethylguanosine
  modified_base 47: mod_base = OTHER; note = 2'-Omethylguanosine
  modified_base 48: mod_base = OTHER; note = 2'-Omethylguanosine phosphorothiorate
  modified_base 56: mod_base = OTHER; note = 2'-fluoroguanosine
  modified_base 57: mod_base = OTHER; note = 2'-fluorocytosine
  modified_base 61: mod_base = OTHER; note = 2'-Omethylguanosine
  modified_base 71: mod_base = OTHER; note = Cytosine phosphorothiorate
  modified_base 78: mod_base = OTHER; note = Cytosine phosphorothiorate
  modified_base 84: mod_base = OTHER; note = 2'-Omethylcytosine phosphorothiorate

SEQ ID NO: 8561 - RNA, 85 nt, synthetic construct; identical to SEQ ID NO: 3288
  source 1..85: mol_type = other RNA
  modified_base 1: mod_base = OTHER; note = 2'-Omethylcytosine phosphorothiorate
  modified_base 2: mod_base = OTHER; note = 2'-fluorocytosine
  modified_base 15: mod_base = OTHER; note = 2'-fluorouridine phosphorothiorate
  modified_base 24: mod_base = OTHER; note = 2'-Omethylcytosine
  modified_base 26: mod_base = OTHER; note = 2'-Omethyluridine
  modified_base 33: mod_base = OTHER; note = 2'-fluorouridine
  modified_base 43: mod_base = OTHER; note = Uridine phosphorothiorate
  modified_base 47: mod_base = OTHER; note = 2'-Omethylcytosine
  modified_base 55: mod_base = OTHER; note = 2'-fluorocytosine phosphorothiorate
  modified_base 61: mod_base = OTHER; note = Guanosine phosphorothiorate
  modified_base 72: mod_base = OTHER; note = 2'-fluorocytosine phosphorothiorate
  modified_base 76: mod_base = OTHER; note = Cytosine phosphorothiorate

SEQ ID NO: 8562 - DNA, 76 bp, synthetic construct; identical to SEQ ID NO: 1924
  source 1..76: mol_type = other DNA
  misc_feature 1..21: note = RNA
  misc_feature 22..25: note = DNA
  misc_feature 26..76: note = RNA

SEQ ID NO: 8563 - RNA, 76 nt, synthetic construct; identical to SEQ ID NO: 625
  source 1..76: mol_type = other RNA
  modified_base 1: mod_base = OTHER; note = 2'-Omethylguanosine phosphorothiorate
  modified_base 2: mod_base = OTHER; note = 2'-Omethylguanosine
  modified_base 3: mod_base = OTHER; note = 2'-Omethylcytosine
  modified_base 4: mod_base = OTHER; note = 2'-Omethyluridine
  modified_base 5: mod_base = OTHER; note = 2'-Omethylcytosine
  modified_base 6: mod_base = OTHER; note = 2'-Omethylcytosine
  modified_base 10: mod_base = OTHER; note = 2'-Omethylguanosine
  modified_base 11: mod_base = OTHER; note = 2'-Omethylcytosine
  modified_base 12: mod_base = OTHER; note = 2'-Omethylguanosine
  modified_base 13: mod_base = OTHER; note = 2'-Omethylcytosine
  modified_base 14: mod_base = OTHER; note = 2'-Omethyladenosine
  modified_base 15: mod_base = OTHER; note = 2'-Omethyladenosine
  modified_base 16: mod_base = OTHER; note = 2'-Omethyluridine
  modified_base 17: mod_base = OTHER; note = 2'-Omethylguanosine
  modified_base 18: mod_base = OTHER; note = 2'-Omethylguanosine
  modified_base 19: mod_base = OTHER; note = 2'-Omethyladenosine
  modified_base 20: mod_base = OTHER; note = 2'-Omethyluridine
  modified_base 44: mod_base = OTHER; note = 2'-Omethyladenosine
  modified_base 45: mod_base = OTHER; note = 2'-Omethylguanosine
  modified_base 46: mod_base = OTHER; note = 2'-Omethylguanosine
  modified_base 49: mod_base = OTHER; note = 2'-Omethylcytosine
  modified_base 50: mod_base = OTHER; note = 2'-Omethylcytosine
  modified_base 51: mod_base = OTHER; note = 2'-Omethylguanosine
  modified_base 52: mod_base = OTHER; note = 2'-Omethylguanosine
  modified_base 53: mod_base = OTHER; note = 2'-Omethylguanosine
  modified_base 61: mod_base = OTHER; note = 2'-Omethylcytosine
  modified_base 62: mod_base = OTHER; note = 2'-Omethylcytosine
  modified_base 63: mod_base = OTHER; note = 2'-fluorocytosine
  modified_base 64: mod_base = OTHER; note = 2'-Omethylguanosine
  modified_base 65: mod_base = OTHER; note = 2'-Omethylguanosine
  modified_base 66: mod_base = OTHER; note = 2'-Omethylcytosine
  modified_base 67: mod_base = OTHER; note = 2'-Omethylguanosine
  modified_base 68: mod_base = OTHER; note = 2'-Omethylguanosine
  modified_base 69: mod_base = OTHER; note = 2'-fluoroadenosine
  modified_base 71: mod_base = OTHER; note = 2'-Omethyluridine

SEQ ID NO: 8564 - RNA, 76 nt, synthetic construct; identical to SEQ ID NO: 625
  source 1..76: mol_type = other RNA
  modified_base 2: mod_base = OTHER; note = 2'-Omethylguanosine
  modified_base 3: mod_base = OTHER; note = Cytosine phosphorothiorate
  modified_base 4: mod_base = OTHER; note = 2'-fluorouridine phosphorothiorate
  modified_base 10: mod_base = OTHER; note = 2'-Omethylguanosine
  modified_base 11: mod_base = OTHER; note = Cytosine phosphorothiorate
  modified_base 12: mod_base = OTHER; note = 2'-fluoroguanosine
  modified_base 14: mod_base = OTHER; note = 2'-Omethyladenosine
  modified_base 15: mod_base = OTHER; note = 2'-Omethyladenosine
  modified_base 16: mod_base = OTHER; note = 2'-fluorouridine
  modified_base 17: mod_base = OTHER; note = 2'-Omethylguanosine phosphorothiorate
  modified_base 18: mod_base = OTHER; note = Guanosine phosphorothiorate
  modified_base 25: mod_base = OTHER; note = Cytosine phosphorothiorate
  modified_base 26: mod_base = OTHER; note = 2'-Omethyladenosine phosphorothiorate
  modified_base 27: mod_base = OTHER; note = 2'-Omethyluridine
  modified_base 28: mod_base = OTHER; note = Uridine phosphorothiorate
  modified_base 29: mod_base = OTHER; note = Guanosine phosphorothiorate
  modified_base 32: mod_base = OTHER; note = 2'-fluorocytosine
  modified_base 34: mod_base = OTHER; note = 2'-Omethyluridine
  modified_base 38: mod_base = OTHER; note = 2'-fluoroadenosine
  modified_base 45: mod_base = OTHER; note = Guanosine phosphorothiorate
  modified_base 46: mod_base = OTHER; note = 2'-Omethylguanosine phosphorothiorate
  modified_base 47: mod_base = OTHER; note = Uridine phosphorothiorate
  modified_base 49: mod_base = OTHER; note = 2'-fluorocytosine
  modified_base 51: mod_base = OTHER; note = Guanosine phosphorothiorate
  modified_base 52: mod_base = OTHER; note = 2'-fluoroguanosine phosphorothiorate
  modified_base 53: mod_base = OTHER; note = Guanosine phosphorothiorate
  modified_base 59: mod_base = OTHER; note = 2'-Omethylguanosine
  modified_base 60: mod_base = OTHER; note = 2'-fluorouridine
  modified_base 61: mod_base = OTHER; note = 2'-Omethylcytosine
  modified_base 63: mod_base = OTHER; note = 2'-Omethylcytosine
  modified_base 64: mod_base = OTHER; note = Guanosine phosphorothiorate
  modified_base 65: mod_base = OTHER; note = 2'-Omethylguanosine
  modified_base 66: mod_base = OTHER; note = 2'-fluorocytosine
  modified_base 73: mod_base = OTHER; note = Guanosine phosphorothiorate
  modified_base 74: mod_base = OTHER; note = 2'-Omethylcytosine
  modified_base 75: mod_base = OTHER; note = 2'-Omethylcytosine

SEQ ID NO: 8565 - RNA, 85 nt, synthetic construct; identical to SEQ ID NO: 3317
  source 1..85: mol_type = other RNA
  modified_base 1: mod_base = OTHER; note = 2'-Omethylguanosine phosphorothiorate
  modified_base 2: mod_base = OTHER; note = Cytosine phosphorothiorate
  modified_base 12: mod_base = OTHER; note = 2'-fluorocytosine
  modified_base 14: mod_base = OTHER; note = 2'-fluoroadenosine
  modified_base 36: mod_base = OTHER; note = 2'-fluoroadenosine
  modified_base 38: mod_base = OTHER; note = 2'-Omethyladenosine
  modified_base 45: mod_base = OTHER; note = 2'-Omethylguanosine
  modified_base 58: mod_base = OTHER; note = 2'-Omethylguanosine phosphorothiorate
  modified_base 62: mod_base = OTHER; note = 2'-Omethylguanosine
  modified_base 83: mod_base = OTHER; note = Cytosine phosphorothiorate

SEQ ID NO: 8566 - RNA, 75 nt, synthetic construct; identical to SEQ ID NO: 3311
  source 1..75: mol_type = other RNA
  modified_base 1: mod_base = OTHER; note = Guanosine phosphorothiorate
  modified_base 2: mod_base = OTHER; note = 2'-Omethylguanosine phosphorothiorate
  modified_base 3: mod_base = OTHER; note = 2'-Omethyluridine
  modified_base 10: mod_base = OTHER; note = 2'-fluoroguanosine phosphorothiorate
  modified_base 14: mod_base = OTHER; note = 2'-fluoroadenosine
  modified_base 15: mod_base = OTHER; note = Adenosine phosphorothiorate
  modified_base 16: mod_base = OTHER; note = 2'-fluorouridine
  modified_base 18: mod_base = OTHER; note = 2'-fluoroguanosine
  modified_base 19: mod_base = OTHER; note = 2'-fluorouridine
  modified_base 22: mod_base = OTHER; note = 2'-fluoroguanosine
  modified_base 23: mod_base = OTHER; note = 2'-fluorocytosine
  modified_base 31: mod_base = OTHER; note = 2'-Omethyladenosine
  modified_base 38: mod_base = OTHER; note = 2'-fluoroadenosine phosphorothiorate
  modified_base 44: mod_base = OTHER; note = 2'-fluorocytosine
  modified_base 56: mod_base = OTHER; note = Guanosine phosphorothiorate
  modified_base 58: mod_base = OTHER; note = 2'-fluoroguanosine
  modified_base 60: mod_base = OTHER; note = 2'-fluorocytosine
  modified_base 67: mod_base = OTHER; note = 2'-fluoroguanosine

SEQ ID NO: 8567 - RNA, 75 nt, synthetic construct; identical to SEQ ID NO: 3306
  source 1..75: mol_type = other RNA
  modified_base 1: mod_base = OTHER; note = 2'-Omethylguanosine
  modified_base 10: mod_base = OTHER; note = 2'-Omethylguanosine
  modified_base 11: mod_base = OTHER; note = 2'-Omethylcytosine
  modified_base 12: mod_base = OTHER; note = 2'-Omethylguanosine
  modified_base 13: mod_base = OTHER; note = 2'-Omethylcytosine
  modified_base 17: mod_base = OTHER; note = 2'-Omethylguanosine
  modified_base 18: mod_base = OTHER; note = 2'-Omethylguanosine
  modified_base 24: mod_base = OTHER; note = 2'-Omethylcytosine
  modified_base 32: mod_base = OTHER; note = 2'-fluorouridine
  modified_base 33: mod_base = OTHER; note = 2'-Omethylcytosine
  modified_base 34: mod_base = OTHER; note = Uridine phosphorothiorate
  modified_base 36: mod_base = OTHER; note = Guanosine phosphorothiorate
  modified_base 37: mod_base = OTHER; note = Adenosine phosphorothiorate
  modified_base 40: mod_base = OTHER; note = 2'-Omethyladenosine
  modified_base 41: mod_base = OTHER; note = 2'-Omethylguanosine
  modified_base 42: mod_base = OTHER; note = 2'-Omethyladenosine
  modified_base 43: mod_base = OTHER; note = 2'-Omethyladenosine
  modified_base 48: mod_base = OTHER; note = 2'-Omethylguanosine
  modified_base 49: mod_base = OTHER; note = 2'-Omethylcytosine
  modified_base 51: mod_base = OTHER; note = 2'-Omethyluridine
  modified_base 53: mod_base = OTHER; note = Uridine phosphorothiorate
  modified_base 54: mod_base = OTHER; note = Uridine phosphorothiorate
  modified_base 60: mod_base = OTHER; note = 2'-Omethylcytosine
  modified_base 64: mod_base = OTHER; note = 2'-Omethyluridine
  modified_base 72: mod_base = OTHER; note = 2'-Omethyladenosine

SEQ ID NO: 8568 - RNA, 75 nt, synthetic construct; identical to SEQ ID NO: 1045
  source 1..75: mol_type = other RNA
  modified_base 2: mod_base = OTHER; note = 2'-Omethylguanosine phosphorothiorate
  modified_base 5: mod_base = OTHER; note = 2'-Omethylcytosine
  modified_base 8: mod_base = OTHER; note = 2'-fluorouridine phosphorothiorate
  modified_base 14: mod_base = OTHER; note = Adenosine phosphorothiorate
  modified_base 15: mod_base = OTHER; note = 2'-Omethyladenosine phosphorothiorate
  modified_base 16: mod_base = OTHER; note = 2'-Omethyluridine
  modified_base 22: mod_base = OTHER; note = 2'-Omethylguanosine phosphorothiorate
  modified_base 23: mod_base = OTHER; note = Cytosine phosphorothiorate
  modified_base 24: mod_base = OTHER; note = 2'-Omethyladenosine phosphorothiorate
  modified_base 40: mod_base = OTHER; note = 2'-Omethylcytosine phosphorothiorate
  modified_base 52: mod_base = OTHER; note = 2'-Omethylguanosine
  modified_base 56: mod_base = OTHER; note = 2'-Omethylguanosine
  modified_base 57: mod_base = OTHER; note = 2'-Omethyladenosine
  modified_base 60: mod_base = OTHER; note = 2'-Omethylcytosine
  modified_base 66: mod_base = OTHER; note = 2'-Omethylguanosine
  modified_base 67: mod_base = OTHER; note = 2'-Omethylguanosine
  modified_base 72: mod_base = OTHER; note = 2'-Omethyluridine
  modified_base 74: mod_base = OTHER; note = 2'-Omethylcytosine phosphorothiorate
  modified_base 75: mod_base = OTHER; note = 2'-Omethyladenosine

SEQ ID NO: 8569 - RNA, 76 nt, synthetic construct; identical to SEQ ID NO: 625
  source 1..76: mol_type = other RNA
  modified_base 1: mod_base = OTHER; note = 2'-Omethylguanosine
  modified_base 3: mod_base = OTHER; note = 2'-fluorocytosine phosphorothiorate
  modified_base 4: mod_base = OTHER; note = 2'-fluorouridine
  modified_base 6: mod_base = OTHER; note = 2'-Omethylcytosine
  modified_base 14: mod_base = OTHER; note = 2'-Omethyladenosine
  modified_base 18: mod_base = OTHER; note = 2'-fluoroguanosine
  modified_base 20: mod_base = OTHER; note = 2'-Omethyluridine phosphorothiorate
  modified_base 22: mod_base = OTHER; note = 2'-fluoroguanosine
  modified_base 23: mod_base = OTHER; note = 2'-fluorocytosine
  modified_base 25: mod_base = OTHER; note = 2'-Omethylcytosine phosphorothiorate
  modified_base 26: mod_base = OTHER; note = 2'-fluoroadenosine
  modified_base 28: mod_base = OTHER; note = Uridine phosphorothiorate
  modified_base 30: mod_base = OTHER; note = 2'-Omethylguanosine
  modified_base 32: mod_base = OTHER; note = 2'-fluorocytosine
  modified_base 33: mod_base = OTHER; note = Uridine phosphorothiorate
  modified_base 34: mod_base = OTHER; note = 2'-fluorouridine
  modified_base 36: mod_base = OTHER; note = Adenosine phosphorothiorate
  modified_base 38: mod_base = OTHER; note = Adenosine phosphorothiorate
  modified_base 42: mod_base = OTHER; note = 2'-fluoroadenosine
  modified_base 45: mod_base = OTHER; note = 2'-fluoroguanosine
  modified_base 46: mod_base = OTHER; note = 2'-Omethylguanosine
  modified_base 50: mod_base = OTHER; note = 2'-Omethylcytosine
  modified_base 53: mod_base = OTHER; note = 2'-fluoroguanosine
  modified_base 56: mod_base = OTHER; note = 2'-Omethylcytosine
  modified_base 57: mod_base = OTHER; note = 2'-fluoroguanosine
  modified_base 63: mod_base = OTHER; note = 2'-fluorocytosine
  modified_base 65: mod_base = OTHER; note = 2'-fluoroguanosine
  modified_base 66: mod_base = OTHER; note = 2'-Omethylcytosine
  modified_base 68: mod_base = OTHER; note = 2'-fluoroguanosine phosphorothiorate
  modified_base 69: mod_base = OTHER; note = 2'-fluoroadenosine
  modified_base 71: mod_base = OTHER; note = 2'-Omethyluridine
  modified_base 75: mod_base = OTHER; note = 2'-fluorocytosine phosphorothiorate
  modified_base 76: mod_base = OTHER; note = 2'-fluoroadenosine

SEQ ID NO: 8570 - RNA, 76 nt, synthetic construct
  source 1..76: mol_type = other RNA
ggctcatccacgcaatggatagcgtattggacttcaaattcaaaggttccgggttcgagtcccggatgagtcgcca

SEQ ID NO: 8571 - RNA, 75 nt, synthetic construct; identical to SEQ ID NO: 3299
  source 1..75: mol_type = other RNA
  modified_base 9: mod_base = OTHER; note = Guanosine phosphorothiorate
  modified_base 16: mod_base = OTHER; note = 2'-fluorocytosine
  modified_base 23: mod_base = OTHER; note = 2'-fluoroguanosine
  modified_base 25: mod_base = OTHER; note = Adenosine phosphorothiorate
  modified_base 27: mod_base = OTHER; note = 2'-fluorocytosine
  modified_base 46: mod_base = OTHER; note = 2'-fluorouridine
  modified_base 47: mod_base = OTHER; note = 2'-fluorocytosine
  modified_base 64: mod_base = OTHER; note = 2'-fluoroguanosine
  modified_base 70: mod_base = OTHER; note = Guanosine phosphorothiorate
  modified_base 73: mod_base = OTHER; note = Cytosine phosphorothiorate
  modified_base 74: mod_base = OTHER; note = Cytosine phosphorothiorate

SEQ ID NO: 8572 - RNA, 75 nt, synthetic construct; identical to SEQ ID NO: 3306
  source 1..75: mol_type = other RNA
  modified_base 1: mod_base = OTHER; note = 2'-Omethylguanosine phosphorothiorate
  modified_base 2: mod_base = OTHER; note = 2'-Omethyladenosine phosphorothiorate
  modified_base 3: mod_base = OTHER; note = 2'-Omethylcytosine
  modified_base 4: mod_base = OTHER; note = 2'-Omethylcytosine
  modified_base 5: mod_base = OTHER; note = 2'-Omethyluridine
  modified_base 6: mod_base = OTHER; note = 2'-Omethylcytosine
  modified_base 16: mod_base = OTHER; note = 2'-Omethylcytosine
  modified_base 17: mod_base = OTHER; note = 2'-Omethylguanosine
  modified_base 18: mod_base = OTHER; note = 2'-Omethylguanosine
  modified_base 24: mod_base = OTHER; note = 2'-Omethylcytosine
  modified_base 32: mod_base = OTHER; note = 2'-fluorouridine
  modified_base 34: mod_base = OTHER; note = Uridine phosphorothiorate
  modified_base 36: mod_base = OTHER; note = Guanosine phosphorothiorate
  modified_base 37: mod_base = OTHER; note = Adenosine phosphorothiorate
  modified_base 40: mod_base = OTHER; note = 2'-Omethyladenosine
  modified_base 43: mod_base = OTHER; note = 2'-Omethyladenosine
  modified_base 44: mod_base = OTHER; note = 2'-Omethylguanosine
  modified_base 45: mod_base = OTHER; note = 2'-fluoroguanosine
  modified_base 46: mod_base = OTHER; note = 2'-fluorouridine
  modified_base 47: mod_base = OTHER; note = 2'-fluorouridine
  modified_base 48: mod_base = OTHER; note = 2'-Omethylguanosine
  modified_base 49: mod_base = OTHER; note = 2'-Omethylcytosine
  modified_base 50: mod_base = OTHER; note = 2'-Omethylguanosine
  modified_base 51: mod_base = OTHER; note = 2'-Omethyluridine
  modified_base 52: mod_base = OTHER; note = 2'-Omethylguanosine
  modified_base 53: mod_base = OTHER; note = 2'-Omethyluridine
  modified_base 55: mod_base = OTHER; note = 2'-Omethylcytosine
  modified_base 58: mod_base = OTHER; note = 2'-Omethyladenosine
  modified_base 72: mod_base = OTHER; note = 2'-Omethyladenosine

SEQ ID NO: 8573 - RNA, 76 nt, synthetic construct; identical to SEQ ID NO: 625
  source 1..76: mol_type = other RNA
  modified_base 1: mod_base = OTHER; note = 2'-Omethylguanosine phosphorothiorate
  modified_base 2: mod_base = OTHER; note = 2'-Omethylguanosine
  modified_base 3: mod_base = OTHER; note = 2'-Omethylcytosine
  modified_base 4: mod_base = OTHER; note = 2'-Omethyluridine
  modified_base 5: mod_base = OTHER; note = 2'-Omethylcytosine
  modified_base 6: mod_base = OTHER; note = 2'-Omethylcytosine
  modified_base 10: mod_base = OTHER; note = 2'-Omethylguanosine
  modified_base 11: mod_base = OTHER; note = 2'-Omethylcytosine
  modified_base 12: mod_base = OTHER; note = 2'-Omethylguanosine
  modified_base 13: mod_base = OTHER; note = 2'-Omethylcytosine
  modified_base 14: mod_base = OTHER; note = 2'-Omethyladenosine
  modified_base 15: mod_base = OTHER; note = 2'-Omethyladenosine
  modified_base 16: mod_base = OTHER; note = 2'-Omethyluridine
  modified_base 17: mod_base = OTHER; note = 2'-Omethylguanosine
  modified_base 18: mod_base = OTHER; note = 2'-Omethylguanosine
  modified_base 19: mod_base = OTHER; note = 2'-Omethyladenosine
  modified_base 20: mod_base = OTHER; note = 2'-Omethyluridine
  modified_base 40: mod_base = OTHER; note = 2'-fluorouridine
  modified_base 41: mod_base = OTHER; note = 2'-fluorocytosine
  modified_base 42: mod_base = OTHER; note = 2'-fluoroadenosine
  modified_base 43: mod_base = OTHER; note = 2'-fluoroadenosine
  modified_base 44: mod_base = OTHER; note = 2'-Omethyladenosine
  modified_base 45: mod_base = OTHER; note = 2'-Omethylguanosine
  modified_base 46: mod_base = OTHER; note = 2'-Omethylguanosine
  modified_base 49: mod_base = OTHER; note = 2'-Omethylcytosine
  modified_base 50: mod_base = OTHER; note = 2'-Omethylcytosine
  modified_base 51: mod_base = OTHER; note = 2'-Omethylguanosine
  modified_base 52: mod_base = OTHER; note = 2'-Omethylguanosine
  modified_base 53: mod_base = OTHER; note = 2'-Omethylguanosine
  modified_base 61: mod_base = OTHER; note = 2'-Omethylcytosine
  modified_base 62: mod_base = OTHER; note = 2'-Omethylcytosine
  modified_base 63: mod_base = OTHER; note = 2'-fluorocytosine
  modified_base 64: mod_base = OTHER; note = 2'-Omethylguanosine
  modified_base 65: mod_base = OTHER; note = 2'-Omethylguanosine
  modified_base 66: mod_base = OTHER; note = 2'-Omethylcytosine
  modified_base 67: mod_base = OTHER; note = 2'-Omethylguanosine
  modified_base 68: mod_base = OTHER; note = 2'-Omethylguanosine
  modified_base 69: mod_base = OTHER; note = 2'-Omethyladenosine
  modified_base 71: mod_base = OTHER; note = 2'-Omethyluridine
  modified_base 72: mod_base = OTHER; note = 2'-Omethylcytosine

SEQ ID NO: 8574 - RNA, 76 nt, synthetic construct; identical to SEQ ID NO: 625
  source 1..76: mol_type = other RNA
  modified_base 40: mod_base = OTHER; note = 2'-fluorouridine
  modified_base 41: mod_base = OTHER; note = 2'-fluorocytosine
  modified_base 42: mod_base = OTHER; note = 2'-fluoroadenosine
  modified_base 43: mod_base = OTHER; note = 2'-fluoroadenosine
  modified_base 54: mod_base = OTHER; note = Uridine phosphorothiorate
  modified_base 55: mod_base = OTHER; note = Uridine phosphorothiorate
  modified_base 56: mod_base = OTHER; note = Cytosine phosphorothiorate
  modified_base 57: mod_base = OTHER; note = Guanosine phosphorothiorate

SEQ ID NO: 8575 - RNA, 76 nt, synthetic construct; identical to SEQ ID NO: 625
  source 1..76: mol_type = other RNA
  modified_base 1: mod_base = OTHER; note = 2'-Omethylguanosine phosphorothiorate
  modified_base 2: mod_base = OTHER; note = 2'-Omethylguanosine
  modified_base 3: mod_base = OTHER; note = 2'-Omethylcytosine
  modified_base 4: mod_base = OTHER; note = 2'-Omethyluridine
  modified_base 5: mod_base = OTHER; note = 2'-Omethylcytosine
  modified_base 6: mod_base = OTHER; note = 2'-Omethylcytosine
  modified_base 10: mod_base = OTHER; note = 2'-Omethylguanosine
  modified_base 11: mod_base = OTHER; note = 2'-Omethylcytosine
  modified_base 12: mod_base = OTHER; note = Guanosine phosphorothiorate
  modified_base 13: mod_base = OTHER; note = 2'-fluorocytosine
  modified_base 14: mod_base = OTHER; note = 2'-Omethyladenosine
  modified_base 15: mod_base = OTHER; note = 2'-fluoroadenosine
  modified_base 16: mod_base = OTHER; note = 2'-Omethyluridine
  modified_base 17: mod_base = OTHER; note = 2'-Omethylguanosine
  modified_base 18: mod_base = OTHER; note = 2'-Omethylguanosine
  modified_base 19: mod_base = OTHER; note = 2'-fluoroadenosine
  modified_base 20: mod_base = OTHER; note = 2'-Omethyluridine
  modified_base 21: mod_base = OTHER; note = 2'-fluoroadenosine
  modified_base 22: mod_base = OTHER; note = 2'-Omethylguanosine
  modified_base 23: mod_base = OTHER; note = 2'-Omethylcytosine
  modified_base 24: mod_base = OTHER; note = 2'-Omethylguanosine
  modified_base 25: mod_base = OTHER; note = 2'-Omethylcytosine
  modified_base 33: mod_base = OTHER; note = 2'-fluorouridine
  modified_base 35: mod_base = OTHER; note = Cytosine phosphorothiorate
  modified_base 37: mod_base = OTHER; note = Adenosine phosphorothiorate
  modified_base 38: mod_base = OTHER; note = Adenosine phosphorothiorate
  modified_base 44: mod_base = OTHER; note = Adenosine phosphorothiorate
  modified_base 45: mod_base = OTHER; note = 2'-O-(2-Methoxyethyl) guanosine
  modified_base 49: mod_base = OTHER; note = 2'-Omethylcytosine
  modified_base 50: mod_base = OTHER; note = 2'-Omethylcytosine
  modified_base 51: mod_base = OTHER; note = 2'-Omethylguanosine
  modified_base 52: mod_base = OTHER; note = 2'-fluoroguanosine
  modified_base 53: mod_base = OTHER; note = 2'-Omethylguanosine
  modified_base 56: mod_base = OTHER; note = 2'-Omethylcytosine
  modified_base 61: mod_base = OTHER; note = 2'-Omethylcytosine
  modified_base 62: mod_base = OTHER; note = 2'-Omethylcytosine
  modified_base 63: mod_base = OTHER; note = 2'-fluorocytosine
  modified_base 64: mod_base = OTHER; note = 2'-Omethylguanosine
  modified_base 65: mod_base = OTHER; note = 2'-Omethylguanosine
  modified_base 66: mod_base = OTHER; note = 2'-Omethylcytosine
  modified_base 67: mod_base = OTHER; note = 2'-Omethylguanosine
  modified_base 68: mod_base = OTHER; note = 2'-Omethylguanosine
  modified_base 69: mod_base = OTHER; note = 2'-Omethyladenosine
  modified_base 73: mod_base = OTHER; note = 2'-Omethylguanosine
  modified_base 74: mod_base = OTHER; note = 2'-Omethylcytosine phosphorothiorate
  modified_base 75: mod_base = OTHER; note = 2'-fluorocytosine phosphorothiorate

SEQ ID NO: 8576 - RNA, 76 nt, synthetic construct; identical to SEQ ID NO: 625
  source 1..76: mol_type = other RNA
  modified_base 1: mod_base = OTHER; note = 2'-Omethylguanosine
  modified_base 10: mod_base = OTHER; note = 2'-Omethylguanosine
  modified_base 13: mod_base = OTHER; note = 2'-Omethylcytosine
  modified_base 17: mod_base = OTHER; note = Guanosine phosphorothiorate
  modified_base 18: mod_base = OTHER; note = 2'-Omethylguanosine
  modified_base 19: mod_base = OTHER; note = Adenosine phosphorothiorate
  modified_base 20: mod_base = OTHER; note = 2'-Omethyluridine
  modified_base 25: mod_base = OTHER; note = 2'-Omethylcytosine
  modified_base 29: mod_base = OTHER; note = 2'-Omethylguanosine
  modified_base 33: mod_base = OTHER; note = 2'-fluorouridine
  modified_base 35: mod_base = OTHER; note = Cytosine phosphorothiorate
  modified_base 37: mod_base = OTHER; note = Adenosine phosphorothiorate
  modified_base 38: mod_base = OTHER; note = Adenosine phosphorothiorate
  modified_base 41: mod_base = OTHER; note = 2'-fluorocytosine phosphorothiorate
  modified_base 43: mod_base = OTHER; note = 2'-Omethyladenosine
  modified_base 44: mod_base = OTHER; note = 2'-fluoroadenosine
  modified_base 46: mod_base = OTHER; note = Guanosine phosphorothiorate
  modified_base 50: mod_base = OTHER; note = 2'-Omethylcytosine
  modified_base 52: mod_base = OTHER; note = 2'-Omethylguanosine
  modified_base 54: mod_base = OTHER; note = 2'-Omethyluridine
  modified_base 55: mod_base = OTHER; note = Uridine phosphorothiorate
  modified_base 62: mod_base = OTHER; note = 2'-Omethylcytosine
  modified_base 63: mod_base = OTHER; note = 2'-fluorocytosine
  modified_base 65: mod_base = OTHER; note = 2'-Omethylguanosine
  modified_base 71: mod_base = OTHER; note = 2'-Omethyluridine
  modified_base 73: mod_base = OTHER; note = 2'-Omethylguanosine

SEQ ID NO: 8577 - RNA, 76 nt, synthetic construct; identical to SEQ ID NO: 625
  source 1..76: mol_type = other RNA
  modified_base 1: mod_base = OTHER; note = 2'-fluoroguanosine
  modified_base 5: mod_base = OTHER; note = 2'-fluorocytosine
  modified_base 6: mod_base = OTHER; note = 2'-Omethylcytosine
  modified_base 10: mod_base = OTHER; note = 2'-Omethylguanosine
  modified_base 11: mod_base = OTHER; note = 2'-Omethylcytosine
  modified_base 14: mod_base = OTHER; note = 2'-Omethyladenosine
  modified_base 15: mod_base = OTHER; note = 2'-Omethyladenosine
  modified_base 24: mod_base = OTHER; note = 2'-fluoroguanosine
  modified_base 25: mod_base = OTHER; note = 2'-Omethylcytosine phosphorothiorate
  modified_base 26: mod_base = OTHER; note = Adenosine phosphorothiorate
  modified_base 27: mod_base = OTHER; note = 2'-Omethyluridine phosphorothiorate
  modified_base 28: mod_base = OTHER; note = 2'-Omethyluridine phosphorothiorate
  modified_base 30: mod_base = OTHER; note = 2'-Omethylguanosine phosphorothiorate
  modified_base 34: mod_base = OTHER; note = 2'-Omethyluridine
  modified_base 37: mod_base = OTHER; note = Adenosine phosphorothiorate
  modified_base 38: mod_base = OTHER; note = 2'-fluoroadenosine phosphorothiorate
  modified_base 39: mod_base = OTHER; note = 2'-fluorouridine
  modified_base 40: mod_base = OTHER; note = 2'-Omethyluridine phosphorothiorate
  modified_base 41: mod_base = OTHER; note = 2'-Omethylcytosine
  modified_base 42: mod_base = OTHER; note = 2'-Omethyladenosine
  modified_base 43: mod_base = OTHER; note = 2'-Omethyladenosine
  modified_base 44: mod_base = OTHER; note = 2'-fluoroadenosine
  modified_base 47: mod_base = OTHER; note = 2'-Omethyluridine phosphorothiorate
  modified_base 48: mod_base = OTHER; note = 2'-fluorouridine
  modified_base 54: mod_base = OTHER; note = 2'-fluorouridine
  modified_base 58: mod_base = OTHER; note = Adenosine phosphorothiorate
  modified_base 59: mod_base = OTHER; note = 2'-fluoroguanosine phosphorothiorate
  modified_base 60: mod_base = OTHER; note = 2'-fluorouridine
  modified_base 62: mod_base = OTHER; note = Cytosine phosphorothiorate
  modified_base 63: mod_base = OTHER; note = 2'-Omethylcytosine
  modified_base 64: mod_base = OTHER; note = 2'-fluoroguanosine phosphorothiorate
  modified_base 65: mod_base = OTHER; note = 2'-fluoroguanosine
  modified_base 67: mod_base = OTHER; note = Guanosine phosphorothiorate
  modified_base 69: mod_base = OTHER; note = Adenosine phosphorothiorate
  modified_base 70: mod_base = OTHER; note = 2'-fluoroguanosine
  modified_base 71: mod_base = OTHER; note = 2'-fluorouridine
  modified_base 76: mod_base = OTHER; note = 2'-Omethyladenosine

SEQ ID NO: 8578 - RNA, 76 nt, synthetic construct
  source 1..76: mol_type = other RNA
ggctgactggcgcaatggatagcgcattggacttcaaattcaaaggttaggggttcgagtcccctgtcagtcgcca

SEQ ID NO: 8579 - RNA, 75 nt, synthetic construct; identical to SEQ ID NO: 3306
  source 1..75: mol_type = other RNA
  modified_base 1: mod_base = OTHER; note = 2'-Omethylguanosine phosphorothiorate
  modified_base 2: mod_base = OTHER; note = 2'-Omethyladenosine phosphorothiorate
  modified_base 3: mod_base = OTHER; note = 2'-Omethylcytosine
  modified_base 4: mod_base = OTHER; note = 2'-Omethylcytosine
  modified_base 5: mod_base = OTHER; note = 2'-Omethyluridine
  modified_base 6: mod_base = OTHER; note = 2'-Omethylcytosine
  modified_base 16: mod_base = OTHER; note = 2'-Omethylcytosine
  modified_base 17: mod_base = OTHER; note = 2'-Omethylguanosine
  modified_base 18: mod_base = OTHER; note = 2'-Omethylguanosine
  modified_base 21: mod_base = OTHER; note = 2'-Omethylguanosine
  modified_base 23: mod_base = OTHER; note = 2'-Omethylguanosine
  modified_base 24: mod_base = OTHER; note = 2'-Omethylcytosine
  modified_base 26: mod_base = OTHER; note = 2'-Omethyluridine
  modified_base 32: mod_base = OTHER; note = 2'-fluorouridine
  modified_base 34: mod_base = OTHER; note = Uridine phosphorothiorate
  modified_base 36: mod_base = OTHER; note = Guanosine phosphorothiorate
  modified_base 37: mod_base = OTHER; note = Adenosine phosphorothiorate
  modified_base 43: mod_base = OTHER; note = 2'-Omethyladenosine
  modified_base 44: mod_base = OTHER; note = 2'-Omethylguanosine
  modified_base 45: mod_base = OTHER; note = 2'-fluoroguanosine
  modified_base 46: mod_base = OTHER; note = 2'-fluorouridine
  modified_base 47: mod_base = OTHER; note = 2'-fluorouridine
  modified_base 48: mod_base = OTHER; note = 2'-Omethylguanosine
  modified_base 49: mod_base = OTHER; note = 2'-Omethylcytosine
  modified_base 50: mod_base = OTHER; note = 2'-Omethylguanosine
  modified_base 51: mod_base = OTHER; note = 2'-Omethyluridine
  modified_base 52: mod_base = OTHER; note = 2'-Omethylguanosine
  modified_base 53: mod_base = OTHER; note = 2'-Omethyluridine
  modified_base 55: mod_base = OTHER; note = 2'-Omethylcytosine
  modified_base 58: mod_base = OTHER; note = 2'-Omethyladenosine
  modified_base 60: mod_base = OTHER; note = 2'-Omethylcytosine
  modified_base 61: mod_base = OTHER; note = 2'-Omethyladenosine
  modified_base 62: mod_base = OTHER; note = 2'-fluorocytosine
  modified_base 63: mod_base = OTHER; note = 2'-Omethylguanosine
  modified_base 64: mod_base = OTHER; note = 2'-Omethyluridine
  modified_base 65: mod_base = OTHER; note = 2'-Omethylcytosine
  modified_base 66: mod_base = OTHER; note = 2'-Omethylguanosine
  modified_base 67: mod_base = OTHER; note = 2'-Omethylguanosine
  modified_base 72: mod_base = OTHER; note = 2'-Omethyladenosine

SEQ ID NO: 8580 - RNA, 85 nt, synthetic construct; identical to SEQ ID NO: 3317
  source 1..85: mol_type = other RNA
  modified_base 1: mod_base = OTHER; note = 2'-Omethylguanosine phosphorothiorate
  modified_base 4: mod_base = OTHER; note = Guanosine phosphorothiorate
  modified_base 15: mod_base = OTHER; note = 2'-Omethylguanosine
  modified_base 57: mod_base = OTHER; note = Cytosine phosphorothiorate
  modified_base 61: mod_base = OTHER; note = 2'-Omethylguanosine phosphorothiorate
  modified_base 83: mod_base = OTHER; note = 2'-Omethylcytosine phosphorothiorate

SEQ ID NO: 8581 - RNA, 85 nt, synthetic construct; identical to SEQ ID NO: 3301
  source 1..85: mol_type = other RNA
  modified_base 1: mod_base = OTHER; note = 2'-Omethylguanosine phosphorothiorate
  modified_base 2: mod_base = OTHER; note = 2'-Omethylcytosine
  modified_base 10: mod_base = OTHER; note = 2'-fluoroguanosine
  modified_base 19: mod_base = OTHER; note = Uridine phosphorothiorate
  modified_base 28: mod_base = OTHER; note = 2'-Omethyluridine
  modified_base 34: mod_base = OTHER; note = 2'-fluorouridine
  modified_base 37: mod_base = OTHER; note = 2'-fluoroadenosine phosphorothiorate
  modified_base 42: mod_base = OTHER; note = 2'-fluoroadenosine
  modified_base 45: mod_base = OTHER; note = 2'-Omethylguanosine phosphorothiorate
  modified_base 46: mod_base = OTHER; note = 2'-Omethylguanosine phosphorothiorate
  modified_base 52: mod_base = OTHER; note = Cytosine phosphorothiorate
  modified_base 61: mod_base = OTHER; note = 2'-fluoroguanosine
  modified_base 62: mod_base = OTHER; note = Guanosine phosphorothiorate
  modified_base 80: mod_base = OTHER; note = 2'-Omethylguanosine phosphorothiorate
  modified_base 84: mod_base = OTHER; note = 2'-fluorocytosine

SEQ ID NO: 8582 - RNA, 76 nt, synthetic construct; identical to SEQ ID NO: 3318
  source 1..76: mol_type = other RNA
  modified_base 1: mod_base = OTHER; note = 2'-Omethylcytosine phosphorothiorate
  modified_base 2: mod_base = OTHER; note = 2'-Omethylcytosine phosphorothiorate
  modified_base 24: mod_base = OTHER; note = 2'-Omethylguanosine
  modified_base 38: mod_base = OTHER; note = Adenosine phosphorothiorate
  modified_base 44: mod_base = OTHER; note = 2'-fluoroadenosine phosphorothiorate
  modified_base 45: mod_base = OTHER; note = 2'-fluoroguanosine
  modified_base 56: mod_base = OTHER; note = Cytosine phosphorothiorate
  modified_base 57: mod_base = OTHER; note = 2'-Omethylguanosine
  modified_base 61: mod_base = OTHER; note = 2'-fluorocytosine
  modified_base 74: mod_base = OTHER; note = Cytosine phosphorothiorate
  modified_base 75: mod_base = OTHER; note = 2'-Omethylcytosine

SEQ ID NO: 8583 - RNA, 85 nt, synthetic construct; identical to SEQ ID NO: 3297
  source 1..85: mol_type = other RNA
  modified_base 1: mod_base = OTHER; note = 2'-Omethylguanosine phosphorothiorate
  modified_base 2: mod_base = OTHER; note = 2'-Omethylcytosine phosphorothiorate
  modified_base 3: mod_base = OTHER; note = 2'-Omethyluridine
  modified_base 4: mod_base = OTHER; note = 2'-Omethylguanosine
  modified_base 5: mod_base = OTHER; note = 2'-Omethyluridine
  modified_base 6: mod_base = OTHER; note = 2'-Omethylguanosine
  modified_base 10: mod_base = OTHER; note = 2'-Omethylguanosine
  modified_base 11: mod_base = OTHER; note = 2'-Omethylcytosine
  modified_base 12: mod_base = OTHER; note = 2'-Omethylcytosine
  modified_base 13: mod_base = OTHER; note = 2'-Omethylguanosine
  modified_base 14: mod_base = OTHER; note = 2'-Omethyladenosine
  modified_base 15: mod_base = OTHER; note = 2'-fluoroguanosine
  modified_base 16: mod_base = OTHER; note = 2'-Omethyluridine
  modified_base 17: mod_base = OTHER; note = 2'-Omethylguanosine
  modified_base 18: mod_base = OTHER; note = 2'-Omethylguanosine
  modified_base 19: mod_base = OTHER; note = 2'-fluorouridine
  modified_base 20: mod_base = OTHER; note = 2'-Omethyluridine
  modified_base 22: mod_base = OTHER; note = 2'-Omethyladenosine
  modified_base 23: mod_base = OTHER; note = 2'-Omethylguanosine
  modified_base 24: mod_base = OTHER; note = 2'-Omethylguanosine
  modified_base 25: mod_base = OTHER; note = 2'-Omethylcytosine
  modified_base 33: mod_base = OTHER; note = 2'-fluorouridine
  modified_base 35: mod_base = OTHER; note = Cytosine phosphorothiorate
  modified_base 37: mod_base = OTHER; note = Adenosine phosphorothiorate
  modified_base 38: mod_base = OTHER; note = Adenosine phosphorothiorate
  modified_base 44: mod_base = OTHER; note = 2'-Omethyluridine
  modified_base 56: mod_base = OTHER; note = 2'-fluoroguanosine
  modified_base 57: mod_base = OTHER; note = 2'-fluorocytosine
  modified_base 65: mod_base = OTHER; note = 2'-Omethylcytosine
  modified_base 68: mod_base = OTHER; note = 2'-Omethyladenosine
  modified_base 70: mod_base = OTHER; note = 2'-Omethylcytosine
  modified_base 71: mod_base = OTHER; note = 2'-Omethylcytosine
  modified_base 72: mod_base = OTHER; note = 2'-fluorouridine
  modified_base 73: mod_base = OTHER; note = 2'-Omethylguanosine
  modified_base 74: mod_base = OTHER; note = 2'-Omethylcytosine
  modified_base 75: mod_base = OTHER; note = 2'-Omethyluridine
  modified_base 76: mod_base = OTHER; note = 2'-Omethylcytosine
  modified_base 77: mod_base = OTHER; note = 2'-Omethyladenosine
  modified_base 82: mod_base = OTHER; note = 2'-Omethylguanosine

SEQ ID NO: 8584 - RNA, 76 nt, synthetic construct; identical to SEQ ID NO: 3318
  source 1..76: mol_type = other RNA
  modified_base 13: mod_base = OTHER; note = 2'-Omethylcytosine
  modified_base 73: mod_base = OTHER; note = 2'-Omethyladenosine

SEQ ID NO: 8585 - RNA, 74 nt, synthetic construct; identical to SEQ ID NO: 3293
  source 1..74: mol_type = other RNA
  modified_base 1: mod_base = OTHER; note = 2'-fluoroadenosine phosphorothiorate
  modified_base 3: mod_base = OTHER; note = 2'-fluorocytosine phosphorothiorate
  modified_base 14: mod_base = OTHER; note = 2'-fluoroadenosine phosphorothiorate
  modified_base 28: mod_base = OTHER; note = 2'-fluoroguanosine
  modified_base 73: mod_base = OTHER; note = Cytosine phosphorothiorate

SEQ ID NO: 8586 - DNA, 74 bp, synthetic construct; identical to SEQ ID NO: 3384
  source 1..74: mol_type = other DNA
  modified_base 1: mod_base = OTHER; note = 2'-Omethylguanosine phosphorothiorate
  modified_base 2: mod_base = OTHER; note = 2'-Omethylguanosine phosphorothiorate
  modified_base 19: mod_base = OTHER; note = Adenosine phosphorothiorate
  modified_base 29: mod_base = OTHER; note = 2'-O-(2-Methoxyethyl) guanosine
  modified_base 68: mod_base = OTHER; note = 2'-fluoroguanosine
  modified_base 72: mod_base = OTHER; note = 2'-Omethylcytosine
  modified_base 73: mod_base = OTHER; note = 2'-Omethylguanosine
  misc_feature 1..19: note = RNA
  misc_feature 20: note = DNA
  misc_feature 21..43: note = RNA
  misc_feature 44: note = DNA
  misc_feature 45..74: note = RNA

SEQ ID NO: 8587 - RNA, 75 nt, synthetic construct; identical to SEQ ID NO: 1045
  source 1..75: mol_type = other RNA
  modified_base 1: mod_base = OTHER; note = 2'-Omethylguanosine phosphorothiorate
  modified_base 2: mod_base = OTHER; note = 2'-Omethylguanosine phosphorothiorate
  modified_base 3: mod_base = OTHER; note = 2'-Omethyluridine
  modified_base 4: mod_base = OTHER; note = 2'-Omethyluridine
  modified_base 5: mod_base = OTHER; note = 2'-Omethylcytosine
  modified_base 6: mod_base = OTHER; note = 2'-Omethylcytosine
  modified_base 16: mod_base = OTHER; note = 2'-Omethyluridine
  modified_base 17: mod_base = OTHER; note = 2'-Omethylguanosine
  modified_base 18: mod_base = OTHER; note = 2'-Omethylguanosine
  modified_base 20: mod_base = OTHER; note = 2'-Omethyladenosine phosphorothiorate
  modified_base 25: mod_base = OTHER; note = 2'-Omethylcytosine
  modified_base 33: mod_base = OTHER; note = 2'-fluorouridine
  modified_base 35: mod_base = OTHER; note = Uridine phosphorothiorate
  modified_base 37: mod_base = OTHER; note = Adenosine phosphorothiorate
  modified_base 38: mod_base = OTHER; note = Adenosine phosphorothiorate
  modified_base 41: mod_base = OTHER; note = 2'-fluorocytosine phosphorothiorate
  modified_base 42: mod_base = OTHER; note = 2'-Omethyladenosine
  modified_base 43: mod_base = OTHER; note = 2'-Omethylguanosine
  modified_base 44: mod_base = OTHER; note = 2'-Omethylcytosine
  modified_base 45: mod_base = OTHER; note = 2'-Omethylguanosine
  modified_base 46: mod_base = OTHER; note = 2'-fluoroadenosine
  modified_base 47: mod_base = OTHER; note = 2'-fluorouridine
  modified_base 55: mod_base = OTHER; note = 2'-Omethylcytosine
  modified_base 58: mod_base = OTHER; note = 2'-Omethylguanosine
  modified_base 60: mod_base = OTHER; note = 2'-Omethylcytosine
  modified_base 61: mod_base = OTHER; note = 2'-Omethyluridine
  modified_base 62: mod_base = OTHER; note = 2'-fluorocytosine
  modified_base 63: mod_base = OTHER; note = 2'-Omethylguanosine
  modified_base 64: mod_base = OTHER; note = 2'-Omethylguanosine
  modified_base 65: mod_base = OTHER; note = 2'-Omethyluridine
  modified_base 66: mod_base = OTHER; note = 2'-Omethylguanosine
  modified_base 67: mod_base = OTHER; note = 2'-Omethylguanosine
  modified_base 72: mod_base = OTHER; note = 2'-Omethyluridine

SEQ ID NO: 8588 - RNA, 75 nt, synthetic construct; identical to SEQ ID NO: 3336
  source 1..75: mol_type = other RNA
  modified_base 2: mod_base = OTHER; note = 2'-fluorocytosine
  modified_base 4: mod_base = OTHER; note = 2'-Omethylguanosine phosphorothiorate
  modified_base 6: mod_base = OTHER; note = 2'-Omethylguanosine
  modified_base 11: mod_base = OTHER; note = 2'-fluorouridine phosphorothiorate
  modified_base 16: mod_base = OTHER; note = 2'-fluorocytosine phosphorothiorate
  modified_base 20: mod_base = OTHER; note = 2'-fluoroadenosine
  modified_base 21: mod_base = OTHER; note = 2'-Omethylguanosine phosphorothiorate
  modified_base 22: mod_base = OTHER; note = 2'-fluoroadenosine
  modified_base 28: mod_base = OTHER; note = 2'-fluoroadenosine
  modified_base 29: mod_base = OTHER; note = 2'-fluoroguanosine
  modified_base 37: mod_base = OTHER; note = 2'-Omethyladenosine phosphorothiorate
  modified_base 38: mod_base = OTHER; note = 2'-fluorouridine
  modified_base 39: mod_base = OTHER; note = 2'-Omethylcytosine phosphorothiorate
  modified_base 40: mod_base = OTHER; note = 2'-fluorouridine
  modified_base 48: mod_base = OTHER; note = Cytosine phosphorothiorate

SEQ ID NO: 8589 - RNA, 85 nt, synthetic construct; identical to SEQ ID NO: 3297
  source 1..85: mol_type = other RNA
  modified_base 1: mod_base = OTHER; note = 2'-Omethylguanosine phosphorothiorate
  modified_base 2: mod_base = OTHER; note = 2'-Omethylcytosine phosphorothiorate
  modified_base 3: mod_base = OTHER; note = 2'-Omethyluridine
  modified_base 4: mod_base = OTHER; note = 2'-Omethylguanosine
  modified_base 5: mod_base = OTHER; note = 2'-Omethyluridine
  modified_base 6: mod_base = OTHER; note = 2'-Omethylguanosine
  modified_base 10: mod_base = OTHER; note = 2'-Omethylguanosine
  modified_base 11: mod_base = OTHER; note = 2'-Omethylcytosine
  modified_base 12: mod_base = OTHER; note = 2'-Omethylcytosine
  modified_base 13: mod_base = OTHER; note = 2'-Omethylguanosine
  modified_base 22: mod_base = OTHER; note = 2'-Omethyladenosine
  modified_base 23: mod_base = OTHER; note = 2'-Omethylguanosine
  modified_base 24: mod_base = OTHER; note = 2'-Omethylguanosine
  modified_base 25: mod_base = OTHER; note = 2'-Omethylcytosine
  modified_base 58: mod_base = OTHER; note = 2'-Omethylguanosine
  modified_base 59: mod_base = OTHER; note = 2'-Omethylcytosine
  modified_base 60: mod_base = OTHER; note = 2'-Omethyladenosine
  modified_base 61: mod_base = OTHER; note = 2'-Omethylguanosine
  modified_base 62: mod_base = OTHER; note = 2'-Omethylguanosine
  modified_base 63: mod_base = OTHER; note = 2'-Omethyluridine
  modified_base 70: mod_base = OTHER; note = 2'-Omethylcytosine
  modified_base 71: mod_base = OTHER; note = 2'-Omethylcytosine
  modified_base 72: mod_base = OTHER; note = 2'-fluorouridine
  modified_base 73: mod_base = OTHER; note = 2'-Omethylguanosine
  modified_base 74: mod_base = OTHER; note = 2'-Omethylcytosine
  modified_base 75: mod_base = OTHER; note = 2'-Omethyluridine
  modified_base 76: mod_base = OTHER; note = 2'-Omethylcytosine
  modified_base 77: mod_base = OTHER; note = 2'-Omethyladenosine
  modified_base 82: mod_base = OTHER; note = 2'-Omethylguanosine

SEQ ID NO: 8590 - RNA, 76 nt, synthetic construct; identical to SEQ ID NO: 3318
  source 1..76: mol_type = other RNA
  modified_base 10: mod_base = OTHER; note = 2'-Omethylguanosine
  modified_base 11: mod_base = OTHER; note = 2'-Omethylcytosine
  modified_base 12: mod_base = OTHER; note = 2'-Omethyluridine
  modified_base 13: mod_base = OTHER; note = 2'-Omethylcytosine
  modified_base 73: mod_base = OTHER; note = 2'-Omethyladenosine

SEQ ID NO: 8591 - RNA, 75 nt, synthetic construct; identical to SEQ ID NO: 1045
  source 1..75: mol_type = other RNA
  modified_base 1: mod_base = OTHER; note = 2'-Omethylguanosine phosphorothiorate
  modified_base 2: mod_base = OTHER; note = 2'-Omethylguanosine phosphorothiorate
  modified_base 5: mod_base = OTHER; note = 2'-Omethylcytosine
  modified_base 6: mod_base = OTHER; note = 2'-Omethylcytosine
  modified_base 10: mod_base = OTHER; note = 2'-Omethylguanosine phosphorothiorate
  modified_base 16: mod_base = OTHER; note = 2'-Omethyluridine phosphorothiorate
  modified_base 20: mod_base = OTHER; note = 2'-Omethyladenosine
  modified_base 26: mod_base = OTHER; note = 2'-Omethyluridine phosphorothiorate
  modified_base 29: mod_base = OTHER; note = 2'-fluoroguanosine phosphorothiorate
  modified_base 30: mod_base = OTHER; note = 2'-Omethylguanosine
  modified_base 56: mod_base = OTHER; note = 2'-Omethylguanosine phosphorothiorate
  modified_base 60: mod_base = OTHER; note = Cytosine phosphorothiorate
  modified_base 61: mod_base = OTHER; note = 2'-Omethyluridine
  modified_base 72: mod_base = OTHER; note = 2'-Omethyluridine
  modified_base 74: mod_base = OTHER; note = 2'-Omethylcytosine phosphorothiorate
  modified_base 75: mod_base = OTHER; note = 2'-Omethyladenosine

SEQ ID NO: 8592 - RNA, 76 nt, synthetic construct; identical to SEQ ID NO: 625
  source 1..76: mol_type = other RNA
  modified_base 1: mod_base = OTHER; note = 2'-Omethylguanosine
  modified_base 3: mod_base = OTHER; note = Cytosine phosphorothiorate
  modified_base 4: mod_base = OTHER; note = 2'-fluorouridine
  modified_base 8: mod_base = OTHER; note = Uridine phosphorothiorate
  modified_base 13: mod_base = OTHER; note = Cytosine phosphorothiorate
  modified_base 15: mod_base = OTHER; note = Adenosine phosphorothiorate
  modified_base 16: mod_base = OTHER; note = 2'-fluorouridine
  modified_base 18: mod_base = OTHER; note = 2'-Omethylguanosine
  modified_base 23: mod_base = OTHER; note = Cytosine phosphorothiorate
  modified_base 24: mod_base = OTHER; note = 2'-Omethylguanosine
  modified_base 25: mod_base = OTHER; note = 2'-fluorocytosine
  modified_base 26: mod_base = OTHER; note = Adenosine phosphorothiorate
  modified_base 31: mod_base = OTHER; note = 2'-Omethyladenosine
  modified_base 32: mod_base = OTHER; note = 2'-fluorocytosine
  modified_base 40: mod_base = OTHER; note = 2'-Omethyluridine
  modified_base 42: mod_base = OTHER; note = Adenosine phosphorothiorate
  modified_base 45: mod_base = OTHER; note = Guanosine phosphorothiorate
  modified_base 46: mod_base = OTHER; note = 2'-fluoroguanosine
  modified_base 47: mod_base = OTHER; note = Uridine phosphorothiorate
  modified_base 48: mod_base = OTHER; note = 2'-fluorouridine
  modified_base 49: mod_base = OTHER; note = 2'-Omethylcytosine
  modified_base 50: mod_base = OTHER; note = 2'-Omethylcytosine
  modified_base 51: mod_base = OTHER; note = Guanosine phosphorothiorate
  modified_base 52: mod_base = OTHER; note = 2'-fluoroguanosine
  modified_base 53: mod_base = OTHER; note = 2'-Omethylguanosine
  modified_base 54: mod_base = OTHER; note = Uridine phosphorothiorate
  modified_base 55: mod_base = OTHER; note = Uridine phosphorothiorate
  modified_base 56: mod_base = OTHER; note = 2'-Omethylcytosine
  modified_base 58: mod_base = OTHER; note = Adenosine phosphorothiorate
  modified_base 61: mod_base = OTHER; note = 2'-Omethylcytosine phosphorothiorate
  modified_base 62: mod_base = OTHER; note = 2'-fluorocytosine
  modified_base 63: mod_base = OTHER; note = 2'-Omethylcytosine
  modified_base 65: mod_base = OTHER; note = Guanosine phosphorothiorate
  modified_base 66: mod_base = OTHER; note = 2'-Omethylcytosine
  modified_base 67: mod_base = OTHER; note = Guanosine phosphorothiorate
  modified_base 68: mod_base = OTHER; note = Guanosine phosphorothiorate
  modified_base 70: mod_base = OTHER; note = 2'-fluoroguanosine
  modified_base 71: mod_base = OTHER; note = Uridine phosphorothiorate
  modified_base 72: mod_base = OTHER; note = 2'-Omethylcytosine
  modified_base 74: mod_base = OTHER; note = 2'-Omethylcytosine

SEQ ID NO: 8593 - RNA, 76 nt, synthetic construct; identical to SEQ ID NO: 3318
  source 1..76: mol_type = other RNA
  modified_base 1: mod_base = OTHER; note = 2'-Omethylcytosine
  modified_base 2: mod_base = OTHER; note = 2'-Omethylcytosine
  modified_base 3: mod_base = OTHER; note = 2'-Omethyluridine
  modified_base 4: mod_base = OTHER; note = 2'-Omethyluridine
  modified_base 5: mod_base = OTHER; note = 2'-Omethylcytosine
  modified_base 6: mod_base = OTHER; note = 2'-Omethylguanosine
  modified_base 10: mod_base = OTHER; note = 2'-Omethylguanosine
  modified_base 11: mod_base = OTHER; note = 2'-Omethylcytosine
  modified_base 12: mod_base = OTHER; note = 2'-Omethyluridine
  modified_base 13: mod_base = OTHER; note = 2'-Omethylcytosine

SEQ ID NO: 8594 - RNA, 75 nt, synthetic construct; identical to SEQ ID NO: 1045
  source 1..75: mol_type = other RNA
  modified_base 1: mod_base = OTHER; note = 2'-Omethylguanosine phosphorothiorate
  modified_base 11: mod_base = OTHER; note = 2'-Omethyluridine phosphorothiorate
  modified_base 14: mod_base = OTHER; note = Adenosine phosphorothiorate
  modified_base 16: mod_base = OTHER; note = 2'-fluorouridine
  modified_base 20: mod_base = OTHER; note = 2'-fluoroadenosine
  modified_base 21: mod_base = OTHER; note = Adenosine phosphorothiorate
  modified_base 22: mod_base = OTHER; note = Guanosine phosphorothiorate
  modified_base 23: mod_base = OTHER; note = 2'-fluorocytosine
  modified_base 29: mod_base = OTHER; note = 2'-fluoroguanosine phosphorothiorate
  modified_base 32: mod_base = OTHER; note = 2'-fluorocytosine
  modified_base 44: mod_base = OTHER; note = 2'-fluorocytosine
  modified_base 45: mod_base = OTHER; note = 2'-fluoroguanosine
  modified_base 52: mod_base = OTHER; note = Guanosine phosphorothiorate
  modified_base 54: mod_base = OTHER; note = Uridine phosphorothiorate
  modified_base 55: mod_base = OTHER; note = 2'-fluorocytosine phosphorothiorate
  modified_base 61: mod_base = OTHER; note = 2'-fluorouridine phosphorothiorate
  modified_base 63: mod_base = OTHER; note = Guanosine phosphorothiorate
  modified_base 64: mod_base = OTHER; note = Guanosine phosphorothiorate
  modified_base 67: mod_base = OTHER; note = 2'-fluoroguanosine
  modified_base 74: mod_base = OTHER; note = Cytosine phosphorothiorate
  modified_base 75: mod_base = OTHER; note = 2'-Omethyladenosine

SEQ ID NO: 8595 - RNA, 76 nt, synthetic construct; identical to SEQ ID NO: 3329
  source 1..76: mol_type = other RNA
  modified_base 1: mod_base = OTHER; note = 2'-Omethylguanosine phosphorothiorate
  modified_base 2: mod_base = OTHER; note = 2'-Omethylguanosine phosphorothiorate
  modified_base 52: mod_base = OTHER; note = Guanosine phosphorothiorate
  modified_base 74: mod_base = OTHER; note = Cytosine phosphorothiorate
  modified_base 75: mod_base = OTHER; note = 2'-Omethylcytosine

SEQ ID NO: 8596 - RNA, 76 nt, synthetic construct; identical to SEQ ID NO: 625
  source 1..76: mol_type = other RNA
  modified_base 1: mod_base = OTHER; note = 2'-Omethylguanosine phosphorothiorate
  modified_base 2: mod_base = OTHER; note = 2'-Omethylguanosine phosphorothiorate
  modified_base 3: mod_base = OTHER; note = 2'-Omethylcytosine phosphorothiorate
  modified_base 4: mod_base = OTHER; note = 2'-Omethyluridine phosphorothiorate
  modified_base 5: mod_base = OTHER; note = 2'-Omethylcytosine phosphorothiorate
  modified_base 6: mod_base = OTHER; note = 2'-Omethylcytosine phosphorothiorate
  modified_base 10: mod_base = OTHER; note = 2'-Omethylguanosine
  modified_base 11: mod_base = OTHER; note = 2'-Omethylcytosine
  modified_base 12: mod_base = OTHER; note = 2'-Omethylguanosine
  modified_base 13: mod_base = OTHER; note = 2'-Omethylcytosine
  modified_base 22: mod_base = OTHER; note = 2'-Omethylguanosine
  modified_base 23: mod_base = OTHER; note = 2'-Omethylcytosine
  modified_base 24: mod_base = OTHER; note = 2'-Omethylguanosine
  modified_base 25: mod_base = OTHER; note = 2'-Omethylcytosine
  modified_base 40: mod_base = OTHER; note = 2'-fluorouridine
  modified_base 41: mod_base = OTHER; note = 2'-fluorocytosine
  modified_base 42: mod_base = OTHER; note = 2'-fluoroadenosine
  modified_base 43: mod_base = OTHER; note = 2'-fluoroadenosine
  modified_base 54: mod_base = OTHER; note = Uridine phosphorothiorate
  modified_base 55: mod_base = OTHER; note = Uridine phosphorothiorate
  modified_base 56: mod_base = OTHER; note = Cytosine phosphorothiorate
  modified_base 57: mod_base = OTHER; note = Guanosine phosphorothiorate
  modified_base 61: mod_base = OTHER; note = 2'-Omethylcytosine
  modified_base 62: mod_base = OTHER; note = 2'-Omethylcytosine
  modified_base 63: mod_base = OTHER; note = 2'-Omethylcytosine
  modified_base 64: mod_base = OTHER; note = 2'-Omethylguanosine
  modified_base 65: mod_base = OTHER; note = 2'-Omethylguanosine
  modified_base 66: mod_base = OTHER; note = 2'-Omethylcytosine
  modified_base 67: mod_base = OTHER; note = 2'-Omethylguanosine
  modified_base 68: mod_base = OTHER; note = 2'-Omethylguanosine
  modified_base 69: mod_base = OTHER; note = 2'-Omethyladenosine

SEQ ID NO: 8597 - RNA, 76 nt, synthetic construct; identical to SEQ ID NO: 625
  source 1..76: mol_type = other RNA
  modified_base 1: mod_base = OTHER; note = 2'-Omethylguanosine
  modified_base 10: mod_base = OTHER; note = 2'-Omethylguanosine
  modified_base 13: mod_base = OTHER; note = 2'-Omethylcytosine
  modified_base 17: mod_base = OTHER; note = Guanosine phosphorothiorate
  modified_base 18: mod_base = OTHER; note = 2'-Omethylguanosine
  modified_base 19: mod_base = OTHER; note = Adenosine phosphorothiorate
  modified_base 20: mod_base = OTHER; note = 2'-Omethyluridine
  modified_base 25: mod_base = OTHER; note = 2'-Omethylcytosine
  modified_base 29: mod_base = OTHER; note = 2'-Omethylguanosine
  modified_base 33: mod_base = OTHER; note = 2'-fluorouridine
  modified_base 35: mod_base = OTHER; note = Cytosine phosphorothiorate
  modified_base 37: mod_base = OTHER; note = Adenosine phosphorothiorate
  modified_base 38: mod_base = OTHER; note = Adenosine phosphorothiorate
  modified_base 43: mod_base = OTHER; note = 2'-Omethyladenosine
  modified_base 44: mod_base = OTHER; note = 2'-fluoroadenosine
  modified_base 46: mod_base = OTHER; note = Guanosine phosphorothiorate
  modified_base 50: mod_base = OTHER; note = 2'-Omethylcytosine
  modified_base 52: mod_base = OTHER; note = 2'-Omethylguanosine
  modified_base 54: mod_base = OTHER; note = 2'-Omethyluridine
  modified_base 55: mod_base = OTHER; note = Uridine phosphorothiorate
  modified_base 56: mod_base = OTHER; note = 2'-Omethylcytosine
  modified_base 57: mod_base = OTHER; note = Guanosine phosphorothiorate
  modified_base 62: mod_base = OTHER; note = 2'-Omethylcytosine
  modified_base 63: mod_base = OTHER; note = 2'-fluorocytosine
  modified_base 65: mod_base = OTHER; note = 2'-Omethylguanosine
  modified_base 71: mod_base = OTHER; note = 2'-Omethyluridine
  modified_base 73: mod_base = OTHER; note = 2'-Omethylguanosine

SEQ ID NO: 8598 - RNA, 75 nt, synthetic construct; identical to SEQ ID NO: 3306
  source 1..75: mol_type = other RNA
  modified_base 1: mod_base = OTHER; note = 2'-Omethylguanosine
  modified_base 14: mod_base = OTHER; note = 2'-Omethyladenosine phosphorothiorate
  modified_base 15: mod_base = OTHER; note = 2'-Omethyladenosine phosphorothiorate
  modified_base 16: mod_base = OTHER; note = 2'-Omethylcytosine phosphorothiorate
  modified_base 17: mod_base = OTHER; note = 2'-Omethylguanosine phosphorothiorate
  modified_base 18: mod_base = OTHER; note = 2'-Omethylguanosine phosphorothiorate
  modified_base 19: mod_base = OTHER; note = Uridine phosphorothiorate
  modified_base 20: mod_base = OTHER; note = Adenosine phosphorothiorate
  modified_base 49: mod_base = OTHER; note = 2'-Omethylcytosine
  modified_base 51: mod_base = OTHER; note = 2'-Omethyluridine
  modified_base 72: mod_base = OTHER; note = 2'-Omethyladenosine

SEQ ID NO: 8599 - RNA, 76 nt, synthetic construct
  source 1..76: mol_type = other RNA
ggcccagtggcgcaatggatagcgcattggacttcaaattcaaaggttgcgggttcgagtcccgcctgggtcgcca

SEQ ID NO: 8600 - RNA, 76 nt, synthetic construct; identical to SEQ ID NO: 625
  source 1..76: mol_type = other RNA
  modified_base 2: mod_base = OTHER; note = Guanosine phosphorothiorate
  modified_base 4: mod_base = OTHER; note = 2'-fluorouridine
  modified_base 5: mod_base = OTHER; note = 2'-Omethylcytosine
  modified_base 6: mod_base = OTHER; note = Cytosine phosphorothiorate
  modified_base 10: mod_base = OTHER; note = 2'-fluoroguanosine
  modified_base 13: mod_base = OTHER; note = 2'-fluorocytosine
  modified_base 16: mod_base = OTHER; note = 2'-Omethyluridine
  modified_base 18: mod_base = OTHER; note = Guanosine phosphorothiorate
  modified_base 21: mod_base = OTHER; note = Adenosine phosphorothiorate
  modified_base 22: mod_base = OTHER; note = 2'-fluoroguanosine
  modified_base 25: mod_base = OTHER; note = 2'-Omethylcytosine
  modified_base 27: mod_base = OTHER; note = 2'-Omethyluridine
  modified_base 28: mod_base = OTHER; note = 2'-fluorouridine
  modified_base 29: mod_base = OTHER; note = Guanosine phosphorothiorate
  modified_base 30: mod_base = OTHER; note = 2'-Omethylguanosine phosphorothiorate
  modified_base 31: mod_base = OTHER; note = 2'-Omethyladenosine
  modified_base 34: mod_base = OTHER; note = 2'-Omethyluridine
  modified_base 43: mod_base = OTHER; note = 2'-fluoroadenosine
  modified_base 44: mod_base = OTHER; note = 2'-Omethyladenosine phosphorothiorate
  modified_base 46: mod_base = OTHER; note = Guanosine phosphorothiorate
  modified_base 47: mod_base = OTHER; note = 2'-Omethyluridine
  modified_base 48: mod_base = OTHER; note = Uridine phosphorothiorate
  modified_base 53: mod_base = OTHER; note = 2'-Omethylguanosine
  modified_base 55: mod_base = OTHER; note = Uridine phosphorothiorate
  modified_base 56: mod_base = OTHER; note = 2'-Omethylcytosine phosphorothiorate
  modified_base 57: mod_base = OTHER; note = 2'-Omethylguanosine phosphorothiorate
  modified_base 58: mod_base = OTHER; note = Adenosine phosphorothiorate
  modified_base 59: mod_base = OTHER; note = 2'-Omethylguanosine
  modified_base 63: mod_base = OTHER; note = 2'-Omethylcytosine
  modified_base 64: mod_base = OTHER; note = Guanosine phosphorothiorate
  modified_base 65: mod_base = OTHER; note = 2'-Omethylguanosine phosphorothiorate
  modified_base 66: mod_base = OTHER; note = 2'-Omethylcytosine
  modified_base 67: mod_base = OTHER; note = 2'-Omethylguanosine
  modified_base 68: mod_base = OTHER; note = 2'-fluoroguanosine
  modified_base 70: mod_base = OTHER; note = Guanosine phosphorothiorate
  modified_base 73: mod_base = OTHER; note = 2'-fluoroguanosine
  modified_base 75: mod_base = OTHER; note = Cytosine phosphorothiorate

SEQ ID NO: 8601 - RNA, 75 nt, synthetic construct; identical to SEQ ID NO: 3336
  source 1..75: mol_type = other RNA
  modified_base 1: mod_base = OTHER; note = 2'-fluorocytosine
  modified_base 8: mod_base = OTHER; note = Adenosine phosphorothiorate
  modified_base 15: mod_base = OTHER; note = 2'-fluorouridine
  modified_base 16: mod_base = OTHER; note = 2'-fluorocytosine
  modified_base 20: mod_base = OTHER; note = 2'-fluoroadenosine
  modified_base 27: mod_base = OTHER; note = 2'-fluorocytosine phosphorothiorate
  modified_base 50: mod_base = OTHER; note = 2'-fluoroguanosine
  modified_base 72: mod_base = OTHER; note = 2'-fluoroguanosine phosphorothiorate

SEQ ID NO: 8602 - RNA, 76 nt, synthetic construct; identical to SEQ ID NO: 3795
  source 1..76: mol_type = other RNA
  modified_base 1: mod_base = OTHER; note = 2'-Omethylguanosine
  modified_base 2: mod_base = OTHER; note = 2'-Omethylcytosine
  modified_base 3: mod_base = OTHER; note = 2'-Omethylcytosine
  modified_base 4: mod_base = OTHER; note = 2'-Omethyluridine
  modified_base 5: mod_base = OTHER; note = 2'-Omethylcytosine
  modified_base 6: mod_base = OTHER; note = 2'-Omethylcytosine
  modified_base 16: mod_base = OTHER; note = 2'-Omethyluridine
  modified_base 17: mod_base = OTHER; note = 2'-Omethylguanosine
  modified_base 18: mod_base = OTHER; note = 2'-Omethylguanosine
  modified_base 20: mod_base = OTHER; note = 2'-Omethyluridine
  modified_base 25: mod_base = OTHER; note = 2'-Omethylcytosine
  modified_base 33: mod_base = OTHER; note = 2'-fluorouridine
  modified_base 35: mod_base = OTHER; note = Cytosine phosphorothiorate
  modified_base 37: mod_base = OTHER; note = Adenosine phosphorothiorate
  modified_base 38: mod_base = OTHER; note = Adenosine phosphorothiorate
  modified_base 41: mod_base = OTHER; note = 2'-Omethylcytosine
  modified_base 42: mod_base = OTHER; note = 2'-Omethylguanosine
  modified_base 43: mod_base = OTHER; note = 2'-Omethylguanosine
  modified_base 44: mod_base = OTHER; note = 2'-Omethylguanosine
  modified_base 49: mod_base = OTHER; note = 2'-Omethylguanosine
  modified_base 50: mod_base = OTHER; note = 2'-Omethylcytosine
  modified_base 52: mod_base = OTHER; note = 2'-Omethylguanosine
  modified_base 54: mod_base = OTHER; note = Uridine phosphorothiorate
  modified_base 55: mod_base = OTHER; note = Uridine phosphorothiorate
  modified_base 61: mod_base = OTHER; note = 2'-Omethylcytosine
  modified_base 65: mod_base = OTHER; note = 2'-Omethyluridine
  modified_base 73: mod_base = OTHER; note = 2'-Omethylguanosine

SEQ ID NO: 8603 - RNA, 75 nt, synthetic construct; identical to SEQ ID NO: 1045
  source 1..75: mol_type = other RNA
  modified_base 1: mod_base = OTHER; note = 2'-Omethylguanosine phosphorothiorate
  modified_base 2: mod_base = OTHER; note = 2'-fluoroguanosine
  modified_base 19: mod_base = OTHER; note = Uridine phosphorothiorate
  modified_base 20: mod_base = OTHER; note = 2'-fluoroadenosine
  modified_base 23: mod_base = OTHER; note = Cytosine phosphorothiorate
  modified_base 24: mod_base = OTHER; note = 2'-fluoroadenosine
  modified_base 28: mod_base = OTHER; note = 2'-fluorouridine
  modified_base 38: mod_base = OTHER; note = Adenosine phosphorothiorate
  modified_base 39: mod_base = OTHER; note = 2'-fluorouridine
  modified_base 51: mod_base = OTHER; note = Adenosine phosphorothiorate
  modified_base 60: mod_base = OTHER; note = 2'-fluorocytosine
  modified_base 65: mod_base = OTHER; note = Uridine phosphorothiorate
  modified_base 73: mod_base = OTHER; note = Cytosine phosphorothiorate
  modified_base 74: mod_base = OTHER; note = 2'-Omethylcytosine

SEQ ID NO: 8604 - RNA, 85 nt, synthetic construct; identical to SEQ ID NO: 3297
  source 1..85: mol_type = other RNA
  modified_base 1: mod_base = OTHER; note = 2'-Omethylguanosine phosphorothiorate
  modified_base 2: mod_base = OTHER; note = 2'-Omethylcytosine phosphorothiorate
  modified_base 3: mod_base = OTHER; note = 2'-Omethyluridine
  modified_base 4: mod_base = OTHER; note = 2'-Omethylguanosine
  modified_base 5: mod_base = OTHER; note = 2'-Omethyluridine
  modified_base 6: mod_base = OTHER; note = 2'-Omethylguanosine
  modified_base 10: mod_base = OTHER; note = 2'-Omethylguanosine
  modified_base 11: mod_base = OTHER; note = 2'-Omethylcytosine
  modified_base 12: mod_base = OTHER; note = 2'-Omethylcytosine
  modified_base 13: mod_base = OTHER; note = 2'-Omethylguanosine
  modified_base 14: mod_base = OTHER; note = 2'-Omethyladenosine
  modified_base 15: mod_base = OTHER; note = 2'-fluoroguanosine
  modified_base 16: mod_base = OTHER; note = 2'-Omethyluridine
  modified_base 17: mod_base = OTHER; note = 2'-Omethylguanosine
  modified_base 18: mod_base = OTHER; note = 2'-Omethylguanosine
  modified_base 19: mod_base = OTHER; note = 2'-fluorouridine
  modified_base 20: mod_base = OTHER; note = 2'-Omethyluridine
  modified_base 22: mod_base = OTHER; note = 2'-Omethyladenosine
  modified_base 23: mod_base = OTHER; note = 2'-Omethylguanosine
  modified_base 24: mod_base = OTHER; note = 2'-Omethylguanosine
  modified_base 25: mod_base = OTHER; note = 2'-Omethylcytosine
  modified_base 58: mod_base = OTHER; note = 2'-Omethylguanosine
  modified_base 59: mod_base = OTHER; note = 2'-Omethylcytosine
  modified_base 60: mod_base = OTHER; note = 2'-Omethyladenosine
  modified_base 61: mod_base = OTHER; note = 2'-Omethylguanosine
  modified_base 62: mod_base = OTHER; note = 2'-Omethylguanosine
  modified_base 63: mod_base = OTHER; note = 2'-Omethyluridine
  modified_base 70: mod_base = OTHER; note = 2'-Omethylcytosine
  modified_base 71: mod_base = OTHER; note = 2'-Omethylcytosine
  modified_base 72: mod_base = OTHER; note = 2'-fluorouridine
  modified_base 73: mod_base = OTHER; note = 2'-Omethylguanosine
  modified_base 74: mod_base = OTHER; note = 2'-Omethylcytosine
  modified_base 75: mod_base = OTHER; note = 2'-Omethyluridine
  modified_base 76: mod_base = OTHER; note = 2'-Omethylcytosine
  modified_base 77: mod_base = OTHER; note = 2'-Omethyladenosine
  modified_base 82: mod_base = OTHER; note = 2'-Omethylguanosine

SEQ ID NO: 8605 - RNA, 85 nt, synthetic construct; identical to SEQ ID NO: 3288
  source 1..85: mol_type = other RNA
  modified_base 1: mod_base = OTHER; note = 2'-Omethylcytosine phosphorothiorate
  modified_base 2: mod_base = OTHER; note = 2'-fluorocytosine phosphorothiorate
  modified_base 14: mod_base = OTHER; note = Guanosine phosphorothiorate
  modified_base 67: mod_base = OTHER; note = Adenosine phosphorothiorate
  modified_base 84: mod_base = OTHER; note = Cytosine phosphorothiorate
  modified_base 85: mod_base = OTHER; note = 2'-Omethyladenosine

SEQ ID NO: 8606 - RNA, 86 nt, synthetic construct; identical to SEQ ID NO: 3290
  source 1..86: mol_type = other RNA
  modified_base 59: mod_base = OTHER; note = 2'-Omethylguanosine

SEQ ID NO: 8607 - RNA, 76 nt, synthetic construct; identical to SEQ ID NO: 625
  source 1..76: mol_type = other RNA
  modified_base 1: mod_base = OTHER; note = 2'-Omethylguanosine phosphorothiorate
  modified_base 2: mod_base = OTHER; note = 2'-Omethylguanosine
  modified_base 3: mod_base = OTHER; note = 2'-Omethylcytosine
  modified_base 4: mod_base = OTHER; note = 2'-Omethyluridine
  modified_base 5: mod_base = OTHER; note = 2'-Omethylcytosine
  modified_base 6: mod_base = OTHER; note = 2'-Omethylcytosine
  modified_base 10: mod_base = OTHER; note = 2'-Omethylguanosine
  modified_base 11: mod_base = OTHER; note = 2'-Omethylcytosine
  modified_base 12: mod_base = OTHER; note = 2'-Omethylguanosine
  modified_base 13: mod_base = OTHER; note = 2'-Omethylcytosine
  modified_base 14: mod_base = OTHER; note = 2'-Omethyladenosine
  modified_base 15: mod_base = OTHER; note = 2'-Omethyladenosine
  modified_base 16: mod_base = OTHER; note = 2'-Omethyluridine
  modified_base 17: mod_base = OTHER; note = 2'-Omethylguanosine
  modified_base 18: mod_base = OTHER; note = 2'-Omethylguanosine
  modified_base 19: mod_base = OTHER; note = 2'-Omethyladenosine
  modified_base 20: mod_base = OTHER; note = 2'-Omethyluridine
  modified_base 43: mod_base = OTHER; note = 2'-Omethyladenosine
  modified_base 44: mod_base = OTHER; note = 2'-Omethyladenosine
  modified_base 45: mod_base = OTHER; note = 2'-Omethylguanosine
  modified_base 46: mod_base = OTHER; note = 2'-fluoroguanosine
  modified_base 48: mod_base = OTHER; note = 2'-fluorouridine
  modified_base 49: mod_base = OTHER; note = 2'-Omethylcytosine
  modified_base 50: mod_base = OTHER; note = 2'-Omethylcytosine
  modified_base 73: mod_base = OTHER; note = 2'-Omethylguanosine

SEQ ID NO: 8608 - RNA, 76 nt, synthetic construct; identical to SEQ ID NO: 625
  source 1..76: mol_type = other RNA
  modified_base 1: mod_base = OTHER; note = 2'-Omethylguanosine phosphorothiorate
  modified_base 2: mod_base = OTHER; note = 2'-Omethylguanosine
  modified_base 3: mod_base = OTHER; note = 2'-Omethylcytosine
  modified_base 10: mod_base = OTHER; note = 2'-Omethylguanosine
  modified_base 11: mod_base = OTHER; note = 2'-Omethylcytosine
  modified_base 12: mod_base = OTHER; note = 2'-Omethylguanosine
  modified_base 13: mod_base = OTHER; note = 2'-Omethylcytosine
  modified_base 14: mod_base = OTHER; note = 2'-Omethyladenosine
  modified_base 15: mod_base = OTHER; note = 2'-fluoroadenosine
  modified_base 16: mod_base = OTHER; note = 2'-Omethyluridine
  modified_base 17: mod_base = OTHER; note = 2'-Omethylguanosine
  modified_base 18: mod_base = OTHER; note = 2'-Omethylguanosine
  modified_base 19: mod_base = OTHER; note = 2'-fluoroadenosine
  modified_base 20: mod_base = OTHER; note = 2'-Omethyluridine
  modified_base 22: mod_base = OTHER; note = 2'-Omethylguanosine
  modified_base 23: mod_base = OTHER; note = 2'-Omethylcytosine
  modified_base 24: mod_base = OTHER; note = 2'-Omethylguanosine
  modified_base 25: mod_base = OTHER; note = 2'-Omethylcytosine
  modified_base 38: mod_base = OTHER; note = Adenosine phosphorothiorate
  modified_base 39: mod_base = OTHER; note = Uridine phosphorothiorate
  modified_base 40: mod_base = OTHER; note = 2'-fluorouridine
  modified_base 43: mod_base = OTHER; note = 2'-Omethyladenosine
  modified_base 44: mod_base = OTHER; note = 2'-Omethyladenosine
  modified_base 45: mod_base = OTHER; note = 2'-Omethylguanosine
  modified_base 46: mod_base = OTHER; note = 2'-fluoroguanosine
  modified_base 48: mod_base = OTHER; note = 2'-fluorouridine
  modified_base 49: mod_base = OTHER; note = 2'-Omethylcytosine
  modified_base 50: mod_base = OTHER; note = 2'-Omethylcytosine
  modified_base 54: mod_base = OTHER; note = Uridine phosphorothiorate
  modified_base 55: mod_base = OTHER; note = Uridine phosphorothiorate
  modified_base 56: mod_base = OTHER; note = 2'-Omethylcytosine
  modified_base 57: mod_base = OTHER; note = Guanosine phosphorothiorate
  modified_base 61: mod_base = OTHER; note = 2'-Omethylcytosine
  modified_base 62: mod_base = OTHER; note = 2'-Omethylcytosine
  modified_base 63: mod_base = OTHER; note = 2'-fluorocytosine
  modified_base 64: mod_base = OTHER; note = 2'-Omethylguanosine
  modified_base 65: mod_base = OTHER; note = 2'-Omethylguanosine
  modified_base 66: mod_base = OTHER; note = 2'-Omethylcytosine
  modified_base 67: mod_base = OTHER; note = 2'-Omethylguanosine
  modified_base 68: mod_base = OTHER; note = 2'-Omethylguanosine
  modified_base 69: mod_base = OTHER; note = 2'-fluoroadenosine
  modified_base 70: mod_base = OTHER; note = 2'-fluoroguanosine

SEQ ID NO: 8609 - RNA, 75 nt, synthetic construct; identical to SEQ ID NO: 3306
  source 1..75: mol_type = other RNA
  modified_base 1: mod_base = OTHER; note = 2'-Omethylguanosine phosphorothiorate
  modified_base 2: mod_base = OTHER; note = 2'-Omethyladenosine phosphorothiorate
  modified_base 8: mod_base = OTHER; note = Uridine phosphorothiorate
  modified_base 14: mod_base = OTHER; note = Adenosine phosphorothiorate
  modified_base 18: mod_base = OTHER; note = Guanosine phosphorothiorate
  modified_base 21: mod_base = OTHER; note = Guanosine phosphorothiorate
  modified_base 24: mod_base = OTHER; note = Cytosine phosphorothiorate
  modified_base 26: mod_base = OTHER; note = Uridine phosphorothiorate
  modified_base 40: mod_base = OTHER; note = 2'-Omethyladenosine phosphorothiorate
  modified_base 44: mod_base = OTHER; note = Guanosine phosphorothiorate
  modified_base 45: mod_base = OTHER; note = Guanosine phosphorothiorate
  modified_base 46: mod_base = OTHER; note = Uridine phosphorothiorate
  modified_base 47: mod_base = OTHER; note = 2'-fluorouridine
  modified_base 48: mod_base = OTHER; note = Guanosine phosphorothiorate
  modified_base 70: mod_base = OTHER; note = Uridine phosphorothiorate
  modified_base 72: mod_base = OTHER; note = 2'-Omethyladenosine phosphorothiorate

SEQ ID NO: 8610 - RNA, 86 nt, synthetic construct; identical to SEQ ID NO: 3290
  source 1..86: mol_type = other RNA
  modified_base 63: mod_base = OTHER; note = 2'-fluoroguanosine

SEQ ID NO: 8611 - RNA, 76 nt, synthetic construct; identical to SEQ ID NO: 625
  source 1..76: mol_type = other RNA
  modified_base 1: mod_base = OTHER; note = 2'-Omethylguanosine phosphorothiorate
  modified_base 2: mod_base = OTHER; note = 2'-Omethylguanosine
  modified_base 3: mod_base = OTHER; note = 2'-Omethylcytosine
  modified_base 4: mod_base = OTHER; note = 2'-Omethyluridine
  modified_base 5: mod_base = OTHER; note = 2'-Omethylcytosine
  modified_base 6: mod_base = OTHER; note = 2'-Omethylcytosine
  modified_base 10: mod_base = OTHER; note = 2'-Omethylguanosine
  modified_base 11: mod_base = OTHER; note = 2'-Omethylcytosine
  modified_base 12: mod_base = OTHER; note = 2'-Omethylguanosine
  modified_base 13: mod_base = OTHER; note = 2'-Omethylcytosine
  modified_base 40: mod_base = OTHER; note = 2'-fluorouridine
  modified_base 41: mod_base = OTHER; note = 2'-fluorocytosine
  modified_base 42: mod_base = OTHER; note = 2'-fluoroadenosine
  modified_base 43: mod_base = OTHER; note = 2'-fluoroadenosine
  modified_base 44: mod_base = OTHER; note = 2'-Omethyladenosine
  modified_base 45: mod_base = OTHER; note = 2'-Omethylguanosine
  modified_base 46: mod_base = OTHER; note = 2'-Omethylguanosine
  modified_base 49: mod_base = OTHER; note = 2'-Omethylcytosine
  modified_base 50: mod_base = OTHER; note = 2'-Omethylcytosine
  modified_base 51: mod_base = OTHER; note = 2'-Omethylguanosine
  modified_base 52: mod_base = OTHER; note = 2'-Omethylguanosine
  modified_base 53: mod_base = OTHER; note = 2'-Omethylguanosine
  modified_base 61: mod_base = OTHER; note = 2'-Omethylcytosine
  modified_base 62: mod_base = OTHER; note = 2'-Omethylcytosine
  modified_base 63: mod_base = OTHER; note = 2'-fluorocytosine
  modified_base 64: mod_base = OTHER; note = 2'-Omethylguanosine
  modified_base 65: mod_base = OTHER; note = 2'-Omethylguanosine
  modified_base 66: mod_base = OTHER; note = 2'-Omethylcytosine
  modified_base 67: mod_base = OTHER; note = 2'-Omethylguanosine
  modified_base 68: mod_base = OTHER; note = 2'-Omethylguanosine
  modified_base 69: mod_base = OTHER; note = 2'-fluoroadenosine
  modified_base 71: mod_base = OTHER; note = 2'-Omethyluridine

SEQ ID NO: 8612 - RNA, 85 nt, synthetic construct; identical to SEQ ID NO: 3297
  source 1..85: mol_type = other RNA
  modified_base 1: mod_base = OTHER; note = 2'-Omethylguanosine phosphorothiorate
  modified_base 2: mod_base = OTHER; note = 2'-Omethylcytosine
  modified_base 37: mod_base = OTHER; note = Adenosine phosphorothiorate
  modified_base 46: mod_base = OTHER; note = 2'-fluoroguanosine
  modified_base 47: mod_base = OTHER; note = 2'-Omethylguanosine
  modified_base 50: mod_base = OTHER; note = Cytosine phosphorothiorate
  modified_base 61: mod_base = OTHER; note = Guanosine phosphorothiorate
  modified_base 83: mod_base = OTHER; note = Cytosine phosphorothiorate

SEQ ID NO: 8613 - RNA, 86 nt, synthetic construct; identical to SEQ ID NO: 3290
  source 1..86: mol_type = other RNA
  modified_base 1: mod_base = OTHER; note = 2'-Omethyladenosine phosphorothiorate
  modified_base 2: mod_base = OTHER; note = 2'-Omethylcytosine phosphorothiorate
  modified_base 14: mod_base = OTHER; note = 2'-Omethyladenosine
  modified_base 17: mod_base = OTHER; note = 2'-Omethylguanosine
  modified_base 18: mod_base = OTHER; note = 2'-Omethylguanosine
  modified_base 20: mod_base = OTHER; note = 2'-Omethyluridine phosphorothiorate
  modified_base 22: mod_base = OTHER; note = 2'-Omethyladenosine
  modified_base 25: mod_base = OTHER; note = 2'-Omethylcytosine
  modified_base 27: mod_base = OTHER; note = 2'-Omethyluridine
  modified_base 33: mod_base = OTHER; note = 2'-fluorouridine
  modified_base 41: mod_base = OTHER; note = 2'-Omethylcytosine phosphorothiorate
  modified_base 44: mod_base = OTHER; note = 2'-Omethyluridine
  modified_base 57: mod_base = OTHER; note = 2'-fluoroguanosine
  modified_base 58: mod_base = OTHER; note = 2'-fluorocytosine
  modified_base 62: mod_base = OTHER; note = 2'-Omethylguanosine
  modified_base 65: mod_base = OTHER; note = Uridine phosphorothiorate
  modified_base 81: mod_base = OTHER; note = 2'-Omethylguanosine
  modified_base 83: mod_base = OTHER; note = 2'-Omethyladenosine

SEQ ID NO: 8614 - RNA, 76 nt, synthetic construct; identical to SEQ ID NO: 625
  source 1..76: mol_type = other RNA
  modified_base 2: mod_base = OTHER; note = 2'-Omethylguanosine
  modified_base 3: mod_base = OTHER; note = 2'-fluorocytosine
  modified_base 4: mod_base = OTHER; note = Uridine phosphorothiorate
  modified_base 5: mod_base = OTHER; note = Cytosine phosphorothiorate
  modified_base 6: mod_base = OTHER; note = 2'-fluorocytosine
  modified_base 8: mod_base = OTHER; note = Uridine phosphorothiorate
  modified_base 11: mod_base = OTHER; note = Cytosine phosphorothiorate
  modified_base 12: mod_base = OTHER; note = 2'-Omethylguanosine
  modified_base 13: mod_base = OTHER; note = 2'-fluorocytosine
  modified_base 14: mod_base = OTHER; note = 2'-Omethyladenosine
  modified_base 16: mod_base = OTHER; note = Uridine phosphorothiorate
  modified_base 17: mod_base = OTHER; note = 2'-Omethylguanosine
  modified_base 23: mod_base = OTHER; note = Cytosine phosphorothiorate
  modified_base 24: mod_base = OTHER; note = 2'-Omethylguanosine
  modified_base 25: mod_base = OTHER; note = Cytosine phosphorothiorate
  modified_base 26: mod_base = OTHER; note = 2'-fluoroadenosine phosphorothiorate
  modified_base 27: mod_base = OTHER; note = 2'-Omethyluridine
  modified_base 29: mod_base = OTHER; note = Guanosine phosphorothiorate
  modified_base 30: mod_base = OTHER; note = 2'-fluoroguanosine
  modified_base 31: mod_base = OTHER; note = 2'-fluoroadenosine
  modified_base 34: mod_base = OTHER; note = 2'-Omethyluridine
  modified_base 40: mod_base = OTHER; note = 2'-fluorouridine
  modified_base 41: mod_base = OTHER; note = 2'-Omethylcytosine
  modified_base 43: mod_base = OTHER; note = Adenosine phosphorothiorate
  modified_base 44: mod_base = OTHER; note = 2'-fluoroadenosine
  modified_base 46: mod_base = OTHER; note = 2'-fluoroguanosine
  modified_base 47: mod_base = OTHER; note = 2'-fluorouridine
  modified_base 48: mod_base = OTHER; note = 2'-fluorouridine
  modified_base 50: mod_base = OTHER; note = 2'-fluorocytosine
  modified_base 52: mod_base = OTHER; note = 2'-fluoroguanosine phosphorothiorate
  modified_base 53: mod_base = OTHER; note = 2'-Omethylguanosine
  modified_base 57: mod_base = OTHER; note = 2'-Omethylguanosine
  modified_base 59: mod_base = OTHER; note = 2'-Omethylguanosine
  modified_base 61: mod_base = OTHER; note = 2'-Omethylcytosine
  modified_base 62: mod_base = OTHER; note = 2'-Omethylcytosine phosphorothiorate
  modified_base 63: mod_base = OTHER; note = 2'-Omethylcytosine
  modified_base 67: mod_base = OTHER; note = 2'-fluoroguanosine
  modified_base 69: mod_base = OTHER; note = Adenosine phosphorothiorate
  modified_base 70: mod_base = OTHER; note = 2'-Omethylguanosine phosphorothiorate
  modified_base 71: mod_base = OTHER; note = 2'-Omethyluridine phosphorothiorate
  modified_base 74: mod_base = OTHER; note = 2'-fluorocytosine

SEQ ID NO: 8615 - RNA, 76 nt, synthetic construct; identical to SEQ ID NO: 625
  source 1..76: mol_type = other RNA
  modified_base 3: mod_base = OTHER; note = 2'-Omethylcytosine
  modified_base 4: mod_base = OTHER; note = Uridine phosphorothiorate
  modified_base 5: mod_base = OTHER; note = 2'-Omethylcytosine
  modified_base 7: mod_base = OTHER; note = Guanosine phosphorothiorate
  modified_base 10: mod_base = OTHER; note = 2'-Omethylguanosine
  modified_base 13: mod_base = OTHER; note = 2'-Omethylcytosine
  modified_base 14: mod_base = OTHER; note = 2'-Omethyladenosine
  modified_base 16: mod_base = OTHER; note = 2'-Omethyluridine
  modified_base 19: mod_base = OTHER; note = Adenosine phosphorothiorate
  modified_base 20: mod_base = OTHER; note = 2'-fluorouridine
  modified_base 22: mod_base = OTHER; note = Guanosine phosphorothiorate
  modified_base 23: mod_base = OTHER; note = 2'-Omethylcytosine
  modified_base 24: mod_base = OTHER; note = 2'-Omethylguanosine
  modified_base 25: mod_base = OTHER; note = Cytosine phosphorothiorate
  modified_base 26: mod_base = OTHER; note = 2'-fluoroadenosine phosphorothiorate
  modified_base 27: mod_base = OTHER; note = 2'-fluorouridine
  modified_base 28: mod_base = OTHER; note = 2'-Omethyluridine
  modified_base 31: mod_base = OTHER; note = 2'-fluoroadenosine
  modified_base 33: mod_base = OTHER; note = Uridine phosphorothiorate
  modified_base 34: mod_base = OTHER; note = 2'-fluorouridine
  modified_base 36: mod_base = OTHER; note = Adenosine phosphorothiorate
  modified_base 37: mod_base = OTHER; note = Adenosine phosphorothiorate
  modified_base 38: mod_base = OTHER; note = 2'-Omethyladenosine
  modified_base 39: mod_base = OTHER; note = 2'-Omethyluridine
  modified_base 42: mod_base = OTHER; note = 2'-fluoroadenosine
  modified_base 44: mod_base = OTHER; note = 2'-Omethyladenosine
  modified_base 46: mod_base = OTHER; note = 2'-Omethylguanosine
  modified_base 48: mod_base = OTHER; note = Uridine phosphorothiorate
  modified_base 50: mod_base = OTHER; note = 2'-Omethylcytosine
  modified_base 54: mod_base = OTHER; note = 2'-Omethyluridine
  modified_base 59: mod_base = OTHER; note = 2'-fluoroguanosine phosphorothiorate
  modified_base 60: mod_base = OTHER; note = Uridine phosphorothiorate
  modified_base 61: mod_base = OTHER; note = Cytosine phosphorothiorate
  modified_base 62: mod_base = OTHER; note = 2'-Omethylcytosine phosphorothiorate
  modified_base 64: mod_base = OTHER; note = 2'-fluoroguanosine
  modified_base 65: mod_base = OTHER; note = 2'-fluoroguanosine
  modified_base 68: mod_base = OTHER; note = 2'-fluoroguanosine
  modified_base 73: mod_base = OTHER; note = 2'-Omethylguanosine

SEQ ID NO: 8616 - RNA, 76 nt, synthetic construct; identical to SEQ ID NO: 625
  source 1..76: mol_type = other RNA
  modified_base 1: mod_base = OTHER; note = 2'-Omethylguanosine
  modified_base 2: mod_base = OTHER; note = 2'-Omethylguanosine
  modified_base 3: mod_base = OTHER; note = 2'-Omethylcytosine
  modified_base 4: mod_base = OTHER; note = 2'-Omethyluridine
  modified_base 5: mod_base = OTHER; note = 2'-Omethylcytosine
  modified_base 6: mod_base = OTHER; note = 2'-Omethylcytosine
  modified_base 14: mod_base = OTHER; note = 2'-Omethyladenosine
  modified_base 15: mod_base = OTHER; note = 2'-fluoroadenosine
  modified_base 16: mod_base = OTHER; note = 2'-Omethyluridine
  modified_base 17: mod_base = OTHER; note = 2'-Omethylguanosine
  modified_base 18: mod_base = OTHER; note = 2'-Omethylguanosine
  modified_base 19: mod_base = OTHER; note = 2'-fluoroadenosine
  modified_base 20: mod_base = OTHER; note = 2'-Omethyluridine
  modified_base 25: mod_base = OTHER; note = 2'-Omethylcytosine
  modified_base 33: mod_base = OTHER; note = 2'-fluorouridine
  modified_base 35: mod_base = OTHER; note = Cytosine phosphorothiorate
  modified_base 37: mod_base = OTHER; note = Adenosine phosphorothiorate
  modified_base 38: mod_base = OTHER; note = Adenosine phosphorothiorate
  modified_base 49: mod_base = OTHER; note = 2'-Omethylcytosine
  modified_base 50: mod_base = OTHER; note = 2'-Omethylcytosine
  modified_base 51: mod_base = OTHER; note = 2'-Omethylguanosine
  modified_base 52: mod_base = OTHER; note = 2'-Omethylguanosine
  modified_base 53: mod_base = OTHER; note = 2'-Omethylguanosine
  modified_base 56: mod_base = OTHER; note = 2'-Omethylcytosine
  modified_base 57: mod_base = OTHER; note = 2'-Omethylguanosine
  modified_base 61: mod_base = OTHER; note = 2'-Omethylcytosine
  modified_base 62: mod_base = OTHER; note = 2'-Omethylcytosine
  modified_base 63: mod_base = OTHER; note = 2'-fluorocytosine
  modified_base 64: mod_base = OTHER; note = 2'-Omethylguanosine
  modified_base 65: mod_base = OTHER; note = 2'-Omethylguanosine
  modified_base 66: mod_base = OTHER; note = 2'-Omethylcytosine
  modified_base 67: mod_base = OTHER; note = 2'-Omethylguanosine
  modified_base 68: mod_base = OTHER; note = 2'-Omethylguanosine
  modified_base 69: mod_base = OTHER; note = 2'-Omethyladenosine
  modified_base 73: mod_base = OTHER; note = 2'-Omethylguanosine
  modified_base 75: mod_base = OTHER; note = 2'-fluorocytosine phosphorothiorate

SEQ ID NO: 8617 - RNA, 75 nt, synthetic construct; identical to SEQ ID NO: 3306
  source 1..75: mol_type = other RNA
  modified_base 1: mod_base = OTHER; note = 2'-Omethylguanosine phosphorothiorate
  modified_base 2: mod_base = OTHER; note = 2'-Omethyladenosine phosphorothiorate
  modified_base 40: mod_base = OTHER; note = Adenosine phosphorothiorate
  modified_base 41: mod_base = OTHER; note = 2'-fluoroguanosine
  modified_base 53: mod_base = OTHER; note = 2'-fluorouridine
  modified_base 68: mod_base = OTHER; note = 2'-fluoroguanosine
  modified_base 73: mod_base = OTHER; note = Cytosine phosphorothiorate
  modified_base 74: mod_base = OTHER; note = 2'-Omethylcytosine

SEQ ID NO: 8618 - RNA, 76 nt, synthetic construct
  source 1..76: mol_type = other RNA
gcccctgtggcctaatggataaggcatcggtcttcaaaaccggggattgtgggttcgagtcccaccaggggtacca

SEQ ID NO: 8619 - RNA, 76 nt, synthetic construct; identical to SEQ ID NO: 625
  source 1..76: mol_type = other RNA
  modified_base 1: mod_base = OTHER; note = 2'-fluoroguanosine
  modified_base 2: mod_base = OTHER; note = Guanosine phosphorothiorate
  modified_base 6: mod_base = OTHER; note = 2'-fluorocytosine
  modified_base 8: mod_base = OTHER; note = Uridine phosphorothiorate
  modified_base 10: mod_base = OTHER; note = 2'-Omethylguanosine
  modified_base 11: mod_base = OTHER; note = 2'-fluorocytosine
  modified_base 15: mod_base = OTHER; note = 2'-Omethyladenosine
  modified_base 16: mod_base = OTHER; note = Uridine phosphorothiorate
  modified_base 20: mod_base = OTHER; note = 2'-fluorouridine
  modified_base 22: mod_base = OTHER; note = Guanosine phosphorothiorate
  modified_base 23: mod_base = OTHER; note = 2'-fluorocytosine
  modified_base 26: mod_base = OTHER; note = 2'-fluoroadenosine
  modified_base 28: mod_base = OTHER; note = 2'-fluorouridine
  modified_base 31: mod_base = OTHER; note = 2'-fluoroadenosine
  modified_base 33: mod_base = OTHER; note = Uridine phosphorothiorate
  modified_base 36: mod_base = OTHER; note = Adenosine phosphorothiorate
  modified_base 38: mod_base = OTHER; note = Adenosine phosphorothiorate
  modified_base 40: mod_base = OTHER; note = 2'-fluorouridine
  modified_base 41: mod_base = OTHER; note = Cytosine phosphorothiorate
  modified_base 42: mod_base = OTHER; note = 2'-Omethyladenosine
  modified_base 44: mod_base = OTHER; note = 2'-Omethyladenosine
  modified_base 45: mod_base = OTHER; note = Guanosine phosphorothiorate
  modified_base 46: mod_base = OTHER; note = Guanosine phosphorothiorate
  modified_base 53: mod_base = OTHER; note = Guanosine phosphorothiorate
  modified_base 54: mod_base = OTHER; note = 2'-fluorouridine
  modified_base 58: mod_base = OTHER; note = 2'-fluoroadenosine
  modified_base 59: mod_base = OTHER; note = 2'-Omethylguanosine
  modified_base 60: mod_base = OTHER; note = 2'-fluorouridine
  modified_base 63: mod_base = OTHER; note = 2'-fluorocytosine
  modified_base 68: mod_base = OTHER; note = 2'-fluoroguanosine
  modified_base 69: mod_base = OTHER; note = Adenosine phosphorothiorate
  modified_base 72: mod_base = OTHER; note = 2'-Omethylcytosine
  modified_base 73: mod_base = OTHER; note = 2'-Omethylguanosine
  modified_base 74: mod_base = OTHER; note = 2'-fluorocytosine phosphorothiorate
  modified_base 75: mod_base = OTHER; note = 2'-Omethylcytosine

SEQ ID NO: 8620 - RNA, 75 nt, synthetic construct; identical to SEQ ID NO: 1045
  source 1..75: mol_type = other RNA
  modified_base 1: mod_base = OTHER; note = 2'-Omethylguanosine
  modified_base 40: mod_base = OTHER; note = 2'-fluorocytosine
  modified_base 41: mod_base = OTHER; note = 2'-Omethylcytosine phosphorothiorate
  modified_base 42: mod_base = OTHER; note = 2'-fluoroadenosine
  modified_base 43: mod_base = OTHER; note = 2'-Omethylguanosine phosphorothiorate
  modified_base 72: mod_base = OTHER; note = 2'-Omethyluridine

SEQ ID NO: 8621 - RNA, 76 nt, synthetic construct; identical to SEQ ID NO: 625
  source 1..76: mol_type = other RNA
  modified_base 1: mod_base = OTHER; note = 2'-Omethylguanosine
  modified_base 11: mod_base = OTHER; note = 2'-fluorocytosine phosphorothiorate
  modified_base 12: mod_base = OTHER; note = 2'-fluoroguanosine
  modified_base 13: mod_base = OTHER; note = Cytosine phosphorothiorate
  modified_base 14: mod_base = OTHER; note = 2'-fluoroadenosine
  modified_base 15: mod_base = OTHER; note = 2'-Omethyladenosine
  modified_base 16: mod_base = OTHER; note = 2'-Omethyluridine
  modified_base 18: mod_base = OTHER; note = Guanosine phosphorothiorate
  modified_base 21: mod_base = OTHER; note = Adenosine phosphorothiorate
  modified_base 24: mod_base = OTHER; note = 2'-fluoroguanosine
  modified_base 26: mod_base = OTHER; note = 2'-fluoroadenosine
  modified_base 28: mod_base = OTHER; note = 2'-fluorouridine
  modified_base 30: mod_base = OTHER; note = Guanosine phosphorothiorate
  modified_base 31: mod_base = OTHER; note = 2'-fluoroadenosine
  modified_base 33: mod_base = OTHER; note = Uridine phosphorothiorate
  modified_base 34: mod_base = OTHER; note = 2'-Omethyluridine
  modified_base 38: mod_base = OTHER; note = 2'-Omethyladenosine
  modified_base 39: mod_base = OTHER; note = 2'-fluorouridine
  modified_base 41: mod_base = OTHER; note = 2'-fluorocytosine
  modified_base 42: mod_base = OTHER; note = 2'-fluoroadenosine
  modified_base 46: mod_base = OTHER; note = 2'-Omethylguanosine
  modified_base 48: mod_base = OTHER; note = 2'-Omethyluridine
  modified_base 52: mod_base = OTHER; note = Guanosine phosphorothiorate
  modified_base 56: mod_base = OTHER; note = 2'-fluorocytosine
  modified_base 57: mod_base = OTHER; note = 2'-Omethylguanosine
  modified_base 61: mod_base = OTHER; note = 2'-fluorocytosine
  modified_base 63: mod_base = OTHER; note = 2'-fluorocytosine phosphorothiorate
  modified_base 65: mod_base = OTHER; note = Guanosine phosphorothiorate
  modified_base 66: mod_base = OTHER; note = 2'-Omethylcytosine
  modified_base 67: mod_base = OTHER; note = Guanosine phosphorothiorate
  modified_base 69: mod_base = OTHER; note = 2'-fluoroadenosine
  modified_base 71: mod_base = OTHER; note = 2'-Omethyluridine
  modified_base 72: mod_base = OTHER; note = Cytosine phosphorothiorate
  modified_base 73: mod_base = OTHER; note = 2'-fluoroguanosine
  modified_base 74: mod_base = OTHER; note = 2'-Omethylcytosine phosphorothiorate

SEQ ID NO: 8622 - RNA, 75 nt, synthetic construct; identical to SEQ ID NO: 3299
  source 1..75: mol_type = other RNA
  modified_base 11: mod_base = OTHER; note = Uridine phosphorothiorate
  modified_base 14: mod_base = OTHER; note = 2'-fluoroguanosine
  modified_base 19: mod_base = OTHER; note = 2'-Omethyluridine phosphorothiorate
  modified_base 21: mod_base = OTHER; note = 2'-fluoroguanosine
  modified_base 23: mod_base = OTHER; note = 2'-fluoroguanosine
  modified_base 25: mod_base = OTHER; note = 2'-fluoroadenosine
  modified_base 27: mod_base = OTHER; note = 2'-fluorocytosine phosphorothiorate
  modified_base 35: mod_base = OTHER; note = 2'-fluoroadenosine
  modified_base 36: mod_base = OTHER; note = 2'-fluoroadenosine phosphorothiorate
  modified_base 41: mod_base = OTHER; note = 2'-Omethylguanosine phosphorothiorate
  modified_base 46: mod_base = OTHER; note = 2'-fluorouridine
  modified_base 47: mod_base = OTHER; note = 2'-fluorocytosine
  modified_base 51: mod_base = OTHER; note = 2'-fluoroguanosine
  modified_base 55: mod_base = OTHER; note = 2'-fluorocytosine phosphorothiorate
  modified_base 63: mod_base = OTHER; note = 2'-fluorouridine phosphorothiorate
  modified_base 64: mod_base = OTHER; note = 2'-fluoroguanosine
  modified_base 72: mod_base = OTHER; note = Guanosine phosphorothiorate
  modified_base 73: mod_base = OTHER; note = Cytosine phosphorothiorate
  modified_base 74: mod_base = OTHER; note = Cytosine phosphorothiorate

SEQ ID NO: 8623 - RNA, 76 nt, synthetic construct; identical to SEQ ID NO: 625
  source 1..76: mol_type = other RNA
  modified_base 3: mod_base = OTHER; note = Cytosine phosphorothiorate
  modified_base 4: mod_base = OTHER; note = Uridine phosphorothiorate
  modified_base 5: mod_base = OTHER; note = 2'-Omethylcytosine
  modified_base 7: mod_base = OTHER; note = Guanosine phosphorothiorate
  modified_base 9: mod_base = OTHER; note = Guanosine phosphorothiorate
  modified_base 10: mod_base = OTHER; note = 2'-fluoroguanosine
  modified_base 13: mod_base = OTHER; note = Cytosine phosphorothiorate
  modified_base 15: mod_base = OTHER; note = 2'-fluoroadenosine
  modified_base 16: mod_base = OTHER; note = 2'-fluorouridine phosphorothiorate
  modified_base 17: mod_base = OTHER; note = 2'-Omethylguanosine
  modified_base 23: mod_base = OTHER; note = Cytosine phosphorothiorate
  modified_base 24: mod_base = OTHER; note = 2'-Omethylguanosine phosphorothiorate
  modified_base 25: mod_base = OTHER; note = 2'-fluorocytosine
  modified_base 33: mod_base = OTHER; note = 2'-fluorouridine
  modified_base 34: mod_base = OTHER; note = 2'-fluorouridine phosphorothiorate
  modified_base 36: mod_base = OTHER; note = Adenosine phosphorothiorate
  modified_base 38: mod_base = OTHER; note = 2'-fluoroadenosine
  modified_base 39: mod_base = OTHER; note = 2'-Omethyluridine
  modified_base 43: mod_base = OTHER; note = 2'-fluoroadenosine
  modified_base 47: mod_base = OTHER; note = 2'-fluorouridine
  modified_base 50: mod_base = OTHER; note = 2'-fluorocytosine
  modified_base 56: mod_base = OTHER; note = 2'-Omethylcytosine
  modified_base 57: mod_base = OTHER; note = Guanosine phosphorothiorate
  modified_base 58: mod_base = OTHER; note = 2'-fluoroadenosine
  modified_base 60: mod_base = OTHER; note = Uridine phosphorothiorate
  modified_base 61: mod_base = OTHER; note = 2'-fluorocytosine
  modified_base 62: mod_base = OTHER; note = 2'-Omethylcytosine
  modified_base 64: mod_base = OTHER; note = 2'-Omethylguanosine
  modified_base 68: mod_base = OTHER; note = 2'-Omethylguanosine phosphorothiorate
  modified_base 73: mod_base = OTHER; note = 2'-Omethylguanosine phosphorothiorate
  modified_base 74: mod_base = OTHER; note = 2'-fluorocytosine

SEQ ID NO: 8624 - RNA, 85 nt, synthetic construct; identical to SEQ ID NO: 3317
  source 1..85: mol_type = other RNA
  modified_base 1: mod_base = OTHER; note = 2'-Omethylguanosine phosphorothiorate
  modified_base 2: mod_base = OTHER; note = Cytosine phosphorothiorate
  modified_base 4: mod_base = OTHER; note = 2'-Omethylguanosine
  modified_base 12: mod_base = OTHER; note = Cytosine phosphorothiorate
  modified_base 35: mod_base = OTHER; note = 2'-fluorouridine
  modified_base 36: mod_base = OTHER; note = 2'-Omethyladenosine
  modified_base 45: mod_base = OTHER; note = 2'-Omethylguanosine
  modified_base 57: mod_base = OTHER; note = 2'-fluorocytosine
  modified_base 61: mod_base = OTHER; note = Guanosine phosphorothiorate
  modified_base 82: mod_base = OTHER; note = 2'-Omethylguanosine

SEQ ID NO: 8625 - RNA, 86 nt, synthetic construct; identical to SEQ ID NO: 3290
  source 1..86: mol_type = other RNA
  modified_base 1: mod_base = OTHER; note = 2'-Omethyladenosine
  modified_base 16: mod_base = OTHER; note = 2'-Omethyluridine
  modified_base 17: mod_base = OTHER; note = 2'-Omethylguanosine
  modified_base 18: mod_base = OTHER; note = 2'-Omethylguanosine
  modified_base 64: mod_base = OTHER; note = 2'-Omethyluridine
  modified_base 66: mod_base = OTHER; note = 2'-Omethylcytosine
  modified_base 67: mod_base = OTHER; note = 2'-fluoroguanosine
  modified_base 69: mod_base = OTHER; note = 2'-Omethyladenosine
  modified_base 83: mod_base = OTHER; note = 2'-Omethyladenosine

SEQ ID NO: 8626 - RNA, 76 nt, synthetic construct; identical to SEQ ID NO: 625
  source 1..76: mol_type = other RNA
  modified_base 1: mod_base = OTHER; note = 2'-fluoroguanosine
  modified_base 3: mod_base = OTHER; note = 2'-fluorocytosine
  modified_base 5: mod_base = OTHER; note = Cytosine phosphorothiorate
  modified_base 6: mod_base = OTHER; note = 2'-fluorocytosine
  modified_base 9: mod_base = OTHER; note = Guanosine phosphorothiorate
  modified_base 10: mod_base = OTHER; note = 2'-fluoroguanosine
  modified_base 12: mod_base = OTHER; note = 2'-fluoroguanosine
  modified_base 14: mod_base = OTHER; note = Adenosine phosphorothiorate
  modified_base 15: mod_base = OTHER; note = 2'-Omethyladenosine
  modified_base 18: mod_base = OTHER; note = 2'-Omethylguanosine
  modified_base 20: mod_base = OTHER; note = 2'-fluorouridine
  modified_base 22: mod_base = OTHER; note = 2'-Omethylguanosine
  modified_base 26: mod_base = OTHER; note = 2'-fluoroadenosine
  modified_base 28: mod_base = OTHER; note = 2'-Omethyluridine
  modified_base 33: mod_base = OTHER; note = 2'-fluorouridine
  modified_base 42: mod_base = OTHER; note = 2'-Omethyladenosine
  modified_base 46: mod_base = OTHER; note = 2'-Omethylguanosine
  modified_base 47: mod_base = OTHER; note = 2'-fluorouridine phosphorothiorate
  modified_base 48: mod_base = OTHER; note = Uridine phosphorothiorate
  modified_base 50: mod_base = OTHER; note = 2'-fluorocytosine
  modified_base 56: mod_base = OTHER; note = 2'-fluorocytosine
  modified_base 57: mod_base = OTHER; note = 2'-fluoroguanosine
  modified_base 58: mod_base = OTHER; note = 2'-fluoroadenosine
  modified_base 59: mod_base = OTHER; note = 2'-fluoroguanosine phosphorothiorate
  modified_base 60: mod_base = OTHER; note = 2'-fluorouridine
  modified_base 61: mod_base = OTHER; note = 2'-fluorocytosine phosphorothiorate
  modified_base 62: mod_base = OTHER; note = 2'-fluorocytosine
  modified_base 64: mod_base = OTHER; note = 2'-Omethylguanosine
  modified_base 65: mod_base = OTHER; note = 2'-Omethylguanosine
  modified_base 66: mod_base = OTHER; note = 2'-fluorocytosine phosphorothiorate
  modified_base 67: mod_base = OTHER; note = 2'-Omethylguanosine
  modified_base 69: mod_base = OTHER; note = 2'-fluoroadenosine
  modified_base 70: mod_base = OTHER; note = 2'-Omethylguanosine
  modified_base 75: mod_base = OTHER; note = 2'-fluorocytosine phosphorothiorate
  modified_base 76: mod_base = OTHER; note = 2'-Omethyladenosine

SEQ ID NO: 8627 - RNA, 74 nt, synthetic construct
  source 1..74: mol_type = other RNA
  modified_base 1: mod_base = OTHER; note = 2'-Omethylcytosine
  modified_base 18: mod_base = OTHER; note = 2'-Omethylguanosine
  modified_base 19: mod_base = OTHER; note = 2'-Omethylguanosine
  modified_base 50: mod_base = OTHER; note = 2'-Omethylcytosine
  modified_base 52: mod_base = OTHER; note = 2'-Omethylguanosine
  modified_base 73: mod_base = OTHER; note = 2'-Omethyladenosine
ccttcgatagctcagttggtagagcggaggactctagatccttaggtcgctggttcgaatccggctcgaaggac

SEQ ID NO: 8628 - RNA, 76 nt, synthetic construct; identical to SEQ ID NO: 625
  source 1..76: mol_type = other RNA
  modified_base 1: mod_base = OTHER; note = 2'-Omethylguanosine phosphorothiorate
  modified_base 2: mod_base = OTHER; note = 2'-Omethylguanosine phosphorothiorate
  modified_base 3: mod_base = OTHER; note = 2'-Omethylcytosine phosphorothiorate
  modified_base 4: mod_base = OTHER; note = 2'-Omethyluridine phosphorothiorate
  modified_base 5: mod_base = OTHER; note = 2'-Omethylcytosine phosphorothiorate
  modified_base 6: mod_base = OTHER; note = 2'-Omethylcytosine phosphorothiorate
  modified_base 22: mod_base = OTHER; note = 2'-Omethylguanosine
  modified_base 23: mod_base = OTHER; note = 2'-Omethylcytosine
  modified_base 24: mod_base = OTHER; note = 2'-Omethylguanosine
  modified_base 25: mod_base = OTHER; note = 2'-Omethylcytosine
  modified_base 54: mod_base = OTHER; note = Uridine phosphorothiorate
  modified_base 55: mod_base = OTHER; note = Uridine phosphorothiorate
  modified_base 56: mod_base = OTHER; note = Cytosine phosphorothiorate
  modified_base 57: mod_base = OTHER; note = Guanosine phosphorothiorate

SEQ ID NO: 8629 - RNA, 75 nt, synthetic construct; identical to SEQ ID NO: 1045
  source 1..75: mol_type = other RNA
  modified_base 1: mod_base = OTHER; note = 2'-Omethylguanosine phosphorothiorate
  modified_base 2: mod_base = OTHER; note = 2'-Omethylguanosine phosphorothiorate
  modified_base 3: mod_base = OTHER; note = 2'-Omethyluridine phosphorothiorate
  modified_base 4: mod_base = OTHER; note = 2'-fluorouridine phosphorothiorate
  modified_base 5: mod_base = OTHER; note = 2'-Omethylcytosine phosphorothiorate
  modified_base 20: mod_base = OTHER; note = 2'-Omethyladenosine
  modified_base 34: mod_base = OTHER; note = 2'-fluorouridine phosphorothiorate
  modified_base 37: mod_base = OTHER; note = 2'-fluoroadenosine phosphorothiorate
  modified_base 47: mod_base = OTHER; note = 2'-Omethyluridine
  modified_base 50: mod_base = OTHER; note = 2'-Omethylguanosine
  modified_base 63: mod_base = OTHER; note = 2'-fluoroguanosine phosphorothiorate
  modified_base 72: mod_base = OTHER; note = 2'-Omethyluridine
  modified_base 74: mod_base = OTHER; note = 2'-Omethylcytosine phosphorothiorate

SEQ ID NO: 8630 - RNA, 75 nt, synthetic construct; identical to SEQ ID NO: 1045
  source 1..75: mol_type = other RNA
  modified_base 2: mod_base = OTHER; note = 2'-Omethylguanosine phosphorothiorate
  modified_base 6: mod_base = OTHER; note = 2'-fluorocytosine phosphorothiorate
  modified_base 12: mod_base = OTHER; note = 2'-Omethylguanosine
  modified_base 22: mod_base = OTHER; note = Guanosine phosphorothiorate
  modified_base 23: mod_base = OTHER; note = 2'-fluorocytosine
  modified_base 33: mod_base = OTHER; note = 2'-fluorouridine
  modified_base 47: mod_base = OTHER; note = 2'-fluorouridine
  modified_base 58: mod_base = OTHER; note = 2'-fluoroguanosine
  modified_base 73: mod_base = OTHER; note = Cytosine phosphorothiorate

SEQ ID NO: 8631 - RNA, 76 nt, synthetic construct; identical to SEQ ID NO: 625
  source 1..76: mol_type = other RNA
  modified_base 3: mod_base = OTHER; note = 2'-fluorocytosine
  modified_base 5: mod_base = OTHER; note = 2'-Omethylcytosine
  modified_base 6: mod_base = OTHER; note = 2'-fluorocytosine
  modified_base 11: mod_base = OTHER; note = 2'-fluorocytosine
  modified_base 12: mod_base = OTHER; note = 2'-Omethylguanosine
  modified_base 13: mod_base = OTHER; note = Cytosine phosphorothiorate
  modified_base 14: mod_base = OTHER; note = Adenosine phosphorothiorate
  modified_base 15: mod_base = OTHER; note = 2'-fluoroadenosine
  modified_base 16: mod_base = OTHER; note = 2'-Omethyluridine phosphorothiorate
  modified_base 22: mod_base = OTHER; note = 2'-Omethylguanosine
  modified_base 25: mod_base = OTHER; note = Cytosine phosphorothiorate
  modified_base 26: mod_base = OTHER; note = 2'-fluoroadenosine phosphorothiorate
  modified_base 27: mod_base = OTHER; note = 2'-Omethyluridine
  modified_base 31: mod_base = OTHER; note = 2'-fluoroadenosine
  modified_base 32: mod_base = OTHER; note = 2'-fluorocytosine
  modified_base 34: mod_base = OTHER; note = 2'-fluorouridine
  modified_base 37: mod_base = OTHER; note = Adenosine phosphorothiorate
  modified_base 38: mod_base = OTHER; note = 2'-fluoroadenosine
  modified_base 39: mod_base = OTHER; note = Uridine phosphorothiorate
  modified_base 40: mod_base = OTHER; note = 2'-fluorouridine
  modified_base 41: mod_base = OTHER; note = Cytosine phosphorothiorate
  modified_base 47: mod_base = OTHER; note = 2'-fluorouridine
  modified_base 49: mod_base = OTHER; note = 2'-Omethylcytosine
  modified_base 50: mod_base = OTHER; note = 2'-fluorocytosine
  modified_base 52: mod_base = OTHER; note = Guanosine phosphorothiorate
  modified_base 53: mod_base = OTHER; note = 2'-Omethylguanosine
  modified_base 55: mod_base = OTHER; note = Uridine phosphorothiorate
  modified_base 61: mod_base = OTHER; note = Cytosine phosphorothiorate
  modified_base 62: mod_base = OTHER; note = 2'-Omethylcytosine
  modified_base 63: mod_base = OTHER; note = 2'-Omethylcytosine phosphorothiorate
  modified_base 64: mod_base = OTHER; note = 2'-fluoroguanosine
  modified_base 65: mod_base = OTHER; note = 2'-fluoroguanosine
  modified_base 66: mod_base = OTHER; note = 2'-Omethylcytosine
  modified_base 69: mod_base = OTHER; note = 2'-fluoroadenosine
  modified_base 70: mod_base = OTHER; note = 2'-Omethylguanosine
  modified_base 71: mod_base = OTHER; note = Uridine phosphorothiorate
  modified_base 72: mod_base = OTHER; note = 2'-Omethylcytosine
  modified_base 73: mod_base = OTHER; note = Guanosine phosphorothiorate
  modified_base 76: mod_base = OTHER; note = 2'-fluoroadenosine

SEQ ID NO: 8632 - RNA, 86 nt, synthetic construct; identical to SEQ ID NO: 3290
  source 1..86: mol_type = other RNA
  modified_base 70: mod_base = OTHER; note = 2'-Omethylcytosine

SEQ ID NO: 8633 - RNA, 75 nt, synthetic construct; identical to SEQ ID NO: 1045
  source 1..75: mol_type = other RNA
  modified_base 1: mod_base = OTHER; note = 2'-Omethylguanosine phosphorothiorate
  modified_base 11: mod_base = OTHER; note = Uridine phosphorothiorate
  modified_base 15: mod_base = OTHER; note = Adenosine phosphorothiorate
  modified_base 21: mod_base = OTHER; note = Adenosine phosphorothiorate
  modified_base 22: mod_base = OTHER; note = 2'-fluoroguanosine
  modified_base 29: mod_base = OTHER; note = 2'-fluoroguanosine
  modified_base 46: mod_base = OTHER; note = 2'-fluoroadenosine
  modified_base 57: mod_base = OTHER; note = 2'-fluoroadenosine
  modified_base 59: mod_base = OTHER; note = 2'-Omethyluridine
  modified_base 73: mod_base = OTHER; note = Cytosine phosphorothiorate
  modified_base 74: mod_base = OTHER; note = 2'-Omethylcytosine
  modified_base 75: mod_base = OTHER; note = 2'-fluoroadenosine

SEQ ID NO: 8634 - RNA, 76 nt, synthetic construct; identical to SEQ ID NO: 3295
  source 1..76: mol_type = other RNA
  modified_base 1: mod_base = OTHER; note = 2'-Omethylcytosine
  modified_base 2: mod_base = OTHER; note = 2'-fluorocytosine
  modified_base 12: mod_base = OTHER; note = 2'-fluorouridine phosphorothiorate
  modified_base 17: mod_base = OTHER; note = 2'-Omethyluridine phosphorothiorate
  modified_base 43: mod_base = OTHER; note = 2'-Omethyluridine
  modified_base 52: mod_base = OTHER; note = 2'-Omethylguanosine
  modified_base 70: mod_base = OTHER; note = 2'-fluoroadenosine
  modified_base 76: mod_base = OTHER; note = 2'-fluoroadenosine

SEQ ID NO: 8635 - RNA, 76 nt, synthetic construct; identical to SEQ ID NO: 625
  source 1..76: mol_type = other RNA
  modified_base 1: mod_base = OTHER; note = 2'-fluoroguanosine
  modified_base 2: mod_base = OTHER; note = 2'-Omethylguanosine
  modified_base 3: mod_base = OTHER; note = 2'-fluorocytosine
  modified_base 8: mod_base = OTHER; note = Uridine phosphorothiorate
  modified_base 15: mod_base = OTHER; note = 2'-Omethyladenosine
  modified_base 18: mod_base = OTHER; note = 2'-Omethylguanosine
  modified_base 24: mod_base = OTHER; note = 2'-fluoroguanosine phosphorothiorate
  modified_base 25: mod_base = OTHER; note = 2'-Omethylcytosine phosphorothiorate
  modified_base 26: mod_base = OTHER; note = 2'-Omethyladenosine
  modified_base 28: mod_base = OTHER; note = 2'-Omethyluridine
  modified_base 34: mod_base = OTHER; note = 2'-Omethyluridine
  modified_base 36: mod_base = OTHER; note = Adenosine phosphorothiorate
  modified_base 39: mod_base = OTHER; note = 2'-Omethyluridine phosphorothiorate
  modified_base 41: mod_base = OTHER; note = Cytosine phosphorothiorate
  modified_base 42: mod_base = OTHER; note = 2'-Omethyladenosine phosphorothiorate
  modified_base 43: mod_base = OTHER; note = 2'-Omethyladenosine
  modified_base 44: mod_base = OTHER; note = 2'-Omethyladenosine
  modified_base 45: mod_base = OTHER; note = 2'-fluoroguanosine
  modified_base 47: mod_base = OTHER; note = 2'-Omethyluridine phosphorothiorate
  modified_base 48: mod_base = OTHER; note = 2'-fluorouridine
  modified_base 50: mod_base = OTHER; note = 2'-fluorocytosine
  modified_base 51: mod_base = OTHER; note = 2'-Omethylguanosine
  modified_base 52: mod_base = OTHER; note = Guanosine phosphorothiorate
  modified_base 53: mod_base = OTHER; note = 2'-fluoroguanosine
  modified_base 54: mod_base = OTHER; note = 2'-Omethyluridine
  modified_base 59: mod_base = OTHER; note = Guanosine phosphorothiorate
  modified_base 63: mod_base = OTHER; note = Cytosine phosphorothiorate
  modified_base 64: mod_base = OTHER; note = 2'-Omethylguanosine
  modified_base 66: mod_base = OTHER; note = 2'-fluorocytosine
  modified_base 67: mod_base = OTHER; note = 2'-Omethylguanosine
  modified_base 69: mod_base = OTHER; note = 2'-fluoroadenosine
  modified_base 70: mod_base = OTHER; note = Guanosine phosphorothiorate
  modified_base 71: mod_base = OTHER; note = 2'-Omethyluridine
  modified_base 74: mod_base = OTHER; note = 2'-fluorocytosine phosphorothiorate

SEQ ID NO: 8636 - RNA, 75 nt, synthetic construct; identical to SEQ ID NO: 3306
  source 1..75: mol_type = other RNA
  modified_base 1: mod_base = OTHER; note = 2'-Omethylguanosine
  modified_base 39: mod_base = OTHER; note = 2'-fluorocytosine
  modified_base 40: mod_base = OTHER; note = 2'-Omethyladenosine phosphorothiorate
  modified_base 41: mod_base = OTHER; note = 2'-fluoroguanosine
  modified_base 42: mod_base = OTHER; note = 2'-Omethyladenosine phosphorothiorate
  modified_base 72: mod_base = OTHER; note = 2'-Omethyladenosine

SEQ ID NO: 8637 - RNA, 75 nt, synthetic construct; identical to SEQ ID NO: 3336
  source 1..75: mol_type = other RNA
  modified_base 1: mod_base = OTHER; note = 2'-Omethylcytosine
  modified_base 2: mod_base = OTHER; note = 2'-Omethylcytosine phosphorothiorate
  modified_base 16: mod_base = OTHER; note = 2'-fluorocytosine phosphorothiorate
  modified_base 26: mod_base = OTHER; note = 2'-Omethyluridine phosphorothiorate
  modified_base 45: mod_base = OTHER; note = 2'-fluoroguanosine
  modified_base 50: mod_base = OTHER; note = 2'-fluoroguanosine phosphorothiorate
  modified_base 72: mod_base = OTHER; note = 2'-Omethylguanosine
  modified_base 74: mod_base = OTHER; note = 2'-fluorocytosine phosphorothiorate

SEQ ID NO: 8638 - RNA, 76 nt, synthetic construct; identical to SEQ ID NO: 625
  source 1..76: mol_type = other RNA
  modified_base 1: mod_base = OTHER; note = 2'-Omethylguanosine phosphorothiorate
  modified_base 2: mod_base = OTHER; note = 2'-Omethylguanosine phosphorothiorate
  modified_base 3: mod_base = OTHER; note = 2'-Omethylcytosine
  modified_base 4: mod_base = OTHER; note = 2'-Omethyluridine
  modified_base 5: mod_base = OTHER; note = 2'-Omethylcytosine
  modified_base 6: mod_base = OTHER; note = 2'-Omethylcytosine
  modified_base 10: mod_base = OTHER; note = 2'-Omethylguanosine
  modified_base 11: mod_base = OTHER; note = 2'-Omethylcytosine
  modified_base 12: mod_base = OTHER; note = 2'-Omethylguanosine
  modified_base 13: mod_base = OTHER; note = 2'-Omethylcytosine
  modified_base 14: mod_base = OTHER; note = 2'-Omethyladenosine
  modified_base 15: mod_base = OTHER; note = 2'-fluoroadenosine
  modified_base 16: mod_base = OTHER; note = 2'-Omethyluridine
  modified_base 17: mod_base = OTHER; note = 2'-Omethylguanosine
  modified_base 18: mod_base = OTHER; note = 2'-Omethylguanosine
  modified_base 19: mod_base = OTHER; note = 2'-fluoroadenosine
  modified_base 20: mod_base = OTHER; note = 2'-Omethyluridine
  modified_base 22: mod_base = OTHER; note = 2'-Omethylguanosine
  modified_base 23: mod_base = OTHER; note = 2'-Omethylcytosine
  modified_base 24: mod_base = OTHER; note = 2'-Omethylguanosine
  modified_base 25: mod_base = OTHER; note = 2'-Omethylcytosine
  modified_base 38: mod_base = OTHER; note = Adenosine phosphorothiorate
  modified_base 39: mod_base = OTHER; note = Uridine phosphorothiorate
  modified_base 40: mod_base = OTHER; note = 2'-fluorouridine
  modified_base 43: mod_base = OTHER; note = 2'-Omethyladenosine
  modified_base 44: mod_base = OTHER; note = 2'-Omethyladenosine
  modified_base 45: mod_base = OTHER; note = 2'-Omethylguanosine
  modified_base 46: mod_base = OTHER; note = 2'-fluoroguanosine
  modified_base 48: mod_base = OTHER; note = 2'-fluorouridine
  modified_base 49: mod_base = OTHER; note = 2'-Omethylcytosine
  modified_base 50: mod_base = OTHER; note = 2'-Omethylcytosine
  modified_base 54: mod_base = OTHER; note = Uridine phosphorothiorate
  modified_base 55: mod_base = OTHER; note = Uridine phosphorothiorate
  modified_base 56: mod_base = OTHER; note = 2'-Omethylcytosine
  modified_base 57: mod_base = OTHER; note = Guanosine phosphorothiorate
  modified_base 61: mod_base = OTHER; note = 2'-Omethylcytosine
  modified_base 62: mod_base = OTHER; note = 2'-Omethylcytosine
  modified_base 63: mod_base = OTHER; note = 2'-fluorocytosine
  modified_base 64: mod_base = OTHER; note = 2'-Omethylguanosine
  modified_base 65: mod_base = OTHER; note = 2'-Omethylguanosine
  modified_base 66: mod_base = OTHER; note = 2'-Omethylcytosine
  modified_base 67: mod_base = OTHER; note = 2'-Omethylguanosine
  modified_base 68: mod_base = OTHER; note = 2'-Omethylguanosine

SEQ ID NO: 8639 - DNA, 74 bp, synthetic construct; identical to SEQ ID NO: 3384
  source 1..74: mol_type = other DNA
  modified_base 1: mod_base = OTHER; note = 2'-Omethylguanosine phosphorothiorate
  modified_base 2: mod_base = OTHER; note = 2'-Omethylguanosine phosphorothiorate
  modified_base 45: mod_base = OTHER; note = Guanosine phosphorothiorate
  modified_base 65: mod_base = OTHER; note = 2'-Omethylguanosine
  modified_base 73: mod_base = OTHER; note = 2'-Omethylguanosine
  misc_feature 1..45: note = RNA
  misc_feature 46: note = DNA
  misc_feature 47..71: note = RNA
  misc_feature 72: note = DNA
  misc_feature 73..74: note = RNA

SEQ ID NO: 8640 - RNA, 76 nt, synthetic construct; identical to SEQ ID NO: 625
  source 1..76: mol_type = other RNA
  modified_base 5: mod_base = OTHER; note = 2'-fluorocytosine
  modified_base 7: mod_base = OTHER; note = Guanosine phosphorothiorate
  modified_base 12: mod_base = OTHER; note = 2'-fluoroguanosine
  modified_base 19: mod_base = OTHER; note = Adenosine phosphorothiorate
  modified_base 20: mod_base = OTHER; note = 2'-Omethyluridine
  modified_base 22: mod_base = OTHER; note = 2'-fluoroguanosine
  modified_base 23: mod_base = OTHER; note = 2'-fluorocytosine
  modified_base 24: mod_base = OTHER; note = 2'-Omethylguanosine phosphorothiorate
  modified_base 25: mod_base = OTHER; note = Cytosine phosphorothiorate
  modified_base 26: mod_base = OTHER; note = 2'-Omethyladenosine
  modified_base 27: mod_base = OTHER; note = 2'-fluorouridine
  modified_base 28: mod_base = OTHER; note = 2'-fluorouridine phosphorothiorate
  modified_base 29: mod_base = OTHER; note = 2'-Omethylguanosine
  modified_base 32: mod_base = OTHER; note = 2'-fluorocytosine
  modified_base 34: mod_base = OTHER; note = 2'-Omethyluridine
  modified_base 38: mod_base = OTHER; note = 2'-Omethyladenosine phosphorothiorate
  modified_base 39: mod_base = OTHER; note = 2'-fluorouridine phosphorothiorate
  modified_base 40: mod_base = OTHER; note = 2'-Omethyluridine
  modified_base 43: mod_base = OTHER; note = 2'-Omethyladenosine
  modified_base 44: mod_base = OTHER; note = 2'-Omethyladenosine
  modified_base 45: mod_base = OTHER; note = 2'-fluoroguanosine
  modified_base 46: mod_base = OTHER; note = 2'-fluoroguanosine
  modified_base 48: mod_base = OTHER; note = 2'-Omethyluridine
  modified_base 50: mod_base = OTHER; note = 2'-fluorocytosine
  modified_base 52: mod_base = OTHER; note = Guanosine phosphorothiorate
  modified_base 53: mod_base = OTHER; note = 2'-Omethylguanosine
  modified_base 54: mod_base = OTHER; note = 2'-Omethyluridine
  modified_base 56: mod_base = OTHER; note = 2'-Omethylcytosine
  modified_base 61: mod_base = OTHER; note = 2'-fluorocytosine
  modified_base 64: mod_base = OTHER; note = 2'-Omethylguanosine
  modified_base 67: mod_base = OTHER; note = 2'-fluoroguanosine phosphorothiorate
  modified_base 71: mod_base = OTHER; note = 2'-fluorouridine
  modified_base 72: mod_base = OTHER; note = 2'-fluorocytosine phosphorothiorate

SEQ ID NO: 8641 - RNA, 86 nt, synthetic construct; identical to SEQ ID NO: 3290
  source 1..86: mol_type = other RNA
  modified_base 69: mod_base = OTHER; note = 2'-Omethyladenosine

SEQ ID NO: 8642 - RNA, 75 nt, synthetic construct; identical to SEQ ID NO: 3306
  source 1..75: mol_type = other RNA
  modified_base 1: mod_base = OTHER; note = 2'-Omethylguanosine
  modified_base 10: mod_base = OTHER; note = 2'-Omethylguanosine
  modified_base 11: mod_base = OTHER; note = 2'-Omethylcytosine
  modified_base 12: mod_base = OTHER; note = 2'-Omethylguanosine
  modified_base 13: mod_base = OTHER; note = 2'-Omethylcytosine
  modified_base 14: mod_base = OTHER; note = 2'-Omethyladenosine
  modified_base 15: mod_base = OTHER; note = 2'-Omethyladenosine
  modified_base 16: mod_base = OTHER; note = 2'-Omethylcytosine
  modified_base 17: mod_base = OTHER; note = 2'-Omethylguanosine
  modified_base 18: mod_base = OTHER; note = 2'-Omethylguanosine
  modified_base 19: mod_base = OTHER; note = Uridine phosphorothiorate
  modified_base 20: mod_base = OTHER; note = Adenosine phosphorothiorate
  modified_base 24: mod_base = OTHER; note = 2'-Omethylcytosine
  modified_base 32: mod_base = OTHER; note = 2'-fluorouridine
  modified_base 33: mod_base = OTHER; note = 2'-Omethylcytosine
  modified_base 34: mod_base = OTHER; note = Uridine phosphorothiorate
  modified_base 36: mod_base = OTHER; note = Guanosine phosphorothiorate
  modified_base 37: mod_base = OTHER; note = Adenosine phosphorothiorate
  modified_base 40: mod_base = OTHER; note = 2'-fluoroadenosine
  modified_base 41: mod_base = OTHER; note = 2'-Omethylguanosine
  modified_base 42: mod_base = OTHER; note = 2'-Omethyladenosine
  modified_base 43: mod_base = OTHER; note = 2'-fluoroadenosine
  modified_base 48: mod_base = OTHER; note = 2'-Omethylguanosine
  modified_base 49: mod_base = OTHER; note = 2'-Omethylcytosine
  modified_base 51: mod_base = OTHER; note = 2'-Omethyluridine
  modified_base 53: mod_base = OTHER; note = Uridine phosphorothiorate
  modified_base 54: mod_base = OTHER; note = Uridine phosphorothiorate
  modified_base 60: mod_base = OTHER; note = 2'-Omethylcytosine
  modified_base 64: mod_base = OTHER; note = 2'-Omethyluridine
  modified_base 72: mod_base = OTHER; note = 2'-Omethyladenosine

SEQ ID NO: 8643 - RNA, 75 nt, synthetic construct; identical to SEQ ID NO: 3306
  source 1..75: mol_type = other RNA
  modified_base 1: mod_base = OTHER; note = 2'-Omethylguanosine phosphorothiorate
  modified_base 2: mod_base = OTHER; note = 2'-Omethyladenosine
  modified_base 3: mod_base = OTHER; note = 2'-Omethylcytosine
  modified_base 4: mod_base = OTHER; note = 2'-Omethylcytosine
  modified_base 5: mod_base = OTHER; note = 2'-Omethyluridine
  modified_base 6: mod_base = OTHER; note = 2'-Omethylcytosine
  modified_base 42: mod_base = OTHER; note = 2'-Omethyladenosine
  modified_base 43: mod_base = OTHER; note = 2'-Omethyladenosine
  modified_base 44: mod_base = OTHER; note = 2'-Omethylguanosine
  modified_base 45: mod_base = OTHER; note = 2'-fluoroguanosine
  modified_base 47: mod_base = OTHER; note = 2'-fluorouridine
  modified_base 72: mod_base = OTHER; note = 2'-Omethyladenosine

SEQ ID NO: 8644 - RNA, 76 nt, synthetic construct; identical to SEQ ID NO: 3295
  source 1..76: mol_type = other RNA
  modified_base 1: mod_base = OTHER; note = 2'-Omethylcytosine
  modified_base 2: mod_base = OTHER; note = Cytosine phosphorothiorate
  modified_base 8: mod_base = OTHER; note = 2'-Omethyluridine phosphorothiorate
  modified_base 9: mod_base = OTHER; note = 2'-fluoroadenosine
  modified_base 25: mod_base = OTHER; note = 2'-fluorocytosine
  modified_base 43: mod_base = OTHER; note = 2'-fluorouridine phosphorothiorate
  modified_base 52: mod_base = OTHER; note = 2'-Omethylguanosine phosphorothiorate
  modified_base 53: mod_base = OTHER; note = Guanosine phosphorothiorate
  modified_base 74: mod_base = OTHER; note = 2'-Omethylcytosine phosphorothiorate
  modified_base 76: mod_base = OTHER; note = 2'-fluoroadenosine

SEQ ID NO: 8645 - RNA, 85 nt, synthetic construct; identical to SEQ ID NO: 3286
  source 1..85: mol_type = other RNA
  modified_base 1: mod_base = OTHER; note = 2'-Omethylcytosine
  modified_base 8: mod_base = OTHER; note = Guanosine phosphorothiorate
  modified_base 13: mod_base = OTHER; note = 2'-Omethyladenosine
  modified_base 19: mod_base = OTHER; note = 2'-Omethyluridine
  modified_base 27: mod_base = OTHER; note = 2'-fluorouridine
  modified_base 29: mod_base = OTHER; note = 2'-Omethylguanosine phosphorothiorate
  modified_base 32: mod_base = OTHER; note = 2'-fluorouridine
  modified_base 48: mod_base = OTHER; note = 2'-Omethyladenosine
  modified_base 56: mod_base = OTHER; note = 2'-fluoroguanosine
  modified_base 57: mod_base = OTHER; note = 2'-Omethylcytosine
  modified_base 58: mod_base = OTHER; note = 2'-fluoroguanosine phosphorothiorate
  modified_base 61: mod_base = OTHER; note = Guanosine phosphorothiorate
  modified_base 65: mod_base = OTHER; note = Cytosine phosphorothiorate
  modified_base 75: mod_base = OTHER; note = 2'-fluorouridine
  modified_base 76: mod_base = OTHER; note = 2'-fluorocytosine
  modified_base 80: mod_base = OTHER; note = 2'-fluoroguanosine
  modified_base 82: mod_base = OTHER; note = 2'-Omethyladenosine phosphorothiorate
  modified_base 83: mod_base = OTHER; note = 2'-Omethylcytosine

SEQ ID NO: 8646 - RNA, 76 nt, synthetic construct; identical to SEQ ID NO: 3295
  source 1..76: mol_type = other RNA
  modified_base 1: mod_base = OTHER; note = 2'-Omethylcytosine phosphorothiorate
  modified_base 11: mod_base = OTHER; note = 2'-Omethylcytosine phosphorothiorate
  modified_base 15: mod_base = OTHER; note = 2'-Omethylguanosine
  modified_base 21: mod_base = OTHER; note = 2'-Omethyladenosine
  modified_base 22: mod_base = OTHER; note = Guanosine phosphorothiorate
  modified_base 29: mod_base = OTHER; note = 2'-fluoroguanosine
  modified_base 48: mod_base = OTHER; note = 2'-Omethylcytosine
  modified_base 51: mod_base = OTHER; note = 2'-Omethyluridine
  modified_base 53: mod_base = OTHER; note = 2'-Omethylguanosine
  modified_base 64: mod_base = OTHER; note = Guanosine phosphorothiorate
  modified_base 70: mod_base = OTHER; note = 2'-fluoroadenosine
  modified_base 75: mod_base = OTHER; note = Cytosine phosphorothiorate
  modified_base 76: mod_base = OTHER; note = 2'-Omethyladenosine

SEQ ID NO: 8647 - RNA, 76 nt, synthetic construct; identical to SEQ ID NO: 3318
  source 1..76: mol_type = other RNA
  modified_base 1: mod_base = OTHER; note = 2'-Omethylcytosine phosphorothiorate
  modified_base 2: mod_base = OTHER; note = 2'-Omethylcytosine
  modified_base 3: mod_base = OTHER; note = 2'-Omethyluridine
  modified_base 4: mod_base = OTHER; note = 2'-Omethyluridine
  modified_base 5: mod_base = OTHER; note = 2'-Omethylcytosine
  modified_base 6: mod_base = OTHER; note = 2'-Omethylguanosine
  modified_base 43: mod_base = OTHER; note = 2'-Omethyluridine
  modified_base 44: mod_base = OTHER; note = 2'-Omethyladenosine
  modified_base 45: mod_base = OTHER; note = 2'-Omethylguanosine
  modified_base 46: mod_base = OTHER; note = 2'-fluoroguanosine
  modified_base 47: mod_base = OTHER; note = 2'-fluorouridine
  modified_base 48: mod_base = OTHER; note = 2'-Omethylcytosine
  modified_base 49: mod_base = OTHER; note = 2'-Omethylguanosine
  modified_base 73: mod_base = OTHER; note = 2'-Omethyladenosine

SEQ ID NO: 8648 - RNA, 85 nt, synthetic construct; identical to SEQ ID NO: 3288
  source 1..85: mol_type = other RNA
  modified_base 1: mod_base = OTHER; note = 2'-fluorocytosine
  modified_base 11: mod_base = OTHER; note = Cytosine phosphorothiorate
  modified_base 25: mod_base = OTHER; note = 2'-fluoroguanosine
  modified_base 29: mod_base = OTHER; note = 2'-fluoroguanosine
  modified_base 49: mod_base = OTHER; note = 2'-Omethyluridine
  modified_base 54: mod_base = OTHER; note = 2'-Omethylcytosine
  modified_base 57: mod_base = OTHER; note = 2'-Omethylcytosine
  modified_base 59: mod_base = OTHER; note = 2'-Omethyluridine
  modified_base 84: mod_base = OTHER; note = 2'-Omethylcytosine

SEQ ID NO: 8649 - RNA, 76 nt, synthetic construct; identical to SEQ ID NO: 625
  source 1..76: mol_type = other RNA
  modified_base 1: mod_base = OTHER; note = 2'-Omethylguanosine phosphorothiorate
  modified_base 2: mod_base = OTHER; note = 2'-Omethylguanosine
  modified_base 3: mod_base = OTHER; note = 2'-Omethylcytosine

SEQ ID NO: 8650 - RNA, 76 nt, synthetic construct; identical to SEQ ID NO: 3295
  source 1..76: mol_type = other RNA
  modified_base 1: mod_base = OTHER; note = 2'-fluorocytosine
  modified_base 2: mod_base = OTHER; note = 2'-Omethylcytosine
  modified_base 7: mod_base = OTHER; note = 2'-Omethyladenosine
  modified_base 9: mod_base = OTHER; note = 2'-Omethyladenosine phosphorothiorate
  modified_base 11: mod_base = OTHER; note = 2'-Omethylcytosine
  modified_base 14: mod_base = OTHER; note = Adenosine phosphorothiorate
  modified_base 15: mod_base = OTHER; note = 2'-fluoroguanosine phosphorothiorate
  modified_base 16: mod_base = OTHER; note = 2'-fluorouridine phosphorothiorate
  modified_base 17: mod_base = OTHER; note = 2'-Omethyluridine
  modified_base 21: mod_base = OTHER; note = 2'-Omethyladenosine
  modified_base 26: mod_base = OTHER; note = Guanosine phosphorothiorate
  modified_base 30: mod_base = OTHER; note = 2'-fluoroguanosine
  modified_base 36: mod_base = OTHER; note = 2'-fluoroadenosine phosphorothiorate
  modified_base 39: mod_base = OTHER; note = 2'-Omethyluridine phosphorothiorate
  modified_base 41: mod_base = OTHER; note = 2'-fluorocytosine
  modified_base 46: mod_base = OTHER; note = 2'-fluoroguanosine phosphorothiorate
  modified_base 48: mod_base = OTHER; note = 2'-fluorocytosine phosphorothiorate
  modified_base 53: mod_base = OTHER; note = 2'-fluoroguanosine phosphorothiorate
  modified_base 54: mod_base = OTHER; note = Uridine phosphorothiorate
  modified_base 75: mod_base = OTHER; note = 2'-Omethylcytosine phosphorothiorate
  modified_base 76: mod_base = OTHER; note = 2'-fluoroadenosine

SEQ ID NO: 8651 - RNA, 86 nt, synthetic construct; identical to SEQ ID NO: 3290
  source 1..86: mol_type = other RNA
  modified_base 1: mod_base = OTHER; note = 2'-Omethyladenosine phosphorothiorate
  modified_base 2: mod_base = OTHER; note = 2'-Omethylcytosine phosphorothiorate
  modified_base 3: mod_base = OTHER; note = 2'-Omethylcytosine
  modified_base 4: mod_base = OTHER; note = 2'-Omethyladenosine
  modified_base 5: mod_base = OTHER; note = 2'-Omethylguanosine
  modified_base 6: mod_base = OTHER; note = 2'-Omethylguanosine
  modified_base 16: mod_base = OTHER; note = 2'-Omethyluridine
  modified_base 17: mod_base = OTHER; note = 2'-Omethylguanosine
  modified_base 18: mod_base = OTHER; note = 2'-Omethylguanosine
  modified_base 33: mod_base = OTHER; note = 2'-fluorouridine
  modified_base 35: mod_base = OTHER; note = Cytosine phosphorothiorate
  modified_base 37: mod_base = OTHER; note = Guanosine phosphorothiorate
  modified_base 38: mod_base = OTHER; note = Adenosine phosphorothiorate
  modified_base 44: mod_base = OTHER; note = 2'-Omethyluridine
  modified_base 57: mod_base = OTHER; note = 2'-fluoroguanosine
  modified_base 58: mod_base = OTHER; note = 2'-fluorocytosine
  modified_base 66: mod_base = OTHER; note = 2'-Omethylcytosine
  modified_base 69: mod_base = OTHER; note = 2'-Omethyladenosine
  modified_base 71: mod_base = OTHER; note = 2'-Omethylcytosine
  modified_base 72: mod_base = OTHER; note = 2'-Omethylcytosine
  modified_base 73: mod_base = OTHER; note = 2'-fluorocytosine
  modified_base 74: mod_base = OTHER; note = 2'-Omethyladenosine
  modified_base 75: mod_base = OTHER; note = 2'-Omethylcytosine
  modified_base 76: mod_base = OTHER; note = 2'-Omethyluridine
  modified_base 77: mod_base = OTHER; note = 2'-Omethylcytosine
  modified_base 78: mod_base = OTHER; note = 2'-Omethylcytosine
  modified_base 83: mod_base = OTHER; note = 2'-Omethyladenosine

SEQ ID NO: 8652 - RNA, 86 nt, synthetic construct; identical to SEQ ID NO: 3290
  source 1..86: mol_type = other RNA
  modified_base 1: mod_base = OTHER; note = 2'-Omethyladenosine
  modified_base 2: mod_base = OTHER; note = 2'-Omethylcytosine

SEQ ID NO: 8653 - RNA, 74 nt, synthetic construct; identical to SEQ ID NO: 3293
  source 1..74: mol_type = other RNA
  modified_base 1: mod_base = OTHER; note = 2'-Omethyladenosine
  modified_base 2: mod_base = OTHER; note = Cytosine phosphorothiorate
  modified_base 3: mod_base = OTHER; note = Cytosine phosphorothiorate
  modified_base 4: mod_base = OTHER; note = Uridine phosphorothiorate
  modified_base 6: mod_base = OTHER; note = Guanosine phosphorothiorate
  modified_base 7: mod_base = OTHER; note = 2'-fluorouridine
  modified_base 8: mod_base = OTHER; note = Guanosine phosphorothiorate
  modified_base 9: mod_base = OTHER; note = 2'-fluoroguanosine
  modified_base 11: mod_base = OTHER; note = 2'-fluoroguanosine
  modified_base 24: mod_base = OTHER; note = 2'-fluoroguanosine
  modified_base 26: mod_base = OTHER; note = 2'-fluorocytosine
  modified_base 27: mod_base = OTHER; note = Uridine phosphorothiorate
  modified_base 33: mod_base = OTHER; note = Uridine phosphorothiorate
  modified_base 35: mod_base = OTHER; note = 2'-Omethylguanosine
  modified_base 40: mod_base = OTHER; note = 2'-fluoroguanosine
  modified_base 42: mod_base = OTHER; note = Adenosine phosphorothiorate
  modified_base 43: mod_base = OTHER; note = 2'-fluoroguanosine
  modified_base 46: mod_base = OTHER; note = Uridine phosphorothiorate
  modified_base 48: mod_base = OTHER; note = 2'-fluorocytosine
  modified_base 51: mod_base = OTHER; note = 2'-fluoroguanosine
  modified_base 62: mod_base = OTHER; note = Guanosine phosphorothiorate
  modified_base 73: mod_base = OTHER; note = 2'-Omethylcytosine phosphorothiorate
  modified_base 74: mod_base = OTHER; note = 2'-fluoroadenosine

SEQ ID NO: 8654 - RNA, 85 nt, synthetic construct; identical to SEQ ID NO: 3301
  source 1..85: mol_type = other RNA
  modified_base 1: mod_base = OTHER; note = 2'-Omethylguanosine phosphorothiorate
  modified_base 2: mod_base = OTHER; note = Cytosine phosphorothiorate
  modified_base 4: mod_base = OTHER; note = Guanosine phosphorothiorate
  modified_base 10: mod_base = OTHER; note = 2'-fluoroguanosine
  modified_base 17: mod_base = OTHER; note = 2'-fluoroguanosine
  modified_base 24: mod_base = OTHER; note = 2'-Omethylguanosine
  modified_base 25: mod_base = OTHER; note = 2'-fluorocytosine phosphorothiorate
  modified_base 34: mod_base = OTHER; note = 2'-fluorouridine
  modified_base 35: mod_base = OTHER; note = 2'-fluorouridine
  modified_base 44: mod_base = OTHER; note = 2'-Omethyluridine phosphorothiorate
  modified_base 47: mod_base = OTHER; note = 2'-Omethylguanosine phosphorothiorate
  modified_base 53: mod_base = OTHER; note = 2'-fluorocytosine
  modified_base 54: mod_base = OTHER; note = 2'-fluorocytosine
  modified_base 57: mod_base = OTHER; note = 2'-Omethylcytosine
  modified_base 58: mod_base = OTHER; note = Guanosine phosphorothiorate
  modified_base 80: mod_base = OTHER; note = 2'-fluoroguanosine

SEQ ID NO: 8655 - RNA, 76 nt, synthetic construct
  source 1..76: mol_type = other RNA
gccctagtggcctaatggataaggcattggccttcaaagccagggattgtgggttcgagtcccacctggggtacca

SEQ ID NO: 8656 - RNA, 76 nt, synthetic construct; identical to SEQ ID NO: 625
  source 1..76: mol_type = other RNA
  modified_base 1: mod_base = OTHER; note = 2'-Omethylguanosine phosphorothiorate
  modified_base 2: mod_base = OTHER; note = 2'-Omethylguanosine
  modified_base 3: mod_base = OTHER; note = 2'-Omethylcytosine
  modified_base 10: mod_base = OTHER; note = 2'-Omethylguanosine
  modified_base 11: mod_base = OTHER; note = 2'-Omethylcytosine
  modified_base 12: mod_base = OTHER; note = 2'-Omethylguanosine
  modified_base 13: mod_base = OTHER; note = 2'-Omethylcytosine
  modified_base 14: mod_base = OTHER; note = 2'-Omethyladenosine
  modified_base 15: mod_base = OTHER; note = 2'-fluoroadenosine
  modified_base 16: mod_base = OTHER; note = 2'-Omethyluridine
  modified_base 17: mod_base = OTHER; note = 2'-Omethylguanosine
  modified_base 18: mod_base = OTHER; note = 2'-Omethylguanosine
  modified_base 19: mod_base = OTHER; note = 2'-fluoroadenosine
  modified_base 20: mod_base = OTHER; note = 2'-Omethyluridine
  modified_base 21: mod_base = OTHER; note = 2'-fluoroadenosine
  modified_base 22: mod_base = OTHER; note = 2'-Omethylguanosine
  modified_base 23: mod_base = OTHER; note = 2'-Omethylcytosine
  modified_base 24: mod_base = OTHER; note = 2'-Omethylguanosine
  modified_base 25: mod_base = OTHER; note = 2'-Omethylcytosine
  modified_base 38: mod_base = OTHER; note = Adenosine phosphorothiorate
  modified_base 39: mod_base = OTHER; note = Uridine phosphorothiorate
  modified_base 40: mod_base = OTHER; note = 2'-fluorouridine
  modified_base 43: mod_base = OTHER; note = 2'-Omethyladenosine
  modified_base 44: mod_base = OTHER; note = 2'-Omethyladenosine
  modified_base 45: mod_base = OTHER; note = 2'-Omethylguanosine
  modified_base 46: mod_base = OTHER; note = 2'-fluoroguanosine
  modified_base 48: mod_base = OTHER; note = 2'-fluorouridine
  modified_base 49: mod_base = OTHER; note = 2'-Omethylcytosine
  modified_base 50: mod_base = OTHER; note = 2'-Omethylcytosine
  modified_base 54: mod_base = OTHER; note = 2'-Omethyluridine phosphorothiorate
  modified_base 55: mod_base = OTHER; note = Uridine phosphorothiorate
  modified_base 56: mod_base = OTHER; note = 2'-Omethylcytosine
  modified_base 57: mod_base = OTHER; note = 2'-fluoroguanosine
  modified_base 61: mod_base = OTHER; note = 2'-Omethylcytosine
  modified_base 62: mod_base = OTHER; note = 2'-Omethylcytosine
  modified_base 63: mod_base = OTHER; note = 2'-fluorocytosine
  modified_base 64: mod_base = OTHER; note = 2'-Omethylguanosine
  modified_base 65: mod_base = OTHER; note = 2'-Omethylguanosine
  modified_base 66: mod_base = OTHER; note = 2'-Omethylcytosine
  modified_base 67: mod_base = OTHER; note = 2'-Omethylguanosine
  modified_base 68: mod_base = OTHER; note = 2'-Omethylguanosine
  modified_base 69: mod_base = OTHER; note = 2'-Omethyladenosine
  modified_base 70: mod_base = OTHER; note = 2'-fluoroguanosine

SEQ ID NO: 8657 - RNA, 85 nt, synthetic construct; identical to SEQ ID NO: 3317
  source 1..85: mol_type = other RNA
  modified_base 1: mod_base = OTHER; note = 2'-Omethylguanosine phosphorothiorate
  modified_base 2: mod_base = OTHER; note = Cytosine phosphorothiorate
  modified_base 45: mod_base = OTHER; note = 2'-Omethylguanosine phosphorothiorate
  modified_base 47: mod_base = OTHER; note = 2'-Omethylguanosine
  modified_base 55: mod_base = OTHER; note = 2'-fluorocytosine phosphorothiorate
  modified_base 62: mod_base = OTHER; note = 2'-fluoroguanosine phosphorothiorate
  modified_base 82: mod_base = OTHER; note = 2'-Omethylguanosine phosphorothiorate

SEQ ID NO: 8658 - RNA, 76 nt, synthetic construct; identical to SEQ ID NO: 625
  source 1..76: mol_type = other RNA
  modified_base 4: mod_base = OTHER; note = 2'-fluorouridine phosphorothiorate
  modified_base 5: mod_base = OTHER; note = 2'-Omethylcytosine
  modified_base 8: mod_base = OTHER; note = Uridine phosphorothiorate
  modified_base 12: mod_base = OTHER; note = 2'-fluoroguanosine
  modified_base 13: mod_base = OTHER; note = 2'-fluorocytosine
  modified_base 17: mod_base = OTHER; note = 2'-Omethylguanosine
  modified_base 21: mod_base = OTHER; note = Adenosine phosphorothiorate
  modified_base 22: mod_base = OTHER; note = 2'-Omethylguanosine phosphorothiorate
  modified_base 23: mod_base = OTHER; note = 2'-Omethylcytosine
  modified_base 24: mod_base = OTHER; note = 2'-fluoroguanosine
  modified_base 25: mod_base = OTHER; note = 2'-fluorocytosine
  modified_base 27: mod_base = OTHER; note = 2'-Omethyluridine
  modified_base 28: mod_base = OTHER; note = 2'-fluorouridine
  modified_base 29: mod_base = OTHER; note = 2'-Omethylguanosine
  modified_base 34: mod_base = OTHER; note = 2'-fluorouridine
  modified_base 41: mod_base = OTHER; note = 2'-fluorocytosine
  modified_base 42: mod_base = OTHER; note = 2'-Omethyladenosine
  modified_base 45: mod_base = OTHER; note = Guanosine phosphorothiorate
  modified_base 46: mod_base = OTHER; note = 2'-fluoroguanosine
  modified_base 48: mod_base = OTHER; note = 2'-Omethyluridine
  modified_base 49: mod_base = OTHER; note = 2'-fluorocytosine
  modified_base 50: mod_base = OTHER; note = Cytosine phosphorothiorate
  modified_base 52: mod_base = OTHER; note = Guanosine phosphorothiorate
  modified_base 53: mod_base = OTHER; note = 2'-fluoroguanosine
  modified_base 56: mod_base = OTHER; note = Cytosine phosphorothiorate
  modified_base 57: mod_base = OTHER; note = 2'-fluoroguanosine
  modified_base 58: mod_base = OTHER; note = 2'-fluoroadenosine
  modified_base 64: mod_base = OTHER; note = Guanosine phosphorothiorate
  modified_base 65: mod_base = OTHER; note = 2'-fluoroguanosine phosphorothiorate
  modified_base 66: mod_base = OTHER; note = 2'-Omethylcytosine
  modified_base 67: mod_base = OTHER; note = 2'-fluoroguanosine
  modified_base 68: mod_base = OTHER; note = 2'-fluoroguanosine
  modified_base 69: mod_base = OTHER; note = Adenosine phosphorothiorate
  modified_base 72: mod_base = OTHER; note = 2'-Omethylcytosine phosphorothiorate
  modified_base 73: mod_base = OTHER; note = 2'-Omethylguanosine

SEQ ID NO: 8659 - RNA, 76 nt, synthetic construct; identical to SEQ ID NO: 625
  source 1..76: mol_type = other RNA
  modified_base 1: mod_base = OTHER; note = 2'-Omethylguanosine phosphorothiorate
  modified_base 6: mod_base = OTHER; note = Cytosine phosphorothiorate
  modified_base 10: mod_base = OTHER; note = 2'-fluoroguanosine
  modified_base 12: mod_base = OTHER; note = Guanosine phosphorothiorate
  modified_base 14: mod_base = OTHER; note = 2'-fluoroadenosine
  modified_base 16: mod_base = OTHER; note = Uridine phosphorothiorate
  modified_base 17: mod_base = OTHER; note = 2'-Omethylguanosine phosphorothiorate
  modified_base 18: mod_base = OTHER; note = 2'-Omethylguanosine
  modified_base 20: mod_base = OTHER; note = 2'-fluorouridine phosphorothiorate
  modified_base 23: mod_base = OTHER; note = 2'-fluorocytosine
  modified_base 25: mod_base = OTHER; note = Cytosine phosphorothiorate
  modified_base 28: mod_base = OTHER; note = 2'-fluorouridine
  modified_base 30: mod_base = OTHER; note = 2'-Omethylguanosine
  modified_base 31: mod_base = OTHER; note = 2'-fluoroadenosine
  modified_base 32: mod_base = OTHER; note = 2'-fluorocytosine
  modified_base 37: mod_base = OTHER; note = Adenosine phosphorothiorate
  modified_base 39: mod_base = OTHER; note = 2'-fluorouridine phosphorothiorate
  modified_base 40: mod_base = OTHER; note = 2'-fluorouridine
  modified_base 41: mod_base = OTHER; note = 2'-fluorocytosine
  modified_base 42: mod_base = OTHER; note = 2'-Omethyladenosine
  modified_base 46: mod_base = OTHER; note = Guanosine phosphorothiorate
  modified_base 47: mod_base = OTHER; note = 2'-fluorouridine
  modified_base 48: mod_base = OTHER; note = Uridine phosphorothiorate
  modified_base 49: mod_base = OTHER; note = 2'-fluorocytosine
  modified_base 53: mod_base = OTHER; note = 2'-fluoroguanosine
  modified_base 59: mod_base = OTHER; note = 2'-Omethylguanosine
  modified_base 62: mod_base = OTHER; note = 2'-fluorocytosine
  modified_base 63: mod_base = OTHER; note = Cytosine phosphorothiorate
  modified_base 64: mod_base = OTHER; note = 2'-fluoroguanosine
  modified_base 67: mod_base = OTHER; note = 2'-Omethylguanosine
  modified_base 68: mod_base = OTHER; note = 2'-fluoroguanosine
  modified_base 69: mod_base = OTHER; note = 2'-fluoroadenosine phosphorothiorate
  modified_base 70: mod_base = OTHER; note = 2'-fluoroguanosine
  modified_base 72: mod_base = OTHER; note = 2'-Omethylcytosine
  modified_base 74: mod_base = OTHER; note = 2'-fluorocytosine phosphorothiorate
  modified_base 76: mod_base = OTHER; note = 2'-fluoroadenosine

SEQ ID NO: 8660 - RNA, 76 nt, synthetic construct; identical to SEQ ID NO: 3332
  source 1..76: mol_type = other RNA
  modified_base 1: mod_base = OTHER; note = 2'-Omethylguanosine
  modified_base 14: mod_base = OTHER; note = 2'-Omethyladenosine
  modified_base 15: mod_base = OTHER; note = 2'-Omethyladenosine
  modified_base 16: mod_base = OTHER; note = 2'-Omethyluridine
  modified_base 17: mod_base = OTHER; note = 2'-Omethylguanosine
  modified_base 18: mod_base = OTHER; note = 2'-Omethylguanosine
  modified_base 19: mod_base = OTHER; note = Adenosine phosphorothiorate
  modified_base 20: mod_base = OTHER; note = 2'-Omethyluridine
  modified_base 21: mod_base = OTHER; note = Adenosine phosphorothiorate
  modified_base 33: mod_base = OTHER; note = 2'-fluorouridine
  modified_base 34: mod_base = OTHER; note = 2'-Omethyluridine
  modified_base 35: mod_base = OTHER; note = Cytosine phosphorothiorate
  modified_base 37: mod_base = OTHER; note = Adenosine phosphorothiorate
  modified_base 38: mod_base = OTHER; note = Adenosine phosphorothiorate
  modified_base 41: mod_base = OTHER; note = 2'-Omethylcytosine
  modified_base 42: mod_base = OTHER; note = 2'-Omethyladenosine
  modified_base 43: mod_base = OTHER; note = 2'-Omethyladenosine
  modified_base 44: mod_base = OTHER; note = 2'-Omethyladenosine
  modified_base 50: mod_base = OTHER; note = 2'-Omethylcytosine
  modified_base 52: mod_base = OTHER; note = 2'-Omethylguanosine
  modified_base 73: mod_base = OTHER; note = 2'-Omethylguanosine

SEQ ID NO: 8661 - RNA, 75 nt, synthetic construct; identical to SEQ ID NO: 3336
  source 1..75: mol_type = other RNA
  modified_base 1: mod_base = OTHER; note = 2'-Omethylcytosine
  modified_base 10: mod_base = OTHER; note = 2'-fluorocytosine
  modified_base 21: mod_base = OTHER; note = 2'-fluoroguanosine
  modified_base 22: mod_base = OTHER; note = 2'-fluoroadenosine
  modified_base 34: mod_base = OTHER; note = 2'-fluorouridine
  modified_base 36: mod_base = OTHER; note = 2'-fluoroadenosine
  modified_base 46: mod_base = OTHER; note = 2'-fluorouridine
  modified_base 47: mod_base = OTHER; note = 2'-fluorocytosine
  modified_base 73: mod_base = OTHER; note = Cytosine phosphorothiorate
  modified_base 74: mod_base = OTHER; note = 2'-Omethylcytosine

SEQ ID NO: 8662 - RNA, 86 nt, synthetic construct; identical to SEQ ID NO: 3290
  source 1..86: mol_type = other RNA
  modified_base 1: mod_base = OTHER; note = 2'-Omethyladenosine
  modified_base 4: mod_base = OTHER; note = 2'-Omethyladenosine
  modified_base 6: mod_base = OTHER; note = 2'-Omethylguanosine
  modified_base 10: mod_base = OTHER; note = 2'-Omethylguanosine
  modified_base 11: mod_base = OTHER; note = 2'-Omethylcytosine
  modified_base 12: mod_base = OTHER; note = 2'-Omethylcytosine
  modified_base 13: mod_base = OTHER; note = 2'-Omethylguanosine
  modified_base 17: mod_base = OTHER; note = 2'-Omethylguanosine
  modified_base 18: mod_base = OTHER; note = 2'-Omethylguanosine
  modified_base 20: mod_base = OTHER; note = 2'-Omethyluridine
  modified_base 22: mod_base = OTHER; note = 2'-Omethyladenosine
  modified_base 25: mod_base = OTHER; note = 2'-Omethylcytosine
  modified_base 29: mod_base = OTHER; note = 2'-Omethylguanosine
  modified_base 30: mod_base = OTHER; note = 2'-Omethylguanosine
  modified_base 41: mod_base = OTHER; note = 2'-Omethylcytosine
  modified_base 42: mod_base = OTHER; note = 2'-Omethyladenosine
  modified_base 43: mod_base = OTHER; note = 2'-Omethyladenosine
  modified_base 59: mod_base = OTHER; note = 2'-Omethylguanosine
  modified_base 60: mod_base = OTHER; note = 2'-Omethyluridine
  modified_base 62: mod_base = OTHER; note = 2'-Omethylguanosine
  modified_base 66: mod_base = OTHER; note = 2'-Omethylcytosine
  modified_base 69: mod_base = OTHER; note = 2'-Omethyladenosine
  modified_base 71: mod_base = OTHER; note = 2'-Omethylcytosine
  modified_base 72: mod_base = OTHER; note = 2'-Omethylcytosine
  modified_base 75: mod_base = OTHER; note = 2'-Omethylcytosine
  modified_base 76: mod_base = OTHER; note = 2'-Omethyluridine
  modified_base 77: mod_base = OTHER; note = 2'-Omethylcytosine
  modified_base 78: mod_base = OTHER; note = 2'-Omethylcytosine
  modified_base 79: mod_base = OTHER; note = 2'-Omethyluridine
  modified_base 81: mod_base = OTHER; note = 2'-Omethylguanosine
  modified_base 82: mod_base = OTHER; note = 2'-Omethyluridine
  modified_base 83: mod_base = OTHER; note = 2'-Omethyladenosine
  modified_base 86: mod_base = OTHER; note = 2'-Omethyladenosine

SEQ ID NO: 8663 - RNA, 76 nt, synthetic construct; identical to SEQ ID NO: 3289
  source 1..76: mol_type = other RNA
  modified_base 49: mod_base = OTHER; note = 2'-Omethylcytosine
  modified_base 50: mod_base = OTHER; note = 2'-Omethyladenosine
  modified_base 51: mod_base = OTHER; note = 2'-Omethylguanosine
  modified_base 52: mod_base = OTHER; note = 2'-Omethylguanosine
  modified_base 53: mod_base = OTHER; note = 2'-Omethylguanosine
  modified_base 61: mod_base = OTHER; note = 2'-Omethylcytosine
  modified_base 62: mod_base = OTHER; note = 2'-Omethylcytosine
  modified_base 63: mod_base = OTHER; note = 2'-Omethylcytosine
  modified_base 64: mod_base = OTHER; note = 2'-Omethyluridine
  modified_base 65: mod_base = OTHER; note = 2'-Omethylguanosine

SEQ ID NO: 8664 - RNA, 75 nt, synthetic construct; identical to SEQ ID NO: 3311
  source 1..75: mol_type = other RNA
  modified_base 1: mod_base = OTHER; note = 2'-Omethylguanosine phosphorothiorate
  modified_base 2: mod_base = OTHER; note = 2'-Omethylguanosine
  modified_base 12: mod_base = OTHER; note = 2'-Omethylguanosine
  modified_base 13: mod_base = OTHER; note = Uridine phosphorothiorate
  modified_base 22: mod_base = OTHER; note = 2'-fluoroguanosine
  modified_base 23: mod_base = OTHER; note = 2'-fluorocytosine
  modified_base 28: mod_base = OTHER; note = 2'-fluorouridine
  modified_base 43: mod_base = OTHER; note = 2'-fluoroguanosine
  modified_base 50: mod_base = OTHER; note = 2'-fluoroguanosine phosphorothiorate
  modified_base 59: mod_base = OTHER; note = 2'-fluorouridine
  modified_base 65: mod_base = OTHER; note = Uridine phosphorothiorate
  modified_base 73: mod_base = OTHER; note = Cytosine phosphorothiorate
  modified_base 74: mod_base = OTHER; note = 2'-Omethylcytosine

SEQ ID NO: 8665 - RNA, 76 nt, synthetic construct; identical to SEQ ID NO: 625
  source 1..76: mol_type = other RNA
  modified_base 4: mod_base = OTHER; note = 2'-fluorouridine
  modified_base 8: mod_base = OTHER; note = Uridine phosphorothiorate
  modified_base 10: mod_base = OTHER; note = Guanosine phosphorothiorate
  modified_base 16: mod_base = OTHER; note = 2'-fluorouridine
  modified_base 20: mod_base = OTHER; note = 2'-Omethyluridine
  modified_base 24: mod_base = OTHER; note = 2'-Omethylguanosine
  modified_base 26: mod_base = OTHER; note = 2'-fluoroadenosine phosphorothiorate
  modified_base 27: mod_base = OTHER; note = 2'-Omethyluridine
  modified_base 30: mod_base = OTHER; note = Guanosine phosphorothiorate
  modified_base 31: mod_base = OTHER; note = 2'-Omethyladenosine
  modified_base 33: mod_base = OTHER; note = 2'-fluorouridine
  modified_base 36: mod_base = OTHER; note = Adenosine phosphorothiorate
  modified_base 38: mod_base = OTHER; note = Adenosine phosphorothiorate
  modified_base 41: mod_base = OTHER; note = 2'-fluorocytosine
  modified_base 44: mod_base = OTHER; note = Adenosine phosphorothiorate
  modified_base 45: mod_base = OTHER; note = 2'-Omethylguanosine
  modified_base 47: mod_base = OTHER; note = 2'-fluorouridine
  modified_base 48: mod_base = OTHER; note = 2'-fluorouridine phosphorothiorate
  modified_base 49: mod_base = OTHER; note = 2'-Omethylcytosine
  modified_base 51: mod_base = OTHER; note = 2'-Omethylguanosine
  modified_base 52: mod_base = OTHER; note = 2'-Omethylguanosine
  modified_base 55: mod_base = OTHER; note = Uridine phosphorothiorate
  modified_base 60: mod_base = OTHER; note = Uridine phosphorothiorate
  modified_base 61: mod_base = OTHER; note = 2'-Omethylcytosine
  modified_base 62: mod_base = OTHER; note = 2'-Omethylcytosine
  modified_base 63: mod_base = OTHER; note = 2'-fluorocytosine
  modified_base 64: mod_base = OTHER; note = Guanosine phosphorothiorate
  modified_base 71: mod_base = OTHER; note = 2'-fluorouridine phosphorothiorate
  modified_base 72: mod_base = OTHER; note = 2'-fluorocytosine
  modified_base 73: mod_base = OTHER; note = Guanosine phosphorothiorate
  modified_base 74: mod_base = OTHER; note = 2'-Omethylcytosine phosphorothiorate
  modified_base 75: mod_base = OTHER; note = 2'-fluorocytosine
  modified_base 76: mod_base = OTHER; note = 2'-Omethyladenosine

SEQ ID NO: 8666 - RNA, 75 nt, synthetic construct; identical to SEQ ID NO: 3311
  source 1..75: mol_type = other RNA
  modified_base 1: mod_base = OTHER; note = 2'-fluoroguanosine phosphorothiorate
  modified_base 2: mod_base = OTHER; note = 2'-Omethylguanosine phosphorothiorate
  modified_base 3: mod_base = OTHER; note = 2'-fluorouridine phosphorothiorate
  modified_base 11: mod_base = OTHER; note = 2'-fluorouridine
  modified_base 18: mod_base = OTHER; note = 2'-fluoroguanosine
  modified_base 19: mod_base = OTHER; note = Uridine phosphorothiorate
  modified_base 21: mod_base = OTHER; note = 2'-fluoroadenosine
  modified_base 23: mod_base = OTHER; note = 2'-fluorocytosine phosphorothiorate
  modified_base 35: mod_base = OTHER; note = Uridine phosphorothiorate
  modified_base 40: mod_base = OTHER; note = Cytosine phosphorothiorate
  modified_base 41: mod_base = OTHER; note = 2'-fluorocytosine
  modified_base 53: mod_base = OTHER; note = 2'-fluorouridine phosphorothiorate
  modified_base 56: mod_base = OTHER; note = 2'-Omethylguanosine
  modified_base 64: mod_base = OTHER; note = Guanosine phosphorothiorate
  modified_base 66: mod_base = OTHER; note = 2'-fluoroguanosine
  modified_base 69: mod_base = OTHER; note = 2'-fluoroadenosine
  modified_base 72: mod_base = OTHER; note = Uridine phosphorothiorate

SEQ ID NO: 8667 - RNA, 76 nt, synthetic construct; identical to SEQ ID NO: 625
  source 1..76: mol_type = other RNA
  modified_base 1: mod_base = OTHER; note = 2'-Omethylguanosine
  modified_base 4: mod_base = OTHER; note = Uridine phosphorothiorate
  modified_base 5: mod_base = OTHER; note = 2'-Omethylcytosine
  modified_base 7: mod_base = OTHER; note = Guanosine phosphorothiorate
  modified_base 10: mod_base = OTHER; note = 2'-Omethylguanosine
  modified_base 11: mod_base = OTHER; note = Cytosine phosphorothiorate
  modified_base 12: mod_base = OTHER; note = 2'-Omethylguanosine phosphorothiorate
  modified_base 15: mod_base = OTHER; note = 2'-fluoroadenosine
  modified_base 17: mod_base = OTHER; note = Guanosine phosphorothiorate
  modified_base 22: mod_base = OTHER; note = 2'-fluoroguanosine
  modified_base 24: mod_base = OTHER; note = Guanosine phosphorothiorate
  modified_base 26: mod_base = OTHER; note = 2'-fluoroadenosine
  modified_base 27: mod_base = OTHER; note = Uridine phosphorothiorate
  modified_base 28: mod_base = OTHER; note = 2'-fluorouridine phosphorothiorate
  modified_base 29: mod_base = OTHER; note = 2'-fluoroguanosine
  modified_base 30: mod_base = OTHER; note = Guanosine phosphorothiorate
  modified_base 34: mod_base = OTHER; note = Uridine phosphorothiorate
  modified_base 36: mod_base = OTHER; note = Adenosine phosphorothiorate
  modified_base 38: mod_base = OTHER; note = 2'-Omethyladenosine
  modified_base 39: mod_base = OTHER; note = 2'-Omethyluridine
  modified_base 40: mod_base = OTHER; note = 2'-Omethyluridine
  modified_base 41: mod_base = OTHER; note = 2'-fluorocytosine
  modified_base 42: mod_base = OTHER; note = Adenosine phosphorothiorate
  modified_base 46: mod_base = OTHER; note = Guanosine phosphorothiorate
  modified_base 47: mod_base = OTHER; note = 2'-fluorouridine
  modified_base 49: mod_base = OTHER; note = 2'-fluorocytosine
  modified_base 55: mod_base = OTHER; note = Uridine phosphorothiorate
  modified_base 57: mod_base = OTHER; note = 2'-Omethylguanosine
  modified_base 60: mod_base = OTHER; note = 2'-fluorouridine phosphorothiorate
  modified_base 64: mod_base = OTHER; note = 2'-Omethylguanosine
  modified_base 67: mod_base = OTHER; note = 2'-Omethylguanosine
  modified_base 68: mod_base = OTHER; note = 2'-fluoroguanosine
  modified_base 71: mod_base = OTHER; note = 2'-Omethyluridine
  modified_base 73: mod_base = OTHER; note = Guanosine phosphorothiorate
  modified_base 74: mod_base = OTHER; note = 2'-fluorocytosine
  modified_base 76: mod_base = OTHER; note = 2'-Omethyladenosine

SEQ ID NO: 8668 - RNA, 85 nt, synthetic construct; identical to SEQ ID NO: 3310
  source 1..85: mol_type = other RNA
  modified_base 1: mod_base = OTHER; note = 2'-fluorocytosine
  modified_base 12: mod_base = OTHER; note = Guanosine phosphorothiorate
  modified_base 26: mod_base = OTHER; note = 2'-fluorouridine
  modified_base 42: mod_base = OTHER; note = Adenosine phosphorothiorate
  modified_base 45: mod_base = OTHER; note = 2'-Omethylguanosine
  modified_base 84: mod_base = OTHER; note = Cytosine phosphorothiorate

SEQ ID NO: 8669 - RNA, 76 nt, synthetic construct; identical to SEQ ID NO: 625
  source 1..76: mol_type = other RNA
  modified_base 3: mod_base = OTHER; note = 2'-Omethylcytosine phosphorothiorate
  modified_base 4: mod_base = OTHER; note = 2'-Omethyluridine
  modified_base 5: mod_base = OTHER; note = 2'-Omethylcytosine phosphorothiorate
  modified_base 6: mod_base = OTHER; note = 2'-fluorocytosine
  modified_base 7: mod_base = OTHER; note = Guanosine phosphorothiorate
  modified_base 22: mod_base = OTHER; note = Guanosine phosphorothiorate
  modified_base 23: mod_base = OTHER; note = 2'-fluorocytosine
  modified_base 25: mod_base = OTHER; note = 2'-Omethylcytosine
  modified_base 26: mod_base = OTHER; note = Adenosine phosphorothiorate
  modified_base 27: mod_base = OTHER; note = 2'-Omethyluridine
  modified_base 28: mod_base = OTHER; note = 2'-Omethyluridine
  modified_base 34: mod_base = OTHER; note = 2'-Omethyluridine phosphorothiorate
  modified_base 38: mod_base = OTHER; note = 2'-fluoroadenosine
  modified_base 41: mod_base = OTHER; note = Cytosine phosphorothiorate
  modified_base 42: mod_base = OTHER; note = 2'-Omethyladenosine phosphorothiorate
  modified_base 43: mod_base = OTHER; note = 2'-fluoroadenosine
  modified_base 44: mod_base = OTHER; note = 2'-Omethyladenosine
  modified_base 46: mod_base = OTHER; note = 2'-Omethylguanosine
  modified_base 54: mod_base = OTHER; note = 2'-fluorouridine
  modified_base 57: mod_base = OTHER; note = 2'-Omethylguanosine phosphorothiorate
  modified_base 58: mod_base = OTHER; note = Adenosine phosphorothiorate
  modified_base 59: mod_base = OTHER; note = 2'-Omethylguanosine
  modified_base 60: mod_base = OTHER; note = 2'-Omethyluridine
  modified_base 61: mod_base = OTHER; note = 2'-Omethylcytosine
  modified_base 63: mod_base = OTHER; note = 2'-fluorocytosine
  modified_base 64: mod_base = OTHER; note = 2'-fluoroguanosine
  modified_base 65: mod_base = OTHER; note = 2'-fluoroguanosine
  modified_base 67: mod_base = OTHER; note = Guanosine phosphorothiorate
  modified_base 68: mod_base = OTHER; note = 2'-Omethylguanosine
  modified_base 70: mod_base = OTHER; note = 2'-fluoroguanosine
  modified_base 71: mod_base = OTHER; note = 2'-Omethyluridine phosphorothiorate
  modified_base 72: mod_base = OTHER; note = 2'-Omethylcytosine phosphorothiorate
  modified_base 73: mod_base = OTHER; note = 2'-Omethylguanosine
  modified_base 75: mod_base = OTHER; note = 2'-Omethylcytosine

SEQ ID NO: 8670 - RNA, 76 nt, synthetic construct; identical to SEQ ID NO: 3316
  source 1..76: mol_type = other RNA
  modified_base 1: mod_base = OTHER; note = 2'-Omethyladenosine phosphorothiorate
  modified_base 2: mod_base = OTHER; note = 2'-Omethylcytosine phosphorothiorate
  modified_base 3: mod_base = OTHER; note = 2'-Omethylcytosine
  modified_base 4: mod_base = OTHER; note = 2'-Omethyladenosine
  modified_base 5: mod_base = OTHER; note = 2'-Omethyladenosine
  modified_base 6: mod_base = OTHER; note = 2'-Omethylcytosine
  modified_base 10: mod_base = OTHER; note = 2'-Omethylguanosine
  modified_base 11: mod_base = OTHER; note = 2'-Omethylcytosine
  modified_base 12: mod_base = OTHER; note = 2'-Omethylguanosine
  modified_base 13: mod_base = OTHER; note = 2'-Omethylcytosine
  modified_base 17: mod_base = OTHER; note = 2'-Omethylguanosine
  modified_base 18: mod_base = OTHER; note = 2'-Omethylguanosine
  modified_base 22: mod_base = OTHER; note = 2'-Omethylguanosine
  modified_base 23: mod_base = OTHER; note = 2'-Omethylcytosine
  modified_base 24: mod_base = OTHER; note = 2'-Omethylguanosine
  modified_base 25: mod_base = OTHER; note = 2'-Omethylcytosine
  modified_base 33: mod_base = OTHER; note = 2'-fluorouridine
  modified_base 35: mod_base = OTHER; note = Cytosine phosphorothiorate
  modified_base 37: mod_base = OTHER; note = Adenosine phosphorothiorate
  modified_base 38: mod_base = OTHER; note = Adenosine phosphorothiorate
  modified_base 41: mod_base = OTHER; note = 2'-fluorocytosine
  modified_base 42: mod_base = OTHER; note = 2'-Omethyladenosine
  modified_base 43: mod_base = OTHER; note = 2'-Omethyladenosine
  modified_base 44: mod_base = OTHER; note = 2'-fluoroadenosine
  modified_base 49: mod_base = OTHER; note = 2'-Omethylcytosine
  modified_base 50: mod_base = OTHER; note = 2'-Omethylcytosine
  modified_base 51: mod_base = OTHER; note = 2'-Omethylguanosine
  modified_base 52: mod_base = OTHER; note = 2'-Omethylguanosine
  modified_base 53: mod_base = OTHER; note = 2'-Omethylguanosine
  modified_base 54: mod_base = OTHER; note = Uridine phosphorothiorate
  modified_base 55: mod_base = OTHER; note = Uridine phosphorothiorate
  modified_base 61: mod_base = OTHER; note = 2'-Omethylcytosine
  modified_base 62: mod_base = OTHER; note = 2'-Omethylcytosine
  modified_base 63: mod_base = OTHER; note = 2'-fluorocytosine
  modified_base 64: mod_base = OTHER; note = 2'-Omethylguanosine
  modified_base 65: mod_base = OTHER; note = 2'-Omethylguanosine
  modified_base 66: mod_base = OTHER; note = 2'-Omethylcytosine
  modified_base 67: mod_base = OTHER; note = 2'-Omethylguanosine
  modified_base 68: mod_base = OTHER; note = 2'-Omethyluridine
  modified_base 73: mod_base = OTHER; note = 2'-Omethylguanosine

SEQ ID NO: 8671 - RNA, 76 nt, synthetic construct; identical to SEQ ID NO: 625
  source 1..76: mol_type = other RNA
  modified_base 4: mod_base = OTHER; note = Thymine
  modified_base 71: mod_base = OTHER; note = Thymine

SEQ ID NO: 8672 - RNA, 75 nt, synthetic construct; identical to SEQ ID NO: 3299
  source 1..75: mol_type = other RNA
  modified_base 20: mod_base = OTHER; note = 2'-fluoroadenosine
  modified_base 21: mod_base = OTHER; note = 2'-fluoroguanosine
  modified_base 25: mod_base = OTHER; note = 2'-fluoroadenosine
  modified_base 39: mod_base = OTHER; note = 2'-Omethylcytosine phosphorothiorate
  modified_base 47: mod_base = OTHER; note = 2'-Omethylcytosine phosphorothiorate
  modified_base 50: mod_base = OTHER; note = 2'-fluoroguanosine
  modified_base 56: mod_base = OTHER; note = 2'-fluoroadenosine phosphorothiorate
  modified_base 60: mod_base = OTHER; note = 2'-fluorocytosine phosphorothiorate
  modified_base 64: mod_base = OTHER; note = 2'-Omethylguanosine phosphorothiorate
  modified_base 73: mod_base = OTHER; note = Cytosine phosphorothiorate
  modified_base 74: mod_base = OTHER; note = 2'-Omethylcytosine

SEQ ID NO: 8673 - RNA, 76 nt, synthetic construct; identical to SEQ ID NO: 625
  source 1..76: mol_type = other RNA
  modified_base 6: mod_base = OTHER; note = 2'-Omethylcytosine
  modified_base 7: mod_base = OTHER; note = Guanosine phosphorothiorate
  modified_base 15: mod_base = OTHER; note = Adenosine phosphorothiorate
  modified_base 16: mod_base = OTHER; note = 2'-Omethyluridine
  modified_base 18: mod_base = OTHER; note = 2'-Omethylguanosine phosphorothiorate
  modified_base 19: mod_base = OTHER; note = Adenosine phosphorothiorate
  modified_base 24: mod_base = OTHER; note = 2'-Omethylguanosine
  modified_base 28: mod_base = OTHER; note = 2'-Omethyluridine
  modified_base 29: mod_base = OTHER; note = 2'-Omethylguanosine
  modified_base 33: mod_base = OTHER; note = 2'-fluorouridine
  modified_base 34: mod_base = OTHER; note = 2'-Omethyluridine
  modified_base 38: mod_base = OTHER; note = 2'-fluoroadenosine
  modified_base 39: mod_base = OTHER; note = 2'-fluorouridine
  modified_base 40: mod_base = OTHER; note = 2'-Omethyluridine phosphorothiorate
  modified_base 41: mod_base = OTHER; note = 2'-fluorocytosine
  modified_base 42: mod_base = OTHER; note = 2'-fluoroadenosine
  modified_base 46: mod_base = OTHER; note = 2'-Omethylguanosine
  modified_base 50: mod_base = OTHER; note = 2'-Omethylcytosine phosphorothiorate
  modified_base 52: mod_base = OTHER; note = Guanosine phosphorothiorate
  modified_base 53: mod_base = OTHER; note = 2'-Omethylguanosine phosphorothiorate
  modified_base 54: mod_base = OTHER; note = Uridine phosphorothiorate
  modified_base 56: mod_base = OTHER; note = 2'-Omethylcytosine
  modified_base 58: mod_base = OTHER; note = 2'-fluoroadenosine
  modified_base 59: mod_base = OTHER; note = 2'-fluoroguanosine
  modified_base 61: mod_base = OTHER; note = 2'-fluorocytosine
  modified_base 62: mod_base = OTHER; note = 2'-Omethylcytosine
  modified_base 69: mod_base = OTHER; note = 2'-Omethyladenosine
  modified_base 70: mod_base = OTHER; note = 2'-fluoroguanosine
  modified_base 72: mod_base = OTHER; note = 2'-fluorocytosine
  modified_base 74: mod_base = OTHER; note = 2'-Omethylcytosine phosphorothiorate
  modified_base 75: mod_base = OTHER; note = 2'-Omethylcytosine
  modified_base 76: mod_base = OTHER; note = 2'-Omethyladenosine

SEQ ID NO: 8674 - RNA, 76 nt, synthetic construct; identical to SEQ ID NO: 625
  source 1..76: mol_type = other RNA
  modified_base 1: mod_base = OTHER; note = 2'-Omethylguanosine phosphorothiorate
  modified_base 2: mod_base = OTHER; note = 2'-Omethylguanosine phosphorothiorate
  modified_base 3: mod_base = OTHER; note = 2'-Omethylcytosine
  modified_base 4: mod_base = OTHER; note = 2'-Omethyluridine
  modified_base 5: mod_base = OTHER; note = 2'-Omethylcytosine
  modified_base 6: mod_base = OTHER; note = 2'-Omethylcytosine
  modified_base 10: mod_base = OTHER; note = 2'-Omethylguanosine
  modified_base 11: mod_base = OTHER; note = 2'-Omethylcytosine
  modified_base 12: mod_base = OTHER; note = 2'-Omethylguanosine
  modified_base 13: mod_base = OTHER; note = 2'-Omethylcytosine
  modified_base 22: mod_base = OTHER; note = 2'-Omethylguanosine
  modified_base 23: mod_base = OTHER; note = 2'-Omethylcytosine
  modified_base 24: mod_base = OTHER; note = 2'-Omethylguanosine
  modified_base 25: mod_base = OTHER; note = 2'-Omethylcytosine
  modified_base 40: mod_base = OTHER; note = 2'-fluorouridine
  modified_base 41: mod_base = OTHER; note = 2'-fluorocytosine
  modified_base 42: mod_base = OTHER; note = 2'-fluoroadenosine
  modified_base 43: mod_base = OTHER; note = 2'-fluoroadenosine
  modified_base 48: mod_base = OTHER; note = 2'-fluorouridine
  modified_base 49: mod_base = OTHER; note = 2'-Omethylcytosine
  modified_base 50: mod_base = OTHER; note = 2'-Omethylcytosine
  modified_base 51: mod_base = OTHER; note = 2'-Omethylguanosine
  modified_base 52: mod_base = OTHER; note = 2'-Omethylguanosine
  modified_base 53: mod_base = OTHER; note = 2'-Omethylguanosine
  modified_base 54: mod_base = OTHER; note = 2'-Omethyluridine
  modified_base 61: mod_base = OTHER; note = 2'-Omethylcytosine
  modified_base 62: mod_base = OTHER; note = 2'-Omethylcytosine
  modified_base 63: mod_base = OTHER; note = 2'-fluorocytosine
  modified_base 64: mod_base = OTHER; note = 2'-Omethylguanosine
  modified_base 65: mod_base = OTHER; note = 2'-Omethylguanosine
  modified_base 66: mod_base = OTHER; note = 2'-Omethylcytosine
  modified_base 67: mod_base = OTHER; note = 2'-Omethylguanosine
  modified_base 68: mod_base = OTHER; note = 2'-Omethylguanosine
  modified_base 73: mod_base = OTHER; note = 2'-Omethylguanosine

SEQ ID NO: 8675 - RNA, 85 nt, synthetic construct; identical to SEQ ID NO: 3317
  source 1..85: mol_type = other RNA
  modified_base 1: mod_base = OTHER; note = 2'-Omethylguanosine phosphorothiorate
  modified_base 2: mod_base = OTHER; note = 2'-Omethylcytosine phosphorothiorate
  modified_base 4: mod_base = OTHER; note = 2'-Omethylguanosine phosphorothiorate
  modified_base 11: mod_base = OTHER; note = 2'-fluorocytosine
  modified_base 17: mod_base = OTHER; note = 2'-Omethylguanosine
  modified_base 18: mod_base = OTHER; note = 2'-fluoroguanosine
  modified_base 19: mod_base = OTHER; note = 2'-Omethyluridine
  modified_base 23: mod_base = OTHER; note = Guanosine phosphorothiorate
  modified_base 29: mod_base = OTHER; note = 2'-fluoroguanosine
  modified_base 33: mod_base = OTHER; note = 2'-fluorouridine
  modified_base 34: mod_base = OTHER; note = 2'-fluorocytosine
  modified_base 35: mod_base = OTHER; note = 2'-Omethyluridine
  modified_base 37: mod_base = OTHER; note = Adenosine phosphorothiorate
  modified_base 44: mod_base = OTHER; note = 2'-fluorouridine
  modified_base 52: mod_base = OTHER; note = Cytosine phosphorothiorate
  modified_base 53: mod_base = OTHER; note = 2'-fluorocytosine
  modified_base 59: mod_base = OTHER; note = 2'-Omethylcytosine phosphorothiorate
  modified_base 68: mod_base = OTHER; note = Adenosine phosphorothiorate
  modified_base 74: mod_base = OTHER; note = 2'-fluorocytosine
  modified_base 83: mod_base = OTHER; note = 2'-fluorocytosine
  modified_base 84: mod_base = OTHER; note = 2'-Omethylcytosine

SEQ ID NO: 8676 - RNA, 74 nt, synthetic construct; identical to SEQ ID NO: 3293
  source 1..74: mol_type = other RNA
  modified_base 1: mod_base = OTHER; note = 2'-Omethyladenosine
  modified_base 2: mod_base = OTHER; note = Cytosine phosphorothiorate
  modified_base 3: mod_base = OTHER; note = 2'-Omethylcytosine
  modified_base 4: mod_base = OTHER; note = Uridine phosphorothiorate
  modified_base 5: mod_base = OTHER; note = Cytosine phosphorothiorate
  modified_base 8: mod_base = OTHER; note = Guanosine phosphorothiorate
  modified_base 9: mod_base = OTHER; note = 2'-fluoroguanosine
  modified_base 11: mod_base = OTHER; note = 2'-fluoroguanosine
  modified_base 15: mod_base = OTHER; note = 2'-Omethylcytosine phosphorothiorate
  modified_base 24: mod_base = OTHER; note = Guanosine phosphorothiorate
  modified_base 26: mod_base = OTHER; note = 2'-fluorocytosine
  modified_base 35: mod_base = OTHER; note = Guanosine phosphorothiorate
  modified_base 42: mod_base = OTHER; note = Adenosine phosphorothiorate
  modified_base 43: mod_base = OTHER; note = Guanosine phosphorothiorate
  modified_base 46: mod_base = OTHER; note = Uridine phosphorothiorate
  modified_base 48: mod_base = OTHER; note = 2'-fluorocytosine
  modified_base 51: mod_base = OTHER; note = Guanosine phosphorothiorate
  modified_base 62: mod_base = OTHER; note = 2'-fluoroguanosine
  modified_base 73: mod_base = OTHER; note = 2'-Omethylcytosine phosphorothiorate
  modified_base 74: mod_base = OTHER; note = 2'-Omethyladenosine

SEQ ID NO: 8677 - RNA, 76 nt, synthetic construct; identical to SEQ ID NO: 625
  source 1..76: mol_type = other RNA
  modified_base 1: mod_base = OTHER; note = 2'-Omethylguanosine phosphorothiorate
  modified_base 2: mod_base = OTHER; note = 2'-Omethylguanosine
  modified_base 3: mod_base = OTHER; note = 2'-Omethylcytosine
  modified_base 4: mod_base = OTHER; note = 2'-Omethyluridine
  modified_base 5: mod_base = OTHER; note = 2'-Omethylcytosine
  modified_base 6: mod_base = OTHER; note = 2'-Omethylcytosine
  modified_base 10: mod_base = OTHER; note = 2'-Omethylguanosine
  modified_base 11: mod_base = OTHER; note = 2'-Omethylcytosine
  modified_base 12: mod_base = OTHER; note = 2'-Omethylguanosine
  modified_base 13: mod_base = OTHER; note = 2'-Omethylcytosine
  modified_base 16: mod_base = OTHER; note = 2'-Omethyluridine
  modified_base 17: mod_base = OTHER; note = 2'-Omethylguanosine
  modified_base 18: mod_base = OTHER; note = 2'-Omethylguanosine
  modified_base 20: mod_base = OTHER; note = 2'-Omethyluridine
  modified_base 22: mod_base = OTHER; note = 2'-Omethylguanosine
  modified_base 23: mod_base = OTHER; note = 2'-Omethylcytosine
  modified_base 24: mod_base = OTHER; note = 2'-Omethylguanosine
  modified_base 25: mod_base = OTHER; note = 2'-Omethylcytosine
  modified_base 29: mod_base = OTHER; note = 2'-Omethylguanosine
  modified_base 33: mod_base = OTHER; note = 2'-fluorouridine
  modified_base 35: mod_base = OTHER; note = Cytosine phosphorothiorate
  modified_base 37: mod_base = OTHER; note = Adenosine phosphorothiorate
  modified_base 38: mod_base = OTHER; note = Adenosine phosphorothiorate
  modified_base 41: mod_base = OTHER; note = 2'-fluorocytosine phosphorothiorate
  modified_base 43: mod_base = OTHER; note = 2'-Omethyladenosine
  modified_base 44: mod_base = OTHER; note = 2'-fluoroadenosine
  modified_base 46: mod_base = OTHER; note = Guanosine phosphorothiorate
  modified_base 49: mod_base = OTHER; note = 2'-Omethylcytosine
  modified_base 50: mod_base = OTHER; note = 2'-Omethylcytosine
  modified_base 51: mod_base = OTHER; note = 2'-Omethylguanosine
  modified_base 52: mod_base = OTHER; note = 2'-Omethylguanosine
  modified_base 53: mod_base = OTHER; note = 2'-Omethylguanosine
  modified_base 54: mod_base = OTHER; note = 2'-Omethyluridine phosphorothiorate
  modified_base 55: mod_base = OTHER; note = Uridine phosphorothiorate
  modified_base 56: mod_base = OTHER; note = 2'-Omethylcytosine
  modified_base 57: mod_base = OTHER; note = 2'-fluoroguanosine
  modified_base 59: mod_base = OTHER; note = 2'-Omethylguanosine
  modified_base 61: mod_base = OTHER; note = 2'-Omethylcytosine
  modified_base 62: mod_base = OTHER; note = 2'-Omethylcytosine
  modified_base 63: mod_base = OTHER; note = 2'-fluorocytosine
  modified_base 64: mod_base = OTHER; note = 2'-Omethylguanosine
  modified_base 65: mod_base = OTHER; note = 2'-Omethylguanosine
  modified_base 66: mod_base = OTHER; note = 2'-Omethylcytosine
  modified_base 67: mod_base = OTHER; note = 2'-Omethylguanosine
  modified_base 68: mod_base = OTHER; note = 2'-Omethylguanosine
  modified_base 69: mod_base = OTHER; note = 2'-fluoroadenosine
  modified_base 71: mod_base = OTHER; note = 2'-Omethyluridine
  modified_base 73: mod_base = OTHER; note = 2'-Omethylguanosine
  modified_base 75: mod_base = OTHER; note = 2'-fluorocytosine phosphorothiorate

SEQ ID NO: 8678 - RNA, 75 nt, synthetic construct; identical to SEQ ID NO: 3311
  source 1..75: mol_type = other RNA
  modified_base 1: mod_base = OTHER; note = 2'-Omethylguanosine phosphorothiorate
  modified_base 2: mod_base = OTHER; note = Guanosine phosphorothiorate
  modified_base 10: mod_base = OTHER; note = 2'-fluoroguanosine phosphorothiorate
  modified_base 12: mod_base = OTHER; note = Guanosine phosphorothiorate
  modified_base 13: mod_base = OTHER; note = 2'-fluorouridine
  modified_base 17: mod_base = OTHER; note = 2'-fluoroguanosine phosphorothiorate
  modified_base 36: mod_base = OTHER; note = 2'-Omethyladenosine
  modified_base 39: mod_base = OTHER; note = Uridine phosphorothiorate
  modified_base 48: mod_base = OTHER; note = 2'-fluorocytosine
  modified_base 54: mod_base = OTHER; note = 2'-Omethyluridine
  modified_base 56: mod_base = OTHER; note = 2'-fluoroguanosine
  modified_base 57: mod_base = OTHER; note = 2'-Omethyladenosine
  modified_base 64: mod_base = OTHER; note = 2'-fluoroguanosine
  modified_base 69: mod_base = OTHER; note = 2'-fluoroadenosine phosphorothiorate
  modified_base 73: mod_base = OTHER; note = Cytosine phosphorothiorate
  modified_base 75: mod_base = OTHER; note = 2'-Omethyladenosine

SEQ ID NO: 8679 - RNA, 76 nt, synthetic construct; identical to SEQ ID NO: 3675
  source 1..76: mol_type = other RNA
  modified_base 1: mod_base = OTHER; note = 2'-Omethylguanosine
  modified_base 13: mod_base = OTHER; note = 2'-Omethylcytosine
  modified_base 17: mod_base = OTHER; note = 2'-Omethylguanosine
  modified_base 18: mod_base = OTHER; note = 2'-Omethylguanosine
  modified_base 25: mod_base = OTHER; note = 2'-Omethylcytosine
  modified_base 33: mod_base = OTHER; note = Uridine phosphorothiorate
  modified_base 34: mod_base = OTHER; note = 2'-Omethyluridine
  modified_base 35: mod_base = OTHER; note = Cytosine phosphorothiorate
  modified_base 37: mod_base = OTHER; note = Adenosine phosphorothiorate
  modified_base 38: mod_base = OTHER; note = Adenosine phosphorothiorate
  modified_base 41: mod_base = OTHER; note = 2'-fluorocytosine
  modified_base 42: mod_base = OTHER; note = 2'-Omethyladenosine
  modified_base 43: mod_base = OTHER; note = 2'-Omethylcytosine
  modified_base 44: mod_base = OTHER; note = 2'-fluoroadenosine
  modified_base 49: mod_base = OTHER; note = 2'-Omethylcytosine
  modified_base 50: mod_base = OTHER; note = 2'-Omethylcytosine
  modified_base 52: mod_base = OTHER; note = 2'-Omethylguanosine
  modified_base 54: mod_base = OTHER; note = Uridine phosphorothiorate
  modified_base 55: mod_base = OTHER; note = Uridine phosphorothiorate
  modified_base 56: mod_base = OTHER; note = 2'-Omethylcytosine
  modified_base 57: mod_base = OTHER; note = Guanosine phosphorothiorate
  modified_base 58: mod_base = OTHER; note = Adenosine phosphorothiorate
  modified_base 59: mod_base = OTHER; note = 2'-Omethylguanosine
  modified_base 61: mod_base = OTHER; note = 2'-Omethylcytosine
  modified_base 65: mod_base = OTHER; note = 2'-Omethylguanosine
  modified_base 73: mod_base = OTHER; note = 2'-Omethylguanosine

SEQ ID NO: 8680 - RNA, 76 nt, synthetic construct; identical to SEQ ID NO: 3332
  source 1..76: mol_type = other RNA
  modified_base 1: mod_base = OTHER; note = 2'-Omethylguanosine phosphorothiorate
  modified_base 2: mod_base = OTHER; note = 2'-Omethylguanosine
  modified_base 3: mod_base = OTHER; note = 2'-Omethylcytosine
  modified_base 4: mod_base = OTHER; note = 2'-Omethylcytosine
  modified_base 5: mod_base = OTHER; note = 2'-Omethylcytosine
  modified_base 6: mod_base = OTHER; note = 2'-Omethylcytosine
  modified_base 27: mod_base = OTHER; note = 2'-Omethyluridine
  modified_base 28: mod_base = OTHER; note = 2'-Omethyluridine
  modified_base 29: mod_base = OTHER; note = 2'-fluoroguanosine
  modified_base 30: mod_base = OTHER; note = 2'-Omethylguanosine
  modified_base 40: mod_base = OTHER; note = 2'-fluorouridine
  modified_base 41: mod_base = OTHER; note = 2'-Omethylcytosine
  modified_base 42: mod_base = OTHER; note = 2'-Omethyladenosine
  modified_base 43: mod_base = OTHER; note = 2'-Omethyladenosine
  modified_base 73: mod_base = OTHER; note = 2'-Omethylguanosine

SEQ ID NO: 8681 - RNA, 76 nt, synthetic construct; identical to SEQ ID NO: 625
  source 1..76: mol_type = other RNA
  modified_base 1: mod_base = OTHER; note = 2'-Omethylguanosine
  modified_base 40: mod_base = OTHER; note = 2'-fluorouridine
  modified_base 41: mod_base = OTHER; note = 2'-O-(2-Methoxyethyl) 5-methylcytosine phosphorothiorate
  modified_base 42: mod_base = OTHER; note = 2'-Omethyladenosine
  modified_base 43: mod_base = OTHER; note = 2'-Omethyladenosine phosphorothiorate
  modified_base 73: mod_base = OTHER; note = 2'-Omethylguanosine

SEQ ID NO: 8682 - RNA, 76 nt, synthetic construct; identical to SEQ ID NO: 625
  source 1..76: mol_type = other RNA
  modified_base 6: mod_base = OTHER; note = 2'-Omethylcytosine
  modified_base 10: mod_base = OTHER; note = 2'-Omethylguanosine
  modified_base 11: mod_base = OTHER; note = 2'-Omethylcytosine
  modified_base 13: mod_base = OTHER; note = 2'-Omethylcytosine
  modified_base 16: mod_base = OTHER; note = 2'-fluorouridine
  modified_base 22: mod_base = OTHER; note = 2'-Omethylguanosine
  modified_base 25: mod_base = OTHER; note = 2'-fluorocytosine phosphorothiorate
  modified_base 29: mod_base = OTHER; note = 2'-fluoroguanosine phosphorothiorate
  modified_base 30: mod_base = OTHER; note = 2'-fluoroguanosine
  modified_base 31: mod_base = OTHER; note = 2'-fluoroadenosine
  modified_base 38: mod_base = OTHER; note = 2'-fluoroadenosine
  modified_base 39: mod_base = OTHER; note = 2'-fluorouridine
  modified_base 42: mod_base = OTHER; note = 2'-fluoroadenosine
  modified_base 44: mod_base = OTHER; note = 2'-fluoroadenosine
  modified_base 45: mod_base = OTHER; note = 2'-fluoroguanosine
  modified_base 47: mod_base = OTHER; note = Uridine phosphorothiorate
  modified_base 50: mod_base = OTHER; note = Cytosine phosphorothiorate
  modified_base 51: mod_base = OTHER; note = 2'-Omethylguanosine
  modified_base 52: mod_base = OTHER; note = 2'-Omethylguanosine
  modified_base 53: mod_base = OTHER; note = 2'-fluoroguanosine
  modified_base 54: mod_base = OTHER; note = Uridine phosphorothiorate
  modified_base 59: mod_base = OTHER; note = 2'-Omethylguanosine
  modified_base 60: mod_base = OTHER; note = 2'-fluorouridine
  modified_base 61: mod_base = OTHER; note = 2'-Omethylcytosine
  modified_base 62: mod_base = OTHER; note = 2'-fluorocytosine
  modified_base 63: mod_base = OTHER; note = Cytosine phosphorothiorate
  modified_base 64: mod_base = OTHER; note = 2'-fluoroguanosine
  modified_base 65: mod_base = OTHER; note = 2'-fluoroguanosine
  modified_base 66: mod_base = OTHER; note = 2'-fluorocytosine
  modified_base 69: mod_base = OTHER; note = 2'-fluoroadenosine
  modified_base 71: mod_base = OTHER; note = 2'-Omethyluridine
  modified_base 73: mod_base = OTHER; note = 2'-fluoroguanosine

SEQ ID NO: 8683 - RNA, 85 nt, synthetic construct; identical to SEQ ID NO: 3297
  source 1..85: mol_type = other RNA
  modified_base 1: mod_base = OTHER; note = 2'-Omethylguanosine
  modified_base 16: mod_base = OTHER; note = 2'-Omethyluridine

SEQ ID NO: 8684 - RNA, 86 nt, synthetic construct; identical to SEQ ID NO: 3290
  source 1..86: mol_type = other RNA
  modified_base 47: mod_base = OTHER; note = 2'-Omethyladenosine

SEQ ID NO: 8685 - RNA, 76 nt, synthetic construct; identical to SEQ ID NO: 3295
  source 1..76: mol_type = other RNA
  modified_base 1: mod_base = OTHER; note = 2'-fluorocytosine
  modified_base 2: mod_base = OTHER; note = 2'-Omethylcytosine phosphorothiorate
  modified_base 3: mod_base = OTHER; note = 2'-Omethyluridine phosphorothiorate
  modified_base 4: mod_base = OTHER; note = 2'-fluorouridine phosphorothiorate
  modified_base 14: mod_base = OTHER; note = 2'-fluoroadenosine phosphorothiorate
  modified_base 16: mod_base = OTHER; note = 2'-Omethyluridine
  modified_base 48: mod_base = OTHER; note = 2'-fluorocytosine phosphorothiorate
  modified_base 53: mod_base = OTHER; note = 2'-fluoroguanosine
  modified_base 76: mod_base = OTHER; note = 2'-fluoroadenosine

SEQ ID NO: 8686 - RNA, 76 nt, synthetic construct; identical to SEQ ID NO: 625
  source 1..76: mol_type = other RNA
  modified_base 1: mod_base = OTHER; note = 2'-Omethylguanosine phosphorothiorate
  modified_base 2: mod_base = OTHER; note = 2'-Omethylguanosine
  modified_base 3: mod_base = OTHER; note = 2'-Omethylcytosine
  modified_base 4: mod_base = OTHER; note = 2'-Omethyluridine
  modified_base 5: mod_base = OTHER; note = 2'-Omethylcytosine
  modified_base 6: mod_base = OTHER; note = 2'-Omethylcytosine
  modified_base 10: mod_base = OTHER; note = 2'-Omethylguanosine
  modified_base 11: mod_base = OTHER; note = 2'-Omethylcytosine
  modified_base 12: mod_base = OTHER; note = 2'-Omethylguanosine
  modified_base 13: mod_base = OTHER; note = 2'-Omethylcytosine
  modified_base 14: mod_base = OTHER; note = 2'-Omethyladenosine
  modified_base 15: mod_base = OTHER; note = 2'-Omethyladenosine
  modified_base 16: mod_base = OTHER; note = 2'-Omethyluridine
  modified_base 17: mod_base = OTHER; note = 2'-Omethylguanosine
  modified_base 18: mod_base = OTHER; note = 2'-Omethylguanosine
  modified_base 19: mod_base = OTHER; note = 2'-Omethyladenosine
  modified_base 20: mod_base = OTHER; note = 2'-Omethyluridine
  modified_base 40: mod_base = OTHER; note = 2'-fluorouridine
  modified_base 41: mod_base = OTHER; note = 2'-fluorocytosine
  modified_base 42: mod_base = OTHER; note = 2'-fluoroadenosine
  modified_base 43: mod_base = OTHER; note = 2'-fluoroadenosine
  modified_base 49: mod_base = OTHER; note = 2'-Omethylcytosine
  modified_base 50: mod_base = OTHER; note = 2'-Omethylcytosine
  modified_base 51: mod_base = OTHER; note = 2'-Omethylguanosine
  modified_base 52: mod_base = OTHER; note = 2'-Omethylguanosine
  modified_base 53: mod_base = OTHER; note = 2'-Omethylguanosine
  modified_base 61: mod_base = OTHER; note = 2'-Omethylcytosine
  modified_base 62: mod_base = OTHER; note = 2'-Omethylcytosine
  modified_base 63: mod_base = OTHER; note = 2'-fluorocytosine
  modified_base 64: mod_base = OTHER; note = 2'-Omethylguanosine
  modified_base 65: mod_base = OTHER; note = 2'-Omethylguanosine
  modified_base 66: mod_base = OTHER; note = 2'-Omethylcytosine
  modified_base 67: mod_base = OTHER; note = 2'-Omethylguanosine
  modified_base 68: mod_base = OTHER; note = 2'-Omethylguanosine
  modified_base 69: mod_base = OTHER; note = 2'-fluoroadenosine
  modified_base 71: mod_base = OTHER; note = 2'-Omethyluridine

SEQ ID NO: 8687 - RNA, 86 nt, synthetic construct; identical to SEQ ID NO: 3290
  source 1..86: mol_type = other RNA
  modified_base 9: mod_base = OTHER; note = 2'-Omethylguanosine

SEQ ID NO: 8688 - RNA, 76 nt, synthetic construct; identical to SEQ ID NO: 3289
  source 1..76: mol_type = other RNA
  modified_base 1: mod_base = OTHER; note = 2'-Omethylguanosine
  modified_base 35: mod_base = OTHER; note = Uridine phosphorothiorate
  modified_base 37: mod_base = OTHER; note = Adenosine phosphorothiorate
  modified_base 73: mod_base = OTHER; note = 2'-Omethylguanosine

SEQ ID NO: 8689 - RNA, 76 nt, synthetic construct; identical to SEQ ID NO: 3289
  source 1..76: mol_type = other RNA
  modified_base 51: mod_base = OTHER; note = 2'-Omethylguanosine
  modified_base 63: mod_base = OTHER; note = 2'-Omethylcytosine

SEQ ID NO: 8690 - DNA, 74 bp, synthetic construct; identical to SEQ ID NO: 3384
  source 1..74: mol_type = other DNA
  modified_base 1: mod_base = OTHER; note = 2'-Omethylguanosine phosphorothiorate
  modified_base 2: mod_base = OTHER; note = 2'-Omethylguanosine phosphorothiorate
  modified_base 18: mod_base = OTHER; note = 2'-fluoroguanosine
  modified_base 73: mod_base = OTHER; note = 2'-Omethylguanosine
  misc_feature 1..71: note = RNA
  misc_feature 72: note = DNA
  misc_feature 73..74: note = RNA

SEQ ID NO: 8691 - RNA, 75 nt, synthetic construct; identical to SEQ ID NO: 1045
  source 1..75: mol_type = other RNA
  modified_base 1: mod_base = OTHER; note = 2'-Omethylguanosine phosphorothiorate
  modified_base 2: mod_base = OTHER; note = 2'-Omethylguanosine
  modified_base 3: mod_base = OTHER; note = 2'-Omethyluridine
  modified_base 4: mod_base = OTHER; note = 2'-Omethyluridine
  modified_base 5: mod_base = OTHER; note = 2'-Omethylcytosine
  modified_base 6: mod_base = OTHER; note = 2'-Omethylcytosine
  modified_base 48: mod_base = OTHER; note = 2'-Omethylcytosine
  modified_base 49: mod_base = OTHER; note = 2'-Omethylcytosine
  modified_base 50: mod_base = OTHER; note = 2'-Omethylguanosine
  modified_base 51: mod_base = OTHER; note = 2'-Omethyladenosine
  modified_base 52: mod_base = OTHER; note = 2'-Omethylguanosine
  modified_base 60: mod_base = OTHER; note = 2'-Omethylcytosine
  modified_base 61: mod_base = OTHER; note = 2'-Omethyluridine
  modified_base 62: mod_base = OTHER; note = 2'-fluorocytosine
  modified_base 63: mod_base = OTHER; note = 2'-Omethylguanosine
  modified_base 64: mod_base = OTHER; note = 2'-Omethylguanosine
  modified_base 65: mod_base = OTHER; note = 2'-Omethyluridine
  modified_base 66: mod_base = OTHER; note = 2'-Omethylguanosine
  modified_base 67: mod_base = OTHER; note = 2'-Omethylguanosine
  modified_base 68: mod_base = OTHER; note = 2'-Omethyladenosine
  modified_base 70: mod_base = OTHER; note = 2'-Omethylcytosine
  modified_base 71: mod_base = OTHER; note = 2'-Omethylcytosine

SEQ ID NO: 8692 - RNA, 75 nt, synthetic construct; identical to SEQ ID NO: 1045
  source 1..75: mol_type = other RNA
  modified_base 1: mod_base = OTHER; note = 2'-Omethylguanosine
  modified_base 2: mod_base = OTHER; note = 2'-Omethylguanosine phosphorothiorate
  modified_base 3: mod_base = OTHER; note = 2'-Omethyluridine phosphorothiorate
  modified_base 5: mod_base = OTHER; note = 2'-Omethylcytosine phosphorothiorate
  modified_base 8: mod_base = OTHER; note = 2'-fluorouridine phosphorothiorate
  modified_base 16: mod_base = OTHER; note = 2'-Omethyluridine phosphorothiorate
  modified_base 36: mod_base = OTHER; note = 2'-fluoroadenosine phosphorothiorate
  modified_base 41: mod_base = OTHER; note = 2'-Omethylcytosine phosphorothiorate
  modified_base 42: mod_base = OTHER; note = 2'-Omethyladenosine
  modified_base 62: mod_base = OTHER; note = 2'-fluorocytosine phosphorothiorate
  modified_base 65: mod_base = OTHER; note = 2'-Omethyluridine
  modified_base 67: mod_base = OTHER; note = 2'-Omethylguanosine
  modified_base 72: mod_base = OTHER; note = 2'-Omethyluridine
  modified_base 74: mod_base = OTHER; note = 2'-Omethylcytosine phosphorothiorate
  modified_base 75: mod_base = OTHER; note = 2'-Omethyladenosine

SEQ ID NO: 8693 - RNA, 85 nt, synthetic construct; identical to SEQ ID NO: 3288
  source 1..85: mol_type = other RNA
  modified_base 1: mod_base = OTHER; note = 2'-Omethylcytosine
  modified_base 11: mod_base = OTHER; note = Cytosine phosphorothiorate
  modified_base 15: mod_base = OTHER; note = 2'-fluorouridine
  modified_base 22: mod_base = OTHER; note = 2'-fluoroguanosine phosphorothiorate
  modified_base 26: mod_base = OTHER; note = 2'-fluorouridine
  modified_base 28: mod_base = OTHER; note = 2'-fluoroguanosine
  modified_base 30: mod_base = OTHER; note = 2'-fluoroadenosine
  modified_base 32: mod_base = OTHER; note = 2'-fluorouridine
  modified_base 43: mod_base = OTHER; note = 2'-Omethyluridine
  modified_base 45: mod_base = OTHER; note = Guanosine phosphorothiorate
  modified_base 48: mod_base = OTHER; note = 2'-Omethyladenosine
  modified_base 49: mod_base = OTHER; note = 2'-Omethyluridine phosphorothiorate
  modified_base 55: mod_base = OTHER; note = Cytosine phosphorothiorate
  modified_base 56: mod_base = OTHER; note = 2'-Omethylguanosine
  modified_base 59: mod_base = OTHER; note = 2'-Omethyluridine
  modified_base 61: mod_base = OTHER; note = 2'-fluoroguanosine
  modified_base 65: mod_base = OTHER; note = Cytosine phosphorothiorate

SEQ ID NO: 8694 - RNA, 75 nt, synthetic construct; identical to SEQ ID NO: 1045
  source 1..75: mol_type = other RNA
  modified_base 1: mod_base = OTHER; note = 2'-Omethylguanosine phosphorothiorate
  modified_base 2: mod_base = OTHER; note = 2'-Omethylguanosine phosphorothiorate
  modified_base 8: mod_base = OTHER; note = 2'-fluorouridine
  modified_base 16: mod_base = OTHER; note = 2'-fluorouridine
  modified_base 19: mod_base = OTHER; note = 2'-fluorouridine
  modified_base 20: mod_base = OTHER; note = 2'-Omethyladenosine
  modified_base 22: mod_base = OTHER; note = Guanosine phosphorothiorate
  modified_base 23: mod_base = OTHER; note = 2'-fluorocytosine
  modified_base 31: mod_base = OTHER; note = 2'-Omethyladenosine
  modified_base 44: mod_base = OTHER; note = 2'-fluorocytosine
  modified_base 49: mod_base = OTHER; note = 2'-fluorocytosine
  modified_base 54: mod_base = OTHER; note = 2'-fluorouridine phosphorothiorate
  modified_base 55: mod_base = OTHER; note = 2'-fluorocytosine
  modified_base 61: mod_base = OTHER; note = 2'-fluorouridine
  modified_base 64: mod_base = OTHER; note = 2'-fluoroguanosine
  modified_base 65: mod_base = OTHER; note = Uridine phosphorothiorate
  modified_base 67: mod_base = OTHER; note = Guanosine phosphorothiorate
  modified_base 68: mod_base = OTHER; note = 2'-fluoroadenosine
  modified_base 72: mod_base = OTHER; note = 2'-fluorouridine phosphorothiorate
  modified_base 73: mod_base = OTHER; note = Cytosine phosphorothiorate
  modified_base 75: mod_base = OTHER; note = 2'-fluoroadenosine

SEQ ID NO: 8695 - RNA, 85 nt, synthetic construct; identical to SEQ ID NO: 3317
  source 1..85: mol_type = other RNA
  modified_base 1: mod_base = OTHER; note = 2'-Omethylguanosine phosphorothiorate
  modified_base 2: mod_base = OTHER; note = Cytosine phosphorothiorate
  modified_base 3: mod_base = OTHER; note = 2'-Omethyluridine
  modified_base 4: mod_base = OTHER; note = 2'-Omethylguanosine phosphorothiorate
  modified_base 15: mod_base = OTHER; note = 2'-fluoroguanosine phosphorothiorate
  modified_base 18: mod_base = OTHER; note = 2'-Omethylguanosine
  modified_base 20: mod_base = OTHER; note = 2'-Omethyluridine
  modified_base 22: mod_base = OTHER; note = 2'-Omethyladenosine
  modified_base 33: mod_base = OTHER; note = 2'-fluorouridine
  modified_base 37: mod_base = OTHER; note = 2'-fluoroadenosine
  modified_base 44: mod_base = OTHER; note = 2'-fluorouridine
  modified_base 45: mod_base = OTHER; note = 2'-fluoroguanosine
  modified_base 46: mod_base = OTHER; note = 2'-Omethylguanosine
  modified_base 49: mod_base = OTHER; note = 2'-Omethyluridine phosphorothiorate
  modified_base 51: mod_base = OTHER; note = 2'-fluorouridine phosphorothiorate
  modified_base 56: mod_base = OTHER; note = 2'-Omethylguanosine phosphorothiorate
  modified_base 59: mod_base = OTHER; note = Cytosine phosphorothiorate
  modified_base 61: mod_base = OTHER; note = 2'-Omethylguanosine
  modified_base 71: mod_base = OTHER; note = 2'-fluorocytosine
  modified_base 73: mod_base = OTHER; note = Guanosine phosphorothiorate
  modified_base 81: mod_base = OTHER; note = 2'-fluorocytosine phosphorothiorate
  modified_base 83: mod_base = OTHER; note = Cytosine phosphorothiorate

SEQ ID NO: 8696 - RNA, 76 nt, synthetic construct; identical to SEQ ID NO: 625
  source 1..76: mol_type = other RNA
  modified_base 4: mod_base = OTHER; note = 2'-Omethyluridine
  modified_base 6: mod_base = OTHER; note = 2'-fluorocytosine
  modified_base 11: mod_base = OTHER; note = 2'-fluorocytosine
  modified_base 13: mod_base = OTHER; note = 2'-Omethylcytosine
  modified_base 14: mod_base = OTHER; note = 2'-Omethyladenosine
  modified_base 15: mod_base = OTHER; note = Adenosine phosphorothiorate
  modified_base 18: mod_base = OTHER; note = 2'-fluoroguanosine
  modified_base 20: mod_base = OTHER; note = 2'-Omethyluridine
  modified_base 22: mod_base = OTHER; note = 2'-fluoroguanosine
  modified_base 26: mod_base = OTHER; note = 2'-fluoroadenosine phosphorothiorate
  modified_base 29: mod_base = OTHER; note = Guanosine phosphorothiorate
  modified_base 30: mod_base = OTHER; note = Guanosine phosphorothiorate
  modified_base 38: mod_base = OTHER; note = 2'-fluoroadenosine
  modified_base 40: mod_base = OTHER; note = Uridine phosphorothiorate
  modified_base 41: mod_base = OTHER; note = 2'-Omethylcytosine
  modified_base 43: mod_base = OTHER; note = Adenosine phosphorothiorate
  modified_base 44: mod_base = OTHER; note = 2'-fluoroadenosine
  modified_base 46: mod_base = OTHER; note = 2'-Omethylguanosine
  modified_base 47: mod_base = OTHER; note = Uridine phosphorothiorate
  modified_base 48: mod_base = OTHER; note = 2'-fluorouridine phosphorothiorate
  modified_base 49: mod_base = OTHER; note = 2'-fluorocytosine
  modified_base 50: mod_base = OTHER; note = 2'-fluorocytosine
  modified_base 53: mod_base = OTHER; note = 2'-Omethylguanosine
  modified_base 55: mod_base = OTHER; note = Uridine phosphorothiorate
  modified_base 56: mod_base = OTHER; note = 2'-Omethylcytosine
  modified_base 60: mod_base = OTHER; note = Uridine phosphorothiorate
  modified_base 64: mod_base = OTHER; note = 2'-fluoroguanosine
  modified_base 65: mod_base = OTHER; note = 2'-Omethylguanosine
  modified_base 66: mod_base = OTHER; note = 2'-fluorocytosine
  modified_base 67: mod_base = OTHER; note = 2'-Omethylguanosine phosphorothiorate
  modified_base 69: mod_base = OTHER; note = 2'-fluoroadenosine
  modified_base 70: mod_base = OTHER; note = 2'-Omethylguanosine
  modified_base 71: mod_base = OTHER; note = 2'-fluorouridine
  modified_base 75: mod_base = OTHER; note = 2'-fluorocytosine

SEQ ID NO: 8697 - RNA, 85 nt, synthetic construct; identical to SEQ ID NO: 3310
  source 1..85: mol_type = other RNA
  modified_base 1: mod_base = OTHER; note = 2'-Omethylcytosine
  modified_base 13: mod_base = OTHER; note = 2'-Omethyladenosine
  modified_base 28: mod_base = OTHER; note = 2'-fluoroguanosine
  modified_base 30: mod_base = OTHER; note = 2'-fluoroadenosine
  modified_base 44: mod_base = OTHER; note = 2'-Omethylguanosine
  modified_base 49: mod_base = OTHER; note = Uridine phosphorothiorate
  modified_base 54: mod_base = OTHER; note = 2'-fluorocytosine
  modified_base 72: mod_base = OTHER; note = 2'-fluorocytosine
  modified_base 84: mod_base = OTHER; note = 2'-fluorocytosine
  modified_base 85: mod_base = OTHER; note = 2'-Omethyladenosine

SEQ ID NO: 8698 - RNA, 74 nt, synthetic construct; identical to SEQ ID NO: 3293
  source 1..74: mol_type = other RNA
  modified_base 1: mod_base = OTHER; note = 2'-fluoroadenosine phosphorothiorate
  modified_base 4: mod_base = OTHER; note = 2'-fluorouridine
  modified_base 7: mod_base = OTHER; note = Uridine phosphorothiorate
  modified_base 12: mod_base = OTHER; note = 2'-Omethylcytosine
  modified_base 26: mod_base = OTHER; note = 2'-fluorocytosine
  modified_base 42: mod_base = OTHER; note = 2'-fluoroadenosine
  modified_base 46: mod_base = OTHER; note = Uridine phosphorothiorate
  modified_base 60: mod_base = OTHER; note = 2'-fluoroadenosine
  modified_base 73: mod_base = OTHER; note = 2'-Omethylcytosine phosphorothiorate

SEQ ID NO: 8699 - RNA, 85 nt, synthetic construct; identical to SEQ ID NO: 3297
  source 1..85: mol_type = other RNA
  modified_base 1: mod_base = OTHER; note = 2'-Omethylguanosine
  modified_base 2: mod_base = OTHER; note = 2'-Omethylcytosine
  modified_base 3: mod_base = OTHER; note = 2'-Omethyluridine
  modified_base 4: mod_base = OTHER; note = 2'-Omethylguanosine
  modified_base 5: mod_base = OTHER; note = 2'-Omethyluridine
  modified_base 6: mod_base = OTHER; note = 2'-Omethylguanosine
  modified_base 13: mod_base = OTHER; note = 2'-Omethylguanosine
  modified_base 14: mod_base = OTHER; note = 2'-Omethyladenosine
  modified_base 15: mod_base = OTHER; note = 2'-Omethylguanosine
  modified_base 16: mod_base = OTHER; note = 2'-Omethyluridine
  modified_base 17: mod_base = OTHER; note = 2'-Omethylguanosine
  modified_base 18: mod_base = OTHER; note = 2'-Omethylguanosine
  modified_base 19: mod_base = OTHER; note = Uridine phosphorothiorate
  modified_base 20: mod_base = OTHER; note = 2'-Omethyluridine
  modified_base 21: mod_base = OTHER; note = Adenosine phosphorothiorate
  modified_base 25: mod_base = OTHER; note = 2'-Omethylcytosine
  modified_base 33: mod_base = OTHER; note = Uridine phosphorothiorate
  modified_base 34: mod_base = OTHER; note = 2'-Omethyluridine
  modified_base 35: mod_base = OTHER; note = Cytosine phosphorothiorate
  modified_base 37: mod_base = OTHER; note = Adenosine phosphorothiorate
  modified_base 38: mod_base = OTHER; note = Adenosine phosphorothiorate
  modified_base 41: mod_base = OTHER; note = 2'-fluorocytosine
  modified_base 42: mod_base = OTHER; note = 2'-Omethyladenosine
  modified_base 43: mod_base = OTHER; note = 2'-Omethyladenosine
  modified_base 44: mod_base = OTHER; note = 2'-fluorouridine
  modified_base 58: mod_base = OTHER; note = 2'-Omethylguanosine
  modified_base 59: mod_base = OTHER; note = 2'-Omethylcytosine
  modified_base 61: mod_base = OTHER; note = 2'-Omethylguanosine
  modified_base 63: mod_base = OTHER; note = Uridine phosphorothiorate
  modified_base 64: mod_base = OTHER; note = Uridine phosphorothiorate
  modified_base 70: mod_base = OTHER; note = 2'-Omethylcytosine
  modified_base 74: mod_base = OTHER; note = 2'-Omethylcytosine
  modified_base 82: mod_base = OTHER; note = 2'-Omethylguanosine

SEQ ID NO: 8700 - RNA, 73 nt, synthetic construct; identical to SEQ ID NO: 935
  source 1..73: mol_type = other RNA
  modified_base 1: mod_base = OTHER; note = 2'-Omethylguanosine phosphorothiorate
  modified_base 2: mod_base = OTHER; note = 2'-Omethylguanosine phosphorothiorate
  modified_base 5: mod_base = OTHER; note = 2'-Omethylcytosine
  modified_base 61: mod_base = OTHER; note = 2'-fluorocytosine
  modified_base 70: mod_base = OTHER; note = Guanosine phosphorothiorate
  modified_base 71: mod_base = OTHER; note = 2'-Omethyluridine phosphorothiorate
  modified_base 72: mod_base = OTHER; note = 2'-Omethylcytosine

SEQ ID NO: 8701 - RNA, 76 nt, synthetic construct; identical to SEQ ID NO: 3295
  source 1..76: mol_type = other RNA
  modified_base 1: mod_base = OTHER; note = 2'-Omethylcytosine phosphorothiorate
  modified_base 2: mod_base = OTHER; note = 2'-Omethylcytosine
  modified_base 3: mod_base = OTHER; note = 2'-fluorouridine phosphorothiorate
  modified_base 4: mod_base = OTHER; note = 2'-Omethyluridine
  modified_base 6: mod_base = OTHER; note = 2'-fluoroguanosine
  modified_base 8: mod_base = OTHER; note = 2'-Omethyluridine
  modified_base 9: mod_base = OTHER; note = Adenosine phosphorothiorate
  modified_base 10: mod_base = OTHER; note = 2'-fluoroguanosine
  modified_base 17: mod_base = OTHER; note = 2'-fluorouridine phosphorothiorate
  modified_base 20: mod_base = OTHER; note = 2'-fluorouridine
  modified_base 25: mod_base = OTHER; note = Cytosine phosphorothiorate
  modified_base 26: mod_base = OTHER; note = 2'-fluoroguanosine
  modified_base 27: mod_base = OTHER; note = Guanosine phosphorothiorate
  modified_base 28: mod_base = OTHER; note = 2'-fluoroadenosine phosphorothiorate
  modified_base 38: mod_base = OTHER; note = 2'-fluoroadenosine phosphorothiorate
  modified_base 40: mod_base = OTHER; note = 2'-fluorocytosine
  modified_base 43: mod_base = OTHER; note = 2'-fluorouridine phosphorothiorate
  modified_base 49: mod_base = OTHER; note = 2'-Omethylguanosine
  modified_base 52: mod_base = OTHER; note = 2'-Omethylguanosine
  modified_base 53: mod_base = OTHER; note = 2'-Omethylguanosine
  modified_base 55: mod_base = OTHER; note = 2'-fluorouridine phosphorothiorate
  modified_base 58: mod_base = OTHER; note = Adenosine phosphorothiorate
  modified_base 69: mod_base = OTHER; note = 2'-fluoroadenosine
  modified_base 74: mod_base = OTHER; note = 2'-fluorocytosine
  modified_base 75: mod_base = OTHER; note = 2'-Omethylcytosine phosphorothiorate
  modified_base 76: mod_base = OTHER; note = 2'-fluoroadenosine

SEQ ID NO: 8702 - RNA, 76 nt, synthetic construct; identical to SEQ ID NO: 625
  source 1..76: mol_type = other RNA
  modified_base 1: mod_base = OTHER; note = 2'-fluoroguanosine phosphorothiorate
  modified_base 2: mod_base = OTHER; note = 2'-Omethylguanosine
  modified_base 4: mod_base = OTHER; note = 2'-Omethyluridine
  modified_base 6: mod_base = OTHER; note = 2'-fluorocytosine
  modified_base 11: mod_base = OTHER; note = Cytosine phosphorothiorate
  modified_base 12: mod_base = OTHER; note = 2'-fluoroguanosine
  modified_base 17: mod_base = OTHER; note = Guanosine phosphorothiorate
  modified_base 18: mod_base = OTHER; note = 2'-fluoroguanosine
  modified_base 22: mod_base = OTHER; note = 2'-Omethylguanosine
  modified_base 24: mod_base = OTHER; note = 2'-Omethylguanosine
  modified_base 25: mod_base = OTHER; note = 2'-fluorocytosine
  modified_base 26: mod_base = OTHER; note = 2'-Omethyladenosine
  modified_base 30: mod_base = OTHER; note = 2'-fluoroguanosine
  modified_base 31: mod_base = OTHER; note = 2'-fluoroadenosine
  modified_base 34: mod_base = OTHER; note = 2'-fluorouridine
  modified_base 37: mod_base = OTHER; note = Adenosine phosphorothiorate
  modified_base 38: mod_base = OTHER; note = 2'-fluoroadenosine
  modified_base 40: mod_base = OTHER; note = 2'-Omethyluridine phosphorothiorate
  modified_base 41: mod_base = OTHER; note = 2'-fluorocytosine
  modified_base 42: mod_base = OTHER; note = Adenosine phosphorothiorate
  modified_base 43: mod_base = OTHER; note = 2'-Omethyladenosine
  modified_base 44: mod_base = OTHER; note = 2'-Omethyladenosine
  modified_base 47: mod_base = OTHER; note = 2'-Omethyluridine phosphorothiorate
  modified_base 48: mod_base = OTHER; note = 2'-fluorouridine
  modified_base 50: mod_base = OTHER; note = 2'-fluorocytosine
  modified_base 52: mod_base = OTHER; note = 2'-fluoroguanosine
  modified_base 53: mod_base = OTHER; note = 2'-Omethylguanosine
  modified_base 54: mod_base = OTHER; note = 2'-fluorouridine
  modified_base 56: mod_base = OTHER; note = 2'-Omethylcytosine
  modified_base 58: mod_base = OTHER; note = 2'-fluoroadenosine
  modified_base 60: mod_base = OTHER; note = 2'-Omethyluridine
  modified_base 62: mod_base = OTHER; note = 2'-fluorocytosine
  modified_base 65: mod_base = OTHER; note = 2'-Omethylguanosine
  modified_base 66: mod_base = OTHER; note = 2'-Omethylcytosine
  modified_base 67: mod_base = OTHER; note = Guanosine phosphorothiorate
  modified_base 69: mod_base = OTHER; note = 2'-Omethyladenosine
  modified_base 71: mod_base = OTHER; note = 2'-fluorouridine
  modified_base 72: mod_base = OTHER; note = 2'-Omethylcytosine
  modified_base 76: mod_base = OTHER; note = 2'-Omethyladenosine

SEQ ID NO: 8703 - RNA, 75 nt, synthetic construct; identical to SEQ ID NO: 1045
  source 1..75: mol_type = other RNA
  modified_base 1: mod_base = OTHER; note = 2'-Omethylguanosine phosphorothiorate
  modified_base 2: mod_base = OTHER; note = 2'-Omethylguanosine phosphorothiorate
  modified_base 11: mod_base = OTHER; note = Uridine phosphorothiorate
  modified_base 12: mod_base = OTHER; note = 2'-fluoroguanosine
  modified_base 15: mod_base = OTHER; note = 2'-fluoroadenosine
  modified_base 19: mod_base = OTHER; note = 2'-fluorouridine
  modified_base 22: mod_base = OTHER; note = Guanosine phosphorothiorate
  modified_base 23: mod_base = OTHER; note = 2'-fluorocytosine
  modified_base 28: mod_base = OTHER; note = 2'-fluorouridine
  modified_base 29: mod_base = OTHER; note = 2'-Omethylguanosine
  modified_base 40: mod_base = OTHER; note = 2'-Omethylcytosine
  modified_base 48: mod_base = OTHER; note = 2'-fluorocytosine
  modified_base 62: mod_base = OTHER; note = Cytosine phosphorothiorate
  modified_base 68: mod_base = OTHER; note = 2'-fluoroadenosine
  modified_base 73: mod_base = OTHER; note = Cytosine phosphorothiorate
  modified_base 74: mod_base = OTHER; note = 2'-fluorocytosine phosphorothiorate

SEQ ID NO: 8704 - RNA, 85 nt, synthetic construct; identical to SEQ ID NO: 3297
  source 1..85: mol_type = other RNA
  modified_base 1: mod_base = OTHER; note = 2'-Omethylguanosine
  modified_base 2: mod_base = OTHER; note = 2'-Omethylcytosine
  modified_base 3: mod_base = OTHER; note = 2'-Omethyluridine
  modified_base 4: mod_base = OTHER; note = 2'-Omethylguanosine
  modified_base 5: mod_base = OTHER; note = 2'-Omethyluridine
  modified_base 6: mod_base = OTHER; note = 2'-Omethylguanosine
  modified_base 10: mod_base = OTHER; note = 2'-Omethylguanosine
  modified_base 11: mod_base = OTHER; note = 2'-Omethylcytosine
  modified_base 12: mod_base = OTHER; note = 2'-Omethylcytosine
  modified_base 13: mod_base = OTHER; note = 2'-Omethylguanosine
  modified_base 16: mod_base = OTHER; note = 2'-Omethyluridine
  modified_base 17: mod_base = OTHER; note = 2'-Omethylguanosine
  modified_base 18: mod_base = OTHER; note = 2'-Omethylguanosine
  modified_base 20: mod_base = OTHER; note = 2'-Omethyluridine
  modified_base 25: mod_base = OTHER; note = 2'-Omethylcytosine
  modified_base 33: mod_base = OTHER; note = 2'-fluorouridine
  modified_base 35: mod_base = OTHER; note = Cytosine phosphorothiorate
  modified_base 37: mod_base = OTHER; note = Adenosine phosphorothiorate
  modified_base 38: mod_base = OTHER; note = Adenosine phosphorothiorate
  modified_base 41: mod_base = OTHER; note = 2'-fluorocytosine
  modified_base 42: mod_base = OTHER; note = 2'-Omethyladenosine
  modified_base 43: mod_base = OTHER; note = 2'-Omethyladenosine
  modified_base 44: mod_base = OTHER; note = 2'-fluorouridine
  modified_base 58: mod_base = OTHER; note = 2'-Omethylguanosine
  modified_base 59: mod_base = OTHER; note = 2'-Omethylcytosine
  modified_base 61: mod_base = OTHER; note = 2'-Omethylguanosine
  modified_base 63: mod_base = OTHER; note = 2'-Omethyluridine
  modified_base 64: mod_base = OTHER; note = Uridine phosphorothiorate
  modified_base 65: mod_base = OTHER; note = 2'-Omethylcytosine
  modified_base 66: mod_base = OTHER; note = 2'-fluoroguanosine
  modified_base 68: mod_base = OTHER; note = 2'-Omethyladenosine
  modified_base 70: mod_base = OTHER; note = 2'-Omethylcytosine
  modified_base 74: mod_base = OTHER; note = 2'-Omethylcytosine
  modified_base 82: mod_base = OTHER; note = 2'-Omethylguanosine

SEQ ID NO: 8705 - RNA, 76 nt, synthetic construct
  source 1..76: mol_type = other RNA
ggcgccgtggcgcaatggatagcgctttggacttcaaattcaaaggttccgggttcgagtcccggcggcgtcgcca

SEQ ID NO: 8706 - RNA, 85 nt, synthetic construct; identical to SEQ ID NO: 3297
  source 1..85: mol_type = other RNA
  modified_base 1: mod_base = OTHER; note = 2'-Omethylguanosine phosphorothiorate
  modified_base 2: mod_base = OTHER; note = 2'-Omethylcytosine
  modified_base 4: mod_base = OTHER; note = 2'-Omethylguanosine
  modified_base 15: mod_base = OTHER; note = 2'-Omethylguanosine
  modified_base 17: mod_base = OTHER; note = Guanosine phosphorothiorate
  modified_base 27: mod_base = OTHER; note = 2'-fluorouridine
  modified_base 58: mod_base = OTHER; note = 2'-Omethylguanosine phosphorothiorate
  modified_base 62: mod_base = OTHER; note = 2'-Omethylguanosine

SEQ ID NO: 8707 - RNA, 75 nt, synthetic construct; identical to SEQ ID NO: 3311
  source 1..75: mol_type = other RNA
  modified_base 1: mod_base = OTHER; note = Guanosine phosphorothiorate
  modified_base 2: mod_base = OTHER; note = 2'-fluoroguanosine
  modified_base 9: mod_base = OTHER; note = 2'-fluoroguanosine phosphorothiorate
  modified_base 12: mod_base = OTHER; note = Guanosine phosphorothiorate
  modified_base 15: mod_base = OTHER; note = Adenosine phosphorothiorate
  modified_base 19: mod_base = OTHER; note = Uridine phosphorothiorate
  modified_base 27: mod_base = OTHER; note = 2'-fluorocytosine
  modified_base 38: mod_base = OTHER; note = Adenosine phosphorothiorate
  modified_base 39: mod_base = OTHER; note = 2'-fluorouridine
  modified_base 44: mod_base = OTHER; note = 2'-Omethylcytosine
  modified_base 49: mod_base = OTHER; note = 2'-fluorocytosine
  modified_base 57: mod_base = OTHER; note = 2'-Omethyladenosine
  modified_base 62: mod_base = OTHER; note = Cytosine phosphorothiorate
  modified_base 73: mod_base = OTHER; note = Cytosine phosphorothiorate

SEQ ID NO: 8708 - RNA, 75 nt, synthetic construct; identical to SEQ ID NO: 3336
  source 1..75: mol_type = other RNA
  modified_base 1: mod_base = OTHER; note = 2'-Omethylcytosine
  modified_base 3: mod_base = OTHER; note = 2'-Omethyluridine phosphorothiorate
  modified_base 12: mod_base = OTHER; note = 2'-fluorocytosine
  modified_base 17: mod_base = OTHER; note = 2'-Omethylguanosine
  modified_base 39: mod_base = OTHER; note = Cytosine phosphorothiorate
  modified_base 44: mod_base = OTHER; note = 2'-fluoroguanosine
  modified_base 47: mod_base = OTHER; note = 2'-fluorocytosine
  modified_base 61: mod_base = OTHER; note = 2'-Omethylcytosine
  modified_base 73: mod_base = OTHER; note = Cytosine phosphorothiorate
  modified_base 75: mod_base = OTHER; note = 2'-fluoroadenosine

SEQ ID NO: 8709 - RNA, 76 nt, synthetic construct; identical to SEQ ID NO: 3295
  source 1..76: mol_type = other RNA
  modified_base 1: mod_base = OTHER; note = 2'-Omethylcytosine
  modified_base 2: mod_base = OTHER; note = 2'-Omethylcytosine phosphorothiorate
  modified_base 4: mod_base = OTHER; note = 2'-fluorouridine
  modified_base 6: mod_base = OTHER; note = 2'-Omethylguanosine phosphorothiorate
  modified_base 7: mod_base = OTHER; note = 2'-fluoroadenosine
  modified_base 10: mod_base = OTHER; note = 2'-Omethylguanosine
  modified_base 16: mod_base = OTHER; note = 2'-Omethyluridine
  modified_base 26: mod_base = OTHER; note = Guanosine phosphorothiorate
  modified_base 29: mod_base = OTHER; note = 2'-Omethylguanosine phosphorothiorate
  modified_base 39: mod_base = OTHER; note = Uridine phosphorothiorate
  modified_base 45: mod_base = OTHER; note = 2'-fluoroguanosine phosphorothiorate
  modified_base 48: mod_base = OTHER; note = 2'-fluorocytosine
  modified_base 54: mod_base = OTHER; note = Uridine phosphorothiorate
  modified_base 55: mod_base = OTHER; note = 2'-Omethyluridine
  modified_base 74: mod_base = OTHER; note = 2'-fluorocytosine
  modified_base 75: mod_base = OTHER; note = 2'-fluorocytosine

SEQ ID NO: 8710 - DNA, 76 bp, synthetic construct; identical to SEQ ID NO: 1924
  source 1..76: mol_type = other DNA
  modified_base 1: mod_base = OTHER; note = 2'-Omethylguanosine phosphorothiorate
  modified_base 2: mod_base = OTHER; note = 2'-Omethylguanosine phosphorothiorate
  modified_base 27: mod_base = OTHER; note = Uridine phosphorothiorate
  modified_base 51: mod_base = OTHER; note = Guanosine phosphorothiorate
  modified_base 59: mod_base = OTHER; note = 2'-fluoroguanosine
  modified_base 73: mod_base = OTHER; note = Guanosine phosphorothiorate
  modified_base 74: mod_base = OTHER; note = Cytosine phosphorothiorate
  modified_base 75: mod_base = OTHER; note = 2'-Omethylcytosine
  misc_feature 1..51: note = RNA
  misc_feature 52: note = DNA
  misc_feature 53..76: note = RNA

SEQ ID NO: 8711 - RNA, 76 nt, synthetic construct
  source 1..76: mol_type = other RNA
ggctcagtggcgcaatggatagcgcatcggacttcaaattcgaaggttccgggttcgagtcccggctgagtcgcca

SEQ ID NO: 8712 - RNA, 76 nt, synthetic construct; identical to SEQ ID NO: 3316
  source 1..76: mol_type = other RNA

SEQ ID NO: 8713 - RNA, 74 nt, synthetic construct; identical to SEQ ID NO: 3293
  source 1..74: mol_type = other RNA
  modified_base 1: mod_base = OTHER; note = 2'-Omethyladenosine phosphorothiorate
  modified_base 5: mod_base = OTHER; note = Cytosine phosphorothiorate
  modified_base 26: mod_base = OTHER; note = Cytosine phosphorothiorate
  modified_base 32: mod_base = OTHER; note = 2'-fluorocytosine
  modified_base 42: mod_base = OTHER; note = Adenosine phosphorothiorate
  modified_base 49: mod_base = OTHER; note = Guanosine phosphorothiorate
  modified_base 73: mod_base = OTHER; note = 2'-Omethylcytosine phosphorothiorate

SEQ ID NO: 8714 - RNA, 76 nt, synthetic construct; identical to SEQ ID NO: 625
  source 1..76: mol_type = other RNA
  modified_base 16: mod_base = OTHER; note = Thymine
  modified_base 20: mod_base = OTHER; note = Thymine
  modified_base 54: mod_base = OTHER; note = Thymine
  modified_base 55: mod_base = OTHER; note = Thymine
  modified_base 60: mod_base = OTHER; note = Thymine

SEQ ID NO: 8715 - RNA, 75 nt, synthetic construct; identical to SEQ ID NO: 3306
  source 1..75: mol_type = other RNA
  modified_base 1: mod_base = OTHER; note = 2'-Omethylguanosine
  modified_base 4: mod_base = OTHER; note = 2'-Omethylcytosine
  modified_base 10: mod_base = OTHER; note = 2'-Omethylguanosine
  modified_base 11: mod_base = OTHER; note = 2'-Omethylcytosine
  modified_base 12: mod_base = OTHER; note = 2'-Omethylguanosine
  modified_base 13: mod_base = OTHER; note = 2'-Omethylcytosine
  modified_base 17: mod_base = OTHER; note = 2'-Omethylguanosine
  modified_base 18: mod_base = OTHER; note = 2'-Omethylguanosine
  modified_base 24: mod_base = OTHER; note = 2'-Omethylcytosine
  modified_base 28: mod_base = OTHER; note = 2'-Omethyluridine
  modified_base 29: mod_base = OTHER; note = 2'-Omethylguanosine
  modified_base 44: mod_base = OTHER; note = 2'-Omethylguanosine
  modified_base 48: mod_base = OTHER; note = 2'-Omethylguanosine
  modified_base 49: mod_base = OTHER; note = 2'-Omethylcytosine
  modified_base 51: mod_base = OTHER; note = 2'-Omethyluridine
  modified_base 55: mod_base = OTHER; note = 2'-Omethylcytosine
  modified_base 58: mod_base = OTHER; note = 2'-Omethyladenosine
  modified_base 60: mod_base = OTHER; note = 2'-Omethylcytosine
  modified_base 64: mod_base = OTHER; note = 2'-Omethyluridine
  modified_base 65: mod_base = OTHER; note = 2'-Omethylcytosine
  modified_base 67: mod_base = OTHER; note = 2'-Omethylguanosine
  modified_base 68: mod_base = OTHER; note = 2'-Omethylguanosine
  modified_base 70: mod_base = OTHER; note = 2'-Omethyluridine
  modified_base 71: mod_base = OTHER; note = 2'-Omethylcytosine
  modified_base 72: mod_base = OTHER; note = 2'-Omethyladenosine

SEQ ID NO: 8716 - RNA, 86 nt, synthetic construct; identical to SEQ ID NO: 3290
  source 1..86: mol_type = other RNA
  modified_base 1: mod_base = OTHER; note = 2'-Omethyladenosine
  modified_base 14: mod_base = OTHER; note = 2'-Omethyladenosine
  modified_base 15: mod_base = OTHER; note = 2'-fluoroguanosine
  modified_base 16: mod_base = OTHER; note = 2'-Omethyluridine
  modified_base 17: mod_base = OTHER; note = 2'-Omethylguanosine
  modified_base 18: mod_base = OTHER; note = 2'-Omethylguanosine
  modified_base 19: mod_base = OTHER; note = 2'-fluorouridine
  modified_base 20: mod_base = OTHER; note = 2'-Omethyluridine
  modified_base 64: mod_base = OTHER; note = 2'-Omethyluridine phosphorothiorate
  modified_base 65: mod_base = OTHER; note = Uridine phosphorothiorate
  modified_base 66: mod_base = OTHER; note = 2'-Omethylcytosine
  modified_base 67: mod_base = OTHER; note = 2'-Omethylguanosine
  modified_base 69: mod_base = OTHER; note = 2'-Omethyladenosine
  modified_base 83: mod_base = OTHER; note = 2'-Omethyladenosine

SEQ ID NO: 8717 - DNA, 76 bp, synthetic construct; identical to SEQ ID NO: 1924
  source 1..76: mol_type = other DNA
  modified_base 1: mod_base = OTHER; note = 2'-Omethylguanosine phosphorothiorate
  modified_base 2: mod_base = OTHER; note = 2'-Omethylguanosine phosphorothiorate
  modified_base 9: mod_base = OTHER; note = Guanosine phosphorothiorate
  modified_base 10: mod_base = OTHER; note = 2'-fluoroguanosine
  modified_base 38: mod_base = OTHER; note = 2'-fluoroadenosine
  modified_base 52: mod_base = OTHER; note = Guanosine phosphorothiorate
  modified_base 54: mod_base = OTHER; note = 2'-fluorouridine
  modified_base 60: mod_base = OTHER; note = Uridine phosphorothiorate
  modified_base 61: mod_base = OTHER; note = 2'-O-(2-Methoxyethyl) 5-methylcytosine
  modified_base 74: mod_base = OTHER; note = Cytosine phosphorothiorate
  modified_base 75: mod_base = OTHER; note = 2'-Omethylcytosine
  misc_feature 1..42: note = RNA
  misc_feature 43: note = DNA
  misc_feature 44..64: note = RNA
  misc_feature 65: note = DNA
  misc_feature 66..76: note = RNA

SEQ ID NO: 8718 - RNA, 75 nt, synthetic construct; identical to SEQ ID NO: 3306
  source 1..75: mol_type = other RNA
  modified_base 1: mod_base = OTHER; note = 2'-Omethylguanosine
  modified_base 14: mod_base = OTHER; note = 2'-Omethyladenosine
  modified_base 15: mod_base = OTHER; note = 2'-Omethyladenosine
  modified_base 16: mod_base = OTHER; note = 2'-Omethylcytosine
  modified_base 17: mod_base = OTHER; note = 2'-Omethylguanosine
  modified_base 18: mod_base = OTHER; note = 2'-Omethylguanosine
  modified_base 19: mod_base = OTHER; note = Uridine phosphorothiorate
  modified_base 20: mod_base = OTHER; note = Adenosine phosphorothiorate
  modified_base 32: mod_base = OTHER; note = 2'-fluorouridine
  modified_base 33: mod_base = OTHER; note = 2'-Omethylcytosine
  modified_base 34: mod_base = OTHER; note = Uridine phosphorothiorate
  modified_base 36: mod_base = OTHER; note = Guanosine phosphorothiorate
  modified_base 37: mod_base = OTHER; note = Adenosine phosphorothiorate
  modified_base 40: mod_base = OTHER; note = 2'-Omethyladenosine
  modified_base 41: mod_base = OTHER; note = 2'-Omethylguanosine
  modified_base 42: mod_base = OTHER; note = 2'-Omethyladenosine
  modified_base 43: mod_base = OTHER; note = 2'-Omethyladenosine
  modified_base 49: mod_base = OTHER; note = 2'-Omethylcytosine
  modified_base 51: mod_base = OTHER; note = 2'-Omethyluridine
  modified_base 72: mod_base = OTHER; note = 2'-Omethyladenosine

SEQ ID NO: 8719 - RNA, 85 nt, synthetic construct; identical to SEQ ID NO: 3317
  source 1..85: mol_type = other RNA
  modified_base 1: mod_base = OTHER; note = 2'-Omethylguanosine phosphorothiorate
  modified_base 2: mod_base = OTHER; note = 2'-Omethylcytosine
  modified_base 3: mod_base = OTHER; note = 2'-Omethyluridine
  modified_base 5: mod_base = OTHER; note = 2'-Omethyluridine phosphorothiorate
  modified_base 13: mod_base = OTHER; note = 2'-fluoroguanosine
  modified_base 14: mod_base = OTHER; note = 2'-fluoroadenosine phosphorothiorate
  modified_base 18: mod_base = OTHER; note = 2'-Omethylguanosine phosphorothiorate
  modified_base 27: mod_base = OTHER; note = Uridine phosphorothiorate
  modified_base 34: mod_base = OTHER; note = 2'-fluorocytosine
  modified_base 35: mod_base = OTHER; note = 2'-fluorouridine
  modified_base 36: mod_base = OTHER; note = 2'-Omethyladenosine
  modified_base 44: mod_base = OTHER; note = 2'-Omethyluridine
  modified_base 46: mod_base = OTHER; note = 2'-Omethylguanosine
  modified_base 56: mod_base = OTHER; note = 2'-fluoroguanosine
  modified_base 57: mod_base = OTHER; note = 2'-fluorocytosine
  modified_base 61: mod_base = OTHER; note = 2'-Omethylguanosine
  modified_base 62: mod_base = OTHER; note = Guanosine phosphorothiorate
  modified_base 79: mod_base = OTHER; note = 2'-fluoroadenosine
  modified_base 82: mod_base = OTHER; note = Guanosine phosphorothiorate
  modified_base 83: mod_base = OTHER; note = 2'-fluorocytosine phosphorothiorate

SEQ ID NO: 8720 - RNA, 76 nt, synthetic construct; identical to SEQ ID NO: 625
  source 1..76: mol_type = other RNA
  modified_base 1: mod_base = OTHER; note = 2'-Omethylguanosine
  modified_base 2: mod_base = OTHER; note = 2'-Omethylguanosine
  modified_base 3: mod_base = OTHER; note = 2'-Omethylcytosine
  modified_base 4: mod_base = OTHER; note = 2'-Omethyluridine
  modified_base 5: mod_base = OTHER; note = 2'-Omethylcytosine
  modified_base 6: mod_base = OTHER; note = 2'-Omethylcytosine
  modified_base 10: mod_base = OTHER; note = 2'-Omethylguanosine
  modified_base 11: mod_base = OTHER; note = 2'-Omethylcytosine
  modified_base 12: mod_base = OTHER; note = 2'-Omethylguanosine
  modified_base 13: mod_base = OTHER; note = 2'-Omethylcytosine
  modified_base 14: mod_base = OTHER; note = 2'-Omethyladenosine
  modified_base 15: mod_base = OTHER; note = 2'-fluoroadenosine
  modified_base 16: mod_base = OTHER; note = 2'-Omethyluridine
  modified_base 17: mod_base = OTHER; note = 2'-Omethylguanosine
  modified_base 18: mod_base = OTHER; note = 2'-Omethylguanosine
  modified_base 19: mod_base = OTHER; note = 2'-fluoroadenosine
  modified_base 20: mod_base = OTHER; note = 2'-Omethyluridine
  modified_base 22: mod_base = OTHER; note = 2'-Omethylguanosine
  modified_base 23: mod_base = OTHER; note = 2'-Omethylcytosine
  modified_base 24: mod_base = OTHER; note = 2'-Omethylguanosine
  modified_base 25: mod_base = OTHER; note = 2'-Omethylcytosine
  modified_base 38: mod_base = OTHER; note = Adenosine phosphorothiorate
  modified_base 39: mod_base = OTHER; note = Uridine phosphorothiorate
  modified_base 40: mod_base = OTHER; note = 2'-fluorouridine
  modified_base 43: mod_base = OTHER; note = 2'-Omethyladenosine
  modified_base 44: mod_base = OTHER; note = 2'-Omethyladenosine
  modified_base 45: mod_base = OTHER; note = 2'-Omethylguanosine
  modified_base 46: mod_base = OTHER; note = 2'-fluoroguanosine
  modified_base 48: mod_base = OTHER; note = 2'-fluorouridine
  modified_base 49: mod_base = OTHER; note = 2'-Omethylcytosine
  modified_base 50: mod_base = OTHER; note = 2'-Omethylcytosine
  modified_base 51: mod_base = OTHER; note = 2'-Omethylguanosine
  modified_base 52: mod_base = OTHER; note = 2'-Omethylguanosine
  modified_base 53: mod_base = OTHER; note = 2'-Omethylguanosine
  modified_base 54: mod_base = OTHER; note = 2'-Omethyluridine
  modified_base 61: mod_base = OTHER; note = 2'-Omethylcytosine
  modified_base 62: mod_base = OTHER; note = 2'-Omethylcytosine
  modified_base 63: mod_base = OTHER; note = 2'-fluorocytosine
  modified_base 64: mod_base = OTHER; note = 2'-Omethylguanosine
  modified_base 65: mod_base = OTHER; note = 2'-Omethylguanosine
  modified_base 66: mod_base = OTHER; note = 2'-Omethylcytosine
  modified_base 67: mod_base = OTHER; note = 2'-Omethylguanosine
  modified_base 68: mod_base = OTHER; note = 2'-Omethylguanosine
  modified_base 69: mod_base = OTHER; note = 2'-Omethyladenosine
  modified_base 70: mod_base = OTHER; note = 2'-fluoroguanosine

SEQ ID NO: 8721 - RNA, 75 nt, synthetic construct; identical to SEQ ID NO: 1045
  source 1..75: mol_type = other RNA
  modified_base 1: mod_base = OTHER; note = 2'-Omethylguanosine
  modified_base 16: mod_base = OTHER; note = 2'-Omethyluridine
  modified_base 17: mod_base = OTHER; note = 2'-Omethylguanosine
  modified_base 18: mod_base = OTHER; note = 2'-Omethylguanosine
  modified_base 53: mod_base = OTHER; note = 2'-Omethyluridine phosphorothiorate
  modified_base 54: mod_base = OTHER; note = Uridine phosphorothiorate
  modified_base 55: mod_base = OTHER; note = 2'-Omethylcytosine
  modified_base 56: mod_base = OTHER; note = 2'-fluoroguanosine
  modified_base 57: mod_base = OTHER; note = 2'-fluoroadenosine
  modified_base 58: mod_base = OTHER; note = 2'-Omethylguanosine
  modified_base 59: mod_base = OTHER; note = 2'-fluorouridine
  modified_base 72: mod_base = OTHER; note = 2'-Omethyluridine

SEQ ID NO: 8722 - RNA, 85 nt, synthetic construct; identical to SEQ ID NO: 3310
  source 1..85: mol_type = other RNA
  modified_base 1: mod_base = OTHER; note = 2'-fluorocytosine
  modified_base 11: mod_base = OTHER; note = Cytosine phosphorothiorate
  modified_base 25: mod_base = OTHER; note = 2'-fluoroguanosine
  modified_base 29: mod_base = OTHER; note = 2'-fluoroguanosine
  modified_base 49: mod_base = OTHER; note = 2'-Omethyluridine
  modified_base 54: mod_base = OTHER; note = 2'-Omethylcytosine
  modified_base 57: mod_base = OTHER; note = 2'-Omethylcytosine
  modified_base 59: mod_base = OTHER; note = 2'-Omethyluridine
  modified_base 84: mod_base = OTHER; note = 2'-Omethylcytosine

SEQ ID NO: 8723 - RNA, 74 nt, synthetic construct; identical to SEQ ID NO: 766
  source 1..74: mol_type = other RNA
  modified_base 1: mod_base = OTHER; note = 2'-Omethylguanosine phosphorothiorate
  modified_base 2: mod_base = OTHER; note = 2'-Omethylguanosine phosphorothiorate
  modified_base 25: mod_base = OTHER; note = Cytosine phosphorothiorate
  modified_base 43: mod_base = OTHER; note = 2'-fluoroadenosine
  modified_base 55: mod_base = OTHER; note = Uridine phosphorothiorate
  modified_base 72: mod_base = OTHER; note = 2'-Omethylcytosine
  modified_base 73: mod_base = OTHER; note = 2'-Omethylguanosine

SEQ ID NO: 8724 - RNA, 75 nt, synthetic construct; identical to SEQ ID NO: 3299
  source 1..75: mol_type = other RNA
  modified_base 1: mod_base = OTHER; note = 2'-Omethylcytosine
  modified_base 2: mod_base = OTHER; note = 2'-Omethylcytosine phosphorothiorate
  modified_base 11: mod_base = OTHER; note = Uridine phosphorothiorate
  modified_base 19: mod_base = OTHER; note = 2'-fluorouridine
  modified_base 21: mod_base = OTHER; note = 2'-fluoroguanosine
  modified_base 26: mod_base = OTHER; note = 2'-fluorouridine
  modified_base 27: mod_base = OTHER; note = Cytosine phosphorothiorate
  modified_base 46: mod_base = OTHER; note = 2'-fluorouridine
  modified_base 47: mod_base = OTHER; note = 2'-fluorocytosine
  modified_base 62: mod_base = OTHER; note = 2'-fluorocytosine
  modified_base 73: mod_base = OTHER; note = Cytosine phosphorothiorate
  modified_base 74: mod_base = OTHER; note = 2'-Omethylcytosine

SEQ ID NO: 8725 - RNA, 75 nt, synthetic construct; identical to SEQ ID NO: 1045
  source 1..75: mol_type = other RNA
  modified_base 1: mod_base = OTHER; note = 2'-Omethylguanosine
  modified_base 2: mod_base = OTHER; note = 2'-Omethylguanosine
  modified_base 3: mod_base = OTHER; note = 2'-Omethyluridine
  modified_base 4: mod_base = OTHER; note = 2'-Omethyluridine
  modified_base 5: mod_base = OTHER; note = 2'-Omethylcytosine
  modified_base 6: mod_base = OTHER; note = 2'-Omethylcytosine
  modified_base 13: mod_base = OTHER; note = 2'-Omethyluridine
  modified_base 14: mod_base = OTHER; note = 2'-Omethyladenosine
  modified_base 15: mod_base = OTHER; note = 2'-Omethyladenosine
  modified_base 16: mod_base = OTHER; note = 2'-Omethyluridine
  modified_base 17: mod_base = OTHER; note = 2'-Omethylguanosine
  modified_base 18: mod_base = OTHER; note = 2'-Omethylguanosine
  modified_base 19: mod_base = OTHER; note = Uridine phosphorothiorate
  modified_base 20: mod_base = OTHER; note = 2'-Omethyladenosine
  modified_base 21: mod_base = OTHER; note = Adenosine phosphorothiorate
  modified_base 25: mod_base = OTHER; note = 2'-Omethylcytosine
  modified_base 33: mod_base = OTHER; note = 2'-fluorouridine
  modified_base 34: mod_base = OTHER; note = 2'-Omethyluridine
  modified_base 35: mod_base = OTHER; note = Uridine phosphorothiorate
  modified_base 37: mod_base = OTHER; note = Adenosine phosphorothiorate
  modified_base 38: mod_base = OTHER; note = Adenosine phosphorothiorate
  modified_base 41: mod_base = OTHER; note = 2'-fluorocytosine
  modified_base 42: mod_base = OTHER; note = 2'-Omethyladenosine
  modified_base 43: mod_base = OTHER; note = 2'-Omethylguanosine
  modified_base 44: mod_base = OTHER; note = 2'-fluorocytosine
  modified_base 48: mod_base = OTHER; note = 2'-Omethylcytosine
  modified_base 49: mod_base = OTHER; note = 2'-Omethylcytosine
  modified_base 50: mod_base = OTHER; note = 2'-Omethylguanosine
  modified_base 51: mod_base = OTHER; note = 2'-Omethyladenosine
  modified_base 52: mod_base = OTHER; note = 2'-Omethylguanosine
  modified_base 53: mod_base = OTHER; note = Uridine phosphorothiorate
  modified_base 54: mod_base = OTHER; note = Uridine phosphorothiorate
  modified_base 60: mod_base = OTHER; note = 2'-Omethylcytosine
  modified_base 64: mod_base = OTHER; note = 2'-Omethylguanosine
  modified_base 72: mod_base = OTHER; note = 2'-Omethyluridine

SEQ ID NO: 8726 - RNA, 75 nt, synthetic construct; identical to SEQ ID NO: 1045
  source 1..75: mol_type = other RNA
  modified_base 1: mod_base = OTHER; note = 2'-Omethylguanosine phosphorothiorate
  modified_base 2: mod_base = OTHER; note = 2'-Omethylguanosine
  modified_base 11: mod_base = OTHER; note = 2'-fluorouridine
  modified_base 15: mod_base = OTHER; note = Adenosine phosphorothiorate
  modified_base 21: mod_base = OTHER; note = 2'-fluoroadenosine
  modified_base 23: mod_base = OTHER; note = Cytosine phosphorothiorate
  modified_base 24: mod_base = OTHER; note = 2'-fluoroadenosine
  modified_base 32: mod_base = OTHER; note = 2'-fluorocytosine phosphorothiorate
  modified_base 37: mod_base = OTHER; note = 2'-fluoroadenosine
  modified_base 50: mod_base = OTHER; note = 2'-fluoroguanosine phosphorothiorate
  modified_base 52: mod_base = OTHER; note = 2'-fluoroguanosine phosphorothiorate
  modified_base 59: mod_base = OTHER; note = Uridine phosphorothiorate
  modified_base 65: mod_base = OTHER; note = Uridine phosphorothiorate
  modified_base 68: mod_base = OTHER; note = Adenosine phosphorothiorate
  modified_base 69: mod_base = OTHER; note = Adenosine phosphorothiorate
  modified_base 70: mod_base = OTHER; note = 2'-fluorocytosine
  modified_base 74: mod_base = OTHER; note = 2'-fluorocytosine phosphorothiorate

SEQ ID NO: 8727 - RNA, 75 nt, synthetic construct; identical to SEQ ID NO: 1045
  source 1..75: mol_type = other RNA
  modified_base 1: mod_base = OTHER; note = 2'-Omethylguanosine phosphorothiorate
  modified_base 2: mod_base = OTHER; note = 2'-Omethylguanosine phosphorothiorate
  modified_base 12: mod_base = OTHER; note = 2'-fluoroguanosine
  modified_base 19: mod_base = OTHER; note = 2'-Omethyluridine
  modified_base 20: mod_base = OTHER; note = 2'-fluoroadenosine
  modified_base 21: mod_base = OTHER; note = 2'-Omethyladenosine
  modified_base 28: mod_base = OTHER; note = 2'-fluorouridine
  modified_base 40: mod_base = OTHER; note = Cytosine phosphorothiorate
  modified_base 41: mod_base = OTHER; note = 2'-fluorocytosine
  modified_base 43: mod_base = OTHER; note = 2'-fluoroguanosine
  modified_base 44: mod_base = OTHER; note = 2'-fluorocytosine
  modified_base 57: mod_base = OTHER; note = Adenosine phosphorothiorate
  modified_base 58: mod_base = OTHER; note = 2'-fluoroguanosine
  modified_base 65: mod_base = OTHER; note = Uridine phosphorothiorate
  modified_base 73: mod_base = OTHER; note = Cytosine phosphorothiorate
  modified_base 74: mod_base = OTHER; note = Cytosine phosphorothiorate
  modified_base 75: mod_base = OTHER; note = 2'-fluoroadenosine

SEQ ID NO: 8728 - RNA, 76 nt, synthetic construct; identical to SEQ ID NO: 3318
  source 1..76: mol_type = other RNA
  modified_base 1: mod_base = OTHER; note = 2'-Omethylcytosine
  modified_base 19: mod_base = OTHER; note = 2'-Omethylguanosine

SEQ ID NO: 8729 - RNA, 76 nt, synthetic construct; identical to SEQ ID NO: 3318
  source 1..76: mol_type = other RNA
  modified_base 1: mod_base = OTHER; note = 2'-Omethylcytosine
  modified_base 10: mod_base = OTHER; note = 2'-Omethylguanosine
  modified_base 11: mod_base = OTHER; note = 2'-Omethylcytosine
  modified_base 12: mod_base = OTHER; note = 2'-Omethyluridine
  modified_base 13: mod_base = OTHER; note = 2'-Omethylcytosine
  modified_base 14: mod_base = OTHER; note = 2'-Omethyladenosine
  modified_base 15: mod_base = OTHER; note = 2'-Omethylguanosine
  modified_base 16: mod_base = OTHER; note = 2'-Omethyluridine
  modified_base 18: mod_base = OTHER; note = 2'-Omethylguanosine
  modified_base 19: mod_base = OTHER; note = 2'-Omethylguanosine
  modified_base 20: mod_base = OTHER; note = Uridine phosphorothiorate
  modified_base 21: mod_base = OTHER; note = Adenosine phosphorothiorate
  modified_base 25: mod_base = OTHER; note = 2'-Omethylcytosine
  modified_base 41: mod_base = OTHER; note = 2'-Omethylcytosine
  modified_base 42: mod_base = OTHER; note = 2'-Omethyluridine
  modified_base 43: mod_base = OTHER; note = 2'-Omethyluridine
  modified_base 44: mod_base = OTHER; note = 2'-Omethyladenosine
  modified_base 49: mod_base = OTHER; note = 2'-Omethylguanosine
  modified_base 50: mod_base = OTHER; note = 2'-Omethylcytosine
  modified_base 52: mod_base = OTHER; note = 2'-Omethylguanosine
  modified_base 54: mod_base = OTHER; note = Uridine phosphorothiorate
  modified_base 55: mod_base = OTHER; note = Uridine phosphorothiorate
  modified_base 61: mod_base = OTHER; note = 2'-Omethylcytosine
  modified_base 65: mod_base = OTHER; note = 2'-Omethylcytosine
  modified_base 73: mod_base = OTHER; note = 2'-Omethyladenosine

SEQ ID NO: 8730 - RNA, 86 nt, synthetic construct; identical to SEQ ID NO: 3290
  source 1..86: mol_type = other RNA
  modified_base 62: mod_base = OTHER; note = 2'-Omethylguanosine
  modified_base 72: mod_base = OTHER; note = 2'-Omethylcytosine

SEQ ID NO: 8731 - RNA, 76 nt, synthetic construct
  source 1..76: mol_type = other RNA
ggctccgtggcgcaatggatagcgcattggacttcaaattcaaaggttccggattcattttccggcggagtcgcca

SEQ ID NO: 8732 - RNA, 76 nt, synthetic construct; identical to SEQ ID NO: 625
  source 1..76: mol_type = other RNA
  modified_base 1: mod_base = OTHER; note = 2'-Omethylguanosine
  modified_base 2: mod_base = OTHER; note = 2'-Omethylguanosine
  modified_base 3: mod_base = OTHER; note = 2'-Omethylcytosine
  modified_base 4: mod_base = OTHER; note = 2'-Omethyluridine
  modified_base 5: mod_base = OTHER; note = 2'-Omethylcytosine
  modified_base 6: mod_base = OTHER; note = 2'-Omethylcytosine
  modified_base 10: mod_base = OTHER; note = 2'-Omethylguanosine
  modified_base 11: mod_base = OTHER; note = 2'-Omethylcytosine
  modified_base 12: mod_base = OTHER; note = 2'-Omethylguanosine
  modified_base 13: mod_base = OTHER; note = 2'-Omethylcytosine
  modified_base 14: mod_base = OTHER; note = 2'-Omethyladenosine
  modified_base 15: mod_base = OTHER; note = 2'-Omethyladenosine
  modified_base 16: mod_base = OTHER; note = 2'-Omethyluridine
  modified_base 17: mod_base = OTHER; note = 2'-Omethylguanosine
  modified_base 18: mod_base = OTHER; note = 2'-Omethylguanosine
  modified_base 19: mod_base = OTHER; note = 2'-Omethyladenosine
  modified_base 20: mod_base = OTHER; note = 2'-Omethyluridine
  modified_base 22: mod_base = OTHER; note = 2'-Omethylguanosine
  modified_base 23: mod_base = OTHER; note = 2'-Omethylcytosine
  modified_base 24: mod_base = OTHER; note = 2'-Omethylguanosine
  modified_base 25: mod_base = OTHER; note = 2'-Omethylcytosine
  modified_base 40: mod_base = OTHER; note = 2'-fluorouridine
  modified_base 41: mod_base = OTHER; note = 2'-fluorocytosine
  modified_base 42: mod_base = OTHER; note = 2'-fluoroadenosine
  modified_base 43: mod_base = OTHER; note = 2'-fluoroadenosine
  modified_base 44: mod_base = OTHER; note = 2'-Omethyladenosine
  modified_base 45: mod_base = OTHER; note = 2'-Omethylguanosine
  modified_base 46: mod_base = OTHER; note = 2'-Omethylguanosine
  modified_base 61: mod_base = OTHER; note = 2'-Omethylcytosine
  modified_base 62: mod_base = OTHER; note = 2'-Omethylcytosine
  modified_base 63: mod_base = OTHER; note = 2'-Omethylcytosine
  modified_base 64: mod_base = OTHER; note = 2'-Omethylguanosine
  modified_base 65: mod_base = OTHER; note = 2'-Omethylguanosine
  modified_base 66: mod_base = OTHER; note = 2'-Omethylcytosine
  modified_base 67: mod_base = OTHER; note = 2'-Omethylguanosine
  modified_base 68: mod_base = OTHER; note = 2'-Omethylguanosine
  modified_base 69: mod_base = OTHER; note = 2'-Omethyladenosine

SEQ ID NO: 8733 - RNA, 76 nt, synthetic construct
  source 1..76: mol_type = other RNA
ggctctgtggcgcaatggatagcgcattggacttcaaattcaaaggttccgggttcgagccccggcagagtcgcca

SEQ ID NO: 8734 - RNA, 86 nt, synthetic construct; identical to SEQ ID NO: 3290
  source 1..86: mol_type = other RNA
  modified_base 22: mod_base = OTHER; note = 2'-Omethyladenosine
  modified_base 23: mod_base = OTHER; note = 2'-Omethylguanosine
  modified_base 24: mod_base = OTHER; note = 2'-Omethylguanosine
  modified_base 25: mod_base = OTHER; note = 2'-Omethylcytosine
  modified_base 83: mod_base = OTHER; note = 2'-Omethyladenosine

SEQ ID NO: 8735 - RNA, 76 nt, synthetic construct; identical to SEQ ID NO: 625
  source 1..76: mol_type = other RNA
  modified_base 1: mod_base = OTHER; note = 2'-fluoroguanosine
  modified_base 6: mod_base = OTHER; note = Cytosine phosphorothiorate
  modified_base 7: mod_base = OTHER; note = Guanosine phosphorothiorate
  modified_base 14: mod_base = OTHER; note = 2'-Omethyladenosine
  modified_base 16: mod_base = OTHER; note = 2'-fluorouridine
  modified_base 17: mod_base = OTHER; note = Guanosine phosphorothiorate
  modified_base 18: mod_base = OTHER; note = 2'-Omethylguanosine
  modified_base 22: mod_base = OTHER; note = 2'-Omethylguanosine
  modified_base 23: mod_base = OTHER; note = 2'-Omethylcytosine
  modified_base 24: mod_base = OTHER; note = 2'-fluoroguanosine
  modified_base 25: mod_base = OTHER; note = Cytosine phosphorothiorate
  modified_base 27: mod_base = OTHER; note = 2'-Omethyluridine
  modified_base 28: mod_base = OTHER; note = 2'-Omethyluridine
  modified_base 29: mod_base = OTHER; note = 2'-fluoroguanosine
  modified_base 32: mod_base = OTHER; note = 2'-fluorocytosine
  modified_base 33: mod_base = OTHER; note = 2'-fluorouridine
  modified_base 39: mod_base = OTHER; note = 2'-Omethyluridine
  modified_base 43: mod_base = OTHER; note = 2'-Omethyladenosine
  modified_base 45: mod_base = OTHER; note = 2'-fluoroguanosine
  modified_base 50: mod_base = OTHER; note = 2'-Omethylcytosine
  modified_base 53: mod_base = OTHER; note = 2'-fluoroguanosine
  modified_base 59: mod_base = OTHER; note = Guanosine phosphorothiorate
  modified_base 60: mod_base = OTHER; note = 2'-Omethyluridine
  modified_base 63: mod_base = OTHER; note = 2'-Omethylcytosine
  modified_base 64: mod_base = OTHER; note = 2'-fluoroguanosine
  modified_base 65: mod_base = OTHER; note = 2'-Omethylguanosine
  modified_base 68: mod_base = OTHER; note = 2'-Omethylguanosine phosphorothiorate
  modified_base 69: mod_base = OTHER; note = Adenosine phosphorothiorate
  modified_base 71: mod_base = OTHER; note = 2'-fluorouridine
  modified_base 72: mod_base = OTHER; note = Cytosine phosphorothiorate
  modified_base 73: mod_base = OTHER; note = 2'-fluoroguanosine phosphorothiorate
  modified_base 74: mod_base = OTHER; note = 2'-Omethylcytosine

SEQ ID NO: 8736 - RNA, 76 nt, synthetic construct; identical to SEQ ID NO: 625
  source 1..76: mol_type = other RNA
  modified_base 32: mod_base = OTHER; note = 2'-O-(2-Methoxyethyl) 5-methylcytosine

SEQ ID NO: 8737 - RNA, 74 nt, synthetic construct; identical to SEQ ID NO: 3293
  source 1..74: mol_type = other RNA
  modified_base 1: mod_base = OTHER; note = 2'-Omethyladenosine phosphorothiorate
  modified_base 7: mod_base = OTHER; note = 2'-fluorouridine
  modified_base 8: mod_base = OTHER; note = Guanosine phosphorothiorate
  modified_base 15: mod_base = OTHER; note = 2'-fluorocytosine
  modified_base 51: mod_base = OTHER; note = 2'-Omethylguanosine phosphorothiorate
  modified_base 73: mod_base = OTHER; note = 2'-Omethylcytosine phosphorothiorate

SEQ ID NO: 8738 - RNA, 75 nt, synthetic construct; identical to SEQ ID NO: 1045
  source 1..75: mol_type = other RNA
  modified_base 2: mod_base = OTHER; note = 2'-Omethylguanosine phosphorothiorate
  modified_base 12: mod_base = OTHER; note = 2'-Omethylguanosine
  modified_base 22: mod_base = OTHER; note = 2'-fluoroguanosine
  modified_base 25: mod_base = OTHER; note = Cytosine phosphorothiorate
  modified_base 26: mod_base = OTHER; note = 2'-fluorouridine
  modified_base 41: mod_base = OTHER; note = 2'-fluorocytosine
  modified_base 42: mod_base = OTHER; note = 2'-Omethyladenosine
  modified_base 53: mod_base = OTHER; note = 2'-fluorouridine phosphorothiorate
  modified_base 61: mod_base = OTHER; note = Uridine phosphorothiorate
  modified_base 73: mod_base = OTHER; note = Cytosine phosphorothiorate
  modified_base 75: mod_base = OTHER; note = 2'-Omethyladenosine

SEQ ID NO: 8739 - RNA, 75 nt, synthetic construct; identical to SEQ ID NO: 3311
  source 1..75: mol_type = other RNA
  modified_base 1: mod_base = OTHER; note = 2'-fluoroguanosine phosphorothiorate
  modified_base 2: mod_base = OTHER; note = 2'-Omethylguanosine phosphorothiorate
  modified_base 21: mod_base = OTHER; note = Adenosine phosphorothiorate
  modified_base 22: mod_base = OTHER; note = Guanosine phosphorothiorate
  modified_base 23: mod_base = OTHER; note = 2'-fluorocytosine
  modified_base 24: mod_base = OTHER; note = Adenosine phosphorothiorate
  modified_base 42: mod_base = OTHER; note = 2'-fluoroadenosine
  modified_base 53: mod_base = OTHER; note = 2'-Omethyluridine
  modified_base 59: mod_base = OTHER; note = 2'-fluorouridine
  modified_base 63: mod_base = OTHER; note = 2'-fluoroguanosine
  modified_base 73: mod_base = OTHER; note = Cytosine phosphorothiorate
  modified_base 74: mod_base = OTHER; note = 2'-fluorocytosine

SEQ ID NO: 8740 - RNA, 76 nt, synthetic construct; identical to SEQ ID NO: 625
  source 1..76: mol_type = other RNA
  modified_base 1: mod_base = OTHER; note = 2'-Omethylguanosine phosphorothiorate
  modified_base 2: mod_base = OTHER; note = 2'-Omethylguanosine
  modified_base 3: mod_base = OTHER; note = 2'-O-(2-Methoxyethyl) 5-methylcytosine
  modified_base 10: mod_base = OTHER; note = 2'-fluoroguanosine
  modified_base 22: mod_base = OTHER; note = 2'-fluoroguanosine
  modified_base 29: mod_base = OTHER; note = Guanosine phosphorothiorate
  modified_base 30: mod_base = OTHER; note = 2'-fluoroguanosine
  modified_base 74: mod_base = OTHER; note = Cytosine phosphorothiorate
  modified_base 75: mod_base = OTHER; note = 2'-Omethylcytosine phosphorothiorate
  modified_base 76: mod_base = OTHER; note = 2'-Omethyladenosine

SEQ ID NO: 8741 - RNA, 76 nt, synthetic construct; identical to SEQ ID NO: 3325
  source 1..76: mol_type = other RNA
  modified_base 1: mod_base = OTHER; note = 2'-Omethyluridine phosphorothiorate
  modified_base 2: mod_base = OTHER; note = 2'-Omethyladenosine phosphorothiorate
  modified_base 3: mod_base = OTHER; note = 2'-Omethylcytosine
  modified_base 4: mod_base = OTHER; note = 2'-Omethyladenosine
  modified_base 5: mod_base = OTHER; note = 2'-Omethylcytosine
  modified_base 6: mod_base = OTHER; note = 2'-Omethylcytosine
  modified_base 10: mod_base = OTHER; note = 2'-Omethylguanosine
  modified_base 11: mod_base = OTHER; note = 2'-Omethylcytosine
  modified_base 12: mod_base = OTHER; note = 2'-Omethylguanosine
  modified_base 13: mod_base = OTHER; note = 2'-Omethylcytosine
  modified_base 17: mod_base = OTHER; note = 2'-Omethylguanosine
  modified_base 18: mod_base = OTHER; note = 2'-Omethylguanosine
  modified_base 22: mod_base = OTHER; note = 2'-Omethylguanosine
  modified_base 23: mod_base = OTHER; note = 2'-Omethylcytosine
  modified_base 24: mod_base = OTHER; note = 2'-Omethylguanosine
  modified_base 25: mod_base = OTHER; note = 2'-Omethylcytosine
  modified_base 33: mod_base = OTHER; note = 2'-fluorouridine
  modified_base 35: mod_base = OTHER; note = Cytosine phosphorothiorate
  modified_base 37: mod_base = OTHER; note = Adenosine phosphorothiorate
  modified_base 38: mod_base = OTHER; note = Adenosine phosphorothiorate
  modified_base 41: mod_base = OTHER; note = 2'-fluorocytosine
  modified_base 42: mod_base = OTHER; note = 2'-Omethyladenosine
  modified_base 43: mod_base = OTHER; note = 2'-Omethyladenosine
  modified_base 44: mod_base = OTHER; note = 2'-fluoroadenosine
  modified_base 49: mod_base = OTHER; note = 2'-Omethylcytosine
  modified_base 50: mod_base = OTHER; note = 2'-Omethylcytosine
  modified_base 51: mod_base = OTHER; note = 2'-Omethylguanosine
  modified_base 52: mod_base = OTHER; note = 2'-Omethylguanosine
  modified_base 53: mod_base = OTHER; note = 2'-Omethylguanosine
  modified_base 54: mod_base = OTHER; note = Uridine phosphorothiorate
  modified_base 55: mod_base = OTHER; note = Uridine phosphorothiorate
  modified_base 61: mod_base = OTHER; note = 2'-Omethylcytosine
  modified_base 62: mod_base = OTHER; note = 2'-Omethylcytosine
  modified_base 63: mod_base = OTHER; note = 2'-fluorocytosine
  modified_base 64: mod_base = OTHER; note = 2'-Omethylguanosine
  modified_base 65: mod_base = OTHER; note = 2'-Omethylguanosine
  modified_base 66: mod_base = OTHER; note = 2'-Omethylcytosine
  modified_base 67: mod_base = OTHER; note = 2'-Omethylguanosine
  modified_base 68: mod_base = OTHER; note = 2'-Omethylguanosine
  modified_base 73: mod_base = OTHER; note = 2'-Omethylguanosine

SEQ ID NO: 8742 - RNA, 86 nt, synthetic construct; identical to SEQ ID NO: 3290
  source 1..86: mol_type = other RNA
  modified_base 43: mod_base = OTHER; note = 2'-fluoroadenosine

SEQ ID NO: 8743 - RNA, 76 nt, synthetic construct; identical to SEQ ID NO: 3289
  source 1..76: mol_type = other RNA
  modified_base 18: mod_base = OTHER; note = 2'-Omethylguanosine
  modified_base 52: mod_base = OTHER; note = 2'-Omethylguanosine

SEQ ID NO: 8744 - RNA, 75 nt, synthetic construct; identical to SEQ ID NO: 1045
  source 1..75: mol_type = other RNA
  modified_base 1: mod_base = OTHER; note = 2'-Omethylguanosine phosphorothiorate
  modified_base 2: mod_base = OTHER; note = 2'-Omethylguanosine phosphorothiorate
  modified_base 58: mod_base = OTHER; note = 2'-Omethylguanosine
  modified_base 74: mod_base = OTHER; note = Cytosine phosphorothiorate
  modified_base 75: mod_base = OTHER; note = 2'-Omethyladenosine

SEQ ID NO: 8745 - RNA, 74 nt, synthetic construct; identical to SEQ ID NO: 3293
  source 1..74: mol_type = other RNA
  modified_base 1: mod_base = OTHER; note = 2'-fluoroadenosine
  modified_base 2: mod_base = OTHER; note = Cytosine phosphorothiorate
  modified_base 3: mod_base = OTHER; note = Cytosine phosphorothiorate
  modified_base 4: mod_base = OTHER; note = Uridine phosphorothiorate
  modified_base 5: mod_base = OTHER; note = 2'-fluorocytosine
  modified_base 8: mod_base = OTHER; note = 2'-fluoroguanosine
  modified_base 9: mod_base = OTHER; note = 2'-fluoroguanosine
  modified_base 11: mod_base = OTHER; note = Guanosine phosphorothiorate
  modified_base 15: mod_base = OTHER; note = Cytosine phosphorothiorate
  modified_base 21: mod_base = OTHER; note = 2'-fluorocytosine
  modified_base 24: mod_base = OTHER; note = 2'-fluoroguanosine
  modified_base 27: mod_base = OTHER; note = 2'-Omethyluridine
  modified_base 35: mod_base = OTHER; note = 2'-Omethylguanosine
  modified_base 42: mod_base = OTHER; note = Adenosine phosphorothiorate
  modified_base 43: mod_base = OTHER; note = 2'-fluoroguanosine
  modified_base 46: mod_base = OTHER; note = Uridine phosphorothiorate
  modified_base 48: mod_base = OTHER; note = 2'-fluorocytosine
  modified_base 51: mod_base = OTHER; note = 2'-fluoroguanosine
  modified_base 62: mod_base = OTHER; note = Guanosine phosphorothiorate
  modified_base 73: mod_base = OTHER; note = 2'-Omethylcytosine phosphorothiorate

SEQ ID NO: 8746 - RNA, 76 nt, synthetic construct; identical to SEQ ID NO: 3295
  source 1..76: mol_type = other RNA
  modified_base 1: mod_base = OTHER; note = 2'-Omethylcytosine phosphorothiorate
  modified_base 2: mod_base = OTHER; note = 2'-Omethylcytosine
  modified_base 3: mod_base = OTHER; note = 2'-fluorouridine phosphorothiorate
  modified_base 4: mod_base = OTHER; note = 2'-fluorouridine phosphorothiorate
  modified_base 6: mod_base = OTHER; note = 2'-fluoroguanosine
  modified_base 7: mod_base = OTHER; note = 2'-fluoroadenosine phosphorothiorate
  modified_base 8: mod_base = OTHER; note = Uridine phosphorothiorate
  modified_base 12: mod_base = OTHER; note = 2'-fluorouridine phosphorothiorate
  modified_base 17: mod_base = OTHER; note = 2'-Omethyluridine phosphorothiorate
  modified_base 21: mod_base = OTHER; note = 2'-Omethyladenosine
  modified_base 25: mod_base = OTHER; note = 2'-Omethylcytosine
  modified_base 27: mod_base = OTHER; note = Guanosine phosphorothiorate
  modified_base 36: mod_base = OTHER; note = 2'-Omethyladenosine
  modified_base 38: mod_base = OTHER; note = 2'-Omethyladenosine
  modified_base 42: mod_base = OTHER; note = 2'-fluorouridine
  modified_base 52: mod_base = OTHER; note = 2'-Omethylguanosine
  modified_base 56: mod_base = OTHER; note = 2'-fluorocytosine phosphorothiorate
  modified_base 59: mod_base = OTHER; note = 2'-fluoroadenosine
  modified_base 75: mod_base = OTHER; note = 2'-fluorocytosine
  modified_base 76: mod_base = OTHER; note = 2'-Omethyladenosine

SEQ ID NO: 8747 - RNA, 75 nt, synthetic construct; identical to SEQ ID NO: 3336
  source 1..75: mol_type = other RNA
  modified_base 19: mod_base = OTHER; note = 2'-fluorouridine
  modified_base 20: mod_base = OTHER; note = Adenosine phosphorothiorate
  modified_base 25: mod_base = OTHER; note = 2'-fluoroadenosine
  modified_base 27: mod_base = OTHER; note = 2'-Omethylcytosine
  modified_base 46: mod_base = OTHER; note = 2'-fluorouridine
  modified_base 73: mod_base = OTHER; note = 2'-Omethylcytosine
  modified_base 75: mod_base = OTHER; note = 2'-fluoroadenosine

SEQ ID NO: 8748 - RNA, 76 nt, synthetic construct; identical to SEQ ID NO: 3289
  source 1..76: mol_type = other RNA
  modified_base 1: mod_base = OTHER; note = 2'-Omethylguanosine phosphorothiorate
  modified_base 2: mod_base = OTHER; note = 2'-Omethylcytosine
  modified_base 3: mod_base = OTHER; note = 2'-Omethylcytosine
  modified_base 18: mod_base = OTHER; note = Guanosine phosphorothiorate
  modified_base 19: mod_base = OTHER; note = 2'-Omethylguanosine
  modified_base 20: mod_base = OTHER; note = Uridine phosphorothiorate
  modified_base 25: mod_base = OTHER; note = 2'-Omethylcytosine
  modified_base 29: mod_base = OTHER; note = 2'-Omethyladenosine
  modified_base 35: mod_base = OTHER; note = Uridine phosphorothiorate
  modified_base 37: mod_base = OTHER; note = Adenosine phosphorothiorate
  modified_base 38: mod_base = OTHER; note = Adenosine phosphorothiorate
  modified_base 46: mod_base = OTHER; note = Guanosine phosphorothiorate
  modified_base 50: mod_base = OTHER; note = 2'-Omethyladenosine
  modified_base 52: mod_base = OTHER; note = 2'-Omethylguanosine
  modified_base 54: mod_base = OTHER; note = Uridine phosphorothiorate
  modified_base 55: mod_base = OTHER; note = Uridine phosphorothiorate
  modified_base 56: mod_base = OTHER; note = 2'-Omethylcytosine
  modified_base 57: mod_base = OTHER; note = Adenosine phosphorothiorate
  modified_base 65: mod_base = OTHER; note = 2'-Omethylguanosine
  modified_base 71: mod_base = OTHER; note = 2'-Omethylguanosine
  modified_base 73: mod_base = OTHER; note = 2'-Omethylguanosine

SEQ ID NO: 8749 - RNA, 85 nt, synthetic construct; identical to SEQ ID NO: 3317
  source 1..85: mol_type = other RNA
  modified_base 1: mod_base = OTHER; note = 2'-Omethylguanosine phosphorothiorate
  modified_base 13: mod_base = OTHER; note = 2'-fluoroguanosine
  modified_base 37: mod_base = OTHER; note = 2'-Omethyladenosine
  modified_base 53: mod_base = OTHER; note = 2'-Omethylcytosine phosphorothiorate
  modified_base 55: mod_base = OTHER; note = 2'-Omethylcytosine
  modified_base 80: mod_base = OTHER; note = 2'-Omethylguanosine
  modified_base 82: mod_base = OTHER; note = 2'-fluoroguanosine

SEQ ID NO: 8750 - RNA, 75 nt, synthetic construct; identical to SEQ ID NO: 3299
  source 1..75: mol_type = other RNA
  modified_base 21: mod_base = OTHER; note = 2'-fluoroguanosine
  modified_base 22: mod_base = OTHER; note = 2'-fluoroadenosine
  modified_base 25: mod_base = OTHER; note = Adenosine phosphorothiorate
  modified_base 35: mod_base = OTHER; note = Adenosine phosphorothiorate
  modified_base 39: mod_base = OTHER; note = Cytosine phosphorothiorate
  modified_base 46: mod_base = OTHER; note = Uridine phosphorothiorate
  modified_base 48: mod_base = OTHER; note = 2'-fluorocytosine
  modified_base 73: mod_base = OTHER; note = Cytosine phosphorothiorate
  modified_base 74: mod_base = OTHER; note = Cytosine phosphorothiorate

SEQ ID NO: 8751 - RNA, 76 nt, synthetic construct; identical to SEQ ID NO: 3490
  source 1..76: mol_type = other RNA
  modified_base 1: mod_base = OTHER; note = 2'-Omethylguanosine
  modified_base 2: mod_base = OTHER; note = 2'-Omethylguanosine
  modified_base 3: mod_base = OTHER; note = 2'-Omethylcytosine
  modified_base 4: mod_base = OTHER; note = 2'-Omethyluridine
  modified_base 5: mod_base = OTHER; note = 2'-Omethylcytosine
  modified_base 6: mod_base = OTHER; note = 2'-Omethylcytosine
  modified_base 16: mod_base = OTHER; note = 2'-Omethyluridine
  modified_base 17: mod_base = OTHER; note = 2'-Omethylguanosine
  modified_base 18: mod_base = OTHER; note = 2'-Omethylguanosine
  modified_base 20: mod_base = OTHER; note = 2'-Omethyluridine
  modified_base 25: mod_base = OTHER; note = 2'-Omethylcytosine
  modified_base 33: mod_base = OTHER; note = 2'-fluorouridine
  modified_base 35: mod_base = OTHER; note = Cytosine phosphorothiorate
  modified_base 37: mod_base = OTHER; note = Adenosine phosphorothiorate
  modified_base 38: mod_base = OTHER; note = Adenosine phosphorothiorate
  modified_base 41: mod_base = OTHER; note = 2'-fluorocytosine
  modified_base 42: mod_base = OTHER; note = 2'-Omethyladenosine
  modified_base 43: mod_base = OTHER; note = 2'-Omethyladenosine
  modified_base 44: mod_base = OTHER; note = 2'-fluoroadenosine
  modified_base 49: mod_base = OTHER; note = 2'-Omethylguanosine
  modified_base 50: mod_base = OTHER; note = 2'-Omethylcytosine
  modified_base 52: mod_base = OTHER; note = 2'-Omethylguanosine
  modified_base 54: mod_base = OTHER; note = 2'-Omethyluridine
  modified_base 55: mod_base = OTHER; note = Uridine phosphorothiorate
  modified_base 56: mod_base = OTHER; note = 2'-Omethylcytosine
  modified_base 57: mod_base = OTHER; note = 2'-fluoroguanosine
  modified_base 59: mod_base = OTHER; note = 2'-Omethylguanosine
  modified_base 61: mod_base = OTHER; note = 2'-Omethylcytosine
  modified_base 62: mod_base = OTHER; note = 2'-Omethylcytosine
  modified_base 63: mod_base = OTHER; note = 2'-fluorocytosine
  modified_base 64: mod_base = OTHER; note = 2'-Omethylguanosine
  modified_base 65: mod_base = OTHER; note = 2'-Omethylcytosine
  modified_base 73: mod_base = OTHER; note = 2'-Omethylguanosine

SEQ ID NO: 8752 - RNA, 76 nt, synthetic construct; identical to SEQ ID NO: 625
  source 1..76: mol_type = other RNA
  modified_base 1: mod_base = OTHER; note = 2'-Omethylguanosine
  modified_base 10: mod_base = OTHER; note = 2'-Omethylguanosine
  modified_base 13: mod_base = OTHER; note = 2'-Omethylcytosine
  modified_base 17: mod_base = OTHER; note = Guanosine phosphorothiorate
  modified_base 18: mod_base = OTHER; note = 2'-Omethylguanosine
  modified_base 19: mod_base = OTHER; note = Adenosine phosphorothiorate
  modified_base 20: mod_base = OTHER; note = 2'-Omethyluridine
  modified_base 29: mod_base = OTHER; note = 2'-Omethylguanosine
  modified_base 33: mod_base = OTHER; note = 2'-fluorouridine
  modified_base 35: mod_base = OTHER; note = Cytosine phosphorothiorate
  modified_base 37: mod_base = OTHER; note = Adenosine phosphorothiorate
  modified_base 38: mod_base = OTHER; note = Adenosine phosphorothiorate
  modified_base 43: mod_base = OTHER; note = 2'-Omethyladenosine
  modified_base 44: mod_base = OTHER; note = 2'-fluoroadenosine
  modified_base 46: mod_base = OTHER; note = Guanosine phosphorothiorate
  modified_base 50: mod_base = OTHER; note = 2'-Omethylcytosine
  modified_base 52: mod_base = OTHER; note = 2'-Omethylguanosine
  modified_base 54: mod_base = OTHER; note = Uridine phosphorothiorate
  modified_base 55: mod_base = OTHER; note = Uridine phosphorothiorate
  modified_base 56: mod_base = OTHER; note = 2'-Omethylcytosine
  modified_base 57: mod_base = OTHER; note = Guanosine phosphorothiorate
  modified_base 62: mod_base = OTHER; note = 2'-Omethylcytosine
  modified_base 63: mod_base = OTHER; note = 2'-fluorocytosine
  modified_base 65: mod_base = OTHER; note = 2'-Omethylguanosine
  modified_base 71: mod_base = OTHER; note = 2'-Omethyluridine
  modified_base 73: mod_base = OTHER; note = 2'-Omethylguanosine

SEQ ID NO: 8753 - DNA, 74 bp, synthetic construct; identical to SEQ ID NO: 3384
  source 1..74: mol_type = other DNA
  modified_base 1: mod_base = OTHER; note = 2'-Omethylguanosine phosphorothiorate
  modified_base 2: mod_base = OTHER; note = 2'-Omethylguanosine phosphorothiorate
  modified_base 45: mod_base = OTHER; note = Guanosine phosphorothiorate
  modified_base 65: mod_base = OTHER; note = 2'-Omethylguanosine
  modified_base 73: mod_base = OTHER; note = 2'-Omethylguanosine
  misc_feature 1..45: note = RNA
  misc_feature 46: note = DNA
  misc_feature 47..74: note = RNA

SEQ ID NO: 8754 - RNA, 85 nt, synthetic construct; identical to SEQ ID NO: 3297
  source 1..85: mol_type = other RNA
  modified_base 1: mod_base = OTHER; note = 2'-Omethylguanosine phosphorothiorate
  modified_base 2: mod_base = OTHER; note = 2'-Omethylcytosine
  modified_base 3: mod_base = OTHER; note = 2'-Omethyluridine
  modified_base 4: mod_base = OTHER; note = 2'-Omethylguanosine
  modified_base 5: mod_base = OTHER; note = 2'-Omethyluridine
  modified_base 6: mod_base = OTHER; note = 2'-Omethylguanosine
  modified_base 27: mod_base = OTHER; note = 2'-Omethyluridine
  modified_base 28: mod_base = OTHER; note = 2'-Omethyluridine
  modified_base 29: mod_base = OTHER; note = 2'-Omethylguanosine
  modified_base 30: mod_base = OTHER; note = 2'-fluoroguanosine
  modified_base 40: mod_base = OTHER; note = 2'-fluorocytosine
  modified_base 41: mod_base = OTHER; note = 2'-Omethylcytosine
  modified_base 42: mod_base = OTHER; note = 2'-Omethyladenosine
  modified_base 43: mod_base = OTHER; note = 2'-Omethyladenosine
  modified_base 82: mod_base = OTHER; note = 2'-Omethylguanosine

SEQ ID NO: 8755 - RNA, 76 nt, synthetic construct; identical to SEQ ID NO: 625
  source 1..76: mol_type = other RNA
  modified_base 1: mod_base = OTHER; note = Guanosine phosphorothiorate
  modified_base 2: mod_base = OTHER; note = Guanosine phosphorothiorate
  modified_base 3: mod_base = OTHER; note = 2'-Omethylcytosine
  modified_base 7: mod_base = OTHER; note = Guanosine phosphorothiorate
  modified_base 8: mod_base = OTHER; note = Uridine phosphorothiorate
  modified_base 9: mod_base = OTHER; note = Guanosine phosphorothiorate
  modified_base 10: mod_base = OTHER; note = 2'-fluoroguanosine
  modified_base 13: mod_base = OTHER; note = 2'-fluorocytosine phosphorothiorate
  modified_base 14: mod_base = OTHER; note = 2'-Omethyladenosine
  modified_base 15: mod_base = OTHER; note = 2'-Omethyladenosine
  modified_base 16: mod_base = OTHER; note = 2'-Omethyluridine
  modified_base 21: mod_base = OTHER; note = Adenosine phosphorothiorate
  modified_base 22: mod_base = OTHER; note = 2'-fluoroguanosine
  modified_base 28: mod_base = OTHER; note = Uridine phosphorothiorate
  modified_base 29: mod_base = OTHER; note = 2'-Omethylguanosine
  modified_base 30: mod_base = OTHER; note = Guanosine phosphorothiorate
  modified_base 31: mod_base = OTHER; note = 2'-Omethyladenosine
  modified_base 32: mod_base = OTHER; note = 2'-fluorocytosine
  modified_base 41: mod_base = OTHER; note = 2'-fluorocytosine
  modified_base 42: mod_base = OTHER; note = Adenosine phosphorothiorate
  modified_base 43: mod_base = OTHER; note = 2'-Omethyladenosine phosphorothiorate
  modified_base 48: mod_base = OTHER; note = Uridine phosphorothiorate
  modified_base 49: mod_base = OTHER; note = 2'-fluorocytosine
  modified_base 51: mod_base = OTHER; note = Guanosine phosphorothiorate
  modified_base 52: mod_base = OTHER; note = 2'-Omethylguanosine
  modified_base 57: mod_base = OTHER; note = 2'-Omethylguanosine
  modified_base 58: mod_base = OTHER; note = 2'-fluoroadenosine
  modified_base 60: mod_base = OTHER; note = 2'-Omethyluridine
  modified_base 65: mod_base = OTHER; note = 2'-Omethylguanosine
  modified_base 66: mod_base = OTHER; note = 2'-Omethylcytosine
  modified_base 68: mod_base = OTHER; note = 2'-Omethylguanosine phosphorothiorate
  modified_base 69: mod_base = OTHER; note = 2'-fluoroadenosine phosphorothiorate
  modified_base 71: mod_base = OTHER; note = 2'-fluorouridine
  modified_base 72: mod_base = OTHER; note = 2'-Omethylcytosine phosphorothiorate
  modified_base 73: mod_base = OTHER; note = 2'-Omethylguanosine
  modified_base 74: mod_base = OTHER; note = 2'-fluorocytosine phosphorothiorate
  modified_base 75: mod_base = OTHER; note = 2'-Omethylcytosine

SEQ ID NO: 8756 - RNA, 76 nt, synthetic construct; identical to SEQ ID NO: 625
  source 1..76: mol_type = other RNA
  modified_base 1: mod_base = OTHER; note = 2'-Omethylguanosine phosphorothiorate
  modified_base 2: mod_base = OTHER; note = 2'-Omethylguanosine
  modified_base 3: mod_base = OTHER; note = 2'-Omethylcytosine
  modified_base 4: mod_base = OTHER; note = 2'-Omethyluridine
  modified_base 5: mod_base = OTHER; note = 2'-Omethylcytosine
  modified_base 6: mod_base = OTHER; note = 2'-Omethylcytosine
  modified_base 10: mod_base = OTHER; note = 2'-Omethylguanosine
  modified_base 11: mod_base = OTHER; note = 2'-Omethylcytosine
  modified_base 12: mod_base = OTHER; note = 2'-Omethylguanosine
  modified_base 13: mod_base = OTHER; note = 2'-Omethylcytosine
  modified_base 14: mod_base = OTHER; note = 2'-Omethyladenosine
  modified_base 15: mod_base = OTHER; note = 2'-fluoroadenosine
  modified_base 16: mod_base = OTHER; note = 2'-Omethyluridine
  modified_base 17: mod_base = OTHER; note = 2'-Omethylguanosine
  modified_base 18: mod_base = OTHER; note = 2'-Omethylguanosine
  modified_base 19: mod_base = OTHER; note = 2'-fluoroadenosine
  modified_base 20: mod_base = OTHER; note = 2'-Omethyluridine
  modified_base 21: mod_base = OTHER; note = 2'-fluoroadenosine
  modified_base 22: mod_base = OTHER; note = 2'-Omethylguanosine
  modified_base 23: mod_base = OTHER; note = 2'-Omethylcytosine
  modified_base 24: mod_base = OTHER; note = 2'-Omethylguanosine
  modified_base 25: mod_base = OTHER; note = 2'-Omethylcytosine
  modified_base 38: mod_base = OTHER; note = Adenosine phosphorothiorate
  modified_base 39: mod_base = OTHER; note = Uridine phosphorothiorate
  modified_base 40: mod_base = OTHER; note = 2'-fluorouridine
  modified_base 43: mod_base = OTHER; note = 2'-Omethyladenosine
  modified_base 44: mod_base = OTHER; note = 2'-Omethyladenosine
  modified_base 45: mod_base = OTHER; note = 2'-Omethylguanosine
  modified_base 46: mod_base = OTHER; note = 2'-fluoroguanosine
  modified_base 48: mod_base = OTHER; note = 2'-fluorouridine
  modified_base 49: mod_base = OTHER; note = 2'-Omethylcytosine
  modified_base 50: mod_base = OTHER; note = 2'-Omethylcytosine
  modified_base 51: mod_base = OTHER; note = 2'-Omethylguanosine
  modified_base 52: mod_base = OTHER; note = 2'-Omethylguanosine
  modified_base 53: mod_base = OTHER; note = 2'-Omethylguanosine
  modified_base 54: mod_base = OTHER; note = 2'-Omethyluridine
  modified_base 61: mod_base = OTHER; note = 2'-Omethylcytosine
  modified_base 62: mod_base = OTHER; note = 2'-Omethylcytosine
  modified_base 63: mod_base = OTHER; note = 2'-fluorocytosine
  modified_base 64: mod_base = OTHER; note = 2'-Omethylguanosine
  modified_base 65: mod_base = OTHER; note = 2'-Omethylguanosine
  modified_base 66: mod_base = OTHER; note = 2'-Omethylcytosine
  modified_base 67: mod_base = OTHER; note = 2'-Omethylguanosine
  modified_base 68: mod_base = OTHER; note = 2'-Omethylguanosine
  modified_base 69: mod_base = OTHER; note = 2'-Omethyladenosine
  modified_base 70: mod_base = OTHER; note = 2'-fluoroguanosine

SEQ ID NO: 8757 - RNA, 76 nt, synthetic construct; identical to SEQ ID NO: 625
  source 1..76: mol_type = other RNA
  modified_base 10: mod_base = OTHER; note = 2'-O-(2-Methoxyethyl) guanosine
  modified_base 11: mod_base = OTHER; note = 2'-O-(2-Methoxyethyl) cytosine
  modified_base 12: mod_base = OTHER; note = 2'-O-(2-Methoxyethyl) guanosine
  modified_base 13: mod_base = OTHER; note = 2'-O-(2-Methoxyethyl) cytosine

SEQ ID NO: 8758 - RNA, 76 nt, synthetic construct; identical to SEQ ID NO: 625
  source 1..76: mol_type = other RNA
  modified_base 1: mod_base = OTHER; note = 2'-Omethylguanosine
  modified_base 10: mod_base = OTHER; note = 2'-Omethylguanosine
  modified_base 13: mod_base = OTHER; note = 2'-Omethylcytosine
  modified_base 25: mod_base = OTHER; note = 2'-Omethylcytosine
  modified_base 29: mod_base = OTHER; note = 2'-Omethylguanosine
  modified_base 33: mod_base = OTHER; note = 2'-fluorouridine
  modified_base 35: mod_base = OTHER; note = Cytosine phosphorothiorate
  modified_base 37: mod_base = OTHER; note = Adenosine phosphorothiorate
  modified_base 38: mod_base = OTHER; note = Adenosine phosphorothiorate
  modified_base 41: mod_base = OTHER; note = 2'-fluorocytosine phosphorothiorate
  modified_base 43: mod_base = OTHER; note = 2'-Omethyladenosine
  modified_base 44: mod_base = OTHER; note = 2'-fluoroadenosine
  modified_base 46: mod_base = OTHER; note = Guanosine phosphorothiorate
  modified_base 50: mod_base = OTHER; note = 2'-Omethylcytosine
  modified_base 52: mod_base = OTHER; note = 2'-Omethylguanosine
  modified_base 54: mod_base = OTHER; note = Uridine phosphorothiorate
  modified_base 55: mod_base = OTHER; note = Uridine phosphorothiorate
  modified_base 56: mod_base = OTHER; note = 2'-Omethylcytosine
  modified_base 57: mod_base = OTHER; note = Guanosine phosphorothiorate
  modified_base 62: mod_base = OTHER; note = 2'-Omethylcytosine
  modified_base 63: mod_base = OTHER; note = 2'-fluorocytosine
  modified_base 65: mod_base = OTHER; note = 2'-Omethylguanosine
  modified_base 71: mod_base = OTHER; note = 2'-Omethyluridine
  modified_base 73: mod_base = OTHER; note = 2'-Omethylguanosine

SEQ ID NO: 8759 - RNA, 76 nt, synthetic construct; identical to SEQ ID NO: 3490
  source 1..76: mol_type = other RNA
  modified_base 1: mod_base = OTHER; note = 2'-Omethylguanosine phosphorothiorate
  modified_base 2: mod_base = OTHER; note = 2'-Omethylguanosine
  modified_base 3: mod_base = OTHER; note = 2'-Omethylcytosine
  modified_base 4: mod_base = OTHER; note = 2'-Omethyluridine
  modified_base 5: mod_base = OTHER; note = 2'-Omethylcytosine
  modified_base 6: mod_base = OTHER; note = 2'-Omethylcytosine
  modified_base 27: mod_base = OTHER; note = 2'-Omethyluridine
  modified_base 28: mod_base = OTHER; note = 2'-Omethyluridine
  modified_base 29: mod_base = OTHER; note = 2'-fluoroguanosine
  modified_base 30: mod_base = OTHER; note = 2'-Omethylguanosine
  modified_base 40: mod_base = OTHER; note = 2'-fluorouridine
  modified_base 41: mod_base = OTHER; note = 2'-Omethylcytosine
  modified_base 42: mod_base = OTHER; note = 2'-Omethyladenosine
  modified_base 43: mod_base = OTHER; note = 2'-Omethyladenosine
  modified_base 73: mod_base = OTHER; note = 2'-Omethylguanosine

SEQ ID NO: 8760 - RNA, 76 nt, synthetic construct; identical to SEQ ID NO: 3295
  source 1..76: mol_type = other RNA
  modified_base 1: mod_base = OTHER; note = 2'-Omethylcytosine phosphorothiorate
  modified_base 2: mod_base = OTHER; note = 2'-Omethylcytosine
  modified_base 3: mod_base = OTHER; note = 2'-Omethyluridine phosphorothiorate
  modified_base 7: mod_base = OTHER; note = 2'-Omethyladenosine phosphorothiorate
  modified_base 10: mod_base = OTHER; note = 2'-fluoroguanosine
  modified_base 23: mod_base = OTHER; note = 2'-fluoroadenosine phosphorothiorate
  modified_base 25: mod_base = OTHER; note = 2'-fluorocytosine phosphorothiorate
  modified_base 27: mod_base = OTHER; note = 2'-Omethylguanosine
  modified_base 29: mod_base = OTHER; note = 2'-Omethylguanosine phosphorothiorate
  modified_base 37: mod_base = OTHER; note = 2'-Omethylguanosine phosphorothiorate
  modified_base 39: mod_base = OTHER; note = Uridine phosphorothiorate
  modified_base 40: mod_base = OTHER; note = 2'-fluorocytosine phosphorothiorate
  modified_base 43: mod_base = OTHER; note = 2'-Omethyluridine
  modified_base 49: mod_base = OTHER; note = 2'-fluoroguanosine phosphorothiorate
  modified_base 52: mod_base = OTHER; note = Guanosine phosphorothiorate
  modified_base 53: mod_base = OTHER; note = 2'-Omethylguanosine
  modified_base 66: mod_base = OTHER; note = 2'-fluorouridine
  modified_base 74: mod_base = OTHER; note = 2'-Omethylcytosine phosphorothiorate
  modified_base 75: mod_base = OTHER; note = Cytosine phosphorothiorate

SEQ ID NO: 8761 - RNA, 75 nt, synthetic construct; identical to SEQ ID NO: 3299
  source 1..75: mol_type = other RNA
  modified_base 1: mod_base = OTHER; note = 2'-Omethylcytosine
  modified_base 3: mod_base = OTHER; note = Uridine phosphorothiorate
  modified_base 8: mod_base = OTHER; note = 2'-fluoroadenosine phosphorothiorate
  modified_base 16: mod_base = OTHER; note = 2'-Omethylcytosine phosphorothiorate
  modified_base 33: mod_base = OTHER; note = 2'-Omethyluridine phosphorothiorate
  modified_base 37: mod_base = OTHER; note = 2'-Omethyladenosine phosphorothiorate
  modified_base 47: mod_base = OTHER; note = 2'-fluorocytosine
  modified_base 48: mod_base = OTHER; note = 2'-fluorocytosine
  modified_base 60: mod_base = OTHER; note = Cytosine phosphorothiorate
  modified_base 73: mod_base = OTHER; note = Cytosine phosphorothiorate

SEQ ID NO: 8762 - RNA, 75 nt, synthetic construct; identical to SEQ ID NO: 3336
  source 1..75: mol_type = other RNA
  modified_base 1: mod_base = OTHER; note = 2'-fluorocytosine phosphorothiorate
  modified_base 4: mod_base = OTHER; note = 2'-Omethylguanosine phosphorothiorate
  modified_base 8: mod_base = OTHER; note = 2'-Omethyladenosine phosphorothiorate
  modified_base 17: mod_base = OTHER; note = 2'-fluoroguanosine phosphorothiorate
  modified_base 19: mod_base = OTHER; note = 2'-fluorouridine
  modified_base 21: mod_base = OTHER; note = 2'-fluoroguanosine phosphorothiorate
  modified_base 28: mod_base = OTHER; note = 2'-fluoroadenosine
  modified_base 37: mod_base = OTHER; note = 2'-fluoroadenosine
  modified_base 39: mod_base = OTHER; note = 2'-Omethylcytosine phosphorothiorate
  modified_base 41: mod_base = OTHER; note = 2'-fluoroguanosine phosphorothiorate
  modified_base 47: mod_base = OTHER; note = 2'-fluorocytosine
  modified_base 48: mod_base = OTHER; note = 2'-fluorocytosine
  modified_base 49: mod_base = OTHER; note = 2'-fluoroadenosine
  modified_base 53: mod_base = OTHER; note = Uridine phosphorothiorate
  modified_base 55: mod_base = OTHER; note = 2'-fluorocytosine phosphorothiorate
  modified_base 61: mod_base = OTHER; note = Cytosine phosphorothiorate
  modified_base 69: mod_base = OTHER; note = Guanosine phosphorothiorate
  modified_base 72: mod_base = OTHER; note = 2'-Omethylguanosine
  modified_base 73: mod_base = OTHER; note = Cytosine phosphorothiorate
  modified_base 74: mod_base = OTHER; note = 2'-Omethylcytosine

SEQ ID NO: 8763 - RNA, 76 nt, synthetic construct; identical to SEQ ID NO: 625
  source 1..76: mol_type = other RNA
  modified_base 1: mod_base = OTHER; note = 2'-Omethylguanosine
  modified_base 6: mod_base = OTHER; note = 2'-Omethylcytosine phosphorothiorate
  modified_base 11: mod_base = OTHER; note = 2'-fluorocytosine
  modified_base 12: mod_base = OTHER; note = 2'-Omethylguanosine
  modified_base 13: mod_base = OTHER; note = 2'-fluorocytosine
  modified_base 18: mod_base = OTHER; note = Guanosine phosphorothiorate
  modified_base 21: mod_base = OTHER; note = Adenosine phosphorothiorate
  modified_base 22: mod_base = OTHER; note = 2'-Omethylguanosine
  modified_base 23: mod_base = OTHER; note = 2'-Omethylcytosine
  modified_base 24: mod_base = OTHER; note = 2'-Omethylguanosine phosphorothiorate
  modified_base 25: mod_base = OTHER; note = 2'-fluorocytosine
  modified_base 32: mod_base = OTHER; note = 2'-fluorocytosine
  modified_base 34: mod_base = OTHER; note = 2'-fluorouridine
  modified_base 38: mod_base = OTHER; note = 2'-fluoroadenosine
  modified_base 39: mod_base = OTHER; note = 2'-fluorouridine
  modified_base 40: mod_base = OTHER; note = 2'-Omethyluridine
  modified_base 41: mod_base = OTHER; note = 2'-Omethylcytosine
  modified_base 42: mod_base = OTHER; note = 2'-Omethyladenosine phosphorothiorate
  modified_base 44: mod_base = OTHER; note = 2'-Omethyladenosine
  modified_base 48: mod_base = OTHER; note = 2'-fluorouridine phosphorothiorate
  modified_base 49: mod_base = OTHER; note = 2'-fluorocytosine
  modified_base 50: mod_base = OTHER; note = Cytosine phosphorothiorate
  modified_base 51: mod_base = OTHER; note = 2'-Omethylguanosine
  modified_base 55: mod_base = OTHER; note = Uridine phosphorothiorate
  modified_base 56: mod_base = OTHER; note = 2'-Omethylcytosine phosphorothiorate
  modified_base 57: mod_base = OTHER; note = 2'-fluoroguanosine
  modified_base 59: mod_base = OTHER; note = 2'-Omethylguanosine
  modified_base 62: mod_base = OTHER; note = 2'-Omethylcytosine
  modified_base 63: mod_base = OTHER; note = 2'-Omethylcytosine
  modified_base 68: mod_base = OTHER; note = 2'-fluoroguanosine
  modified_base 70: mod_base = OTHER; note = 2'-Omethylguanosine
  modified_base 71: mod_base = OTHER; note = 2'-fluorouridine
  modified_base 73: mod_base = OTHER; note = 2'-fluoroguanosine
  modified_base 74: mod_base = OTHER; note = 2'-Omethylcytosine
  modified_base 75: mod_base = OTHER; note = 2'-Omethylcytosine

SEQ ID NO: 8764 - RNA, 85 nt, synthetic construct; identical to SEQ ID NO: 3297
  source 1..85: mol_type = other RNA
  modified_base 1: mod_base = OTHER; note = 2'-Omethylguanosine
  modified_base 10: mod_base = OTHER; note = 2'-Omethylguanosine
  modified_base 13: mod_base = OTHER; note = 2'-Omethylguanosine
  modified_base 17: mod_base = OTHER; note = Guanosine phosphorothiorate
  modified_base 18: mod_base = OTHER; note = 2'-Omethylguanosine
  modified_base 19: mod_base = OTHER; note = Uridine phosphorothiorate
  modified_base 20: mod_base = OTHER; note = 2'-Omethyluridine
  modified_base 25: mod_base = OTHER; note = 2'-Omethylcytosine
  modified_base 29: mod_base = OTHER; note = 2'-Omethylguanosine
  modified_base 33: mod_base = OTHER; note = 2'-fluorouridine
  modified_base 35: mod_base = OTHER; note = Cytosine phosphorothiorate
  modified_base 37: mod_base = OTHER; note = Adenosine phosphorothiorate
  modified_base 38: mod_base = OTHER; note = Adenosine phosphorothiorate
  modified_base 41: mod_base = OTHER; note = 2'-fluorocytosine phosphorothiorate
  modified_base 43: mod_base = OTHER; note = 2'-Omethyladenosine
  modified_base 44: mod_base = OTHER; note = 2'-fluorouridine
  modified_base 56: mod_base = OTHER; note = Guanosine phosphorothiorate
  modified_base 59: mod_base = OTHER; note = 2'-Omethylcytosine
  modified_base 61: mod_base = OTHER; note = 2'-Omethylguanosine
  modified_base 63: mod_base = OTHER; note = Uridine phosphorothiorate
  modified_base 64: mod_base = OTHER; note = Uridine phosphorothiorate
  modified_base 65: mod_base = OTHER; note = 2'-Omethylcytosine
  modified_base 66: mod_base = OTHER; note = Guanosine phosphorothiorate
  modified_base 71: mod_base = OTHER; note = 2'-Omethylcytosine
  modified_base 72: mod_base = OTHER; note = 2'-fluorouridine
  modified_base 74: mod_base = OTHER; note = 2'-Omethylcytosine
  modified_base 80: mod_base = OTHER; note = 2'-Omethylguanosine
  modified_base 82: mod_base = OTHER; note = 2'-Omethylguanosine

SEQ ID NO: 8765 - RNA, 74 nt, synthetic construct; identical to SEQ ID NO: 3293
  source 1..74: mol_type = other RNA
  modified_base 1: mod_base = OTHER; note = 2'-fluoroadenosine
  modified_base 2: mod_base = OTHER; note = Cytosine phosphorothiorate
  modified_base 4: mod_base = OTHER; note = 2'-fluorouridine
  modified_base 8: mod_base = OTHER; note = Guanosine phosphorothiorate
  modified_base 9: mod_base = OTHER; note = 2'-fluoroguanosine
  modified_base 11: mod_base = OTHER; note = 2'-Omethylguanosine phosphorothiorate
  modified_base 25: mod_base = OTHER; note = Uridine phosphorothiorate
  modified_base 27: mod_base = OTHER; note = 2'-fluorouridine
  modified_base 40: mod_base = OTHER; note = 2'-fluoroguanosine
  modified_base 42: mod_base = OTHER; note = Adenosine phosphorothiorate
  modified_base 43: mod_base = OTHER; note = Guanosine phosphorothiorate
  modified_base 52: mod_base = OTHER; note = 2'-fluorouridine
  modified_base 62: mod_base = OTHER; note = Guanosine phosphorothiorate
  modified_base 65: mod_base = OTHER; note = Guanosine phosphorothiorate
  modified_base 73: mod_base = OTHER; note = 2'-Omethylcytosine phosphorothiorate
  modified_base 74: mod_base = OTHER; note = 2'-Omethyladenosine

SEQ ID NO: 8766 - RNA, 76 nt, synthetic construct; identical to SEQ ID NO: 3295
  source 1..76: mol_type = other RNA
  modified_base 1: mod_base = OTHER; note = Cytosine phosphorothiorate
  modified_base 2: mod_base = OTHER; note = 2'-Omethylcytosine
  modified_base 3: mod_base = OTHER; note = 2'-Omethyluridine
  modified_base 4: mod_base = OTHER; note = 2'-Omethyluridine
  modified_base 7: mod_base = OTHER; note = 2'-fluoroadenosine
  modified_base 9: mod_base = OTHER; note = 2'-fluoroadenosine phosphorothiorate
  modified_base 11: mod_base = OTHER; note = 2'-fluorocytosine
  modified_base 16: mod_base = OTHER; note = 2'-fluorouridine phosphorothiorate
  modified_base 17: mod_base = OTHER; note = 2'-Omethyluridine
  modified_base 25: mod_base = OTHER; note = 2'-fluorocytosine phosphorothiorate
  modified_base 27: mod_base = OTHER; note = 2'-fluoroguanosine phosphorothiorate
  modified_base 30: mod_base = OTHER; note = 2'-fluoroguanosine phosphorothiorate
  modified_base 35: mod_base = OTHER; note = 2'-fluorouridine phosphorothiorate
  modified_base 38: mod_base = OTHER; note = 2'-fluoroadenosine phosphorothiorate
  modified_base 40: mod_base = OTHER; note = 2'-fluorocytosine
  modified_base 46: mod_base = OTHER; note = 2'-fluoroguanosine phosphorothiorate
  modified_base 48: mod_base = OTHER; note = 2'-Omethylcytosine
  modified_base 52: mod_base = OTHER; note = 2'-fluoroguanosine phosphorothiorate
  modified_base 53: mod_base = OTHER; note = 2'-Omethylguanosine
  modified_base 54: mod_base = OTHER; note = Uridine phosphorothiorate
  modified_base 68: mod_base = OTHER; note = 2'-fluoroguanosine
  modified_base 74: mod_base = OTHER; note = 2'-Omethylcytosine phosphorothiorate
  modified_base 75: mod_base = OTHER; note = 2'-fluorocytosine

SEQ ID NO: 8767 - RNA, 76 nt, synthetic construct; identical to SEQ ID NO: 3675
  source 1..76: mol_type = other RNA
  modified_base 1: mod_base = OTHER; note = 2'-Omethylguanosine phosphorothiorate
  modified_base 2: mod_base = OTHER; note = 2'-Omethylcytosine phosphorothiorate
  modified_base 3: mod_base = OTHER; note = 2'-Omethylcytosine
  modified_base 4: mod_base = OTHER; note = 2'-Omethyluridine
  modified_base 5: mod_base = OTHER; note = 2'-Omethylcytosine
  modified_base 6: mod_base = OTHER; note = 2'-Omethylcytosine
  modified_base 16: mod_base = OTHER; note = 2'-Omethyluridine
  modified_base 17: mod_base = OTHER; note = 2'-Omethylguanosine
  modified_base 18: mod_base = OTHER; note = 2'-Omethylguanosine
  modified_base 20: mod_base = OTHER; note = 2'-Omethyluridine
  modified_base 25: mod_base = OTHER; note = 2'-Omethylcytosine
  modified_base 33: mod_base = OTHER; note = 2'-fluorouridine
  modified_base 35: mod_base = OTHER; note = Cytosine phosphorothiorate
  modified_base 37: mod_base = OTHER; note = Adenosine phosphorothiorate
  modified_base 38: mod_base = OTHER; note = Adenosine phosphorothiorate
  modified_base 41: mod_base = OTHER; note = 2'-Omethylcytosine
  modified_base 44: mod_base = OTHER; note = 2'-Omethyladenosine
  modified_base 45: mod_base = OTHER; note = 2'-Omethylguanosine
  modified_base 46: mod_base = OTHER; note = 2'-fluoroguanosine
  modified_base 47: mod_base = OTHER; note = 2'-fluorouridine
  modified_base 48: mod_base = OTHER; note = 2'-fluorouridine
  modified_base 49: mod_base = OTHER; note = 2'-Omethylcytosine
  modified_base 50: mod_base = OTHER; note = 2'-Omethylcytosine
  modified_base 51: mod_base = OTHER; note = 2'-Omethylguanosine
  modified_base 52: mod_base = OTHER; note = 2'-Omethylguanosine
  modified_base 53: mod_base = OTHER; note = 2'-Omethylguanosine
  modified_base 54: mod_base = OTHER; note = 2'-Omethyluridine
  modified_base 56: mod_base = OTHER; note = 2'-Omethylcytosine
  modified_base 59: mod_base = OTHER; note = 2'-Omethylguanosine
  modified_base 73: mod_base = OTHER; note = 2'-Omethylguanosine

SEQ ID NO: 8768 - RNA, 76 nt, synthetic construct; identical to SEQ ID NO: 625
  source 1..76: mol_type = other RNA
  modified_base 1: mod_base = OTHER; note = 2'-Omethylguanosine phosphorothiorate
  modified_base 2: mod_base = OTHER; note = 2'-Omethylguanosine phosphorothiorate
  modified_base 11: mod_base = OTHER; note = Cytosine phosphorothiorate
  modified_base 20: mod_base = OTHER; note = 2'-O-(2-Methoxyethyl) thymine
  modified_base 44: mod_base = OTHER; note = 2'-O-(2-Methoxyethyl) adenosine
  modified_base 45: mod_base = OTHER; note = 2'-fluoroguanosine
  modified_base 48: mod_base = OTHER; note = Uridine phosphorothiorate
  modified_base 49: mod_base = OTHER; note = 2'-O-(2-Methoxyethyl) 5-methylcytosine
  modified_base 74: mod_base = OTHER; note = Cytosine phosphorothiorate
  modified_base 75: mod_base = OTHER; note = 2'-Omethylcytosine phosphorothiorate
  modified_base 76: mod_base = OTHER; note = 2'-Omethyladenosine

SEQ ID NO: 8769 - RNA, 86 nt, synthetic construct; identical to SEQ ID NO: 3290
  source 1..86: mol_type = other RNA
  modified_base 26: mod_base = OTHER; note = 2'-fluoroguanosine

SEQ ID NO: 8770 - RNA, 76 nt, synthetic construct; identical to SEQ ID NO: 625
  source 1..76: mol_type = other RNA
  modified_base 1: mod_base = OTHER; note = 2'-fluoroguanosine
  modified_base 2: mod_base = OTHER; note = 2'-Omethylguanosine
  modified_base 7: mod_base = OTHER; note = Guanosine phosphorothiorate
  modified_base 10: mod_base = OTHER; note = 2'-fluoroguanosine
  modified_base 14: mod_base = OTHER; note = Adenosine phosphorothiorate
  modified_base 15: mod_base = OTHER; note = 2'-Omethyladenosine
  modified_base 18: mod_base = OTHER; note = 2'-fluoroguanosine
  modified_base 19: mod_base = OTHER; note = Adenosine phosphorothiorate
  modified_base 20: mod_base = OTHER; note = 2'-Omethyluridine
  modified_base 22: mod_base = OTHER; note = Guanosine phosphorothiorate
  modified_base 23: mod_base = OTHER; note = 2'-fluorocytosine phosphorothiorate
  modified_base 25: mod_base = OTHER; note = Cytosine phosphorothiorate
  modified_base 26: mod_base = OTHER; note = 2'-fluoroadenosine
  modified_base 28: mod_base = OTHER; note = 2'-fluorouridine
  modified_base 29: mod_base = OTHER; note = 2'-fluoroguanosine
  modified_base 30: mod_base = OTHER; note = 2'-fluoroguanosine
  modified_base 33: mod_base = OTHER; note = Uridine phosphorothiorate
  modified_base 37: mod_base = OTHER; note = Adenosine phosphorothiorate
  modified_base 41: mod_base = OTHER; note = 2'-fluorocytosine
  modified_base 42: mod_base = OTHER; note = 2'-fluoroadenosine
  modified_base 45: mod_base = OTHER; note = 2'-Omethylguanosine
  modified_base 48: mod_base = OTHER; note = 2'-fluorouridine
  modified_base 49: mod_base = OTHER; note = 2'-Omethylcytosine
  modified_base 50: mod_base = OTHER; note = 2'-fluorocytosine phosphorothiorate
  modified_base 52: mod_base = OTHER; note = Guanosine phosphorothiorate
  modified_base 53: mod_base = OTHER; note = 2'-Omethylguanosine
  modified_base 56: mod_base = OTHER; note = 2'-Omethylcytosine phosphorothiorate
  modified_base 57: mod_base = OTHER; note = 2'-fluoroguanosine phosphorothiorate
  modified_base 59: mod_base = OTHER; note = 2'-fluoroguanosine
  modified_base 60: mod_base = OTHER; note = 2'-fluorouridine
  modified_base 62: mod_base = OTHER; note = 2'-fluorocytosine
  modified_base 64: mod_base = OTHER; note = 2'-fluoroguanosine phosphorothiorate
  modified_base 65: mod_base = OTHER; note = Guanosine phosphorothiorate
  modified_base 66: mod_base = OTHER; note = 2'-Omethylcytosine phosphorothiorate
  modified_base 67: mod_base = OTHER; note = 2'-fluoroguanosine
  modified_base 69: mod_base = OTHER; note = Adenosine phosphorothiorate
  modified_base 70: mod_base = OTHER; note = 2'-fluoroguanosine
  modified_base 71: mod_base = OTHER; note = 2'-fluorouridine
  modified_base 73: mod_base = OTHER; note = 2'-fluoroguanosine
  modified_base 74: mod_base = OTHER; note = 2'-Omethylcytosine
  modified_base 75: mod_base = OTHER; note = 2'-Omethylcytosine

SEQ ID NO: 8771 - RNA, 76 nt, synthetic construct; identical to SEQ ID NO: 625
  source 1..76: mol_type = other RNA
  modified_base 1: mod_base = OTHER; note = 2'-Omethylguanosine
  modified_base 2: mod_base = OTHER; note = 2'-Omethylguanosine phosphorothiorate
  modified_base 3: mod_base = OTHER; note = 2'-Omethylcytosine
  modified_base 4: mod_base = OTHER; note = 2'-Omethyluridine
  modified_base 5: mod_base = OTHER; note = 2'-Omethylcytosine
  modified_base 12: mod_base = OTHER; note = 2'-Omethylguanosine
  modified_base 13: mod_base = OTHER; note = 2'-Omethylcytosine
  modified_base 14: mod_base = OTHER; note = 2'-Omethyladenosine
  modified_base 16: mod_base = OTHER; note = 2'-Omethyluridine
  modified_base 18: mod_base = OTHER; note = 2'-fluoroguanosine phosphorothiorate
  modified_base 19: mod_base = OTHER; note = Adenosine phosphorothiorate
  modified_base 21: mod_base = OTHER; note = 2'-Omethyladenosine phosphorothiorate
  modified_base 22: mod_base = OTHER; note = 2'-Omethylguanosine
  modified_base 23: mod_base = OTHER; note = 2'-Omethylcytosine
  modified_base 24: mod_base = OTHER; note = 2'-Omethylguanosine
  modified_base 25: mod_base = OTHER; note = 2'-Omethylcytosine
  modified_base 26: mod_base = OTHER; note = 2'-Omethyladenosine phosphorothiorate
  modified_base 29: mod_base = OTHER; note = 2'-fluoroguanosine phosphorothiorate
  modified_base 30: mod_base = OTHER; note = 2'-Omethylguanosine phosphorothiorate
  modified_base 31: mod_base = OTHER; note = 2'-Omethyladenosine phosphorothiorate
  modified_base 33: mod_base = OTHER; note = 2'-fluorouridine
  modified_base 37: mod_base = OTHER; note = Adenosine phosphorothiorate
  modified_base 38: mod_base = OTHER; note = 2'-Omethyladenosine phosphorothiorate
  modified_base 43: mod_base = OTHER; note = Adenosine phosphorothiorate
  modified_base 44: mod_base = OTHER; note = 2'-Omethyladenosine
  modified_base 45: mod_base = OTHER; note = 2'-Omethylguanosine phosphorothiorate
  modified_base 49: mod_base = OTHER; note = 2'-Omethylcytosine
  modified_base 50: mod_base = OTHER; note = 2'-Omethylcytosine phosphorothiorate
  modified_base 52: mod_base = OTHER; note = 2'-Omethylguanosine
  modified_base 53: mod_base = OTHER; note = 2'-Omethylguanosine phosphorothiorate
  modified_base 55: mod_base = OTHER; note = Uridine phosphorothiorate
  modified_base 59: mod_base = OTHER; note = 2'-Omethylguanosine phosphorothiorate
  modified_base 60: mod_base = OTHER; note = 2'-Omethyluridine phosphorothiorate
  modified_base 61: mod_base = OTHER; note = 2'-Omethylcytosine
  modified_base 62: mod_base = OTHER; note = 2'-Omethylcytosine phosphorothiorate
  modified_base 65: mod_base = OTHER; note = 2'-Omethylguanosine phosphorothiorate
  modified_base 67: mod_base = OTHER; note = Guanosine phosphorothiorate
  modified_base 68: mod_base = OTHER; note = 2'-Omethylguanosine
  modified_base 69: mod_base = OTHER; note = 2'-fluoroadenosine phosphorothiorate
  modified_base 71: mod_base = OTHER; note = 2'-Omethyluridine
  modified_base 73: mod_base = OTHER; note = 2'-Omethylguanosine
  modified_base 74: mod_base = OTHER; note = 2'-Omethylcytosine
  modified_base 75: mod_base = OTHER; note = 2'-fluorocytosine
  modified_base 76: mod_base = OTHER; note = 2'-Omethyladenosine

SEQ ID NO: 8772 - RNA, 76 nt, synthetic construct
  source 1..76: mol_type = other RNA
ggctccgtggcgcaaaggatagcgcattggacttcaaattcaaaggttccgggttcgagtcccggcggagtcgcca

SEQ ID NO: 8773 - RNA, 74 nt, synthetic construct; identical to SEQ ID NO: 3293
  source 1..74: mol_type = other RNA
  modified_base 1: mod_base = OTHER; note = 2'-Omethyladenosine
  modified_base 2: mod_base = OTHER; note = 2'-fluorocytosine
  modified_base 4: mod_base = OTHER; note = 2'-Omethyluridine phosphorothiorate
  modified_base 15: mod_base = OTHER; note = 2'-fluorocytosine
  modified_base 46: mod_base = OTHER; note = 2'-fluorouridine
  modified_base 51: mod_base = OTHER; note = 2'-fluoroguanosine
  modified_base 73: mod_base = OTHER; note = 2'-Omethylcytosine phosphorothiorate
  modified_base 74: mod_base = OTHER; note = 2'-Omethyladenosine

SEQ ID NO: 8774 - RNA, 76 nt, synthetic construct; identical to SEQ ID NO: 3342
  source 1..76: mol_type = other RNA
  modified_base 1: mod_base = OTHER; note = 2'-Omethylguanosine
  modified_base 2: mod_base = OTHER; note = 2'-Omethylguanosine
  modified_base 3: mod_base = OTHER; note = 2'-Omethylcytosine
  modified_base 4: mod_base = OTHER; note = 2'-Omethyluridine
  modified_base 5: mod_base = OTHER; note = 2'-Omethylcytosine
  modified_base 6: mod_base = OTHER; note = 2'-Omethylcytosine
  modified_base 13: mod_base = OTHER; note = 2'-Omethylcytosine
  modified_base 14: mod_base = OTHER; note = 2'-Omethyladenosine
  modified_base 15: mod_base = OTHER; note = 2'-Omethyladenosine
  modified_base 16: mod_base = OTHER; note = 2'-Omethyluridine
  modified_base 17: mod_base = OTHER; note = 2'-Omethylguanosine
  modified_base 18: mod_base = OTHER; note = 2'-Omethylguanosine
  modified_base 19: mod_base = OTHER; note = Adenosine phosphorothiorate
  modified_base 20: mod_base = OTHER; note = 2'-Omethyluridine
  modified_base 21: mod_base = OTHER; note = Adenosine phosphorothiorate
  modified_base 25: mod_base = OTHER; note = 2'-Omethylcytosine
  modified_base 33: mod_base = OTHER; note = Uridine phosphorothiorate
  modified_base 34: mod_base = OTHER; note = 2'-Omethyluridine
  modified_base 35: mod_base = OTHER; note = Cytosine phosphorothiorate
  modified_base 37: mod_base = OTHER; note = Adenosine phosphorothiorate
  modified_base 38: mod_base = OTHER; note = Adenosine phosphorothiorate
  modified_base 49: mod_base = OTHER; note = 2'-Omethylcytosine
  modified_base 50: mod_base = OTHER; note = 2'-Omethylcytosine
  modified_base 51: mod_base = OTHER; note = 2'-Omethylguanosine
  modified_base 52: mod_base = OTHER; note = 2'-Omethylguanosine
  modified_base 53: mod_base = OTHER; note = 2'-Omethylguanosine
  modified_base 54: mod_base = OTHER; note = Uridine phosphorothiorate
  modified_base 55: mod_base = OTHER; note = Uridine phosphorothiorate
  modified_base 61: mod_base = OTHER; note = 2'-Omethylcytosine
  modified_base 65: mod_base = OTHER; note = 2'-Omethylguanosine
  modified_base 73: mod_base = OTHER; note = 2'-Omethylguanosine

SEQ ID NO: 8775 - RNA, 75 nt, synthetic construct; identical to SEQ ID NO: 1045
  source 1..75: mol_type = other RNA
  modified_base 2: mod_base = OTHER; note = 2'-Omethylguanosine phosphorothiorate
  modified_base 12: mod_base = OTHER; note = Guanosine phosphorothiorate
  modified_base 18: mod_base = OTHER; note = 2'-fluoroguanosine
  modified_base 20: mod_base = OTHER; note = 2'-fluoroadenosine
  modified_base 34: mod_base = OTHER; note = Uridine phosphorothiorate
  modified_base 35: mod_base = OTHER; note = 2'-fluorouridine
  modified_base 40: mod_base = OTHER; note = 2'-fluorocytosine phosphorothiorate
  modified_base 41: mod_base = OTHER; note = 2'-Omethylcytosine
  modified_base 47: mod_base = OTHER; note = 2'-fluorouridine
  modified_base 48: mod_base = OTHER; note = 2'-fluorocytosine
  modified_base 51: mod_base = OTHER; note = 2'-fluoroadenosine
  modified_base 54: mod_base = OTHER; note = 2'-fluorouridine phosphorothiorate
  modified_base 62: mod_base = OTHER; note = 2'-fluorocytosine
  modified_base 65: mod_base = OTHER; note = 2'-Omethyluridine phosphorothiorate
  modified_base 66: mod_base = OTHER; note = 2'-fluoroguanosine
  modified_base 74: mod_base = OTHER; note = Cytosine phosphorothiorate

SEQ ID NO: 8776 - RNA, 74 nt, synthetic construct
  source 1..74: mol_type = other RNA
  modified_base 1: mod_base = OTHER; note = 2'-Omethylguanosine
  modified_base 18: mod_base = OTHER; note = 2'-Omethylguanosine
  modified_base 19: mod_base = OTHER; note = 2'-Omethylguanosine
  modified_base 50: mod_base = OTHER; note = 2'-Omethyladenosine
  modified_base 52: mod_base = OTHER; note = 2'-Omethylguanosine
  modified_base 73: mod_base = OTHER; note = 2'-Omethylguanosine
gcctgggtagctcagtcggtagagcatcagactttaaatctgagggtccagggttcaagtccctgtccaggcgc

SEQ ID NO: 8777 - RNA, 76 nt, synthetic construct; identical to SEQ ID NO: 625
  source 1..76: mol_type = other RNA
  modified_base 1: mod_base = OTHER; note = 2'-fluoroguanosine
  modified_base 11: mod_base = OTHER; note = 2'-Omethylcytosine
  modified_base 12: mod_base = OTHER; note = Guanosine phosphorothiorate
  modified_base 13: mod_base = OTHER; note = 2'-Omethylcytosine phosphorothiorate
  modified_base 17: mod_base = OTHER; note = 2'-Omethylguanosine phosphorothiorate
  modified_base 18: mod_base = OTHER; note = 2'-Omethylguanosine
  modified_base 22: mod_base = OTHER; note = Guanosine phosphorothiorate
  modified_base 23: mod_base = OTHER; note = Cytosine phosphorothiorate
  modified_base 24: mod_base = OTHER; note = 2'-Omethylguanosine
  modified_base 25: mod_base = OTHER; note = 2'-fluorocytosine
  modified_base 26: mod_base = OTHER; note = 2'-Omethyladenosine
  modified_base 29: mod_base = OTHER; note = Guanosine phosphorothiorate
  modified_base 30: mod_base = OTHER; note = 2'-Omethylguanosine
  modified_base 33: mod_base = OTHER; note = Uridine phosphorothiorate
  modified_base 34: mod_base = OTHER; note = 2'-Omethyluridine
  modified_base 39: mod_base = OTHER; note = 2'-fluorouridine
  modified_base 41: mod_base = OTHER; note = 2'-Omethylcytosine phosphorothiorate
  modified_base 43: mod_base = OTHER; note = 2'-fluoroadenosine phosphorothiorate
  modified_base 44: mod_base = OTHER; note = 2'-fluoroadenosine
  modified_base 47: mod_base = OTHER; note = 2'-Omethyluridine
  modified_base 54: mod_base = OTHER; note = 2'-fluorouridine phosphorothiorate
  modified_base 56: mod_base = OTHER; note = 2'-fluorocytosine
  modified_base 59: mod_base = OTHER; note = 2'-Omethylguanosine
  modified_base 60: mod_base = OTHER; note = Uridine phosphorothiorate
  modified_base 61: mod_base = OTHER; note = 2'-fluorocytosine
  modified_base 62: mod_base = OTHER; note = 2'-fluorocytosine phosphorothiorate
  modified_base 63: mod_base = OTHER; note = 2'-fluorocytosine phosphorothiorate
  modified_base 64: mod_base = OTHER; note = 2'-Omethylguanosine
  modified_base 65: mod_base = OTHER; note = Guanosine phosphorothiorate
  modified_base 66: mod_base = OTHER; note = 2'-Omethylcytosine
  modified_base 68: mod_base = OTHER; note = 2'-fluoroguanosine
  modified_base 70: mod_base = OTHER; note = 2'-fluoroguanosine
  modified_base 72: mod_base = OTHER; note = Cytosine phosphorothiorate
  modified_base 73: mod_base = OTHER; note = 2'-Omethylguanosine
  modified_base 74: mod_base = OTHER; note = 2'-Omethylcytosine
  modified_base 76: mod_base = OTHER; note = 2'-fluoroadenosine

SEQ ID NO: 8778 - RNA, 75 nt, synthetic construct; identical to SEQ ID NO: 3306
  source 1..75: mol_type = other RNA
  modified_base 1: mod_base = OTHER; note = 2'-Omethylguanosine
  modified_base 2: mod_base = OTHER; note = 2'-Omethyladenosine
  modified_base 3: mod_base = OTHER; note = 2'-Omethylcytosine
  modified_base 4: mod_base = OTHER; note = 2'-Omethylcytosine
  modified_base 5: mod_base = OTHER; note = 2'-Omethyluridine
  modified_base 6: mod_base = OTHER; note = 2'-Omethylcytosine
  modified_base 13: mod_base = OTHER; note = 2'-Omethylcytosine
  modified_base 14: mod_base = OTHER; note = 2'-Omethyladenosine
  modified_base 15: mod_base = OTHER; note = 2'-Omethyladenosine
  modified_base 16: mod_base = OTHER; note = 2'-Omethylcytosine
  modified_base 17: mod_base = OTHER; note = 2'-Omethylguanosine
  modified_base 18: mod_base = OTHER; note = 2'-Omethylguanosine
  modified_base 19: mod_base = OTHER; note = Uridine phosphorothiorate
  modified_base 20: mod_base = OTHER; note = Adenosine phosphorothiorate
  modified_base 24: mod_base = OTHER; note = 2'-Omethylcytosine
  modified_base 32: mod_base = OTHER; note = 2'-fluorouridine
  modified_base 33: mod_base = OTHER; note = 2'-Omethylcytosine
  modified_base 34: mod_base = OTHER; note = Uridine phosphorothiorate
  modified_base 36: mod_base = OTHER; note = Guanosine phosphorothiorate
  modified_base 37: mod_base = OTHER; note = Adenosine phosphorothiorate
  modified_base 40: mod_base = OTHER; note = 2'-Omethyladenosine
  modified_base 41: mod_base = OTHER; note = 2'-Omethylguanosine
  modified_base 42: mod_base = OTHER; note = 2'-Omethyladenosine
  modified_base 43: mod_base = OTHER; note = 2'-Omethyladenosine
  modified_base 48: mod_base = OTHER; note = 2'-Omethylguanosine
  modified_base 49: mod_base = OTHER; note = 2'-Omethylcytosine
  modified_base 51: mod_base = OTHER; note = 2'-Omethyluridine
  modified_base 53: mod_base = OTHER; note = Uridine phosphorothiorate
  modified_base 54: mod_base = OTHER; note = Uridine phosphorothiorate
  modified_base 60: mod_base = OTHER; note = 2'-Omethylcytosine
  modified_base 64: mod_base = OTHER; note = 2'-Omethyluridine
  modified_base 72: mod_base = OTHER; note = 2'-Omethyladenosine

SEQ ID NO: 8779 - RNA, 85 nt, synthetic construct; identical to SEQ ID NO: 3286
  source 1..85: mol_type = other RNA
  modified_base 1: mod_base = OTHER; note = 2'-fluorocytosine phosphorothiorate
  modified_base 2: mod_base = OTHER; note = 2'-Omethylcytosine
  modified_base 11: mod_base = OTHER; note = Cytosine phosphorothiorate
  modified_base 30: mod_base = OTHER; note = 2'-fluoroadenosine
  modified_base 49: mod_base = OTHER; note = 2'-fluorouridine
  modified_base 57: mod_base = OTHER; note = 2'-Omethylcytosine
  modified_base 84: mod_base = OTHER; note = Cytosine phosphorothiorate

SEQ ID NO: 8780 - RNA, 76 nt, synthetic construct; identical to SEQ ID NO: 625
  source 1..76: mol_type = other RNA
  modified_base 1: mod_base = OTHER; note = 2'-Omethylguanosine
  modified_base 2: mod_base = OTHER; note = Guanosine phosphorothiorate
  modified_base 5: mod_base = OTHER; note = 2'-fluorocytosine phosphorothiorate
  modified_base 6: mod_base = OTHER; note = 2'-Omethylcytosine
  modified_base 7: mod_base = OTHER; note = Guanosine phosphorothiorate
  modified_base 10: mod_base = OTHER; note = 2'-fluoroguanosine
  modified_base 11: mod_base = OTHER; note = Cytosine phosphorothiorate
  modified_base 12: mod_base = OTHER; note = 2'-fluoroguanosine
  modified_base 28: mod_base = OTHER; note = 2'-Omethyluridine
  modified_base 29: mod_base = OTHER; note = Guanosine phosphorothiorate
  modified_base 36: mod_base = OTHER; note = Adenosine phosphorothiorate
  modified_base 39: mod_base = OTHER; note = 2'-fluorouridine phosphorothiorate
  modified_base 40: mod_base = OTHER; note = 2'-fluorouridine
  modified_base 41: mod_base = OTHER; note = 2'-fluorocytosine
  modified_base 42: mod_base = OTHER; note = 2'-fluoroadenosine
  modified_base 43: mod_base = OTHER; note = 2'-fluoroadenosine
  modified_base 44: mod_base = OTHER; note = 2'-fluoroadenosine
  modified_base 46: mod_base = OTHER; note = 2'-Omethylguanosine
  modified_base 48: mod_base = OTHER; note = 2'-fluorouridine
  modified_base 52: mod_base = OTHER; note = 2'-Omethylguanosine
  modified_base 53: mod_base = OTHER; note = 2'-fluoroguanosine phosphorothiorate
  modified_base 54: mod_base = OTHER; note = 2'-fluorouridine
  modified_base 57: mod_base = OTHER; note = 2'-Omethylguanosine
  modified_base 61: mod_base = OTHER; note = Cytosine phosphorothiorate
  modified_base 62: mod_base = OTHER; note = 2'-fluorocytosine
  modified_base 65: mod_base = OTHER; note = 2'-Omethylguanosine
  modified_base 66: mod_base = OTHER; note = 2'-fluorocytosine
  modified_base 67: mod_base = OTHER; note = 2'-Omethylguanosine
  modified_base 69: mod_base = OTHER; note = 2'-Omethyladenosine phosphorothiorate
  modified_base 70: mod_base = OTHER; note = 2'-fluoroguanosine phosphorothiorate
  modified_base 71: mod_base = OTHER; note = 2'-Omethyluridine phosphorothiorate
  modified_base 72: mod_base = OTHER; note = 2'-Omethylcytosine

SEQ ID NO: 8781 - RNA, 74 nt, synthetic construct; identical to SEQ ID NO: 3293
  source 1..74: mol_type = other RNA
  modified_base 1: mod_base = OTHER; note = 2'-fluoroadenosine
  modified_base 2: mod_base = OTHER; note = Cytosine phosphorothiorate
  modified_base 6: mod_base = OTHER; note = Guanosine phosphorothiorate
  modified_base 8: mod_base = OTHER; note = Guanosine phosphorothiorate
  modified_base 9: mod_base = OTHER; note = 2'-fluoroguanosine
  modified_base 11: mod_base = OTHER; note = 2'-fluoroguanosine
  modified_base 26: mod_base = OTHER; note = 2'-fluorocytosine
  modified_base 35: mod_base = OTHER; note = 2'-Omethylguanosine
  modified_base 40: mod_base = OTHER; note = 2'-fluoroguanosine
  modified_base 43: mod_base = OTHER; note = 2'-fluoroguanosine
  modified_base 46: mod_base = OTHER; note = Uridine phosphorothiorate
  modified_base 48: mod_base = OTHER; note = Cytosine phosphorothiorate
  modified_base 50: mod_base = OTHER; note = Uridine phosphorothiorate
  modified_base 51: mod_base = OTHER; note = 2'-fluoroguanosine
  modified_base 56: mod_base = OTHER; note = 2'-fluoroadenosine phosphorothiorate
  modified_base 62: mod_base = OTHER; note = 2'-fluoroguanosine
  modified_base 73: mod_base = OTHER; note = Cytosine phosphorothiorate
  modified_base 74: mod_base = OTHER; note = 2'-Omethyladenosine

SEQ ID NO: 8782 - RNA, 76 nt, synthetic construct
  source 1..76: mol_type = other RNA
acacgcgtggcgcaatggatagcgcattggacttcaaattcaaaggttccgggttcgagtcccggcgcgtgtgcca

SEQ ID NO: 8783 - RNA, 76 nt, synthetic construct; identical to SEQ ID NO: 3295
  source 1..76: mol_type = other RNA
  modified_base 1: mod_base = OTHER; note = 2'-Omethylcytosine
  modified_base 2: mod_base = OTHER; note = 2'-fluorocytosine
  modified_base 3: mod_base = OTHER; note = 2'-Omethyluridine
  modified_base 12: mod_base = OTHER; note = 2'-fluorouridine
  modified_base 20: mod_base = OTHER; note = 2'-fluorouridine phosphorothiorate
  modified_base 25: mod_base = OTHER; note = 2'-Omethylcytosine phosphorothiorate
  modified_base 29: mod_base = OTHER; note = Guanosine phosphorothiorate
  modified_base 53: mod_base = OTHER; note = 2'-Omethylguanosine
  modified_base 56: mod_base = OTHER; note = Cytosine phosphorothiorate

SEQ ID NO: 8784 - RNA, 76 nt, synthetic construct; identical to SEQ ID NO: 3490
  source 1..76: mol_type = other RNA
  modified_base 1: mod_base = OTHER; note = 2'-Omethylguanosine
  modified_base 2: mod_base = OTHER; note = 2'-Omethylguanosine
  modified_base 3: mod_base = OTHER; note = 2'-Omethylcytosine
  modified_base 4: mod_base = OTHER; note = 2'-Omethyluridine
  modified_base 5: mod_base = OTHER; note = 2'-Omethylcytosine
  modified_base 6: mod_base = OTHER; note = 2'-Omethylcytosine
  modified_base 10: mod_base = OTHER; note = 2'-Omethylguanosine
  modified_base 11: mod_base = OTHER; note = 2'-Omethylcytosine
  modified_base 12: mod_base = OTHER; note = 2'-Omethylguanosine
  modified_base 13: mod_base = OTHER; note = 2'-Omethylcytosine
  modified_base 16: mod_base = OTHER; note = 2'-Omethyluridine
  modified_base 17: mod_base = OTHER; note = 2'-Omethylguanosine
  modified_base 18: mod_base = OTHER; note = 2'-Omethylguanosine
  modified_base 20: mod_base = OTHER; note = 2'-Omethyluridine
  modified_base 25: mod_base = OTHER; note = 2'-Omethylcytosine
  modified_base 33: mod_base = OTHER; note = 2'-fluorouridine
  modified_base 35: mod_base = OTHER; note = Cytosine phosphorothiorate
  modified_base 37: mod_base = OTHER; note = Adenosine phosphorothiorate
  modified_base 38: mod_base = OTHER; note = Adenosine phosphorothiorate
  modified_base 41: mod_base = OTHER; note = 2'-fluorocytosine
  modified_base 42: mod_base = OTHER; note = 2'-Omethyladenosine
  modified_base 43: mod_base = OTHER; note = 2'-Omethyladenosine
  modified_base 44: mod_base = OTHER; note = 2'-fluoroadenosine
  modified_base 49: mod_base = OTHER; note = 2'-Omethylguanosine
  modified_base 50: mod_base = OTHER; note = 2'-Omethylcytosine
  modified_base 52: mod_base = OTHER; note = 2'-Omethylguanosine
  modified_base 54: mod_base = OTHER; note = 2'-Omethyluridine
  modified_base 55: mod_base = OTHER; note = Uridine phosphorothiorate
  modified_base 56: mod_base = OTHER; note = 2'-Omethylcytosine
  modified_base 57: mod_base = OTHER; note = 2'-fluoroguanosine
  modified_base 59: mod_base = OTHER; note = 2'-Omethylguanosine
  modified_base 61: mod_base = OTHER; note = 2'-Omethylcytosine
  modified_base 65: mod_base = OTHER; note = 2'-Omethylcytosine
  modified_base 73: mod_base = OTHER; note = 2'-Omethylguanosine

SEQ ID NO: 8785 - RNA, 85 nt, synthetic construct; identical to SEQ ID NO: 3297
  source 1..85: mol_type = other RNA
  modified_base 1: mod_base = OTHER; note = 2'-Omethylguanosine
  modified_base 2: mod_base = OTHER; note = 2'-Omethylcytosine

SEQ ID NO: 8786 - RNA, 73 nt, synthetic construct; identical to SEQ ID NO: 935
  source 1..73: mol_type = other RNA
  modified_base 1: mod_base = OTHER; note = 2'-Omethylguanosine phosphorothiorate
  modified_base 2: mod_base = OTHER; note = 2'-Omethylguanosine phosphorothiorate
  modified_base 13: mod_base = OTHER; note = 2'-fluorocytosine
  modified_base 14: mod_base = OTHER; note = 2'-fluoroadenosine
  modified_base 54: mod_base = OTHER; note = 2'-fluorouridine
  modified_base 59: mod_base = OTHER; note = 2'-Omethylguanosine

SEQ ID NO: 8787 - DNA, 76 bp, synthetic construct; identical to SEQ ID NO: 1924
  source 1..76: mol_type = other DNA
  modified_base 1: mod_base = OTHER; note = 2'-Omethylguanosine phosphorothiorate
  modified_base 2: mod_base = OTHER; note = 2'-Omethylguanosine
  modified_base 3: mod_base = OTHER; note = 2'-Omethylcytosine
  modified_base 4: mod_base = OTHER; note = 2'-Omethyluridine
  modified_base 5: mod_base = OTHER; note = 2'-Omethylcytosine
  modified_base 6: mod_base = OTHER; note = 2'-Omethylcytosine
  modified_base 10: mod_base = OTHER; note = 2'-Omethylguanosine
  modified_base 11: mod_base = OTHER; note = 2'-Omethylcytosine
  modified_base 12: mod_base = OTHER; note = Guanosine phosphorothiorate
  modified_base 13: mod_base = OTHER; note = 2'-Omethylcytosine
  modified_base 14: mod_base = OTHER; note = 2'-Omethyladenosine
  modified_base 15: mod_base = OTHER; note = 2'-fluoroadenosine
  modified_base 16: mod_base = OTHER; note = 2'-Omethyluridine
  modified_base 17: mod_base = OTHER; note = Guanosine phosphorothiorate
  modified_base 18: mod_base = OTHER; note = 2'-Omethylguanosine
  modified_base 19: mod_base = OTHER; note = 2'-fluoroadenosine
  modified_base 20: mod_base = OTHER; note = 2'-Omethyluridine
  modified_base 21: mod_base = OTHER; note = Adenosine phosphorothiorate
  modified_base 23: mod_base = OTHER; note = 2'-Omethylcytosine
  modified_base 24: mod_base = OTHER; note = 2'-Omethylguanosine
  modified_base 25: mod_base = OTHER; note = Cytosine phosphorothiorate
  modified_base 33: mod_base = OTHER; note = 2'-fluorouridine
  modified_base 35: mod_base = OTHER; note = Cytosine phosphorothiorate
  modified_base 37: mod_base = OTHER; note = Adenosine phosphorothiorate
  modified_base 38: mod_base = OTHER; note = Adenosine phosphorothiorate
  modified_base 44: mod_base = OTHER; note = Adenosine phosphorothiorate
  modified_base 45: mod_base = OTHER; note = 2'-fluoroguanosine
  modified_base 49: mod_base = OTHER; note = 2'-Omethylcytosine
  modified_base 50: mod_base = OTHER; note = 2'-Omethylcytosine
  modified_base 51: mod_base = OTHER; note = Guanosine phosphorothiorate
  modified_base 52: mod_base = OTHER; note = 2'-Omethylguanosine
  modified_base 53: mod_base = OTHER; note = 2'-Omethylguanosine
  modified_base 54: mod_base = OTHER; note = 2'-Omethyluridine
  modified_base 56: mod_base = OTHER; note = 2'-Omethylcytosine
  modified_base 57: mod_base = OTHER; note = 2'-O-(2-Methoxyethyl) guanosine
  modified_base 59: mod_base = OTHER; note = 2'-Omethylguanosine
  modified_base 61: mod_base = OTHER; note = 2'-Omethylcytosine
  modified_base 62: mod_base = OTHER; note = 2'-Omethylcytosine
  modified_base 63: mod_base = OTHER; note = 2'-fluorocytosine
  modified_base 64: mod_base = OTHER; note = 2'-Omethylguanosine
  modified_base 65: mod_base = OTHER; note = 2'-Omethylguanosine
  modified_base 66: mod_base = OTHER; note = 2'-Omethylcytosine
  modified_base 67: mod_base = OTHER; note = 2'-Omethylguanosine
  modified_base 68: mod_base = OTHER; note = 2'-Omethylguanosine
  modified_base 69: mod_base = OTHER; note = 2'-fluoroadenosine
  modified_base 71: mod_base = OTHER; note = 2'-Omethyluridine
  modified_base 73: mod_base = OTHER; note = 2'-Omethylguanosine
  modified_base 74: mod_base = OTHER; note = Cytosine phosphorothiorate
  modified_base 75: mod_base = OTHER; note = 2'-fluorocytosine phosphorothiorate
  misc_feature 1..21: note = RNA
  misc_feature 22: note = DNA
  misc_feature 23..76: note = RNA

SEQ ID NO: 8788 - RNA, 86 nt, synthetic construct; identical to SEQ ID NO: 3290
  source 1..86: mol_type = other RNA
  modified_base 64: mod_base = OTHER; note = 2'-fluorouridine

SEQ ID NO: 8789 - RNA, 76 nt, synthetic construct; identical to SEQ ID NO: 625
  source 1..76: mol_type = other RNA
  modified_base 1: mod_base = OTHER; note = 2'-Omethylguanosine phosphorothiorate
  modified_base 2: mod_base = OTHER; note = 2'-Omethylguanosine phosphorothiorate
  modified_base 3: mod_base = OTHER; note = 2'-Omethylcytosine phosphorothiorate
  modified_base 4: mod_base = OTHER; note = 2'-Omethyluridine phosphorothiorate
  modified_base 5: mod_base = OTHER; note = 2'-Omethylcytosine phosphorothiorate
  modified_base 6: mod_base = OTHER; note = 2'-Omethylcytosine phosphorothiorate
  modified_base 49: mod_base = OTHER; note = 2'-Omethylcytosine
  modified_base 50: mod_base = OTHER; note = 2'-Omethylcytosine
  modified_base 51: mod_base = OTHER; note = 2'-Omethylguanosine
  modified_base 52: mod_base = OTHER; note = 2'-Omethylguanosine
  modified_base 53: mod_base = OTHER; note = 2'-Omethylguanosine
  modified_base 54: mod_base = OTHER; note = Uridine phosphorothiorate
  modified_base 55: mod_base = OTHER; note = Uridine phosphorothiorate
  modified_base 56: mod_base = OTHER; note = Cytosine phosphorothiorate
  modified_base 57: mod_base = OTHER; note = Guanosine phosphorothiorate

SEQ ID NO: 8790 - RNA, 85 nt, synthetic construct; identical to SEQ ID NO: 3310
  source 1..85: mol_type = other RNA
  modified_base 1: mod_base = OTHER; note = 2'-Omethylcytosine
  modified_base 11: mod_base = OTHER; note = Cytosine phosphorothiorate
  modified_base 26: mod_base = OTHER; note = 2'-Omethyluridine
  modified_base 28: mod_base = OTHER; note = 2'-fluoroguanosine
  modified_base 32: mod_base = OTHER; note = 2'-fluorouridine
  modified_base 36: mod_base = OTHER; note = Guanosine phosphorothiorate
  modified_base 44: mod_base = OTHER; note = 2'-Omethylguanosine
  modified_base 48: mod_base = OTHER; note = Adenosine phosphorothiorate
  modified_base 57: mod_base = OTHER; note = 2'-Omethylcytosine
  modified_base 59: mod_base = OTHER; note = 2'-Omethyluridine
  modified_base 67: mod_base = OTHER; note = Adenosine phosphorothiorate
  modified_base 84: mod_base = OTHER; note = Cytosine phosphorothiorate

SEQ ID NO: 8791 - RNA, 76 nt, synthetic construct; identical to SEQ ID NO: 3289
  source 1..76: mol_type = other RNA
  modified_base 19: mod_base = OTHER; note = 2'-Omethylguanosine
  modified_base 73: mod_base = OTHER; note = 2'-Omethylguanosine

SEQ ID NO: 8792 - DNA, 76 bp, synthetic construct; identical to SEQ ID NO: 1924
  source 1..76: mol_type = other DNA
  modified_base 1: mod_base = OTHER; note = 2'-Omethylguanosine phosphorothiorate
  modified_base 2: mod_base = OTHER; note = 2'-Omethylguanosine phosphorothiorate
  modified_base 4: mod_base = OTHER; note = 2'-fluorouridine
  modified_base 10: mod_base = OTHER; note = 2'-fluoroguanosine phosphorothiorate
  modified_base 11: mod_base = OTHER; note = 2'-Omethylcytosine
  modified_base 14: mod_base = OTHER; note = Adenosine phosphorothiorate
  modified_base 15: mod_base = OTHER; note = 2'-O-(2-Methoxyethyl) adenosine
  modified_base 18: mod_base = OTHER; note = Guanosine phosphorothiorate
  modified_base 19: mod_base = OTHER; note = 2'-fluoroadenosine
  modified_base 21: mod_base = OTHER; note = deoxyadenosine phosphorothiorate
  modified_base 24: mod_base = OTHER; note = Guanosine phosphorothiorate
  modified_base 25: mod_base = OTHER; note = 2'-fluorocytosine
  modified_base 26: mod_base = OTHER; note = Adenosine phosphorothiorate
  modified_base 27: mod_base = OTHER; note = 2'-fluorouridine
  modified_base 31: mod_base = OTHER; note = 2'-fluoroadenosine phosphorothiorate
  modified_base 32: mod_base = OTHER; note = 2'-fluorocytosine phosphorothiorate
  modified_base 39: mod_base = OTHER; note = Uridine phosphorothiorate
  modified_base 40: mod_base = OTHER; note = 2'-O-(2-Methoxyethyl) thymine
  modified_base 43: mod_base = OTHER; note = 2'-Omethyladenosine phosphorothiorate
  modified_base 44: mod_base = OTHER; note = 2'-Omethyladenosine
  modified_base 46: mod_base = OTHER; note = Guanosine phosphorothiorate
  modified_base 48: mod_base = OTHER; note = 2'-fluorouridine
  modified_base 49: mod_base = OTHER; note = Cytosine phosphorothiorate
  modified_base 50: mod_base = OTHER; note = 2'-O-(2-Methoxyethyl) 5-methylcytosine phosphorothiorate
  modified_base 52: mod_base = OTHER; note = 2'-fluoroguanosine
  modified_base 53: mod_base = OTHER; note = Guanosine phosphorothiorate
  modified_base 54: mod_base = OTHER; note = 2'-fluorouridine
  modified_base 55: mod_base = OTHER; note = deoxyuridine phosphorothiorate
  modified_base 60: mod_base = OTHER; note = deoxyuridine phosphorothiorate
  modified_base 61: mod_base = OTHER; note = 2'-O-(2-Methoxyethyl) 5-methylcytosine
  modified_base 62: mod_base = OTHER; note = Cytosine phosphorothiorate
  modified_base 63: mod_base = OTHER; note = 2'-Omethylcytosine
  modified_base 64: mod_base = OTHER; note = 2'-Omethylguanosine
  modified_base 67: mod_base = OTHER; note = 2'-O-(2-Methoxyethyl) guanosine
  modified_base 68: mod_base = OTHER; note = 2'-fluoroguanosine
  modified_base 73: mod_base = OTHER; note = Guanosine phosphorothiorate
  modified_base 74: mod_base = OTHER; note = 2'-Omethylcytosine
  modified_base 75: mod_base = OTHER; note = Cytosine phosphorothiorate
  modified_base 76: mod_base = OTHER; note = 2'-Omethyladenosine
  misc_feature 1..20: note = RNA
  misc_feature 21: note = DNA
  misc_feature 22..54: note = RNA
  misc_feature 55: note = DNA
  misc_feature 56: note = RNA
  misc_feature 57: note = DNA
  misc_feature 58..59: note = RNA
  misc_feature 60: note = DNA
  misc_feature 61..76: note = RNA

SEQ ID NO: 8793 - RNA, 85 nt, synthetic construct; identical to SEQ ID NO: 3288
  source 1..85: mol_type = other RNA
  modified_base 1: mod_base = OTHER; note = 2'-Omethylcytosine phosphorothiorate
  modified_base 16: mod_base = OTHER; note = Guanosine phosphorothiorate
  modified_base 22: mod_base = OTHER; note = 2'-fluoroguanosine
  modified_base 23: mod_base = OTHER; note = Guanosine phosphorothiorate
  modified_base 26: mod_base = OTHER; note = 2'-fluorouridine
  modified_base 27: mod_base = OTHER; note = 2'-Omethyluridine
  modified_base 28: mod_base = OTHER; note = 2'-fluoroguanosine
  modified_base 30: mod_base = OTHER; note = 2'-fluoroadenosine
  modified_base 34: mod_base = OTHER; note = 2'-fluorocytosine
  modified_base 35: mod_base = OTHER; note = Adenosine phosphorothiorate
  modified_base 45: mod_base = OTHER; note = 2'-Omethylguanosine
  modified_base 47: mod_base = OTHER; note = 2'-fluorocytosine
  modified_base 48: mod_base = OTHER; note = 2'-Omethyladenosine
  modified_base 52: mod_base = OTHER; note = 2'-fluoroguanosine phosphorothiorate
  modified_base 53: mod_base = OTHER; note = Uridine phosphorothiorate
  modified_base 55: mod_base = OTHER; note = 2'-Omethylcytosine
  modified_base 57: mod_base = OTHER; note = 2'-Omethylcytosine
  modified_base 84: mod_base = OTHER; note = 2'-fluorocytosine

SEQ ID NO: 8794 - RNA, 73 nt, synthetic construct; identical to SEQ ID NO: 935
  source 1..73: mol_type = other RNA
  modified_base 1: mod_base = OTHER; note = 2'-Omethylguanosine
  modified_base 50: mod_base = OTHER; note = 2'-Omethylcytosine
  modified_base 73: mod_base = OTHER; note = 2'-Omethylguanosine

SEQ ID NO: 8795 - RNA, 86 nt, synthetic construct; identical to SEQ ID NO: 3290
  source 1..86: mol_type = other RNA
  modified_base 23: mod_base = OTHER; note = Guanosine phosphorothiorate

SEQ ID NO: 8796 - RNA, 76 nt, synthetic construct; identical to SEQ ID NO: 3325
  source 1..76: mol_type = other RNA
  modified_base 1: mod_base = OTHER; note = 2'-Omethyluridine
  modified_base 14: mod_base = OTHER; note = 2'-Omethyladenosine
  modified_base 15: mod_base = OTHER; note = 2'-fluoroadenosine
  modified_base 16: mod_base = OTHER; note = 2'-Omethyluridine
  modified_base 17: mod_base = OTHER; note = 2'-Omethylguanosine
  modified_base 18: mod_base = OTHER; note = 2'-Omethylguanosine
  modified_base 19: mod_base = OTHER; note = 2'-fluoroadenosine
  modified_base 20: mod_base = OTHER; note = 2'-Omethyluridine
  modified_base 33: mod_base = OTHER; note = 2'-fluorouridine
  modified_base 35: mod_base = OTHER; note = Cytosine phosphorothiorate
  modified_base 37: mod_base = OTHER; note = Adenosine phosphorothiorate
  modified_base 38: mod_base = OTHER; note = Adenosine phosphorothiorate
  modified_base 41: mod_base = OTHER; note = 2'-Omethylcytosine
  modified_base 42: mod_base = OTHER; note = 2'-Omethyladenosine
  modified_base 43: mod_base = OTHER; note = 2'-Omethyladenosine
  modified_base 44: mod_base = OTHER; note = 2'-Omethyladenosine
  modified_base 50: mod_base = OTHER; note = 2'-Omethylcytosine
  modified_base 52: mod_base = OTHER; note = 2'-Omethylguanosine
  modified_base 73: mod_base = OTHER; note = 2'-Omethylguanosine

SEQ ID NO: 8797 - RNA, 76 nt, synthetic construct; identical to SEQ ID NO: 625
  source 1..76: mol_type = other RNA
  modified_base 1: mod_base = OTHER; note = 2'-Omethylguanosine
  modified_base 10: mod_base = OTHER; note = 2'-Omethylguanosine
  modified_base 13: mod_base = OTHER; note = 2'-Omethylcytosine
  modified_base 17: mod_base = OTHER; note = 2'-Omethylguanosine phosphorothiorate
  modified_base 18: mod_base = OTHER; note = 2'-Omethylguanosine
  modified_base 19: mod_base = OTHER; note = Adenosine phosphorothiorate
  modified_base 20: mod_base = OTHER; note = 2'-Omethyluridine
  modified_base 25: mod_base = OTHER; note = 2'-Omethylcytosine
  modified_base 29: mod_base = OTHER; note = 2'-Omethylguanosine
  modified_base 33: mod_base = OTHER; note = 2'-fluorouridine
  modified_base 35: mod_base = OTHER; note = Cytosine phosphorothiorate
  modified_base 37: mod_base = OTHER; note = Adenosine phosphorothiorate
  modified_base 38: mod_base = OTHER; note = Adenosine phosphorothiorate
  modified_base 41: mod_base = OTHER; note = 2'-Omethylcytosine
  modified_base 43: mod_base = OTHER; note = 2'-Omethyladenosine
  modified_base 44: mod_base = OTHER; note = 2'-fluoroadenosine
  modified_base 46: mod_base = OTHER; note = Guanosine phosphorothiorate
  modified_base 50: mod_base = OTHER; note = 2'-Omethylcytosine
  modified_base 52: mod_base = OTHER; note = 2'-Omethylguanosine
  modified_base 54: mod_base = OTHER; note = Uridine phosphorothiorate
  modified_base 55: mod_base = OTHER; note = Uridine phosphorothiorate
  modified_base 56: mod_base = OTHER; note = 2'-Omethylcytosine
  modified_base 57: mod_base = OTHER; note = Guanosine phosphorothiorate
  modified_base 62: mod_base = OTHER; note = 2'-Omethylcytosine
  modified_base 63: mod_base = OTHER; note = 2'-fluorocytosine
  modified_base 65: mod_base = OTHER; note = 2'-Omethylguanosine
  modified_base 71: mod_base = OTHER; note = 2'-Omethyluridine
  modified_base 73: mod_base = OTHER; note = 2'-Omethylguanosine

SEQ ID NO: 8798 - RNA, 85 nt, synthetic construct; identical to SEQ ID NO: 3288
  source 1..85: mol_type = other RNA
  modified_base 1: mod_base = OTHER; note = 2'-Omethylcytosine
  modified_base 2: mod_base = OTHER; note = 2'-fluorocytosine phosphorothiorate
  modified_base 11: mod_base = OTHER; note = Cytosine phosphorothiorate
  modified_base 20: mod_base = OTHER; note = 2'-fluoroadenosine
  modified_base 22: mod_base = OTHER; note = Guanosine phosphorothiorate
  modified_base 26: mod_base = OTHER; note = 2'-fluorouridine
  modified_base 29: mod_base = OTHER; note = 2'-fluoroguanosine
  modified_base 30: mod_base = OTHER; note = 2'-fluoroadenosine
  modified_base 34: mod_base = OTHER; note = 2'-fluorocytosine
  modified_base 36: mod_base = OTHER; note = Guanosine phosphorothiorate
  modified_base 37: mod_base = OTHER; note = 2'-fluoroadenosine phosphorothiorate
  modified_base 39: mod_base = OTHER; note = Cytosine phosphorothiorate
  modified_base 43: mod_base = OTHER; note = 2'-Omethyluridine
  modified_base 46: mod_base = OTHER; note = 2'-Omethyladenosine
  modified_base 47: mod_base = OTHER; note = 2'-Omethylcytosine
  modified_base 53: mod_base = OTHER; note = 2'-fluorouridine
  modified_base 54: mod_base = OTHER; note = 2'-Omethylcytosine
  modified_base 55: mod_base = OTHER; note = 2'-Omethylcytosine
  modified_base 57: mod_base = OTHER; note = 2'-Omethylcytosine
  modified_base 59: mod_base = OTHER; note = 2'-Omethyluridine
  modified_base 70: mod_base = OTHER; note = 2'-fluorocytosine phosphorothiorate
  modified_base 73: mod_base = OTHER; note = 2'-Omethyladenosine
  modified_base 84: mod_base = OTHER; note = Cytosine phosphorothiorate

SEQ ID NO: 8799 - RNA, 76 nt, synthetic construct; identical to SEQ ID NO: 3295
  source 1..76: mol_type = other RNA
  modified_base 1: mod_base = OTHER; note = 2'-Omethylcytosine
  modified_base 2: mod_base = OTHER; note = 2'-fluorocytosine
  modified_base 5: mod_base = OTHER; note = 2'-fluorocytosine phosphorothiorate
  modified_base 7: mod_base = OTHER; note = 2'-fluoroadenosine
  modified_base 9: mod_base = OTHER; note = 2'-fluoroadenosine
  modified_base 17: mod_base = OTHER; note = 2'-Omethyluridine
  modified_base 26: mod_base = OTHER; note = 2'-fluoroguanosine phosphorothiorate
  modified_base 35: mod_base = OTHER; note = Uridine phosphorothiorate
  modified_base 50: mod_base = OTHER; note = 2'-Omethylcytosine
  modified_base 70: mod_base = OTHER; note = 2'-fluoroadenosine

SEQ ID NO: 8800 - RNA, 85 nt, synthetic construct; identical to SEQ ID NO: 3317
  source 1..85: mol_type = other RNA
  modified_base 1: mod_base = OTHER; note = 2'-Omethylguanosine phosphorothiorate
  modified_base 2: mod_base = OTHER; note = 2'-Omethylcytosine
  modified_base 37: mod_base = OTHER; note = Adenosine phosphorothiorate
  modified_base 46: mod_base = OTHER; note = 2'-fluoroguanosine
  modified_base 47: mod_base = OTHER; note = 2'-Omethylguanosine
  modified_base 50: mod_base = OTHER; note = Cytosine phosphorothiorate
  modified_base 61: mod_base = OTHER; note = Guanosine phosphorothiorate
  modified_base 83: mod_base = OTHER; note = Cytosine phosphorothiorate

SEQ ID NO: 8801 - RNA, 75 nt, synthetic construct; identical to SEQ ID NO: 3336
  source 1..75: mol_type = other RNA
  modified_base 1: mod_base = OTHER; note = Cytosine phosphorothiorate
  modified_base 2: mod_base = OTHER; note = 2'-fluorocytosine phosphorothiorate
  modified_base 3: mod_base = OTHER; note = 2'-Omethyluridine phosphorothiorate
  modified_base 15: mod_base = OTHER; note = 2'-fluorouridine
  modified_base 21: mod_base = OTHER; note = 2'-fluoroguanosine
  modified_base 27: mod_base = OTHER; note = Cytosine phosphorothiorate
  modified_base 35: mod_base = OTHER; note = 2'-fluoroadenosine
  modified_base 46: mod_base = OTHER; note = 2'-fluorouridine
  modified_base 47: mod_base = OTHER; note = 2'-fluorocytosine
  modified_base 73: mod_base = OTHER; note = Cytosine phosphorothiorate
  modified_base 74: mod_base = OTHER; note = Cytosine phosphorothiorate

SEQ ID NO: 8802 - RNA, 73 nt, synthetic construct; identical to SEQ ID NO: 935
  source 1..73: mol_type = other RNA
  modified_base 1: mod_base = OTHER; note = 2'-Omethylguanosine phosphorothiorate
  modified_base 2: mod_base = OTHER; note = 2'-Omethylguanosine phosphorothiorate
  modified_base 45: mod_base = OTHER; note = 2'-fluoroguanosine
  modified_base 57: mod_base = OTHER; note = 2'-fluoroguanosine
  modified_base 68: mod_base = OTHER; note = 2'-fluoroguanosine
  modified_base 70: mod_base = OTHER; note = Guanosine phosphorothiorate
  modified_base 71: mod_base = OTHER; note = 2'-Omethyluridine phosphorothiorate
  modified_base 72: mod_base = OTHER; note = 2'-Omethylcytosine

SEQ ID NO: 8803 - RNA, 76 nt, synthetic construct
  source 1..76: mol_type = other RNA
gcctctgtggcccaatggataaggcatcggccttcaaagccgaggattgtgggttcgagtcccaccagaggtacca

SEQ ID NO: 8804 - RNA, 75 nt, synthetic construct; identical to SEQ ID NO: 1045
  source 1..75: mol_type = other RNA
  modified_base 1: mod_base = OTHER; note = Guanosine phosphorothiorate
  modified_base 2: mod_base = OTHER; note = 2'-Omethylguanosine phosphorothiorate
  modified_base 20: mod_base = OTHER; note = Adenosine phosphorothiorate
  modified_base 21: mod_base = OTHER; note = 2'-fluoroadenosine
  modified_base 28: mod_base = OTHER; note = 2'-fluorouridine
  modified_base 39: mod_base = OTHER; note = 2'-fluorouridine
  modified_base 40: mod_base = OTHER; note = 2'-Omethylcytosine
  modified_base 50: mod_base = OTHER; note = Guanosine phosphorothiorate
  modified_base 51: mod_base = OTHER; note = Adenosine phosphorothiorate
  modified_base 56: mod_base = OTHER; note = 2'-fluoroguanosine
  modified_base 58: mod_base = OTHER; note = 2'-fluoroguanosine
  modified_base 62: mod_base = OTHER; note = 2'-fluorocytosine
  modified_base 63: mod_base = OTHER; note = Guanosine phosphorothiorate
  modified_base 64: mod_base = OTHER; note = Guanosine phosphorothiorate
  modified_base 65: mod_base = OTHER; note = Uridine phosphorothiorate
  modified_base 67: mod_base = OTHER; note = Guanosine phosphorothiorate
  modified_base 73: mod_base = OTHER; note = Cytosine phosphorothiorate
  modified_base 74: mod_base = OTHER; note = 2'-Omethylcytosine

SEQ ID NO: 8805 - RNA, 76 nt, synthetic construct; identical to SEQ ID NO: 625
  source 1..76: mol_type = other RNA
  modified_base 1: mod_base = OTHER; note = 2'-Omethylguanosine phosphorothiorate
  modified_base 2: mod_base = OTHER; note = 2'-Omethylguanosine
  modified_base 3: mod_base = OTHER; note = 2'-fluorocytosine
  modified_base 4: mod_base = OTHER; note = 2'-Omethyluridine
  modified_base 6: mod_base = OTHER; note = Cytosine phosphorothiorate
  modified_base 11: mod_base = OTHER; note = 2'-fluorocytosine
  modified_base 14: mod_base = OTHER; note = 2'-Omethyladenosine
  modified_base 18: mod_base = OTHER; note = Guanosine phosphorothiorate
  modified_base 20: mod_base = OTHER; note = 2'-Omethyluridine phosphorothiorate
  modified_base 22: mod_base = OTHER; note = Guanosine phosphorothiorate
  modified_base 23: mod_base = OTHER; note = 2'-Omethylcytosine phosphorothiorate
  modified_base 26: mod_base = OTHER; note = 2'-Omethyladenosine
  modified_base 27: mod_base = OTHER; note = 2'-Omethyluridine
  modified_base 29: mod_base = OTHER; note = 2'-Omethylguanosine
  modified_base 30: mod_base = OTHER; note = 2'-Omethylguanosine
  modified_base 36: mod_base = OTHER; note = Adenosine phosphorothiorate
  modified_base 39: mod_base = OTHER; note = 2'-Omethyluridine
  modified_base 43: mod_base = OTHER; note = 2'-fluoroadenosine
  modified_base 44: mod_base = OTHER; note = 2'-Omethyladenosine
  modified_base 46: mod_base = OTHER; note = 2'-fluoroguanosine
  modified_base 47: mod_base = OTHER; note = 2'-fluorouridine
  modified_base 53: mod_base = OTHER; note = Guanosine phosphorothiorate
  modified_base 54: mod_base = OTHER; note = 2'-Omethyluridine
  modified_base 63: mod_base = OTHER; note = 2'-fluorocytosine
  modified_base 64: mod_base = OTHER; note = 2'-fluoroguanosine
  modified_base 66: mod_base = OTHER; note = 2'-fluorocytosine
  modified_base 69: mod_base = OTHER; note = 2'-fluoroadenosine
  modified_base 70: mod_base = OTHER; note = 2'-fluoroguanosine
  modified_base 72: mod_base = OTHER; note = 2'-fluorocytosine
  modified_base 73: mod_base = OTHER; note = 2'-fluoroguanosine
  modified_base 74: mod_base = OTHER; note = Cytosine phosphorothiorate
  modified_base 75: mod_base = OTHER; note = 2'-Omethylcytosine
  modified_base 76: mod_base = OTHER; note = 2'-fluoroadenosine

SEQ ID NO: 8806 - RNA, 75 nt, synthetic construct; identical to SEQ ID NO: 3306
  source 1..75: mol_type = other RNA
  modified_base 1: mod_base = OTHER; note = 2'-Omethylguanosine
  modified_base 2: mod_base = OTHER; note = 2'-Omethyladenosine
  modified_base 3: mod_base = OTHER; note = 2'-Omethylcytosine
  modified_base 4: mod_base = OTHER; note = 2'-Omethylcytosine
  modified_base 5: mod_base = OTHER; note = 2'-Omethyluridine
  modified_base 6: mod_base = OTHER; note = 2'-Omethylcytosine
  modified_base 14: mod_base = OTHER; note = 2'-Omethyladenosine
  modified_base 15: mod_base = OTHER; note = 2'-Omethyladenosine
  modified_base 16: mod_base = OTHER; note = 2'-Omethylcytosine
  modified_base 17: mod_base = OTHER; note = 2'-Omethylguanosine
  modified_base 18: mod_base = OTHER; note = 2'-Omethylguanosine
  modified_base 21: mod_base = OTHER; note = 2'-Omethylguanosine
  modified_base 22: mod_base = OTHER; note = 2'-Omethylcytosine
  modified_base 23: mod_base = OTHER; note = 2'-Omethylguanosine
  modified_base 24: mod_base = OTHER; note = 2'-Omethylcytosine
  modified_base 40: mod_base = OTHER; note = 2'-fluoroadenosine
  modified_base 41: mod_base = OTHER; note = 2'-Omethylguanosine
  modified_base 42: mod_base = OTHER; note = 2'-Omethyladenosine
  modified_base 43: mod_base = OTHER; note = 2'-fluoroadenosine
  modified_base 48: mod_base = OTHER; note = 2'-Omethylguanosine
  modified_base 49: mod_base = OTHER; note = 2'-Omethylcytosine
  modified_base 51: mod_base = OTHER; note = 2'-Omethyluridine
  modified_base 53: mod_base = OTHER; note = 2'-Omethyluridine
  modified_base 54: mod_base = OTHER; note = Uridine phosphorothiorate
  modified_base 55: mod_base = OTHER; note = 2'-Omethylcytosine
  modified_base 56: mod_base = OTHER; note = 2'-fluoroadenosine
  modified_base 58: mod_base = OTHER; note = 2'-Omethyladenosine
  modified_base 60: mod_base = OTHER; note = 2'-Omethylcytosine
  modified_base 64: mod_base = OTHER; note = 2'-Omethyluridine
  modified_base 72: mod_base = OTHER; note = 2'-Omethyladenosine

SEQ ID NO: 8807 - RNA, 76 nt, synthetic construct; identical to SEQ ID NO: 3318
  source 1..76: mol_type = other RNA
  modified_base 1: mod_base = OTHER; note = 2'-Omethylcytosine phosphorothiorate
  modified_base 2: mod_base = OTHER; note = 2'-Omethylcytosine phosphorothiorate
  modified_base 41: mod_base = OTHER; note = Cytosine phosphorothiorate
  modified_base 42: mod_base = OTHER; note = 2'-fluorouridine
  modified_base 54: mod_base = OTHER; note = 2'-fluorouridine
  modified_base 69: mod_base = OTHER; note = 2'-fluoroadenosine
  modified_base 74: mod_base = OTHER; note = Cytosine phosphorothiorate
  modified_base 75: mod_base = OTHER; note = 2'-Omethylcytosine

SEQ ID NO: 8808 - RNA, 76 nt, synthetic construct; identical to SEQ ID NO: 3318
  source 1..76: mol_type = other RNA
  modified_base 1: mod_base = OTHER; note = 2'-Omethylcytosine
  modified_base 2: mod_base = OTHER; note = 2'-Omethylcytosine
  modified_base 3: mod_base = OTHER; note = 2'-Omethyluridine
  modified_base 4: mod_base = OTHER; note = 2'-Omethyluridine
  modified_base 5: mod_base = OTHER; note = 2'-Omethylcytosine
  modified_base 6: mod_base = OTHER; note = 2'-Omethylguanosine
  modified_base 13: mod_base = OTHER; note = 2'-Omethylcytosine
  modified_base 14: mod_base = OTHER; note = 2'-Omethyladenosine
  modified_base 15: mod_base = OTHER; note = 2'-Omethylguanosine
  modified_base 16: mod_base = OTHER; note = 2'-Omethyluridine
  modified_base 18: mod_base = OTHER; note = 2'-Omethylguanosine
  modified_base 19: mod_base = OTHER; note = 2'-Omethylguanosine
  modified_base 20: mod_base = OTHER; note = Uridine phosphorothiorate
  modified_base 21: mod_base = OTHER; note = Adenosine phosphorothiorate
  modified_base 25: mod_base = OTHER; note = 2'-Omethylcytosine
  modified_base 33: mod_base = OTHER; note = Uridine phosphorothiorate
  modified_base 34: mod_base = OTHER; note = 2'-Omethylcytosine
  modified_base 35: mod_base = OTHER; note = Uridine phosphorothiorate
  modified_base 37: mod_base = OTHER; note = Guanosine phosphorothiorate
  modified_base 38: mod_base = OTHER; note = Adenosine phosphorothiorate
  modified_base 49: mod_base = OTHER; note = 2'-Omethylguanosine
  modified_base 50: mod_base = OTHER; note = 2'-Omethylcytosine
  modified_base 51: mod_base = OTHER; note = 2'-Omethyluridine
  modified_base 52: mod_base = OTHER; note = 2'-Omethylguanosine
  modified_base 53: mod_base = OTHER; note = 2'-Omethylguanosine
  modified_base 54: mod_base = OTHER; note = Uridine phosphorothiorate
  modified_base 55: mod_base = OTHER; note = Uridine phosphorothiorate
  modified_base 61: mod_base = OTHER; note = 2'-Omethylcytosine
  modified_base 65: mod_base = OTHER; note = 2'-Omethylcytosine
  modified_base 73: mod_base = OTHER; note = 2'-Omethyladenosine

SEQ ID NO: 8809 - RNA, 76 nt, synthetic construct; identical to SEQ ID NO: 625
  source 1..76: mol_type = other RNA
  modified_base 1: mod_base = OTHER; note = 2'-Omethylguanosine
  modified_base 2: mod_base = OTHER; note = 2'-Omethylguanosine
  modified_base 3: mod_base = OTHER; note = 2'-Omethylcytosine
  modified_base 4: mod_base = OTHER; note = 2'-Omethyluridine
  modified_base 5: mod_base = OTHER; note = 2'-Omethylcytosine
  modified_base 6: mod_base = OTHER; note = 2'-Omethylcytosine
  modified_base 10: mod_base = OTHER; note = 2'-fluoroguanosine phosphorothiorate
  modified_base 11: mod_base = OTHER; note = 2'-Omethylcytosine
  modified_base 12: mod_base = OTHER; note = 2'-Omethylguanosine
  modified_base 13: mod_base = OTHER; note = 2'-Omethylcytosine
  modified_base 16: mod_base = OTHER; note = 2'-Omethyluridine
  modified_base 17: mod_base = OTHER; note = 2'-Omethylguanosine
  modified_base 18: mod_base = OTHER; note = 2'-fluoroguanosine phosphorothiorate
  modified_base 19: mod_base = OTHER; note = 2'-fluoroadenosine phosphorothiorate
  modified_base 21: mod_base = OTHER; note = 2'-fluoroadenosine phosphorothiorate
  modified_base 22: mod_base = OTHER; note = 2'-Omethylguanosine
  modified_base 23: mod_base = OTHER; note = 2'-Omethylcytosine
  modified_base 24: mod_base = OTHER; note = 2'-Omethylguanosine
  modified_base 25: mod_base = OTHER; note = 2'-Omethylcytosine
  modified_base 26: mod_base = OTHER; note = Adenosine phosphorothiorate
  modified_base 28: mod_base = OTHER; note = 2'-Omethyluridine
  modified_base 29: mod_base = OTHER; note = 2'-fluoroguanosine phosphorothiorate
  modified_base 30: mod_base = OTHER; note = 2'-Omethylguanosine phosphorothiorate
  modified_base 31: mod_base = OTHER; note = 2'-Omethyladenosine phosphorothiorate
  modified_base 32: mod_base = OTHER; note = 2'-Omethylcytosine phosphorothiorate
  modified_base 33: mod_base = OTHER; note = 2'-fluorouridine
  modified_base 35: mod_base = OTHER; note = 2'-Omethylcytosine phosphorothiorate
  modified_base 36: mod_base = OTHER; note = 2'-Omethyladenosine phosphorothiorate
  modified_base 37: mod_base = OTHER; note = Adenosine phosphorothiorate
  modified_base 38: mod_base = OTHER; note = Adenosine phosphorothiorate
  modified_base 39: mod_base = OTHER; note = Uridine phosphorothiorate
  modified_base 40: mod_base = OTHER; note = 2'-Omethyluridine
  modified_base 41: mod_base = OTHER; note = 2'-Omethylcytosine
  modified_base 42: mod_base = OTHER; note = Adenosine phosphorothiorate
  modified_base 44: mod_base = OTHER; note = 2'-Omethyladenosine
  modified_base 48: mod_base = OTHER; note = 2'-fluorouridine
  modified_base 49: mod_base = OTHER; note = 2'-Omethylcytosine
  modified_base 50: mod_base = OTHER; note = 2'-Omethylcytosine
  modified_base 51: mod_base = OTHER; note = Guanosine phosphorothiorate
  modified_base 52: mod_base = OTHER; note = 2'-Omethylguanosine
  modified_base 53: mod_base = OTHER; note = 2'-Omethylguanosine
  modified_base 55: mod_base = OTHER; note = Uridine phosphorothiorate
  modified_base 56: mod_base = OTHER; note = 2'-Omethylcytosine
  modified_base 57: mod_base = OTHER; note = 2'-Omethylguanosine
  modified_base 59: mod_base = OTHER; note = 2'-Omethylguanosine
  modified_base 61: mod_base = OTHER; note = 2'-Omethylcytosine
  modified_base 62: mod_base = OTHER; note = 2'-Omethylcytosine
  modified_base 63: mod_base = OTHER; note = 2'-fluorocytosine
  modified_base 64: mod_base = OTHER; note = 2'-Omethylguanosine
  modified_base 65: mod_base = OTHER; note = 2'-Omethylguanosine phosphorothiorate
  modified_base 66: mod_base = OTHER; note = 2'-Omethylcytosine
  modified_base 67: mod_base = OTHER; note = 2'-fluoroguanosine
  modified_base 68: mod_base = OTHER; note = 2'-Omethylguanosine
  modified_base 69: mod_base = OTHER; note = 2'-fluoroadenosine phosphorothiorate
  modified_base 70: mod_base = OTHER; note = 2'-fluoroguanosine phosphorothiorate
  modified_base 71: mod_base = OTHER; note = 2'-fluorouridine
  modified_base 72: mod_base = OTHER; note = 2'-fluorocytosine phosphorothiorate
  modified_base 73: mod_base = OTHER; note = 2'-Omethylguanosine
  modified_base 74: mod_base = OTHER; note = 2'-fluorocytosine phosphorothiorate
  modified_base 75: mod_base = OTHER; note = 2'-Omethylcytosine
  modified_base 76: mod_base = OTHER; note = 2'-fluoroadenosine

SEQ ID NO: 8810 - RNA, 75 nt, synthetic construct; identical to SEQ ID NO: 3336
  source 1..75: mol_type = other RNA
  modified_base 9: mod_base = OTHER; note = 2'-fluoroguanosine phosphorothiorate
  modified_base 18: mod_base = OTHER; note = 2'-fluoroguanosine
  modified_base 19: mod_base = OTHER; note = 2'-fluorouridine
  modified_base 25: mod_base = OTHER; note = 2'-Omethyladenosine phosphorothiorate
  modified_base 29: mod_base = OTHER; note = Guanosine phosphorothiorate
  modified_base 42: mod_base = OTHER; note = 2'-fluoroadenosine phosphorothiorate
  modified_base 47: mod_base = OTHER; note = 2'-fluorocytosine
  modified_base 48: mod_base = OTHER; note = Cytosine phosphorothiorate
  modified_base 69: mod_base = OTHER; note = 2'-fluoroguanosine phosphorothiorate
  modified_base 73: mod_base = OTHER; note = Cytosine phosphorothiorate

SEQ ID NO: 8811 - RNA, 85 nt, synthetic construct; identical to SEQ ID NO: 3317
  source 1..85: mol_type = other RNA
  modified_base 1: mod_base = OTHER; note = 2'-Omethylguanosine phosphorothiorate
  modified_base 2: mod_base = OTHER; note = Cytosine phosphorothiorate
  modified_base 3: mod_base = OTHER; note = 2'-Omethyluridine
  modified_base 5: mod_base = OTHER; note = Uridine phosphorothiorate
  modified_base 17: mod_base = OTHER; note = 2'-Omethylguanosine phosphorothiorate
  modified_base 21: mod_base = OTHER; note = 2'-fluoroadenosine
  modified_base 23: mod_base = OTHER; note = 2'-Omethylguanosine phosphorothiorate
  modified_base 28: mod_base = OTHER; note = 2'-fluorouridine
  modified_base 29: mod_base = OTHER; note = 2'-fluoroguanosine
  modified_base 35: mod_base = OTHER; note = 2'-fluorouridine
  modified_base 37: mod_base = OTHER; note = 2'-Omethyladenosine phosphorothiorate
  modified_base 46: mod_base = OTHER; note = 2'-Omethylguanosine phosphorothiorate
  modified_base 50: mod_base = OTHER; note = 2'-Omethylcytosine phosphorothiorate
  modified_base 54: mod_base = OTHER; note = 2'-fluorocytosine
  modified_base 56: mod_base = OTHER; note = Guanosine phosphorothiorate
  modified_base 58: mod_base = OTHER; note = 2'-Omethylguanosine phosphorothiorate
  modified_base 59: mod_base = OTHER; note = 2'-Omethylcytosine
  modified_base 82: mod_base = OTHER; note = Guanosine phosphorothiorate

SEQ ID NO: 8812 - RNA, 85 nt, synthetic construct; identical to SEQ ID NO: 3301
  source 1..85: mol_type = other RNA
  modified_base 1: mod_base = OTHER; note = 2'-Omethylguanosine phosphorothiorate
  modified_base 2: mod_base = OTHER; note = Cytosine phosphorothiorate
  modified_base 4: mod_base = OTHER; note = 2'-Omethylguanosine phosphorothiorate
  modified_base 14: mod_base = OTHER; note = 2'-Omethyladenosine phosphorothiorate
  modified_base 20: mod_base = OTHER; note = Uridine phosphorothiorate
  modified_base 23: mod_base = OTHER; note = 2'-Omethylguanosine phosphorothiorate
  modified_base 27: mod_base = OTHER; note = 2'-fluorouridine
  modified_base 35: mod_base = OTHER; note = 2'-fluorouridine
  modified_base 41: mod_base = OTHER; note = 2'-fluorocytosine
  modified_base 44: mod_base = OTHER; note = 2'-Omethyluridine
  modified_base 46: mod_base = OTHER; note = 2'-Omethylguanosine
  modified_base 48: mod_base = OTHER; note = Guanosine phosphorothiorate
  modified_base 55: mod_base = OTHER; note = 2'-Omethylcytosine phosphorothiorate
  modified_base 57: mod_base = OTHER; note = 2'-Omethylcytosine
  modified_base 59: mod_base = OTHER; note = 2'-Omethylcytosine
  modified_base 68: mod_base = OTHER; note = Adenosine phosphorothiorate
  modified_base 80: mod_base = OTHER; note = Guanosine phosphorothiorate
  modified_base 81: mod_base = OTHER; note = 2'-fluorocytosine
  modified_base 82: mod_base = OTHER; note = 2'-fluoroguanosine
  modified_base 84: mod_base = OTHER; note = 2'-Omethylcytosine phosphorothiorate

SEQ ID NO: 8813 - RNA, 76 nt, synthetic construct; identical to SEQ ID NO: 3316
  source 1..76: mol_type = other RNA
  modified_base 1: mod_base = OTHER; note = 2'-Omethyladenosine phosphorothiorate
  modified_base 2: mod_base = OTHER; note = 2'-Omethylcytosine phosphorothiorate
  modified_base 3: mod_base = OTHER; note = 2'-Omethylcytosine
  modified_base 4: mod_base = OTHER; note = 2'-Omethyladenosine
  modified_base 5: mod_base = OTHER; note = 2'-Omethyladenosine
  modified_base 6: mod_base = OTHER; note = 2'-Omethylcytosine
  modified_base 10: mod_base = OTHER; note = 2'-Omethylguanosine
  modified_base 11: mod_base = OTHER; note = 2'-Omethylcytosine
  modified_base 12: mod_base = OTHER; note = 2'-Omethylguanosine
  modified_base 13: mod_base = OTHER; note = 2'-Omethylcytosine
  modified_base 22: mod_base = OTHER; note = 2'-Omethylguanosine
  modified_base 23: mod_base = OTHER; note = 2'-Omethylcytosine
  modified_base 24: mod_base = OTHER; note = 2'-Omethylguanosine
  modified_base 25: mod_base = OTHER; note = 2'-Omethylcytosine
  modified_base 49: mod_base = OTHER; note = 2'-Omethylcytosine
  modified_base 50: mod_base = OTHER; note = 2'-Omethylcytosine
  modified_base 51: mod_base = OTHER; note = 2'-Omethylguanosine
  modified_base 52: mod_base = OTHER; note = 2'-Omethylguanosine
  modified_base 53: mod_base = OTHER; note = 2'-Omethylguanosine
  modified_base 54: mod_base = OTHER; note = 2'-Omethyluridine
  modified_base 61: mod_base = OTHER; note = 2'-Omethylcytosine
  modified_base 62: mod_base = OTHER; note = 2'-Omethylcytosine
  modified_base 63: mod_base = OTHER; note = 2'-fluorocytosine
  modified_base 64: mod_base = OTHER; note = 2'-Omethylguanosine
  modified_base 65: mod_base = OTHER; note = 2'-Omethylguanosine
  modified_base 66: mod_base = OTHER; note = 2'-Omethylcytosine
  modified_base 67: mod_base = OTHER; note = 2'-Omethylguanosine
  modified_base 68: mod_base = OTHER; note = 2'-Omethyluridine
  modified_base 73: mod_base = OTHER; note = 2'-Omethylguanosine

SEQ ID NO: 8814 - RNA, 76 nt, synthetic construct; identical to SEQ ID NO: 625
  source 1..76: mol_type = other RNA
  modified_base 2: mod_base = OTHER; note = 2'-fluoroguanosine
  modified_base 3: mod_base = OTHER; note = 2'-fluorocytosine
  modified_base 4: mod_base = OTHER; note = 2'-fluorouridine
  modified_base 6: mod_base = OTHER; note = 2'-fluorocytosine
  modified_base 11: mod_base = OTHER; note = 2'-Omethylcytosine
  modified_base 14: mod_base = OTHER; note = Adenosine phosphorothiorate
  modified_base 15: mod_base = OTHER; note = 2'-Omethyladenosine
  modified_base 17: mod_base = OTHER; note = Guanosine phosphorothiorate
  modified_base 18: mod_base = OTHER; note = 2'-fluoroguanosine
  modified_base 22: mod_base = OTHER; note = 2'-Omethylguanosine phosphorothiorate
  modified_base 24: mod_base = OTHER; note = 2'-Omethylguanosine
  modified_base 26: mod_base = OTHER; note = 2'-Omethyladenosine
  modified_base 27: mod_base = OTHER; note = Uridine phosphorothiorate
  modified_base 28: mod_base = OTHER; note = 2'-Omethyluridine
  modified_base 29: mod_base = OTHER; note = Guanosine phosphorothiorate
  modified_base 30: mod_base = OTHER; note = 2'-Omethylguanosine phosphorothiorate
  modified_base 31: mod_base = OTHER; note = 2'-Omethyladenosine
  modified_base 32: mod_base = OTHER; note = 2'-fluorocytosine
  modified_base 34: mod_base = OTHER; note = 2'-Omethyluridine
  modified_base 39: mod_base = OTHER; note = 2'-Omethyluridine
  modified_base 47: mod_base = OTHER; note = 2'-fluorouridine
  modified_base 48: mod_base = OTHER; note = 2'-fluorouridine
  modified_base 49: mod_base = OTHER; note = 2'-Omethylcytosine
  modified_base 50: mod_base = OTHER; note = 2'-Omethylcytosine phosphorothiorate
  modified_base 51: mod_base = OTHER; note = 2'-Omethylguanosine
  modified_base 52: mod_base = OTHER; note = 2'-Omethylguanosine
  modified_base 54: mod_base = OTHER; note = 2'-Omethyluridine phosphorothiorate
  modified_base 55: mod_base = OTHER; note = Uridine phosphorothiorate
  modified_base 56: mod_base = OTHER; note = 2'-Omethylcytosine
  modified_base 57: mod_base = OTHER; note = 2'-fluoroguanosine
  modified_base 61: mod_base = OTHER; note = Cytosine phosphorothiorate
  modified_base 63: mod_base = OTHER; note = 2'-fluorocytosine
  modified_base 67: mod_base = OTHER; note = 2'-Omethylguanosine
  modified_base 71: mod_base = OTHER; note = 2'-Omethyluridine
  modified_base 72: mod_base = OTHER; note = 2'-fluorocytosine

SEQ ID NO: 8815 - RNA, 86 nt, synthetic construct; identical to SEQ ID NO: 3290
  source 1..86: mol_type = other RNA
  modified_base 77: mod_base = OTHER; note = Cytosine phosphorothiorate

SEQ ID NO: 8816 - RNA, 85 nt, synthetic construct; identical to SEQ ID NO: 3297
  source 1..85: mol_type = other RNA
  modified_base 1: mod_base = OTHER; note = 2'-Omethylguanosine
  modified_base 19: mod_base = OTHER; note = 2'-fluorouridine
  modified_base 20: mod_base = OTHER; note = 2'-Omethyluridine phosphorothiorate
  modified_base 21: mod_base = OTHER; note = 2'-fluoroadenosine
  modified_base 22: mod_base = OTHER; note = 2'-Omethyladenosine
  modified_base 40: mod_base = OTHER; note = 2'-fluorocytosine
  modified_base 41: mod_base = OTHER; note = 2'-Omethylcytosine
  modified_base 42: mod_base = OTHER; note = 2'-Omethyladenosine
  modified_base 43: mod_base = OTHER; note = 2'-Omethyladenosine
  modified_base 82: mod_base = OTHER; note = 2'-Omethylguanosine

SEQ ID NO: 8817 - RNA, 74 nt, synthetic construct; identical to SEQ ID NO: 766
  source 1..74: mol_type = other RNA
  modified_base 1: mod_base = OTHER; note = 2'-Omethylguanosine
  modified_base 14: mod_base = OTHER; note = 2'-Omethyladenosine
  modified_base 16: mod_base = OTHER; note = 2'-Omethyluridine
  modified_base 17: mod_base = OTHER; note = 2'-Omethylguanosine
  modified_base 18: mod_base = OTHER; note = 2'-Omethylguanosine
  modified_base 19: mod_base = OTHER; note = 2'-fluoroadenosine
  modified_base 20: mod_base = OTHER; note = 2'-Omethyluridine
  modified_base 73: mod_base = OTHER; note = 2'-Omethylguanosine

SEQ ID NO: 8818 - RNA, 86 nt, synthetic construct
  source 1..86: mol_type = other RNA
accaggatggccgagtggttaaggcgttggacttcagatccaatggacatatgtcctcgtgggttcgaaccccactcctggtacca

SEQ ID NO: 8819 - RNA, 85 nt, synthetic construct; identical to SEQ ID NO: 3317
  source 1..85: mol_type = other RNA
  modified_base 1: mod_base = OTHER; note = 2'-Omethylguanosine phosphorothiorate
  modified_base 2: mod_base = OTHER; note = 2'-Omethylcytosine
  modified_base 10: mod_base = OTHER; note = 2'-fluoroguanosine
  modified_base 19: mod_base = OTHER; note = Uridine phosphorothiorate
  modified_base 28: mod_base = OTHER; note = 2'-Omethyluridine
  modified_base 34: mod_base = OTHER; note = 2'-fluorocytosine
  modified_base 37: mod_base = OTHER; note = 2'-fluoroadenosine phosphorothiorate
  modified_base 42: mod_base = OTHER; note = 2'-fluoroadenosine
  modified_base 45: mod_base = OTHER; note = 2'-Omethylguanosine phosphorothiorate
  modified_base 46: mod_base = OTHER; note = 2'-Omethylguanosine phosphorothiorate
  modified_base 52: mod_base = OTHER; note = Cytosine phosphorothiorate
  modified_base 61: mod_base = OTHER; note = 2'-fluoroguanosine
  modified_base 62: mod_base = OTHER; note = Guanosine phosphorothiorate
  modified_base 80: mod_base = OTHER; note = 2'-Omethylguanosine phosphorothiorate
  modified_base 84: mod_base = OTHER; note = 2'-fluorocytosine

SEQ ID NO: 8820 - RNA, 76 nt, synthetic construct; identical to SEQ ID NO: 3289
  source 1..76: mol_type = other RNA
  modified_base 1: mod_base = OTHER; note = 2'-Omethylguanosine
  modified_base 2: mod_base = OTHER; note = 2'-Omethylcytosine
  modified_base 3: mod_base = OTHER; note = 2'-Omethylcytosine
  modified_base 4: mod_base = OTHER; note = 2'-Omethyluridine
  modified_base 5: mod_base = OTHER; note = 2'-Omethylguanosine
  modified_base 6: mod_base = OTHER; note = 2'-Omethylguanosine
  modified_base 16: mod_base = OTHER; note = 2'-Omethyluridine
  modified_base 18: mod_base = OTHER; note = 2'-Omethylguanosine
  modified_base 19: mod_base = OTHER; note = 2'-Omethylguanosine
  modified_base 33: mod_base = OTHER; note = 2'-fluorouridine
  modified_base 35: mod_base = OTHER; note = Uridine phosphorothiorate
  modified_base 37: mod_base = OTHER; note = Adenosine phosphorothiorate
  modified_base 38: mod_base = OTHER; note = Adenosine phosphorothiorate
  modified_base 44: mod_base = OTHER; note = 2'-Omethylguanosine
  modified_base 45: mod_base = OTHER; note = 2'-Omethylguanosine
  modified_base 46: mod_base = OTHER; note = 2'-fluoroguanosine
  modified_base 47: mod_base = OTHER; note = 2'-fluorouridine
  modified_base 48: mod_base = OTHER; note = 2'-fluorocytosine
  modified_base 56: mod_base = OTHER; note = 2'-Omethylcytosine
  modified_base 59: mod_base = OTHER; note = 2'-Omethylguanosine
  modified_base 61: mod_base = OTHER; note = 2'-Omethylcytosine
  modified_base 62: mod_base = OTHER; note = 2'-Omethylcytosine
  modified_base 63: mod_base = OTHER; note = 2'-fluorocytosine
  modified_base 64: mod_base = OTHER; note = 2'-Omethyluridine
  modified_base 65: mod_base = OTHER; note = 2'-Omethylguanosine
  modified_base 66: mod_base = OTHER; note = 2'-Omethyluridine
  modified_base 67: mod_base = OTHER; note = 2'-Omethylcytosine
  modified_base 68: mod_base = OTHER; note = 2'-Omethylcytosine
  modified_base 73: mod_base = OTHER; note = 2'-Omethylguanosine

SEQ ID NO: 8821 - RNA, 76 nt, synthetic construct; identical to SEQ ID NO: 625
  source 1..76: mol_type = other RNA
  modified_base 2: mod_base = OTHER; note = 2'-fluoroguanosine
  modified_base 3: mod_base = OTHER; note = 2'-fluorocytosine
  modified_base 4: mod_base = OTHER; note = 2'-Omethyluridine
  modified_base 6: mod_base = OTHER; note = 2'-fluorocytosine
  modified_base 9: mod_base = OTHER; note = Guanosine phosphorothiorate
  modified_base 10: mod_base = OTHER; note = 2'-Omethylguanosine
  modified_base 12: mod_base = OTHER; note = 2'-fluoroguanosine
  modified_base 18: mod_base = OTHER; note = 2'-Omethylguanosine phosphorothiorate
  modified_base 19: mod_base = OTHER; note = Adenosine phosphorothiorate
  modified_base 20: mod_base = OTHER; note = 2'-Omethyluridine phosphorothiorate
  modified_base 22: mod_base = OTHER; note = 2'-Omethylguanosine
  modified_base 23: mod_base = OTHER; note = 2'-Omethylcytosine
  modified_base 24: mod_base = OTHER; note = 2'-Omethylguanosine
  modified_base 27: mod_base = OTHER; note = 2'-fluorouridine
  modified_base 31: mod_base = OTHER; note = 2'-fluoroadenosine
  modified_base 32: mod_base = OTHER; note = 2'-fluorocytosine
  modified_base 34: mod_base = OTHER; note = 2'-Omethyluridine
  modified_base 37: mod_base = OTHER; note = Adenosine phosphorothiorate
  modified_base 38: mod_base = OTHER; note = 2'-Omethyladenosine
  modified_base 39: mod_base = OTHER; note = 2'-fluorouridine
  modified_base 40: mod_base = OTHER; note = 2'-fluorouridine
  modified_base 41: mod_base = OTHER; note = Cytosine phosphorothiorate
  modified_base 42: mod_base = OTHER; note = 2'-Omethyladenosine
  modified_base 43: mod_base = OTHER; note = Adenosine phosphorothiorate
  modified_base 44: mod_base = OTHER; note = 2'-Omethyladenosine
  modified_base 45: mod_base = OTHER; note = 2'-fluoroguanosine
  modified_base 49: mod_base = OTHER; note = 2'-Omethylcytosine phosphorothiorate
  modified_base 50: mod_base = OTHER; note = 2'-fluorocytosine
  modified_base 52: mod_base = OTHER; note = Guanosine phosphorothiorate
  modified_base 54: mod_base = OTHER; note = 2'-fluorouridine
  modified_base 58: mod_base = OTHER; note = Adenosine phosphorothiorate
  modified_base 59: mod_base = OTHER; note = 2'-Omethylguanosine phosphorothiorate
  modified_base 60: mod_base = OTHER; note = 2'-fluorouridine
  modified_base 62: mod_base = OTHER; note = 2'-fluorocytosine
  modified_base 63: mod_base = OTHER; note = 2'-fluorocytosine
  modified_base 64: mod_base = OTHER; note = 2'-fluoroguanosine
  modified_base 69: mod_base = OTHER; note = 2'-Omethyladenosine
  modified_base 72: mod_base = OTHER; note = Cytosine phosphorothiorate
  modified_base 75: mod_base = OTHER; note = 2'-fluorocytosine

SEQ ID NO: 8822 - RNA, 76 nt, synthetic construct; identical to SEQ ID NO: 625
  source 1..76: mol_type = other RNA
  modified_base 3: mod_base = OTHER; note = 2'-fluorocytosine
  modified_base 5: mod_base = OTHER; note = 2'-fluorocytosine
  modified_base 6: mod_base = OTHER; note = Cytosine phosphorothiorate
  modified_base 15: mod_base = OTHER; note = 2'-Omethyladenosine
  modified_base 22: mod_base = OTHER; note = 2'-fluoroguanosine
  modified_base 23: mod_base = OTHER; note = 2'-Omethylcytosine
  modified_base 24: mod_base = OTHER; note = 2'-Omethylguanosine
  modified_base 25: mod_base = OTHER; note = 2'-Omethylcytosine
  modified_base 27: mod_base = OTHER; note = 2'-Omethyluridine
  modified_base 32: mod_base = OTHER; note = 2'-fluorocytosine
  modified_base 40: mod_base = OTHER; note = Uridine phosphorothiorate
  modified_base 41: mod_base = OTHER; note = 2'-fluorocytosine
  modified_base 44: mod_base = OTHER; note = 2'-fluoroadenosine phosphorothiorate
  modified_base 45: mod_base = OTHER; note = 2'-fluoroguanosine
  modified_base 48: mod_base = OTHER; note = Uridine phosphorothiorate
  modified_base 50: mod_base = OTHER; note = 2'-Omethylcytosine
  modified_base 51: mod_base = OTHER; note = Guanosine phosphorothiorate
  modified_base 52: mod_base = OTHER; note = 2'-fluoroguanosine
  modified_base 54: mod_base = OTHER; note = Uridine phosphorothiorate
  modified_base 55: mod_base = OTHER; note = Uridine phosphorothiorate
  modified_base 56: mod_base = OTHER; note = 2'-fluorocytosine
  modified_base 57: mod_base = OTHER; note = 2'-Omethylguanosine
  modified_base 59: mod_base = OTHER; note = Guanosine phosphorothiorate
  modified_base 60: mod_base = OTHER; note = 2'-fluorouridine
  modified_base 61: mod_base = OTHER; note = 2'-fluorocytosine
  modified_base 62: mod_base = OTHER; note = 2'-fluorocytosine
  modified_base 65: mod_base = OTHER; note = 2'-Omethylguanosine
  modified_base 66: mod_base = OTHER; note = 2'-Omethylcytosine
  modified_base 67: mod_base = OTHER; note = 2'-Omethylguanosine
  modified_base 68: mod_base = OTHER; note = 2'-Omethylguanosine
  modified_base 69: mod_base = OTHER; note = Adenosine phosphorothiorate
  modified_base 70: mod_base = OTHER; note = 2'-fluoroguanosine phosphorothiorate
  modified_base 72: mod_base = OTHER; note = 2'-Omethylcytosine
  modified_base 73: mod_base = OTHER; note = Guanosine phosphorothiorate
  modified_base 74: mod_base = OTHER; note = 2'-Omethylcytosine

SEQ ID NO: 8823 - RNA, 75 nt, synthetic construct; identical to SEQ ID NO: 3299
  source 1..75: mol_type = other RNA
  modified_base 13: mod_base = OTHER; note = 2'-fluoroadenosine phosphorothiorate
  modified_base 20: mod_base = OTHER; note = 2'-fluoroadenosine
  modified_base 22: mod_base = OTHER; note = 2'-fluoroadenosine
  modified_base 27: mod_base = OTHER; note = Cytosine phosphorothiorate
  modified_base 39: mod_base = OTHER; note = 2'-fluorocytosine
  modified_base 45: mod_base = OTHER; note = 2'-fluoroguanosine
  modified_base 48: mod_base = OTHER; note = 2'-fluorocytosine phosphorothiorate
  modified_base 52: mod_base = OTHER; note = 2'-fluoroguanosine
  modified_base 58: mod_base = OTHER; note = 2'-Omethylguanosine phosphorothiorate
  modified_base 74: mod_base = OTHER; note = Cytosine phosphorothiorate

SEQ ID NO: 8824 - RNA, 75 nt, synthetic construct; identical to SEQ ID NO: 3299
  source 1..75: mol_type = other RNA
  modified_base 1: mod_base = OTHER; note = 2'-Omethylcytosine phosphorothiorate
  modified_base 2: mod_base = OTHER; note = Cytosine phosphorothiorate
  modified_base 4: mod_base = OTHER; note = Guanosine phosphorothiorate
  modified_base 6: mod_base = OTHER; note = 2'-Omethylguanosine
  modified_base 14: mod_base = OTHER; note = 2'-fluoroguanosine
  modified_base 19: mod_base = OTHER; note = 2'-fluorouridine
  modified_base 23: mod_base = OTHER; note = 2'-fluoroguanosine
  modified_base 29: mod_base = OTHER; note = 2'-fluoroguanosine
  modified_base 40: mod_base = OTHER; note = 2'-fluorouridine
  modified_base 45: mod_base = OTHER; note = 2'-fluoroguanosine
  modified_base 47: mod_base = OTHER; note = Cytosine phosphorothiorate
  modified_base 49: mod_base = OTHER; note = Adenosine phosphorothiorate
  modified_base 59: mod_base = OTHER; note = Uridine phosphorothiorate
  modified_base 64: mod_base = OTHER; note = 2'-fluoroguanosine
  modified_base 68: mod_base = OTHER; note = 2'-Omethyladenosine
  modified_base 72: mod_base = OTHER; note = Guanosine phosphorothiorate
  modified_base 74: mod_base = OTHER; note = 2'-Omethylcytosine

SEQ ID NO: 8825 - RNA, 85 nt, synthetic construct; identical to SEQ ID NO: 3288
  source 1..85: mol_type = other RNA
  modified_base 1: mod_base = OTHER; note = 2'-Omethylcytosine phosphorothiorate
  modified_base 3: mod_base = OTHER; note = 2'-Omethyladenosine
  modified_base 14: mod_base = OTHER; note = Guanosine phosphorothiorate
  modified_base 34: mod_base = OTHER; note = Cytosine phosphorothiorate
  modified_base 36: mod_base = OTHER; note = 2'-fluoroguanosine
  modified_base 49: mod_base = OTHER; note = Uridine phosphorothiorate
  modified_base 54: mod_base = OTHER; note = 2'-fluorocytosine
  modified_base 58: mod_base = OTHER; note = 2'-fluoroguanosine
  modified_base 62: mod_base = OTHER; note = Guanosine phosphorothiorate
  modified_base 84: mod_base = OTHER; note = 2'-fluorocytosine

SEQ ID NO: 8826 - RNA, 76 nt, synthetic construct; identical to SEQ ID NO: 625
  source 1..76: mol_type = other RNA
  modified_base 1: mod_base = OTHER; note = 2'-Omethylguanosine
  modified_base 2: mod_base = OTHER; note = 2'-Omethylguanosine
  modified_base 3: mod_base = OTHER; note = 2'-Omethylcytosine
  modified_base 4: mod_base = OTHER; note = 2'-Omethyluridine
  modified_base 5: mod_base = OTHER; note = 2'-Omethylcytosine
  modified_base 6: mod_base = OTHER; note = 2'-Omethylcytosine
  modified_base 10: mod_base = OTHER; note = 2'-Omethylguanosine
  modified_base 11: mod_base = OTHER; note = 2'-Omethylcytosine
  modified_base 12: mod_base = OTHER; note = 2'-Omethylguanosine
  modified_base 13: mod_base = OTHER; note = 2'-Omethylcytosine
  modified_base 14: mod_base = OTHER; note = 2'-Omethyladenosine
  modified_base 15: mod_base = OTHER; note = 2'-fluoroadenosine
  modified_base 16: mod_base = OTHER; note = 2'-Omethyluridine
  modified_base 17: mod_base = OTHER; note = 2'-Omethylguanosine
  modified_base 18: mod_base = OTHER; note = 2'-Omethylguanosine
  modified_base 19: mod_base = OTHER; note = 2'-fluoroadenosine
  modified_base 20: mod_base = OTHER; note = 2'-Omethyluridine
  modified_base 21: mod_base = OTHER; note = 2'-fluoroadenosine
  modified_base 22: mod_base = OTHER; note = 2'-Omethylguanosine
  modified_base 23: mod_base = OTHER; note = 2'-Omethylcytosine
  modified_base 24: mod_base = OTHER; note = 2'-Omethylguanosine
  modified_base 25: mod_base = OTHER; note = 2'-Omethylcytosine
  modified_base 38: mod_base = OTHER; note = Adenosine phosphorothiorate
  modified_base 39: mod_base = OTHER; note = Uridine phosphorothiorate
  modified_base 40: mod_base = OTHER; note = 2'-fluorouridine
  modified_base 43: mod_base = OTHER; note = 2'-Omethyladenosine
  modified_base 44: mod_base = OTHER; note = 2'-Omethyladenosine
  modified_base 45: mod_base = OTHER; note = 2'-Omethylguanosine
  modified_base 46: mod_base = OTHER; note = 2'-fluoroguanosine
  modified_base 48: mod_base = OTHER; note = 2'-fluorouridine
  modified_base 49: mod_base = OTHER; note = 2'-Omethylcytosine
  modified_base 50: mod_base = OTHER; note = 2'-Omethylcytosine
  modified_base 54: mod_base = OTHER; note = Uridine phosphorothiorate
  modified_base 55: mod_base = OTHER; note = Uridine phosphorothiorate
  modified_base 56: mod_base = OTHER; note = 2'-Omethylcytosine
  modified_base 57: mod_base = OTHER; note = Guanosine phosphorothiorate
  modified_base 61: mod_base = OTHER; note = 2'-Omethylcytosine
  modified_base 62: mod_base = OTHER; note = 2'-Omethylcytosine
  modified_base 63: mod_base = OTHER; note = 2'-fluorocytosine
  modified_base 64: mod_base = OTHER; note = 2'-Omethylguanosine
  modified_base 65: mod_base = OTHER; note = 2'-Omethylguanosine
  modified_base 66: mod_base = OTHER; note = 2'-Omethylcytosine
  modified_base 67: mod_base = OTHER; note = 2'-Omethylguanosine
  modified_base 68: mod_base = OTHER; note = 2'-Omethylguanosine
  modified_base 69: mod_base = OTHER; note = 2'-Omethyladenosine

SEQ ID NO: 8827 - RNA, 76 nt, synthetic construct; identical to SEQ ID NO: 3419
  source 1..76: mol_type = other RNA
  modified_base 1: mod_base = OTHER; note = 2'-Omethylguanosine
  modified_base 17: mod_base = OTHER; note = 2'-Omethylguanosine
  modified_base 18: mod_base = OTHER; note = 2'-Omethylguanosine
  modified_base 50: mod_base = OTHER; note = 2'-Omethylcytosine
  modified_base 52: mod_base = OTHER; note = 2'-Omethylguanosine
  modified_base 73: mod_base = OTHER; note = 2'-Omethylguanosine

SEQ ID NO: 8828 - RNA, 85 nt, synthetic construct; identical to SEQ ID NO: 3288
  source 1..85: mol_type = other RNA
  modified_base 1: mod_base = OTHER; note = 2'-Omethylcytosine
  modified_base 4: mod_base = OTHER; note = 2'-fluoroguanosine
  modified_base 14: mod_base = OTHER; note = Guanosine phosphorothiorate
  modified_base 15: mod_base = OTHER; note = 2'-fluorouridine phosphorothiorate
  modified_base 25: mod_base = OTHER; note = 2'-fluoroguanosine
  modified_base 26: mod_base = OTHER; note = 2'-Omethyluridine phosphorothiorate
  modified_base 30: mod_base = OTHER; note = 2'-fluoroadenosine
  modified_base 34: mod_base = OTHER; note = 2'-fluorocytosine
  modified_base 39: mod_base = OTHER; note = Cytosine phosphorothiorate
  modified_base 45: mod_base = OTHER; note = Guanosine phosphorothiorate
  modified_base 48: mod_base = OTHER; note = 2'-Omethyladenosine
  modified_base 53: mod_base = OTHER; note = 2'-Omethyluridine
  modified_base 55: mod_base = OTHER; note = Cytosine phosphorothiorate
  modified_base 56: mod_base = OTHER; note = 2'-Omethylguanosine
  modified_base 57: mod_base = OTHER; note = 2'-Omethylcytosine
  modified_base 61: mod_base = OTHER; note = Guanosine phosphorothiorate
  modified_base 75: mod_base = OTHER; note = 2'-fluorouridine
  modified_base 80: mod_base = OTHER; note = 2'-fluoroguanosine phosphorothiorate
  modified_base 84: mod_base = OTHER; note = 2'-Omethylcytosine

SEQ ID NO: 8829 - RNA, 75 nt, synthetic construct; identical to SEQ ID NO: 3311
  source 1..75: mol_type = other RNA
  modified_base 1: mod_base = OTHER; note = 2'-Omethylguanosine phosphorothiorate
  modified_base 2: mod_base = OTHER; note = 2'-Omethylguanosine phosphorothiorate
  modified_base 3: mod_base = OTHER; note = 2'-fluorouridine phosphorothiorate
  modified_base 7: mod_base = OTHER; note = 2'-fluoroadenosine
  modified_base 12: mod_base = OTHER; note = 2'-fluoroguanosine phosphorothiorate
  modified_base 18: mod_base = OTHER; note = 2'-Omethylguanosine
  modified_base 19: mod_base = OTHER; note = 2'-fluorouridine
  modified_base 20: mod_base = OTHER; note = Adenosine phosphorothiorate
  modified_base 21: mod_base = OTHER; note = 2'-fluoroadenosine
  modified_base 22: mod_base = OTHER; note = 2'-fluoroguanosine
  modified_base 24: mod_base = OTHER; note = 2'-fluoroadenosine
  modified_base 28: mod_base = OTHER; note = 2'-fluorouridine phosphorothiorate
  modified_base 36: mod_base = OTHER; note = 2'-fluoroadenosine
  modified_base 38: mod_base = OTHER; note = 2'-fluoroadenosine
  modified_base 43: mod_base = OTHER; note = 2'-fluoroguanosine
  modified_base 44: mod_base = OTHER; note = 2'-Omethylcytosine
  modified_base 52: mod_base = OTHER; note = 2'-fluoroguanosine
  modified_base 57: mod_base = OTHER; note = Adenosine phosphorothiorate
  modified_base 61: mod_base = OTHER; note = 2'-fluorouridine
  modified_base 62: mod_base = OTHER; note = Cytosine phosphorothiorate
  modified_base 64: mod_base = OTHER; note = Guanosine phosphorothiorate
  modified_base 65: mod_base = OTHER; note = Uridine phosphorothiorate
  modified_base 66: mod_base = OTHER; note = 2'-fluoroguanosine
  modified_base 68: mod_base = OTHER; note = Adenosine phosphorothiorate
  modified_base 69: mod_base = OTHER; note = 2'-fluoroadenosine
  modified_base 74: mod_base = OTHER; note = Cytosine phosphorothiorate
  modified_base 75: mod_base = OTHER; note = 2'-fluoroadenosine

SEQ ID NO: 8830 - RNA, 76 nt, synthetic construct; identical to SEQ ID NO: 3295
  source 1..76: mol_type = other RNA
  modified_base 1: mod_base = OTHER; note = 2'-Omethylcytosine phosphorothiorate
  modified_base 2: mod_base = OTHER; note = 2'-Omethylcytosine
  modified_base 3: mod_base = OTHER; note = 2'-Omethyluridine
  modified_base 9: mod_base = OTHER; note = 2'-fluoroadenosine phosphorothiorate
  modified_base 10: mod_base = OTHER; note = 2'-fluoroguanosine phosphorothiorate
  modified_base 11: mod_base = OTHER; note = 2'-fluorocytosine
  modified_base 16: mod_base = OTHER; note = 2'-Omethyluridine
  modified_base 17: mod_base = OTHER; note = 2'-Omethyluridine
  modified_base 24: mod_base = OTHER; note = 2'-fluoroguanosine phosphorothiorate
  modified_base 25: mod_base = OTHER; note = 2'-Omethylcytosine phosphorothiorate
  modified_base 27: mod_base = OTHER; note = 2'-fluoroguanosine
  modified_base 29: mod_base = OTHER; note = Guanosine phosphorothiorate
  modified_base 35: mod_base = OTHER; note = 2'-fluorouridine phosphorothiorate
  modified_base 37: mod_base = OTHER; note = 2'-fluoroguanosine phosphorothiorate
  modified_base 43: mod_base = OTHER; note = 2'-fluorouridine phosphorothiorate
  modified_base 46: mod_base = OTHER; note = 2'-fluoroguanosine phosphorothiorate
  modified_base 47: mod_base = OTHER; note = 2'-Omethyluridine phosphorothiorate
  modified_base 52: mod_base = OTHER; note = 2'-Omethylguanosine
  modified_base 53: mod_base = OTHER; note = Guanosine phosphorothiorate
  modified_base 74: mod_base = OTHER; note = Cytosine phosphorothiorate
  modified_base 75: mod_base = OTHER; note = 2'-fluorocytosine

SEQ ID NO: 8831 - RNA, 75 nt, synthetic construct; identical to SEQ ID NO: 1045
  source 1..75: mol_type = other RNA
  modified_base 1: mod_base = OTHER; note = 2'-Omethylguanosine phosphorothiorate
  modified_base 2: mod_base = OTHER; note = 2'-Omethylguanosine phosphorothiorate
  modified_base 3: mod_base = OTHER; note = 2'-Omethyluridine phosphorothiorate
  modified_base 18: mod_base = OTHER; note = 2'-Omethylguanosine phosphorothiorate
  modified_base 34: mod_base = OTHER; note = 2'-Omethyluridine
  modified_base 51: mod_base = OTHER; note = 2'-Omethyladenosine phosphorothiorate
  modified_base 52: mod_base = OTHER; note = 2'-Omethylguanosine phosphorothiorate
  modified_base 53: mod_base = OTHER; note = 2'-Omethyluridine
  modified_base 54: mod_base = OTHER; note = 2'-Omethyluridine phosphorothiorate
  modified_base 59: mod_base = OTHER; note = 2'-fluorouridine
  modified_base 60: mod_base = OTHER; note = 2'-Omethylcytosine
  modified_base 61: mod_base = OTHER; note = 2'-Omethyluridine
  modified_base 66: mod_base = OTHER; note = 2'-Omethylguanosine
  modified_base 72: mod_base = OTHER; note = 2'-Omethyluridine
  modified_base 74: mod_base = OTHER; note = 2'-Omethylcytosine phosphorothiorate

SEQ ID NO: 8832 - RNA, 76 nt, synthetic construct; identical to SEQ ID NO: 3295
  source 1..76: mol_type = other RNA
  modified_base 1: mod_base = OTHER; note = 2'-Omethylcytosine
  modified_base 2: mod_base = OTHER; note = 2'-Omethylcytosine
  modified_base 8: mod_base = OTHER; note = 2'-Omethyluridine
  modified_base 9: mod_base = OTHER; note = 2'-fluoroadenosine
  modified_base 12: mod_base = OTHER; note = 2'-fluorouridine phosphorothiorate
  modified_base 17: mod_base = OTHER; note = 2'-Omethyluridine
  modified_base 23: mod_base = OTHER; note = 2'-fluoroadenosine
  modified_base 30: mod_base = OTHER; note = 2'-fluoroguanosine phosphorothiorate
  modified_base 38: mod_base = OTHER; note = Adenosine phosphorothiorate
  modified_base 40: mod_base = OTHER; note = Cytosine phosphorothiorate
  modified_base 43: mod_base = OTHER; note = 2'-fluorouridine phosphorothiorate
  modified_base 49: mod_base = OTHER; note = 2'-Omethylguanosine
  modified_base 52: mod_base = OTHER; note = 2'-fluoroguanosine
  modified_base 54: mod_base = OTHER; note = 2'-fluorouridine phosphorothiorate
  modified_base 61: mod_base = OTHER; note = 2'-fluorocytosine
  modified_base 67: mod_base = OTHER; note = 2'-fluorocytosine
  modified_base 74: mod_base = OTHER; note = 2'-fluorocytosine
  modified_base 75: mod_base = OTHER; note = 2'-fluorocytosine

SEQ ID NO: 8833 - RNA, 76 nt, synthetic construct; identical to SEQ ID NO: 3318
  source 1..76: mol_type = other RNA
  modified_base 1: mod_base = OTHER; note = 2'-Omethylcytosine
  modified_base 2: mod_base = OTHER; note = 2'-Omethylcytosine
  modified_base 3: mod_base = OTHER; note = 2'-Omethyluridine
  modified_base 4: mod_base = OTHER; note = 2'-Omethyluridine
  modified_base 5: mod_base = OTHER; note = 2'-Omethylcytosine

SEQ ID NO: 8834 - RNA, 73 nt, synthetic construct; identical to SEQ ID NO: 935
  source 1..73: mol_type = other RNA
  modified_base 1: mod_base = OTHER; note = 2'-Omethylguanosine phosphorothiorate
  modified_base 2: mod_base = OTHER; note = 2'-Omethylguanosine
  modified_base 3: mod_base = OTHER; note = 2'-Omethylcytosine
  modified_base 4: mod_base = OTHER; note = 2'-Omethyluridine
  modified_base 5: mod_base = OTHER; note = 2'-Omethylcytosine
  modified_base 6: mod_base = OTHER; note = 2'-Omethylcytosine
  modified_base 44: mod_base = OTHER; note = 2'-Omethyladenosine
  modified_base 45: mod_base = OTHER; note = 2'-Omethylguanosine
  modified_base 46: mod_base = OTHER; note = 2'-fluoroguanosine
  modified_base 48: mod_base = OTHER; note = 2'-fluorouridine
  modified_base 73: mod_base = OTHER; note = 2'-Omethylguanosine

SEQ ID NO: 8835 - RNA, 76 nt, synthetic construct; identical to SEQ ID NO: 625
  source 1..76: mol_type = other RNA
  modified_base 1: mod_base = OTHER; note = 2'-Omethylguanosine
  modified_base 10: mod_base = OTHER; note = 2'-Omethylguanosine
  modified_base 13: mod_base = OTHER; note = 2'-Omethylcytosine
  modified_base 18: mod_base = OTHER; note = 2'-Omethylguanosine
  modified_base 19: mod_base = OTHER; note = Adenosine phosphorothiorate
  modified_base 20: mod_base = OTHER; note = 2'-Omethyluridine
  modified_base 25: mod_base = OTHER; note = 2'-Omethylcytosine
  modified_base 29: mod_base = OTHER; note = 2'-Omethylguanosine
  modified_base 33: mod_base = OTHER; note = 2'-fluorouridine
  modified_base 35: mod_base = OTHER; note = Cytosine phosphorothiorate
  modified_base 37: mod_base = OTHER; note = Adenosine phosphorothiorate
  modified_base 38: mod_base = OTHER; note = Adenosine phosphorothiorate
  modified_base 41: mod_base = OTHER; note = 2'-Omethylcytosine
  modified_base 43: mod_base = OTHER; note = 2'-Omethyladenosine
  modified_base 44: mod_base = OTHER; note = 2'-fluoroadenosine
  modified_base 46: mod_base = OTHER; note = Guanosine phosphorothiorate
  modified_base 50: mod_base = OTHER; note = 2'-Omethylcytosine
  modified_base 52: mod_base = OTHER; note = 2'-Omethylguanosine
  modified_base 54: mod_base = OTHER; note = Uridine phosphorothiorate
  modified_base 55: mod_base = OTHER; note = Uridine phosphorothiorate
  modified_base 56: mod_base = OTHER; note = 2'-Omethylcytosine
  modified_base 57: mod_base = OTHER; note = Guanosine phosphorothiorate
  modified_base 62: mod_base = OTHER; note = 2'-Omethylcytosine
  modified_base 63: mod_base = OTHER; note = 2'-fluorocytosine
  modified_base 65: mod_base = OTHER; note = 2'-Omethylguanosine
  modified_base 71: mod_base = OTHER; note = 2'-Omethyluridine
  modified_base 73: mod_base = OTHER; note = 2'-Omethylguanosine

SEQ ID NO: 8836 - RNA, 76 nt, synthetic construct; identical to SEQ ID NO: 625
  source 1..76: mol_type = other RNA
  modified_base 1: mod_base = OTHER; note = 2'-Omethylguanosine
  modified_base 10: mod_base = OTHER; note = 2'-Omethylguanosine
  modified_base 13: mod_base = OTHER; note = 2'-Omethylcytosine
  modified_base 17: mod_base = OTHER; note = 2'-Omethylguanosine
  modified_base 18: mod_base = OTHER; note = 2'-Omethylguanosine
  modified_base 19: mod_base = OTHER; note = Adenosine phosphorothiorate
  modified_base 20: mod_base = OTHER; note = 2'-Omethyluridine
  modified_base 25: mod_base = OTHER; note = 2'-Omethylcytosine
  modified_base 29: mod_base = OTHER; note = 2'-Omethylguanosine
  modified_base 33: mod_base = OTHER; note = 2'-fluorouridine
  modified_base 35: mod_base = OTHER; note = Cytosine phosphorothiorate
  modified_base 37: mod_base = OTHER; note = Adenosine phosphorothiorate
  modified_base 38: mod_base = OTHER; note = Adenosine phosphorothiorate
  modified_base 41: mod_base = OTHER; note = 2'-fluorocytosine
  modified_base 43: mod_base = OTHER; note = 2'-Omethyladenosine
  modified_base 44: mod_base = OTHER; note = 2'-fluoroadenosine
  modified_base 46: mod_base = OTHER; note = Guanosine phosphorothiorate
  modified_base 50: mod_base = OTHER; note = 2'-Omethylcytosine
  modified_base 52: mod_base = OTHER; note = 2'-Omethylguanosine
  modified_base 54: mod_base = OTHER; note = Uridine phosphorothiorate
  modified_base 55: mod_base = OTHER; note = Uridine phosphorothiorate
  modified_base 56: mod_base = OTHER; note = 2'-Omethylcytosine
  modified_base 57: mod_base = OTHER; note = Guanosine phosphorothiorate
  modified_base 62: mod_base = OTHER; note = 2'-Omethylcytosine
  modified_base 63: mod_base = OTHER; note = 2'-fluorocytosine
  modified_base 65: mod_base = OTHER; note = 2'-Omethylguanosine
  modified_base 71: mod_base = OTHER; note = 2'-Omethyluridine
  modified_base 73: mod_base = OTHER; note = 2'-Omethylguanosine

SEQ ID NO: 8837 - RNA, 76 nt, synthetic construct; identical to SEQ ID NO: 3329
  source 1..76: mol_type = other RNA
  modified_base 1: mod_base = OTHER; note = 2'-Omethylguanosine
  modified_base 2: mod_base = OTHER; note = 2'-Omethylguanosine
  modified_base 3: mod_base = OTHER; note = 2'-Omethylcytosine
  modified_base 4: mod_base = OTHER; note = 2'-Omethylcytosine
  modified_base 5: mod_base = OTHER; note = 2'-Omethylcytosine
  modified_base 6: mod_base = OTHER; note = 2'-Omethylcytosine
  modified_base 14: mod_base = OTHER; note = 2'-Omethyladenosine
  modified_base 15: mod_base = OTHER; note = 2'-Omethyladenosine
  modified_base 16: mod_base = OTHER; note = 2'-Omethyluridine
  modified_base 17: mod_base = OTHER; note = 2'-Omethylguanosine
  modified_base 18: mod_base = OTHER; note = 2'-Omethylguanosine
  modified_base 20: mod_base = OTHER; note = 2'-Omethyluridine
  modified_base 25: mod_base = OTHER; note = 2'-Omethylcytosine
  modified_base 33: mod_base = OTHER; note = 2'-fluorouridine
  modified_base 35: mod_base = OTHER; note = Cytosine phosphorothiorate
  modified_base 37: mod_base = OTHER; note = Adenosine phosphorothiorate
  modified_base 38: mod_base = OTHER; note = Adenosine phosphorothiorate
  modified_base 41: mod_base = OTHER; note = 2'-fluorocytosine
  modified_base 42: mod_base = OTHER; note = 2'-Omethyladenosine
  modified_base 43: mod_base = OTHER; note = 2'-Omethyladenosine
  modified_base 44: mod_base = OTHER; note = 2'-fluoroadenosine
  modified_base 49: mod_base = OTHER; note = 2'-Omethylcytosine
  modified_base 50: mod_base = OTHER; note = 2'-Omethylcytosine
  modified_base 52: mod_base = OTHER; note = 2'-Omethylguanosine
  modified_base 54: mod_base = OTHER; note = 2'-Omethyluridine
  modified_base 55: mod_base = OTHER; note = Uridine phosphorothiorate
  modified_base 56: mod_base = OTHER; note = 2'-Omethylcytosine
  modified_base 57: mod_base = OTHER; note = 2'-fluoroguanosine
  modified_base 59: mod_base = OTHER; note = 2'-Omethylguanosine
  modified_base 61: mod_base = OTHER; note = 2'-Omethylcytosine
  modified_base 62: mod_base = OTHER; note = 2'-Omethylcytosine
  modified_base 63: mod_base = OTHER; note = 2'-fluorocytosine
  modified_base 64: mod_base = OTHER; note = 2'-Omethylguanosine
  modified_base 65: mod_base = OTHER; note = 2'-Omethylguanosine
  modified_base 73: mod_base = OTHER; note = 2'-Omethylguanosine

SEQ ID NO: 8838 - RNA, 75 nt, synthetic construct; identical to SEQ ID NO: 3306
  source 1..75: mol_type = other RNA
  modified_base 1: mod_base = OTHER; note = 2'-Omethylguanosine
  modified_base 2: mod_base = OTHER; note = 2'-Omethyladenosine
  modified_base 3: mod_base = OTHER; note = 2'-Omethylcytosine
  modified_base 4: mod_base = OTHER; note = 2'-Omethylcytosine
  modified_base 5: mod_base = OTHER; note = 2'-Omethyluridine
  modified_base 6: mod_base = OTHER; note = 2'-Omethylcytosine
  modified_base 10: mod_base = OTHER; note = 2'-Omethylguanosine
  modified_base 11: mod_base = OTHER; note = 2'-Omethylcytosine
  modified_base 12: mod_base = OTHER; note = 2'-Omethylguanosine
  modified_base 13: mod_base = OTHER; note = 2'-Omethylcytosine
  modified_base 21: mod_base = OTHER; note = 2'-Omethylguanosine
  modified_base 22: mod_base = OTHER; note = 2'-Omethylcytosine
  modified_base 23: mod_base = OTHER; note = 2'-Omethylguanosine
  modified_base 24: mod_base = OTHER; note = 2'-Omethylcytosine
  modified_base 48: mod_base = OTHER; note = 2'-Omethylguanosine
  modified_base 49: mod_base = OTHER; note = 2'-Omethylcytosine
  modified_base 50: mod_base = OTHER; note = 2'-Omethylguanosine
  modified_base 51: mod_base = OTHER; note = 2'-Omethyluridine
  modified_base 52: mod_base = OTHER; note = 2'-Omethylguanosine

SEQ ID NO: 8839 - RNA, 75 nt, synthetic construct; identical to SEQ ID NO: 1045
  source 1..75: mol_type = other RNA
  modified_base 2: mod_base = OTHER; note = 2'-Omethylguanosine phosphorothiorate
  modified_base 3: mod_base = OTHER; note = 2'-Omethyluridine phosphorothiorate
  modified_base 5: mod_base = OTHER; note = Cytosine phosphorothiorate
  modified_base 6: mod_base = OTHER; note = 2'-Omethylcytosine
  modified_base 14: mod_base = OTHER; note = 2'-Omethyladenosine
  modified_base 15: mod_base = OTHER; note = 2'-Omethyladenosine
  modified_base 16: mod_base = OTHER; note = 2'-Omethyluridine
  modified_base 18: mod_base = OTHER; note = 2'-Omethylguanosine
  modified_base 23: mod_base = OTHER; note = 2'-Omethylcytosine
  modified_base 28: mod_base = OTHER; note = 2'-Omethyluridine
  modified_base 31: mod_base = OTHER; note = 2'-Omethyladenosine phosphorothiorate
  modified_base 32: mod_base = OTHER; note = 2'-Omethylcytosine phosphorothiorate
  modified_base 33: mod_base = OTHER; note = 2'-Omethyluridine phosphorothiorate
  modified_base 49: mod_base = OTHER; note = 2'-fluorocytosine
  modified_base 50: mod_base = OTHER; note = 2'-Omethylguanosine
  modified_base 53: mod_base = OTHER; note = 2'-Omethyluridine phosphorothiorate
  modified_base 55: mod_base = OTHER; note = 2'-Omethylcytosine
  modified_base 66: mod_base = OTHER; note = 2'-Omethylguanosine
  modified_base 72: mod_base = OTHER; note = 2'-Omethyluridine
  modified_base 73: mod_base = OTHER; note = Cytosine phosphorothiorate
  modified_base 74: mod_base = OTHER; note = 2'-Omethylcytosine phosphorothiorate
  modified_base 75: mod_base = OTHER; note = 2'-Omethyladenosine

SEQ ID NO: 8840 - RNA, 74 nt, synthetic construct; identical to SEQ ID NO: 3293
  source 1..74: mol_type = other RNA
  modified_base 1: mod_base = OTHER; note = 2'-Omethyladenosine phosphorothiorate
  modified_base 2: mod_base = OTHER; note = Cytosine phosphorothiorate
  modified_base 5: mod_base = OTHER; note = 2'-Omethylcytosine phosphorothiorate
  modified_base 25: mod_base = OTHER; note = 2'-fluorouridine
  modified_base 60: mod_base = OTHER; note = Adenosine phosphorothiorate
  modified_base 73: mod_base = OTHER; note = 2'-Omethylcytosine phosphorothiorate
  modified_base 74: mod_base = OTHER; note = 2'-Omethyladenosine

SEQ ID NO: 8841 - RNA, 73 nt, synthetic construct; identical to SEQ ID NO: 935
  source 1..73: mol_type = other RNA
  modified_base 1: mod_base = OTHER; note = 2'-Omethylguanosine phosphorothiorate
  modified_base 2: mod_base = OTHER; note = 2'-Omethylguanosine phosphorothiorate
  modified_base 25: mod_base = OTHER; note = Cytosine phosphorothiorate
  modified_base 43: mod_base = OTHER; note = 2'-fluoroadenosine
  modified_base 55: mod_base = OTHER; note = Uridine phosphorothiorate

SEQ ID NO: 8842 - RNA, 85 nt, synthetic construct; identical to SEQ ID NO: 3288
  source 1..85: mol_type = other RNA
  modified_base 1: mod_base = OTHER; note = 2'-Omethylcytosine phosphorothiorate
  modified_base 2: mod_base = OTHER; note = Cytosine phosphorothiorate
  modified_base 11: mod_base = OTHER; note = Cytosine phosphorothiorate
  modified_base 27: mod_base = OTHER; note = 2'-fluorouridine
  modified_base 34: mod_base = OTHER; note = 2'-fluorocytosine
  modified_base 54: mod_base = OTHER; note = 2'-fluorocytosine
  modified_base 64: mod_base = OTHER; note = Uridine phosphorothiorate
  modified_base 76: mod_base = OTHER; note = 2'-fluorocytosine
  modified_base 84: mod_base = OTHER; note = 2'-fluorocytosine

SEQ ID NO: 8843 - RNA, 76 nt, synthetic construct; identical to SEQ ID NO: 625
  source 1..76: mol_type = other RNA
  modified_base 1: mod_base = OTHER; note = 2'-Omethylguanosine phosphorothiorate
  modified_base 2: mod_base = OTHER; note = 2'-Omethylguanosine
  modified_base 3: mod_base = OTHER; note = 2'-Omethylcytosine
  modified_base 4: mod_base = OTHER; note = 2'-Omethyluridine
  modified_base 5: mod_base = OTHER; note = 2'-Omethylcytosine
  modified_base 6: mod_base = OTHER; note = 2'-Omethylcytosine
  modified_base 22: mod_base = OTHER; note = 2'-Omethylguanosine
  modified_base 23: mod_base = OTHER; note = 2'-Omethylcytosine
  modified_base 24: mod_base = OTHER; note = 2'-Omethylguanosine
  modified_base 25: mod_base = OTHER; note = 2'-Omethylcytosine
  modified_base 49: mod_base = OTHER; note = 2'-Omethylcytosine
  modified_base 50: mod_base = OTHER; note = 2'-Omethylcytosine
  modified_base 51: mod_base = OTHER; note = 2'-Omethylguanosine
  modified_base 52: mod_base = OTHER; note = 2'-Omethylguanosine
  modified_base 53: mod_base = OTHER; note = 2'-Omethylguanosine
  modified_base 61: mod_base = OTHER; note = 2'-Omethylcytosine
  modified_base 62: mod_base = OTHER; note = 2'-Omethylcytosine
  modified_base 63: mod_base = OTHER; note = 2'-fluorocytosine
  modified_base 64: mod_base = OTHER; note = 2'-Omethylguanosine
  modified_base 65: mod_base = OTHER; note = 2'-Omethylguanosine
  modified_base 66: mod_base = OTHER; note = 2'-Omethylcytosine
  modified_base 67: mod_base = OTHER; note = 2'-Omethylguanosine
  modified_base 68: mod_base = OTHER; note = 2'-Omethylguanosine
  modified_base 69: mod_base = OTHER; note = 2'-fluoroadenosine
  modified_base 71: mod_base = OTHER; note = 2'-Omethyluridine

SEQ ID NO: 8844 - RNA, 76 nt, synthetic construct; identical to SEQ ID NO: 625
  source 1..76: mol_type = other RNA
  modified_base 27: mod_base = OTHER; note = 2'-Omethyluridine
  modified_base 28: mod_base = OTHER; note = 2'-Omethyluridine
  modified_base 29: mod_base = OTHER; note = 2'-Omethylguanosine
  modified_base 30: mod_base = OTHER; note = 2'-Omethylguanosine
  modified_base 31: mod_base = OTHER; note = 2'-Omethyladenosine
  modified_base 39: mod_base = OTHER; note = 2'-Omethyluridine
  modified_base 40: mod_base = OTHER; note = 2'-Omethyluridine
  modified_base 41: mod_base = OTHER; note = 2'-Omethylcytosine
  modified_base 42: mod_base = OTHER; note = 2'-Omethyladenosine
  modified_base 43: mod_base = OTHER; note = 2'-Omethyladenosine

SEQ ID NO: 8845 - RNA, 75 nt, synthetic construct; identical to SEQ ID NO: 1045
  source 1..75: mol_type = other RNA
  modified_base 2: mod_base = OTHER; note = 2'-Omethylguanosine phosphorothiorate
  modified_base 8: mod_base = OTHER; note = Uridine phosphorothiorate
  modified_base 15: mod_base = OTHER; note = 2'-Omethyladenosine
  modified_base 23: mod_base = OTHER; note = 2'-Omethylcytosine
  modified_base 44: mod_base = OTHER; note = 2'-Omethylcytosine
  modified_base 48: mod_base = OTHER; note = 2'-Omethylcytosine phosphorothiorate
  modified_base 49: mod_base = OTHER; note = 2'-Omethylcytosine
  modified_base 50: mod_base = OTHER; note = 2'-Omethylguanosine phosphorothiorate
  modified_base 53: mod_base = OTHER; note = 2'-Omethyluridine phosphorothiorate
  modified_base 54: mod_base = OTHER; note = 2'-Omethyluridine phosphorothiorate
  modified_base 55: mod_base = OTHER; note = 2'-Omethylcytosine phosphorothiorate
  modified_base 56: mod_base = OTHER; note = 2'-fluoroguanosine
  modified_base 66: mod_base = OTHER; note = 2'-Omethylguanosine
  modified_base 67: mod_base = OTHER; note = 2'-Omethylguanosine
  modified_base 72: mod_base = OTHER; note = 2'-Omethyluridine

SEQ ID NO: 8846 - RNA, 75 nt, synthetic construct; identical to SEQ ID NO: 3299
  source 1..75: mol_type = other RNA
  modified_base 2: mod_base = OTHER; note = Cytosine phosphorothiorate
  modified_base 3: mod_base = OTHER; note = 2'-Omethyluridine phosphorothiorate
  modified_base 13: mod_base = OTHER; note = 2'-fluoroadenosine
  modified_base 14: mod_base = OTHER; note = 2'-fluoroguanosine
  modified_base 41: mod_base = OTHER; note = Guanosine phosphorothiorate
  modified_base 74: mod_base = OTHER; note = Cytosine phosphorothiorate

SEQ ID NO: 8847 - RNA, 75 nt, synthetic construct; identical to SEQ ID NO: 3299
  source 1..75: mol_type = other RNA
  modified_base 1: mod_base = OTHER; note = 2'-Omethylcytosine phosphorothiorate
  modified_base 2: mod_base = OTHER; note = 2'-fluorocytosine phosphorothiorate
  modified_base 5: mod_base = OTHER; note = 2'-fluoroguanosine
  modified_base 6: mod_base = OTHER; note = 2'-Omethylguanosine phosphorothiorate
  modified_base 11: mod_base = OTHER; note = Uridine phosphorothiorate
  modified_base 15: mod_base = OTHER; note = 2'-fluorouridine
  modified_base 17: mod_base = OTHER; note = 2'-Omethylguanosine
  modified_base 21: mod_base = OTHER; note = Guanosine phosphorothiorate
  modified_base 24: mod_base = OTHER; note = 2'-fluorocytosine
  modified_base 25: mod_base = OTHER; note = 2'-fluoroadenosine
  modified_base 30: mod_base = OTHER; note = 2'-fluoroadenosine
  modified_base 33: mod_base = OTHER; note = 2'-Omethyluridine phosphorothiorate
  modified_base 39: mod_base = OTHER; note = 2'-Omethylcytosine
  modified_base 40: mod_base = OTHER; note = 2'-fluorouridine
  modified_base 50: mod_base = OTHER; note = 2'-Omethylguanosine phosphorothiorate
  modified_base 61: mod_base = OTHER; note = Cytosine phosphorothiorate
  modified_base 64: mod_base = OTHER; note = 2'-fluoroguanosine
  modified_base 74: mod_base = OTHER; note = Cytosine phosphorothiorate

SEQ ID NO: 8848 - RNA, 76 nt, synthetic construct; identical to SEQ ID NO: 625
  source 1..76: mol_type = other RNA
  modified_base 1: mod_base = OTHER; note = 2'-Omethylguanosine phosphorothiorate
  modified_base 2: mod_base = OTHER; note = 2'-Omethylguanosine
  modified_base 13: mod_base = OTHER; note = 2'-Omethylcytosine
  modified_base 33: mod_base = OTHER; note = 2'-fluorouridine
  modified_base 35: mod_base = OTHER; note = Cytosine phosphorothiorate
  modified_base 37: mod_base = OTHER; note = Adenosine phosphorothiorate
  modified_base 38: mod_base = OTHER; note = Adenosine phosphorothiorate
  modified_base 50: mod_base = OTHER; note = 2'-Omethylcytosine
  modified_base 52: mod_base = OTHER; note = 2'-fluoroguanosine
  modified_base 56: mod_base = OTHER; note = 2'-Omethylcytosine
  modified_base 62: mod_base = OTHER; note = 2'-Omethylcytosine
  modified_base 65: mod_base = OTHER; note = 2'-Omethylguanosine
  modified_base 73: mod_base = OTHER; note = 2'-Omethylguanosine
  modified_base 75: mod_base = OTHER; note = 2'-fluorocytosine phosphorothiorate

SEQ ID NO: 8849 - RNA, 76 nt, synthetic construct; identical to SEQ ID NO: 625
  source 1..76: mol_type = other RNA
  modified_base 3: mod_base = OTHER; note = Cytosine phosphorothiorate
  modified_base 6: mod_base = OTHER; note = 2'-fluorocytosine
  modified_base 9: mod_base = OTHER; note = Guanosine phosphorothiorate
  modified_base 10: mod_base = OTHER; note = 2'-Omethylguanosine
  modified_base 12: mod_base = OTHER; note = 2'-Omethylguanosine
  modified_base 15: mod_base = OTHER; note = 2'-fluoroadenosine phosphorothiorate
  modified_base 16: mod_base = OTHER; note = 2'-fluorouridine
  modified_base 18: mod_base = OTHER; note = Guanosine phosphorothiorate
  modified_base 20: mod_base = OTHER; note = Uridine phosphorothiorate
  modified_base 22: mod_base = OTHER; note = 2'-Omethylguanosine
  modified_base 23: mod_base = OTHER; note = 2'-Omethylcytosine
  modified_base 24: mod_base = OTHER; note = 2'-fluoroguanosine
  modified_base 25: mod_base = OTHER; note = 2'-fluorocytosine
  modified_base 29: mod_base = OTHER; note = 2'-Omethylguanosine
  modified_base 30: mod_base = OTHER; note = 2'-Omethylguanosine
  modified_base 34: mod_base = OTHER; note = 2'-Omethyluridine
  modified_base 39: mod_base = OTHER; note = Uridine phosphorothiorate
  modified_base 40: mod_base = OTHER; note = 2'-Omethyluridine
  modified_base 41: mod_base = OTHER; note = 2'-fluorocytosine
  modified_base 42: mod_base = OTHER; note = 2'-fluoroadenosine
  modified_base 43: mod_base = OTHER; note = Adenosine phosphorothiorate
  modified_base 44: mod_base = OTHER; note = 2'-fluoroadenosine phosphorothiorate
  modified_base 45: mod_base = OTHER; note = Guanosine phosphorothiorate
  modified_base 46: mod_base = OTHER; note = 2'-fluoroguanosine phosphorothiorate
  modified_base 48: mod_base = OTHER; note = 2'-Omethyluridine phosphorothiorate
  modified_base 49: mod_base = OTHER; note = 2'-Omethylcytosine
  modified_base 52: mod_base = OTHER; note = 2'-Omethylguanosine
  modified_base 54: mod_base = OTHER; note = 2'-fluorouridine phosphorothiorate
  modified_base 57: mod_base = OTHER; note = 2'-Omethylguanosine
  modified_base 59: mod_base = OTHER; note = 2'-Omethylguanosine
  modified_base 62: mod_base = OTHER; note = 2'-fluorocytosine
  modified_base 65: mod_base = OTHER; note = 2'-fluoroguanosine phosphorothiorate
  modified_base 66: mod_base = OTHER; note = 2'-Omethylcytosine
  modified_base 67: mod_base = OTHER; note = 2'-Omethylguanosine
  modified_base 70: mod_base = OTHER; note = Guanosine phosphorothiorate
  modified_base 71: mod_base = OTHER; note = 2'-fluorouridine
  modified_base 76: mod_base = OTHER; note = 2'-Omethyladenosine

SEQ ID NO: 8850 - RNA, 76 nt, synthetic construct; identical to SEQ ID NO: 625
  source 1..76: mol_type = other RNA
  modified_base 4: mod_base = OTHER; note = Uridine phosphorothiorate
  modified_base 5: mod_base = OTHER; note = 2'-fluorocytosine
  modified_base 10: mod_base = OTHER; note = 2'-Omethylguanosine phosphorothiorate
  modified_base 11: mod_base = OTHER; note = 2'-fluorocytosine
  modified_base 13: mod_base = OTHER; note = 2'-fluorocytosine
  modified_base 20: mod_base = OTHER; note = 2'-fluorouridine
  modified_base 26: mod_base = OTHER; note = 2'-Omethyladenosine
  modified_base 27: mod_base = OTHER; note = 2'-Omethyluridine
  modified_base 28: mod_base = OTHER; note = 2'-Omethyluridine phosphorothiorate
  modified_base 29: mod_base = OTHER; note = 2'-Omethylguanosine
  modified_base 30: mod_base = OTHER; note = 2'-fluoroguanosine
  modified_base 32: mod_base = OTHER; note = 2'-fluorocytosine
  modified_base 33: mod_base = OTHER; note = Uridine phosphorothiorate
  modified_base 34: mod_base = OTHER; note = 2'-Omethyluridine
  modified_base 39: mod_base = OTHER; note = 2'-Omethyluridine phosphorothiorate
  modified_base 40: mod_base = OTHER; note = 2'-fluorouridine
  modified_base 42: mod_base = OTHER; note = 2'-fluoroadenosine phosphorothiorate
  modified_base 43: mod_base = OTHER; note = 2'-fluoroadenosine
  modified_base 45: mod_base = OTHER; note = 2'-Omethylguanosine phosphorothiorate
  modified_base 46: mod_base = OTHER; note = 2'-Omethylguanosine phosphorothiorate
  modified_base 50: mod_base = OTHER; note = 2'-fluorocytosine
  modified_base 53: mod_base = OTHER; note = 2'-Omethylguanosine
  modified_base 56: mod_base = OTHER; note = Cytosine phosphorothiorate
  modified_base 57: mod_base = OTHER; note = 2'-fluoroguanosine
  modified_base 62: mod_base = OTHER; note = Cytosine phosphorothiorate
  modified_base 63: mod_base = OTHER; note = 2'-fluorocytosine phosphorothiorate
  modified_base 64: mod_base = OTHER; note = 2'-fluoroguanosine
  modified_base 66: mod_base = OTHER; note = 2'-Omethylcytosine
  modified_base 68: mod_base = OTHER; note = 2'-Omethylguanosine
  modified_base 69: mod_base = OTHER; note = 2'-fluoroadenosine
  modified_base 70: mod_base = OTHER; note = Guanosine phosphorothiorate
  modified_base 73: mod_base = OTHER; note = 2'-Omethylguanosine

SEQ ID NO: 8851 - RNA, 75 nt, synthetic construct; identical to SEQ ID NO: 3299
  source 1..75: mol_type = other RNA
  modified_base 2: mod_base = OTHER; note = 2'-fluorocytosine
  modified_base 8: mod_base = OTHER; note = 2'-Omethyladenosine phosphorothiorate
  modified_base 10: mod_base = OTHER; note = 2'-Omethylcytosine phosphorothiorate
  modified_base 15: mod_base = OTHER; note = 2'-fluorouridine
  modified_base 18: mod_base = OTHER; note = 2'-fluoroguanosine
  modified_base 23: mod_base = OTHER; note = 2'-Omethylguanosine phosphorothiorate
  modified_base 27: mod_base = OTHER; note = 2'-fluorocytosine
  modified_base 28: mod_base = OTHER; note = 2'-fluoroadenosine
  modified_base 35: mod_base = OTHER; note = 2'-fluoroadenosine
  modified_base 39: mod_base = OTHER; note = 2'-Omethylcytosine
  modified_base 40: mod_base = OTHER; note = 2'-fluorouridine
  modified_base 48: mod_base = OTHER; note = 2'-fluorocytosine phosphorothiorate
  modified_base 50: mod_base = OTHER; note = Guanosine phosphorothiorate
  modified_base 59: mod_base = OTHER; note = 2'-Omethyluridine
  modified_base 72: mod_base = OTHER; note = 2'-Omethylguanosine
  modified_base 74: mod_base = OTHER; note = Cytosine phosphorothiorate

SEQ ID NO: 8852 - RNA, 86 nt, synthetic construct; identical to SEQ ID NO: 3290
  source 1..86: mol_type = other RNA
  modified_base 17: mod_base = OTHER; note = 2'-Omethylguanosine
  modified_base 83: mod_base = OTHER; note = 2'-Omethyladenosine

SEQ ID NO: 8853 - RNA, 85 nt, synthetic construct; identical to SEQ ID NO: 3297
  source 1..85: mol_type = other RNA
  modified_base 1: mod_base = OTHER; note = 2'-Omethylguanosine
  modified_base 16: mod_base = OTHER; note = 2'-Omethyluridine
  modified_base 17: mod_base = OTHER; note = 2'-Omethylguanosine
  modified_base 18: mod_base = OTHER; note = 2'-Omethylguanosine
  modified_base 63: mod_base = OTHER; note = 2'-Omethyluridine
  modified_base 65: mod_base = OTHER; note = 2'-Omethylcytosine
  modified_base 66: mod_base = OTHER; note = 2'-Omethylguanosine
  modified_base 68: mod_base = OTHER; note = 2'-Omethyladenosine
  modified_base 82: mod_base = OTHER; note = 2'-Omethylguanosine

SEQ ID NO: 8854 - RNA, 85 nt, synthetic construct; identical to SEQ ID NO: 3288
  source 1..85: mol_type = other RNA
  modified_base 1: mod_base = OTHER; note = 2'-Omethylcytosine
  modified_base 14: mod_base = OTHER; note = Guanosine phosphorothiorate
  modified_base 42: mod_base = OTHER; note = 2'-Omethyladenosine
  modified_base 53: mod_base = OTHER; note = 2'-Omethyluridine
  modified_base 57: mod_base = OTHER; note = Cytosine phosphorothiorate
  modified_base 81: mod_base = OTHER; note = Uridine phosphorothiorate

SEQ ID NO: 8855 - RNA, 76 nt, synthetic construct; identical to SEQ ID NO: 625
  source 1..76: mol_type = other RNA
  modified_base 1: mod_base = OTHER; note = 2'-Omethylguanosine
  modified_base 7: mod_base = OTHER; note = Guanosine phosphorothiorate
  modified_base 12: mod_base = OTHER; note = 2'-fluoroguanosine
  modified_base 14: mod_base = OTHER; note = 2'-fluoroadenosine
  modified_base 16: mod_base = OTHER; note = 2'-Omethyluridine
  modified_base 17: mod_base = OTHER; note = 2'-Omethylguanosine
  modified_base 18: mod_base = OTHER; note = 2'-Omethylguanosine
  modified_base 20: mod_base = OTHER; note = 2'-Omethyluridine
  modified_base 25: mod_base = OTHER; note = 2'-fluorocytosine phosphorothiorate
  modified_base 26: mod_base = OTHER; note = 2'-Omethyladenosine
  modified_base 29: mod_base = OTHER; note = 2'-fluoroguanosine
  modified_base 30: mod_base = OTHER; note = 2'-Omethylguanosine
  modified_base 34: mod_base = OTHER; note = 2'-fluorouridine phosphorothiorate
  modified_base 37: mod_base = OTHER; note = Adenosine phosphorothiorate
  modified_base 41: mod_base = OTHER; note = 2'-Omethylcytosine
  modified_base 45: mod_base = OTHER; note = 2'-fluoroguanosine
  modified_base 46: mod_base = OTHER; note = 2'-Omethylguanosine
  modified_base 48: mod_base = OTHER; note = 2'-Omethyluridine
  modified_base 51: mod_base = OTHER; note = 2'-Omethylguanosine
  modified_base 52: mod_base = OTHER; note = 2'-Omethylguanosine
  modified_base 53: mod_base = OTHER; note = 2'-Omethylguanosine
  modified_base 56: mod_base = OTHER; note = 2'-Omethylcytosine
  modified_base 59: mod_base = OTHER; note = Guanosine phosphorothiorate
  modified_base 60: mod_base = OTHER; note = 2'-Omethyluridine
  modified_base 61: mod_base = OTHER; note = Cytosine phosphorothiorate
  modified_base 62: mod_base = OTHER; note = 2'-Omethylcytosine
  modified_base 63: mod_base = OTHER; note = Cytosine phosphorothiorate
  modified_base 64: mod_base = OTHER; note = 2'-Omethylguanosine
  modified_base 66: mod_base = OTHER; note = Cytosine phosphorothiorate
  modified_base 67: mod_base = OTHER; note = 2'-Omethylguanosine phosphorothiorate
  modified_base 68: mod_base = OTHER; note = 2'-fluoroguanosine phosphorothiorate
  modified_base 70: mod_base = OTHER; note = Guanosine phosphorothiorate
  modified_base 71: mod_base = OTHER; note = 2'-fluorouridine
  modified_base 72: mod_base = OTHER; note = Cytosine phosphorothiorate
  modified_base 73: mod_base = OTHER; note = 2'-Omethylguanosine
  modified_base 74: mod_base = OTHER; note = 2'-Omethylcytosine

SEQ ID NO: 8856 - RNA, 75 nt, synthetic construct; identical to SEQ ID NO: 3299
  source 1..75: mol_type = other RNA
  modified_base 1: mod_base = OTHER; note = 2'-Omethylcytosine phosphorothiorate
  modified_base 9: mod_base = OTHER; note = Guanosine phosphorothiorate
  modified_base 11: mod_base = OTHER; note = 2'-Omethyluridine
  modified_base 23: mod_base = OTHER; note = 2'-fluoroguanosine
  modified_base 30: mod_base = OTHER; note = 2'-fluoroadenosine phosphorothiorate
  modified_base 49: mod_base = OTHER; note = Adenosine phosphorothiorate
  modified_base 69: mod_base = OTHER; note = 2'-fluoroguanosine phosphorothiorate
  modified_base 73: mod_base = OTHER; note = Cytosine phosphorothiorate
  modified_base 74: mod_base = OTHER; note = Cytosine phosphorothiorate

SEQ ID NO: 8857 - RNA, 76 nt, synthetic construct; identical to SEQ ID NO: 3615
  source 1..76: mol_type = other RNA
  modified_base 1: mod_base = OTHER; note = 2'-Omethylguanosine
  modified_base 2: mod_base = OTHER; note = 2'-Omethylguanosine
  modified_base 3: mod_base = OTHER; note = 2'-Omethylcytosine
  modified_base 4: mod_base = OTHER; note = 2'-Omethyluridine
  modified_base 5: mod_base = OTHER; note = 2'-Omethylcytosine
  modified_base 6: mod_base = OTHER; note = 2'-Omethylcytosine
  modified_base 14: mod_base = OTHER; note = 2'-Omethyladenosine
  modified_base 15: mod_base = OTHER; note = 2'-Omethyladenosine
  modified_base 16: mod_base = OTHER; note = 2'-Omethyluridine
  modified_base 17: mod_base = OTHER; note = 2'-Omethylguanosine
  modified_base 18: mod_base = OTHER; note = 2'-Omethylguanosine
  modified_base 20: mod_base = OTHER; note = 2'-Omethyluridine
  modified_base 25: mod_base = OTHER; note = 2'-Omethylcytosine
  modified_base 41: mod_base = OTHER; note = 2'-Omethylcytosine
  modified_base 42: mod_base = OTHER; note = 2'-Omethyladenosine
  modified_base 43: mod_base = OTHER; note = 2'-Omethyladenosine
  modified_base 44: mod_base = OTHER; note = 2'-Omethylguanosine
  modified_base 49: mod_base = OTHER; note = 2'-Omethylcytosine
  modified_base 50: mod_base = OTHER; note = 2'-Omethylcytosine
  modified_base 52: mod_base = OTHER; note = 2'-Omethylguanosine
  modified_base 54: mod_base = OTHER; note = 2'-Omethyluridine
  modified_base 55: mod_base = OTHER; note = Uridine phosphorothiorate
  modified_base 56: mod_base = OTHER; note = 2'-Omethylcytosine
  modified_base 57: mod_base = OTHER; note = 2'-fluoroguanosine
  modified_base 59: mod_base = OTHER; note = 2'-Omethylguanosine
  modified_base 61: mod_base = OTHER; note = 2'-Omethylcytosine
  modified_base 62: mod_base = OTHER; note = 2'-Omethylcytosine
  modified_base 63: mod_base = OTHER; note = 2'-fluorocytosine
  modified_base 64: mod_base = OTHER; note = 2'-Omethylguanosine
  modified_base 65: mod_base = OTHER; note = 2'-Omethylguanosine
  modified_base 73: mod_base = OTHER; note = 2'-Omethylguanosine

SEQ ID NO: 8858 - RNA, 85 nt, synthetic construct; identical to SEQ ID NO: 3310
  source 1..85: mol_type = other RNA
  modified_base 1: mod_base = OTHER; note = 2'-Omethylcytosine
  modified_base 11: mod_base = OTHER; note = Cytosine phosphorothiorate
  modified_base 37: mod_base = OTHER; note = 2'-fluoroadenosine
  modified_base 44: mod_base = OTHER; note = 2'-Omethylguanosine
  modified_base 50: mod_base = OTHER; note = Adenosine phosphorothiorate
  modified_base 54: mod_base = OTHER; note = 2'-fluorocytosine
  modified_base 72: mod_base = OTHER; note = 2'-fluorocytosine

SEQ ID NO: 8859 - RNA, 85 nt, synthetic construct; identical to SEQ ID NO: 3297
  source 1..85: mol_type = other RNA
  modified_base 1: mod_base = OTHER; note = 2'-Omethylguanosine
  modified_base 43: mod_base = OTHER; note = 2'-Omethyladenosine

SEQ ID NO: 8860 - RNA, 76 nt, synthetic construct; identical to SEQ ID NO: 625
  source 1..76: mol_type = other RNA
  modified_base 2: mod_base = OTHER; note = 2'-Omethylguanosine
  modified_base 3: mod_base = OTHER; note = 2'-Omethylcytosine
  modified_base 5: mod_base = OTHER; note = 2'-fluorocytosine
  modified_base 8: mod_base = OTHER; note = Uridine phosphorothiorate
  modified_base 10: mod_base = OTHER; note = 2'-Omethylguanosine
  modified_base 13: mod_base = OTHER; note = 2'-fluorocytosine
  modified_base 17: mod_base = OTHER; note = 2'-Omethylguanosine
  modified_base 19: mod_base = OTHER; note = Adenosine phosphorothiorate
  modified_base 23: mod_base = OTHER; note = 2'-Omethylcytosine
  modified_base 24: mod_base = OTHER; note = Guanosine phosphorothiorate
  modified_base 25: mod_base = OTHER; note = 2'-fluorocytosine
  modified_base 26: mod_base = OTHER; note = 2'-fluoroadenosine
  modified_base 27: mod_base = OTHER; note = 2'-Omethyluridine
  modified_base 29: mod_base = OTHER; note = Guanosine phosphorothiorate
  modified_base 38: mod_base = OTHER; note = 2'-Omethyladenosine
  modified_base 41: mod_base = OTHER; note = 2'-Omethylcytosine
  modified_base 43: mod_base = OTHER; note = 2'-fluoroadenosine
  modified_base 44: mod_base = OTHER; note = 2'-fluoroadenosine
  modified_base 45: mod_base = OTHER; note = 2'-Omethylguanosine
  modified_base 46: mod_base = OTHER; note = 2'-Omethylguanosine
  modified_base 47: mod_base = OTHER; note = Uridine phosphorothiorate
  modified_base 48: mod_base = OTHER; note = 2'-Omethyluridine
  modified_base 50: mod_base = OTHER; note = 2'-fluorocytosine phosphorothiorate
  modified_base 51: mod_base = OTHER; note = 2'-Omethylguanosine
  modified_base 52: mod_base = OTHER; note = 2'-Omethylguanosine
  modified_base 56: mod_base = OTHER; note = 2'-fluorocytosine
  modified_base 58: mod_base = OTHER; note = 2'-fluoroadenosine
  modified_base 59: mod_base = OTHER; note = 2'-Omethylguanosine phosphorothiorate
  modified_base 60: mod_base = OTHER; note = 2'-Omethyluridine
  modified_base 61: mod_base = OTHER; note = 2'-Omethylcytosine phosphorothiorate
  modified_base 62: mod_base = OTHER; note = 2'-fluorocytosine
  modified_base 64: mod_base = OTHER; note = 2'-Omethylguanosine
  modified_base 66: mod_base = OTHER; note = Cytosine phosphorothiorate
  modified_base 69: mod_base = OTHER; note = Adenosine phosphorothiorate
  modified_base 71: mod_base = OTHER; note = 2'-Omethyluridine
  modified_base 72: mod_base = OTHER; note = 2'-Omethylcytosine
  modified_base 73: mod_base = OTHER; note = Guanosine phosphorothiorate

SEQ ID NO: 8861 - RNA, 76 nt, synthetic construct
  source 1..76: mol_type = other RNA
ggctccgtggcgcaatggatagcgcgtcggacttcaaattcgaaggttccgggttcgagtcccggcggagtcgcca

SEQ ID NO: 8862 - RNA, 85 nt, synthetic construct; identical to SEQ ID NO: 3288
  source 1..85: mol_type = other RNA
  modified_base 1: mod_base = OTHER; note = 2'-Omethylcytosine
  modified_base 12: mod_base = OTHER; note = Guanosine phosphorothiorate
  modified_base 13: mod_base = OTHER; note = Adenosine phosphorothiorate
  modified_base 28: mod_base = OTHER; note = 2'-fluoroguanosine
  modified_base 30: mod_base = OTHER; note = 2'-fluoroadenosine
  modified_base 43: mod_base = OTHER; note = 2'-Omethyluridine
  modified_base 46: mod_base = OTHER; note = Adenosine phosphorothiorate
  modified_base 53: mod_base = OTHER; note = Uridine phosphorothiorate
  modified_base 54: mod_base = OTHER; note = 2'-fluorocytosine
  modified_base 56: mod_base = OTHER; note = 2'-Omethylguanosine
  modified_base 58: mod_base = OTHER; note = 2'-Omethylguanosine
  modified_base 72: mod_base = OTHER; note = 2'-fluorocytosine
  modified_base 76: mod_base = OTHER; note = 2'-fluorocytosine
  modified_base 83: mod_base = OTHER; note = Cytosine phosphorothiorate
  modified_base 84: mod_base = OTHER; note = Cytosine phosphorothiorate

SEQ ID NO: 8863 - RNA, 85 nt, synthetic construct; identical to SEQ ID NO: 3310
  source 1..85: mol_type = other RNA
  modified_base 1: mod_base = OTHER; note = 2'-Omethylcytosine
  modified_base 14: mod_base = OTHER; note = Guanosine phosphorothiorate
  modified_base 42: mod_base = OTHER; note = 2'-Omethyladenosine
  modified_base 53: mod_base = OTHER; note = 2'-Omethyluridine
  modified_base 57: mod_base = OTHER; note = Cytosine phosphorothiorate
  modified_base 81: mod_base = OTHER; note = Uridine phosphorothiorate

SEQ ID NO: 8864 - RNA, 76 nt, synthetic construct; identical to SEQ ID NO: 3316
  source 1..76: mol_type = other RNA
  modified_base 1: mod_base = OTHER; note = 2'-Omethyladenosine
  modified_base 13: mod_base = OTHER; note = 2'-Omethylcytosine
  modified_base 17: mod_base = OTHER; note = 2'-Omethylguanosine
  modified_base 18: mod_base = OTHER; note = 2'-Omethylguanosine
  modified_base 25: mod_base = OTHER; note = 2'-Omethylcytosine
  modified_base 33: mod_base = OTHER; note = Uridine phosphorothiorate
  modified_base 34: mod_base = OTHER; note = 2'-Omethyluridine
  modified_base 35: mod_base = OTHER; note = Cytosine phosphorothiorate
  modified_base 37: mod_base = OTHER; note = Adenosine phosphorothiorate
  modified_base 38: mod_base = OTHER; note = Adenosine phosphorothiorate
  modified_base 41: mod_base = OTHER; note = 2'-fluorocytosine
  modified_base 42: mod_base = OTHER; note = 2'-Omethyladenosine
  modified_base 43: mod_base = OTHER; note = 2'-Omethyladenosine
  modified_base 44: mod_base = OTHER; note = 2'-fluoroadenosine
  modified_base 49: mod_base = OTHER; note = 2'-Omethylcytosine
  modified_base 50: mod_base = OTHER; note = 2'-Omethylcytosine
  modified_base 52: mod_base = OTHER; note = 2'-Omethylguanosine
  modified_base 54: mod_base = OTHER; note = Uridine phosphorothiorate
  modified_base 55: mod_base = OTHER; note = Uridine phosphorothiorate
  modified_base 56: mod_base = OTHER; note = 2'-Omethylcytosine
  modified_base 57: mod_base = OTHER; note = Guanosine phosphorothiorate
  modified_base 58: mod_base = OTHER; note = Adenosine phosphorothiorate
  modified_base 59: mod_base = OTHER; note = 2'-Omethylguanosine
  modified_base 61: mod_base = OTHER; note = 2'-Omethylcytosine
  modified_base 65: mod_base = OTHER; note = 2'-Omethylguanosine
  modified_base 73: mod_base = OTHER; note = 2'-Omethylguanosine

SEQ ID NO: 8865 - RNA, 76 nt, synthetic construct; identical to SEQ ID NO: 625
  source 1..76: mol_type = other RNA
  modified_base 3: mod_base = OTHER; note = Cytosine phosphorothiorate
  modified_base 4: mod_base = OTHER; note = 2'-Omethyluridine
  modified_base 5: mod_base = OTHER; note = 2'-fluorocytosine phosphorothiorate
  modified_base 10: mod_base = OTHER; note = 2'-Omethylguanosine
  modified_base 15: mod_base = OTHER; note = 2'-Omethyladenosine
  modified_base 22: mod_base = OTHER; note = 2'-Omethylguanosine
  modified_base 27: mod_base = OTHER; note = 2'-Omethyluridine
  modified_base 32: mod_base = OTHER; note = 2'-fluorocytosine
  modified_base 38: mod_base = OTHER; note = 2'-Omethyladenosine
  modified_base 40: mod_base = OTHER; note = 2'-fluorouridine
  modified_base 41: mod_base = OTHER; note = 2'-fluorocytosine
  modified_base 42: mod_base = OTHER; note = 2'-Omethyladenosine
  modified_base 43: mod_base = OTHER; note = 2'-Omethyladenosine
  modified_base 45: mod_base = OTHER; note = Guanosine phosphorothiorate
  modified_base 46: mod_base = OTHER; note = 2'-fluoroguanosine phosphorothiorate
  modified_base 47: mod_base = OTHER; note = 2'-Omethyluridine
  modified_base 48: mod_base = OTHER; note = 2'-fluorouridine phosphorothiorate
  modified_base 49: mod_base = OTHER; note = 2'-Omethylcytosine
  modified_base 50: mod_base = OTHER; note = 2'-Omethylcytosine
  modified_base 52: mod_base = OTHER; note = Guanosine phosphorothiorate
  modified_base 53: mod_base = OTHER; note = 2'-Omethylguanosine
  modified_base 54: mod_base = OTHER; note = 2'-Omethyluridine
  modified_base 59: mod_base = OTHER; note = 2'-Omethylguanosine phosphorothiorate
  modified_base 63: mod_base = OTHER; note = 2'-Omethylcytosine
  modified_base 66: mod_base = OTHER; note = 2'-Omethylcytosine phosphorothiorate
  modified_base 67: mod_base = OTHER; note = 2'-Omethylguanosine phosphorothiorate
  modified_base 68: mod_base = OTHER; note = 2'-Omethylguanosine
  modified_base 69: mod_base = OTHER; note = 2'-fluoroadenosine
  modified_base 71: mod_base = OTHER; note = 2'-fluorouridine
  modified_base 72: mod_base = OTHER; note = Cytosine phosphorothiorate
  modified_base 74: mod_base = OTHER; note = 2'-Omethylcytosine
  modified_base 75: mod_base = OTHER; note = 2'-fluorocytosine

SEQ ID NO: 8866 - RNA, 75 nt, synthetic construct; identical to SEQ ID NO: 3336
  source 1..75: mol_type = other RNA
  modified_base 1: mod_base = OTHER; note = 2'-fluorocytosine phosphorothiorate
  modified_base 3: mod_base = OTHER; note = 2'-Omethyluridine phosphorothiorate
  modified_base 11: mod_base = OTHER; note = Uridine phosphorothiorate
  modified_base 19: mod_base = OTHER; note = Uridine phosphorothiorate
  modified_base 21: mod_base = OTHER; note = 2'-fluoroguanosine
  modified_base 23: mod_base = OTHER; note = 2'-fluoroguanosine
  modified_base 27: mod_base = OTHER; note = 2'-fluorocytosine
  modified_base 46: mod_base = OTHER; note = 2'-fluorouridine
  modified_base 47: mod_base = OTHER; note = 2'-fluorocytosine
  modified_base 62: mod_base = OTHER; note = Cytosine phosphorothiorate
  modified_base 72: mod_base = OTHER; note = Guanosine phosphorothiorate
  modified_base 74: mod_base = OTHER; note = 2'-Omethylcytosine

SEQ ID NO: 8867 - RNA, 75 nt, synthetic construct; identical to SEQ ID NO: 1045
  source 1..75: mol_type = other RNA
  modified_base 1: mod_base = OTHER; note = 2'-Omethylguanosine
  modified_base 13: mod_base = OTHER; note = 2'-Omethyluridine
  modified_base 17: mod_base = OTHER; note = 2'-Omethylguanosine
  modified_base 18: mod_base = OTHER; note = 2'-Omethylguanosine
  modified_base 25: mod_base = OTHER; note = 2'-Omethylcytosine
  modified_base 33: mod_base = OTHER; note = 2'-fluorouridine
  modified_base 34: mod_base = OTHER; note = 2'-Omethyluridine
  modified_base 35: mod_base = OTHER; note = Uridine phosphorothiorate
  modified_base 37: mod_base = OTHER; note = Adenosine phosphorothiorate
  modified_base 38: mod_base = OTHER; note = Adenosine phosphorothiorate
  modified_base 41: mod_base = OTHER; note = 2'-fluorocytosine
  modified_base 42: mod_base = OTHER; note = 2'-Omethyladenosine
  modified_base 43: mod_base = OTHER; note = 2'-Omethylguanosine
  modified_base 44: mod_base = OTHER; note = 2'-fluorocytosine
  modified_base 48: mod_base = OTHER; note = 2'-Omethylcytosine
  modified_base 49: mod_base = OTHER; note = 2'-Omethylcytosine
  modified_base 50: mod_base = OTHER; note = 2'-Omethylguanosine
  modified_base 51: mod_base = OTHER; note = 2'-Omethyladenosine
  modified_base 52: mod_base = OTHER; note = 2'-Omethylguanosine
  modified_base 53: mod_base = OTHER; note = Uridine phosphorothiorate
  modified_base 54: mod_base = OTHER; note = Uridine phosphorothiorate
  modified_base 60: mod_base = OTHER; note = 2'-Omethylcytosine
  modified_base 64: mod_base = OTHER; note = 2'-Omethylguanosine
  modified_base 72: mod_base = OTHER; note = 2'-Omethyluridine

SEQ ID NO: 8868 - RNA, 74 nt, synthetic construct; identical to SEQ ID NO: 3293
  source 1..74: mol_type = other RNA
  modified_base 1: mod_base = OTHER; note = 2'-fluoroadenosine phosphorothiorate
  modified_base 5: mod_base = OTHER; note = 2'-fluorocytosine
  modified_base 8: mod_base = OTHER; note = Guanosine phosphorothiorate
  modified_base 10: mod_base = OTHER; note = 2'-fluorocytosine
  modified_base 25: mod_base = OTHER; note = Uridine phosphorothiorate
  modified_base 48: mod_base = OTHER; note = Cytosine phosphorothiorate
  modified_base 62: mod_base = OTHER; note = Guanosine phosphorothiorate
  modified_base 73: mod_base = OTHER; note = 2'-Omethylcytosine phosphorothiorate
  modified_base 74: mod_base = OTHER; note = 2'-Omethyladenosine

SEQ ID NO: 8869 - RNA, 85 nt, synthetic construct; identical to SEQ ID NO: 3297
  source 1..85: mol_type = other RNA
  modified_base 1: mod_base = OTHER; note = 2'-Omethylguanosine phosphorothiorate
  modified_base 2: mod_base = OTHER; note = Cytosine phosphorothiorate
  modified_base 15: mod_base = OTHER; note = 2'-Omethylguanosine phosphorothiorate
  modified_base 27: mod_base = OTHER; note = 2'-fluorouridine
  modified_base 44: mod_base = OTHER; note = 2'-Omethyluridine phosphorothiorate
  modified_base 52: mod_base = OTHER; note = Cytosine phosphorothiorate
  modified_base 61: mod_base = OTHER; note = 2'-Omethylguanosine

SEQ ID NO: 8870 - RNA, 76 nt, synthetic construct; identical to SEQ ID NO: 625
  source 1..76: mol_type = other RNA
  modified_base 1: mod_base = OTHER; note = 2'-Omethylguanosine phosphorothiorate
  modified_base 2: mod_base = OTHER; note = 2'-Omethylguanosine phosphorothiorate
  modified_base 3: mod_base = OTHER; note = 2'-Omethylcytosine phosphorothiorate
  modified_base 4: mod_base = OTHER; note = 2'-Omethyluridine phosphorothiorate
  modified_base 5: mod_base = OTHER; note = 2'-Omethylcytosine phosphorothiorate
  modified_base 6: mod_base = OTHER; note = 2'-Omethylcytosine phosphorothiorate
  modified_base 10: mod_base = OTHER; note = 2'-Omethylguanosine
  modified_base 11: mod_base = OTHER; note = 2'-Omethylcytosine
  modified_base 12: mod_base = OTHER; note = 2'-Omethylguanosine
  modified_base 13: mod_base = OTHER; note = 2'-Omethylcytosine
  modified_base 22: mod_base = OTHER; note = 2'-Omethylguanosine
  modified_base 23: mod_base = OTHER; note = 2'-Omethylcytosine
  modified_base 24: mod_base = OTHER; note = 2'-Omethylguanosine
  modified_base 25: mod_base = OTHER; note = 2'-Omethylcytosine
  modified_base 44: mod_base = OTHER; note = 2'-Omethyladenosine
  modified_base 45: mod_base = OTHER; note = 2'-Omethylguanosine
  modified_base 46: mod_base = OTHER; note = 2'-Omethylguanosine
  modified_base 49: mod_base = OTHER; note = 2'-Omethylcytosine
  modified_base 50: mod_base = OTHER; note = 2'-Omethylcytosine
  modified_base 51: mod_base = OTHER; note = 2'-Omethylguanosine
  modified_base 52: mod_base = OTHER; note = 2'-Omethylguanosine
  modified_base 53: mod_base = OTHER; note = 2'-Omethylguanosine
  modified_base 61: mod_base = OTHER; note = 2'-Omethylcytosine
  modified_base 62: mod_base = OTHER; note = 2'-Omethylcytosine
  modified_base 63: mod_base = OTHER; note = 2'-Omethylcytosine
  modified_base 64: mod_base = OTHER; note = 2'-Omethylguanosine
  modified_base 65: mod_base = OTHER; note = 2'-Omethylguanosine
  modified_base 66: mod_base = OTHER; note = 2'-Omethylcytosine
  modified_base 67: mod_base = OTHER; note = 2'-Omethylguanosine
  modified_base 68: mod_base = OTHER; note = 2'-Omethylguanosine
  modified_base 69: mod_base = OTHER; note = 2'-Omethyladenosine

SEQ ID NO: 8871 - RNA, 76 nt, synthetic construct; identical to SEQ ID NO: 625
  source 1..76: mol_type = other RNA
  modified_base 1: mod_base = OTHER; note = 2'-Omethylguanosine
  modified_base 2: mod_base = OTHER; note = 2'-fluoroguanosine
  modified_base 3: mod_base = OTHER; note = 2'-Omethylcytosine phosphorothiorate
  modified_base 4: mod_base = OTHER; note = 2'-fluorouridine
  modified_base 5: mod_base = OTHER; note = Cytosine phosphorothiorate
  modified_base 8: mod_base = OTHER; note = Uridine phosphorothiorate
  modified_base 10: mod_base = OTHER; note = Guanosine phosphorothiorate
  modified_base 11: mod_base = OTHER; note = 2'-fluorocytosine phosphorothiorate
  modified_base 13: mod_base = OTHER; note = 2'-fluorocytosine
  modified_base 14: mod_base = OTHER; note = 2'-fluoroadenosine
  modified_base 16: mod_base = OTHER; note = 2'-fluorouridine
  modified_base 18: mod_base = OTHER; note = 2'-Omethylguanosine
  modified_base 22: mod_base = OTHER; note = 2'-fluoroguanosine
  modified_base 25: mod_base = OTHER; note = 2'-fluorocytosine
  modified_base 27: mod_base = OTHER; note = 2'-Omethyluridine
  modified_base 28: mod_base = OTHER; note = 2'-fluorouridine
  modified_base 29: mod_base = OTHER; note = 2'-Omethylguanosine phosphorothiorate
  modified_base 30: mod_base = OTHER; note = 2'-fluoroguanosine
  modified_base 33: mod_base = OTHER; note = 2'-fluorouridine
  modified_base 34: mod_base = OTHER; note = 2'-Omethyluridine
  modified_base 39: mod_base = OTHER; note = 2'-fluorouridine
  modified_base 41: mod_base = OTHER; note = Cytosine phosphorothiorate
  modified_base 42: mod_base = OTHER; note = 2'-Omethyladenosine phosphorothiorate
  modified_base 44: mod_base = OTHER; note = 2'-fluoroadenosine
  modified_base 45: mod_base = OTHER; note = 2'-fluoroguanosine phosphorothiorate
  modified_base 46: mod_base = OTHER; note = 2'-fluoroguanosine
  modified_base 48: mod_base = OTHER; note = Uridine phosphorothiorate
  modified_base 52: mod_base = OTHER; note = 2'-fluoroguanosine
  modified_base 53: mod_base = OTHER; note = 2'-fluoroguanosine
  modified_base 54: mod_base = OTHER; note = 2'-Omethyluridine
  modified_base 62: mod_base = OTHER; note = Cytosine phosphorothiorate
  modified_base 63: mod_base = OTHER; note = 2'-fluorocytosine
  modified_base 64: mod_base = OTHER; note = 2'-Omethylguanosine phosphorothiorate
  modified_base 65: mod_base = OTHER; note = 2'-fluoroguanosine
  modified_base 68: mod_base = OTHER; note = 2'-Omethylguanosine
  modified_base 73: mod_base = OTHER; note = 2'-fluoroguanosine

SEQ ID NO: 8872 - RNA, 85 nt, synthetic construct; identical to SEQ ID NO: 3301
  source 1..85: mol_type = other RNA
  modified_base 1: mod_base = OTHER; note = 2'-Omethylguanosine phosphorothiorate
  modified_base 3: mod_base = OTHER; note = 2'-Omethyluridine phosphorothiorate
  modified_base 4: mod_base = OTHER; note = 2'-Omethylguanosine phosphorothiorate
  modified_base 16: mod_base = OTHER; note = 2'-Omethyluridine
  modified_base 17: mod_base = OTHER; note = 2'-Omethylguanosine phosphorothiorate
  modified_base 27: mod_base = OTHER; note = 2'-fluorouridine
  modified_base 34: mod_base = OTHER; note = 2'-Omethyluridine
  modified_base 36: mod_base = OTHER; note = Adenosine phosphorothiorate
  modified_base 41: mod_base = OTHER; note = 2'-fluorocytosine
  modified_base 45: mod_base = OTHER; note = 2'-Omethylguanosine
  modified_base 47: mod_base = OTHER; note = Guanosine phosphorothiorate
  modified_base 53: mod_base = OTHER; note = Cytosine phosphorothiorate
  modified_base 55: mod_base = OTHER; note = 2'-Omethylcytosine
  modified_base 59: mod_base = OTHER; note = Cytosine phosphorothiorate
  modified_base 77: mod_base = OTHER; note = 2'-fluoroadenosine
  modified_base 79: mod_base = OTHER; note = 2'-fluoroadenosine phosphorothiorate

SEQ ID NO: 8873 - RNA, 76 nt, synthetic construct; identical to SEQ ID NO: 625
  source 1..76: mol_type = other RNA
  modified_base 1: mod_base = OTHER; note = 2'-Omethylguanosine
  modified_base 4: mod_base = OTHER; note = 2'-fluorouridine
  modified_base 5: mod_base = OTHER; note = 2'-Omethylcytosine
  modified_base 6: mod_base = OTHER; note = 2'-fluorocytosine
  modified_base 7: mod_base = OTHER; note = Guanosine phosphorothiorate
  modified_base 8: mod_base = OTHER; note = Uridine phosphorothiorate
  modified_base 11: mod_base = OTHER; note = 2'-fluorocytosine
  modified_base 13: mod_base = OTHER; note = 2'-Omethylcytosine
  modified_base 15: mod_base = OTHER; note = Adenosine phosphorothiorate
  modified_base 16: mod_base = OTHER; note = 2'-Omethyluridine
  modified_base 20: mod_base = OTHER; note = Uridine phosphorothiorate
  modified_base 22: mod_base = OTHER; note = 2'-fluoroguanosine
  modified_base 29: mod_base = OTHER; note = 2'-Omethylguanosine phosphorothiorate
  modified_base 30: mod_base = OTHER; note = 2'-fluoroguanosine
  modified_base 31: mod_base = OTHER; note = 2'-Omethyladenosine
  modified_base 34: mod_base = OTHER; note = 2'-fluorouridine phosphorothiorate
  modified_base 39: mod_base = OTHER; note = 2'-Omethyluridine
  modified_base 41: mod_base = OTHER; note = 2'-Omethylcytosine phosphorothiorate
  modified_base 42: mod_base = OTHER; note = 2'-Omethyladenosine
  modified_base 43: mod_base = OTHER; note = 2'-fluoroadenosine phosphorothiorate
  modified_base 44: mod_base = OTHER; note = 2'-Omethyladenosine
  modified_base 46: mod_base = OTHER; note = 2'-fluoroguanosine
  modified_base 50: mod_base = OTHER; note = 2'-Omethylcytosine
  modified_base 51: mod_base = OTHER; note = 2'-Omethylguanosine
  modified_base 53: mod_base = OTHER; note = Guanosine phosphorothiorate
  modified_base 54: mod_base = OTHER; note = 2'-Omethyluridine phosphorothiorate
  modified_base 56: mod_base = OTHER; note = 2'-fluorocytosine
  modified_base 61: mod_base = OTHER; note = 2'-Omethylcytosine
  modified_base 63: mod_base = OTHER; note = Cytosine phosphorothiorate
  modified_base 64: mod_base = OTHER; note = 2'-Omethylguanosine phosphorothiorate
  modified_base 65: mod_base = OTHER; note = 2'-Omethylguanosine
  modified_base 68: mod_base = OTHER; note = 2'-fluoroguanosine
  modified_base 72: mod_base = OTHER; note = Cytosine phosphorothiorate
  modified_base 74: mod_base = OTHER; note = 2'-Omethylcytosine
  modified_base 75: mod_base = OTHER; note = 2'-Omethylcytosine
  modified_base 76: mod_base = OTHER; note = 2'-Omethyladenosine

SEQ ID NO: 8874 - RNA, 76 nt, synthetic construct; identical to SEQ ID NO: 3289
  source 1..76: mol_type = other RNA
  modified_base 1: mod_base = OTHER; note = 2'-Omethylguanosine phosphorothiorate
  modified_base 2: mod_base = OTHER; note = 2'-Omethylcytosine phosphorothiorate
  modified_base 3: mod_base = OTHER; note = 2'-Omethylcytosine
  modified_base 4: mod_base = OTHER; note = 2'-Omethyluridine
  modified_base 5: mod_base = OTHER; note = 2'-Omethylguanosine
  modified_base 6: mod_base = OTHER; note = 2'-Omethylguanosine
  modified_base 10: mod_base = OTHER; note = 2'-Omethylguanosine
  modified_base 11: mod_base = OTHER; note = 2'-Omethylcytosine
  modified_base 12: mod_base = OTHER; note = 2'-Omethyluridine
  modified_base 13: mod_base = OTHER; note = 2'-Omethylcytosine
  modified_base 22: mod_base = OTHER; note = 2'-Omethylguanosine
  modified_base 23: mod_base = OTHER; note = 2'-Omethyladenosine
  modified_base 24: mod_base = OTHER; note = 2'-Omethylguanosine
  modified_base 25: mod_base = OTHER; note = 2'-Omethylcytosine
  modified_base 49: mod_base = OTHER; note = 2'-Omethylcytosine
  modified_base 50: mod_base = OTHER; note = 2'-Omethyladenosine
  modified_base 51: mod_base = OTHER; note = 2'-Omethylguanosine
  modified_base 52: mod_base = OTHER; note = 2'-Omethylguanosine
  modified_base 53: mod_base = OTHER; note = 2'-Omethylguanosine
  modified_base 54: mod_base = OTHER; note = 2'-Omethyluridine
  modified_base 61: mod_base = OTHER; note = 2'-Omethylcytosine
  modified_base 62: mod_base = OTHER; note = 2'-Omethylcytosine
  modified_base 63: mod_base = OTHER; note = 2'-fluorocytosine
  modified_base 64: mod_base = OTHER; note = 2'-Omethyluridine
  modified_base 65: mod_base = OTHER; note = 2'-Omethylguanosine
  modified_base 66: mod_base = OTHER; note = 2'-Omethyluridine
  modified_base 67: mod_base = OTHER; note = 2'-Omethylcytosine
  modified_base 68: mod_base = OTHER; note = 2'-Omethylcytosine
  modified_base 73: mod_base = OTHER; note = 2'-Omethylguanosine

SEQ ID NO: 8875 - RNA, 76 nt, synthetic construct; identical to SEQ ID NO: 3295
  source 1..76: mol_type = other RNA
  modified_base 1: mod_base = OTHER; note = 2'-Omethylcytosine
  modified_base 3: mod_base = OTHER; note = 2'-fluorouridine
  modified_base 27: mod_base = OTHER; note = Guanosine phosphorothiorate
  modified_base 29: mod_base = OTHER; note = 2'-fluoroguanosine phosphorothiorate
  modified_base 45: mod_base = OTHER; note = 2'-Omethylguanosine
  modified_base 49: mod_base = OTHER; note = 2'-Omethylguanosine
  modified_base 52: mod_base = OTHER; note = 2'-Omethylguanosine phosphorothiorate
  modified_base 54: mod_base = OTHER; note = 2'-fluorouridine phosphorothiorate
  modified_base 76: mod_base = OTHER; note = 2'-fluoroadenosine

SEQ ID NO: 8876 - RNA, 85 nt, synthetic construct; identical to SEQ ID NO: 3297
  source 1..85: mol_type = other RNA
  modified_base 1: mod_base = OTHER; note = 2'-Omethylguanosine phosphorothiorate
  modified_base 2: mod_base = OTHER; note = 2'-Omethylcytosine phosphorothiorate
  modified_base 3: mod_base = OTHER; note = 2'-Omethyluridine
  modified_base 4: mod_base = OTHER; note = 2'-Omethylguanosine
  modified_base 5: mod_base = OTHER; note = 2'-Omethyluridine
  modified_base 6: mod_base = OTHER; note = 2'-Omethylguanosine
  modified_base 16: mod_base = OTHER; note = 2'-Omethyluridine
  modified_base 17: mod_base = OTHER; note = 2'-Omethylguanosine
  modified_base 18: mod_base = OTHER; note = 2'-Omethylguanosine
  modified_base 20: mod_base = OTHER; note = 2'-Omethyluridine
  modified_base 25: mod_base = OTHER; note = 2'-Omethylcytosine
  modified_base 33: mod_base = OTHER; note = 2'-fluorouridine
  modified_base 35: mod_base = OTHER; note = Cytosine phosphorothiorate
  modified_base 37: mod_base = OTHER; note = Adenosine phosphorothiorate
  modified_base 38: mod_base = OTHER; note = Adenosine phosphorothiorate
  modified_base 41: mod_base = OTHER; note = 2'-Omethylcytosine
  modified_base 44: mod_base = OTHER; note = 2'-Omethyluridine
  modified_base 56: mod_base = OTHER; note = 2'-fluoroguanosine
  modified_base 57: mod_base = OTHER; note = 2'-fluorocytosine
  modified_base 58: mod_base = OTHER; note = 2'-Omethylguanosine
  modified_base 59: mod_base = OTHER; note = 2'-Omethylcytosine
  modified_base 60: mod_base = OTHER; note = 2'-Omethyladenosine
  modified_base 61: mod_base = OTHER; note = 2'-Omethylguanosine
  modified_base 62: mod_base = OTHER; note = 2'-Omethylguanosine
  modified_base 63: mod_base = OTHER; note = 2'-Omethyluridine
  modified_base 65: mod_base = OTHER; note = 2'-Omethylcytosine
  modified_base 68: mod_base = OTHER; note = 2'-Omethyladenosine
  modified_base 82: mod_base = OTHER; note = 2'-Omethylguanosine

SEQ ID NO: 8877 - RNA, 76 nt, synthetic construct; identical to SEQ ID NO: 3318
  source 1..76: mol_type = other RNA
  modified_base 1: mod_base = OTHER; note = 2'-Omethylcytosine
  modified_base 2: mod_base = OTHER; note = 2'-Omethylcytosine
  modified_base 3: mod_base = OTHER; note = 2'-Omethyluridine
  modified_base 4: mod_base = OTHER; note = 2'-Omethyluridine
  modified_base 5: mod_base = OTHER; note = 2'-Omethylcytosine
  modified_base 6: mod_base = OTHER; note = 2'-Omethylguanosine
  modified_base 14: mod_base = OTHER; note = 2'-Omethyladenosine
  modified_base 15: mod_base = OTHER; note = 2'-Omethylguanosine
  modified_base 16: mod_base = OTHER; note = 2'-Omethyluridine
  modified_base 18: mod_base = OTHER; note = 2'-Omethylguanosine
  modified_base 19: mod_base = OTHER; note = 2'-Omethylguanosine
  modified_base 25: mod_base = OTHER; note = 2'-Omethylcytosine
  modified_base 33: mod_base = OTHER; note = 2'-fluorouridine
  modified_base 35: mod_base = OTHER; note = Uridine phosphorothiorate
  modified_base 37: mod_base = OTHER; note = Guanosine phosphorothiorate
  modified_base 38: mod_base = OTHER; note = Adenosine phosphorothiorate
  modified_base 41: mod_base = OTHER; note = 2'-Omethylcytosine
  modified_base 42: mod_base = OTHER; note = 2'-Omethyluridine
  modified_base 43: mod_base = OTHER; note = 2'-Omethyluridine
  modified_base 44: mod_base = OTHER; note = 2'-fluoroadenosine
  modified_base 49: mod_base = OTHER; note = 2'-Omethylguanosine
  modified_base 50: mod_base = OTHER; note = 2'-Omethylcytosine
  modified_base 52: mod_base = OTHER; note = 2'-Omethylguanosine
  modified_base 54: mod_base = OTHER; note = 2'-Omethyluridine
  modified_base 55: mod_base = OTHER; note = Uridine phosphorothiorate
  modified_base 56: mod_base = OTHER; note = 2'-Omethylcytosine
  modified_base 57: mod_base = OTHER; note = 2'-fluoroguanosine
  modified_base 59: mod_base = OTHER; note = 2'-Omethyladenosine
  modified_base 61: mod_base = OTHER; note = 2'-Omethylcytosine
  modified_base 65: mod_base = OTHER; note = 2'-Omethylcytosine
  modified_base 73: mod_base = OTHER; note = 2'-Omethyladenosine

SEQ ID NO: 8878 - RNA, 85 nt, synthetic construct; identical to SEQ ID NO: 3310
  source 1..85: mol_type = other RNA
  modified_base 1: mod_base = OTHER; note = 2'-fluorocytosine phosphorothiorate
  modified_base 2: mod_base = OTHER; note = 2'-Omethylcytosine
  modified_base 11: mod_base = OTHER; note = Cytosine phosphorothiorate
  modified_base 30: mod_base = OTHER; note = 2'-fluoroadenosine
  modified_base 49: mod_base = OTHER; note = 2'-fluorouridine
  modified_base 57: mod_base = OTHER; note = 2'-Omethylcytosine
  modified_base 84: mod_base = OTHER; note = Cytosine phosphorothiorate

SEQ ID NO: 8879 - RNA, 76 nt, synthetic construct; identical to SEQ ID NO: 625
  source 1..76: mol_type = other RNA
  modified_base 1: mod_base = OTHER; note = 2'-Omethylguanosine phosphorothiorate
  modified_base 3: mod_base = OTHER; note = 2'-Omethylcytosine
  modified_base 4: mod_base = OTHER; note = 2'-Omethyluridine
  modified_base 6: mod_base = OTHER; note = 2'-fluorocytosine
  modified_base 7: mod_base = OTHER; note = Guanosine phosphorothiorate
  modified_base 10: mod_base = OTHER; note = 2'-Omethylguanosine phosphorothiorate
  modified_base 12: mod_base = OTHER; note = 2'-fluoroguanosine phosphorothiorate
  modified_base 13: mod_base = OTHER; note = 2'-Omethylcytosine
  modified_base 20: mod_base = OTHER; note = Uridine phosphorothiorate
  modified_base 22: mod_base = OTHER; note = 2'-Omethylguanosine
  modified_base 23: mod_base = OTHER; note = 2'-fluorocytosine
  modified_base 27: mod_base = OTHER; note = 2'-fluorouridine
  modified_base 29: mod_base = OTHER; note = Guanosine phosphorothiorate
  modified_base 31: mod_base = OTHER; note = 2'-fluoroadenosine
  modified_base 32: mod_base = OTHER; note = 2'-fluorocytosine
  modified_base 34: mod_base = OTHER; note = 2'-Omethyluridine
  modified_base 37: mod_base = OTHER; note = Adenosine phosphorothiorate
  modified_base 42: mod_base = OTHER; note = Adenosine phosphorothiorate
  modified_base 43: mod_base = OTHER; note = 2'-fluoroadenosine
  modified_base 46: mod_base = OTHER; note = 2'-Omethylguanosine
  modified_base 47: mod_base = OTHER; note = Uridine phosphorothiorate
  modified_base 48: mod_base = OTHER; note = 2'-fluorouridine
  modified_base 49: mod_base = OTHER; note = 2'-Omethylcytosine
  modified_base 51: mod_base = OTHER; note = 2'-Omethylguanosine
  modified_base 53: mod_base = OTHER; note = 2'-fluoroguanosine
  modified_base 57: mod_base = OTHER; note = 2'-fluoroguanosine
  modified_base 60: mod_base = OTHER; note = Uridine phosphorothiorate
  modified_base 62: mod_base = OTHER; note = Cytosine phosphorothiorate
  modified_base 63: mod_base = OTHER; note = 2'-Omethylcytosine
  modified_base 64: mod_base = OTHER; note = Guanosine phosphorothiorate
  modified_base 68: mod_base = OTHER; note = 2'-fluoroguanosine
  modified_base 70: mod_base = OTHER; note = Guanosine phosphorothiorate
  modified_base 71: mod_base = OTHER; note = 2'-fluorouridine
  modified_base 74: mod_base = OTHER; note = Cytosine phosphorothiorate
  modified_base 75: mod_base = OTHER; note = 2'-fluorocytosine

SEQ ID NO: 8880 - RNA, 76 nt, synthetic construct; identical to SEQ ID NO: 625
  source 1..76: mol_type = other RNA
  modified_base 3: mod_base = OTHER; note = 2'-fluorocytosine
  modified_base 5: mod_base = OTHER; note = 2'-fluorocytosine
  modified_base 7: mod_base = OTHER; note = Guanosine phosphorothiorate
  modified_base 10: mod_base = OTHER; note = 2'-fluoroguanosine
  modified_base 12: mod_base = OTHER; note = 2'-fluoroguanosine
  modified_base 14: mod_base = OTHER; note = 2'-fluoroadenosine phosphorothiorate
  modified_base 15: mod_base = OTHER; note = 2'-fluoroadenosine
  modified_base 16: mod_base = OTHER; note = Uridine phosphorothiorate
  modified_base 17: mod_base = OTHER; note = 2'-Omethylguanosine
  modified_base 22: mod_base = OTHER; note = Guanosine phosphorothiorate
  modified_base 23: mod_base = OTHER; note = 2'-Omethylcytosine
  modified_base 27: mod_base = OTHER; note = 2'-fluorouridine
  modified_base 29: mod_base = OTHER; note = 2'-Omethylguanosine
  modified_base 31: mod_base = OTHER; note = 2'-Omethyladenosine
  modified_base 33: mod_base = OTHER; note = 2'-fluorouridine
  modified_base 34: mod_base = OTHER; note = Uridine phosphorothiorate
  modified_base 36: mod_base = OTHER; note = Adenosine phosphorothiorate
  modified_base 38: mod_base = OTHER; note = Adenosine phosphorothiorate
  modified_base 39: mod_base = OTHER; note = 2'-Omethyluridine
  modified_base 40: mod_base = OTHER; note = Uridine phosphorothiorate
  modified_base 41: mod_base = OTHER; note = 2'-fluorocytosine
  modified_base 46: mod_base = OTHER; note = 2'-fluoroguanosine
  modified_base 48: mod_base = OTHER; note = 2'-Omethyluridine
  modified_base 49: mod_base = OTHER; note = 2'-fluorocytosine phosphorothiorate
  modified_base 50: mod_base = OTHER; note = 2'-fluorocytosine
  modified_base 53: mod_base = OTHER; note = Guanosine phosphorothiorate
  modified_base 55: mod_base = OTHER; note = Uridine phosphorothiorate
  modified_base 56: mod_base = OTHER; note = 2'-Omethylcytosine phosphorothiorate
  modified_base 57: mod_base = OTHER; note = 2'-Omethylguanosine
  modified_base 59: mod_base = OTHER; note = 2'-fluoroguanosine phosphorothiorate
  modified_base 60: mod_base = OTHER; note = 2'-fluorouridine
  modified_base 62: mod_base = OTHER; note = Cytosine phosphorothiorate
  modified_base 67: mod_base = OTHER; note = 2'-fluoroguanosine
  modified_base 69: mod_base = OTHER; note = 2'-fluoroadenosine phosphorothiorate
  modified_base 70: mod_base = OTHER; note = 2'-Omethylguanosine
  modified_base 72: mod_base = OTHER; note = 2'-fluorocytosine
  modified_base 73: mod_base = OTHER; note = 2'-Omethylguanosine
  modified_base 74: mod_base = OTHER; note = Cytosine phosphorothiorate
  modified_base 75: mod_base = OTHER; note = 2'-Omethylcytosine

SEQ ID NO: 8881 - RNA, 76 nt, synthetic construct; identical to SEQ ID NO: 625
  source 1..76: mol_type = other RNA
  modified_base 33: mod_base = OTHER; note = 2'-O-(2-Methoxyethyl) thymine
  modified_base 55: mod_base = OTHER; note = Uridine phosphorothiorate

SEQ ID NO: 8882 - RNA, 85 nt, synthetic construct; identical to SEQ ID NO: 3310
  source 1..85: mol_type = other RNA
  modified_base 1: mod_base = OTHER; note = 2'-Omethylcytosine
  modified_base 2: mod_base = OTHER; note = 2'-fluorocytosine
  modified_base 27: mod_base = OTHER; note = 2'-fluorouridine
  modified_base 51: mod_base = OTHER; note = 2'-Omethyluridine
  modified_base 56: mod_base = OTHER; note = 2'-fluoroguanosine
  modified_base 57: mod_base = OTHER; note = 2'-Omethylcytosine
  modified_base 73: mod_base = OTHER; note = Adenosine phosphorothiorate
  modified_base 84: mod_base = OTHER; note = 2'-fluorocytosine

SEQ ID NO: 8883 - DNA, 76 bp, synthetic construct; identical to SEQ ID NO: 1924
  source 1..76: mol_type = other DNA
  modified_base 1: mod_base = OTHER; note = 2'-Omethylguanosine phosphorothiorate
  modified_base 2: mod_base = OTHER; note = 2'-Omethylguanosine phosphorothiorate
  modified_base 23: mod_base = OTHER; note = Cytosine phosphorothiorate
  modified_base 24: mod_base = OTHER; note = 2'-O-(2-Methoxyethyl) guanosine phosphorothiorate
  modified_base 31: mod_base = OTHER; note = Adenosine phosphorothiorate
  modified_base 49: mod_base = OTHER; note = 2'-O-(2-Methoxyethyl) 5-methylcytosine
  modified_base 53: mod_base = OTHER; note = Guanosine phosphorothiorate
  modified_base 54: mod_base = OTHER; note = 2'-O-(2-Methoxyethyl) thymine
  modified_base 67: mod_base = OTHER; note = Guanosine phosphorothiorate
  modified_base 68: mod_base = OTHER; note = 2'-fluoroguanosine
  modified_base 69: mod_base = OTHER; note = 2'-Omethyladenosine
  modified_base 74: mod_base = OTHER; note = Cytosine phosphorothiorate
  modified_base 75: mod_base = OTHER; note = 2'-Omethylcytosine
  misc_feature 1..31: note = RNA
  misc_feature 32: note = DNA
  misc_feature 33..76: note = RNA

SEQ ID NO: 8884 - RNA, 85 nt, synthetic construct; identical to SEQ ID NO: 3297
  source 1..85: mol_type = other RNA
  modified_base 83: mod_base = OTHER; note = 2'-Omethylcytosine
  modified_base 84: mod_base = OTHER; note = 2'-Omethylcytosine

SEQ ID NO: 8885 - RNA, 76 nt, synthetic construct; identical to SEQ ID NO: 625
  source 1..76: mol_type = other RNA
  modified_base 1: mod_base = OTHER; note = 2'-Omethylguanosine phosphorothiorate
  modified_base 2: mod_base = OTHER; note = 2'-Omethylguanosine
  modified_base 3: mod_base = OTHER; note = 2'-Omethylcytosine
  modified_base 4: mod_base = OTHER; note = 2'-Omethyluridine
  modified_base 5: mod_base = OTHER; note = 2'-Omethylcytosine
  modified_base 10: mod_base = OTHER; note = 2'-fluoroguanosine phosphorothiorate
  modified_base 11: mod_base = OTHER; note = 2'-Omethylcytosine
  modified_base 12: mod_base = OTHER; note = 2'-Omethylguanosine
  modified_base 13: mod_base = OTHER; note = 2'-Omethylcytosine
  modified_base 14: mod_base = OTHER; note = 2'-Omethyladenosine
  modified_base 15: mod_base = OTHER; note = 2'-fluoroadenosine phosphorothiorate
  modified_base 16: mod_base = OTHER; note = 2'-fluorouridine phosphorothiorate
  modified_base 17: mod_base = OTHER; note = 2'-fluoroguanosine phosphorothiorate
  modified_base 18: mod_base = OTHER; note = 2'-Omethylguanosine
  modified_base 19: mod_base = OTHER; note = 2'-fluoroadenosine phosphorothiorate
  modified_base 21: mod_base = OTHER; note = 2'-fluoroadenosine phosphorothiorate
  modified_base 22: mod_base = OTHER; note = 2'-Omethylguanosine
  modified_base 23: mod_base = OTHER; note = 2'-Omethylcytosine
  modified_base 24: mod_base = OTHER; note = 2'-Omethylguanosine phosphorothiorate
  modified_base 25: mod_base = OTHER; note = 2'-Omethylcytosine
  modified_base 26: mod_base = OTHER; note = 2'-Omethyladenosine phosphorothiorate
  modified_base 29: mod_base = OTHER; note = Guanosine phosphorothiorate
  modified_base 30: mod_base = OTHER; note = 2'-fluoroguanosine phosphorothiorate
  modified_base 31: mod_base = OTHER; note = 2'-Omethyladenosine phosphorothiorate
  modified_base 33: mod_base = OTHER; note = 2'-fluorouridine
  modified_base 37: mod_base = OTHER; note = Adenosine phosphorothiorate
  modified_base 40: mod_base = OTHER; note = 2'-Omethyluridine
  modified_base 41: mod_base = OTHER; note = 2'-Omethylcytosine
  modified_base 45: mod_base = OTHER; note = 2'-Omethylguanosine
  modified_base 47: mod_base = OTHER; note = 2'-Omethyluridine phosphorothiorate
  modified_base 53: mod_base = OTHER; note = 2'-Omethylguanosine
  modified_base 54: mod_base = OTHER; note = 2'-Omethyluridine
  modified_base 55: mod_base = OTHER; note = Uridine phosphorothiorate
  modified_base 57: mod_base = OTHER; note = 2'-fluoroguanosine phosphorothiorate
  modified_base 61: mod_base = OTHER; note = Cytosine phosphorothiorate
  modified_base 62: mod_base = OTHER; note = 2'-Omethylcytosine
  modified_base 63: mod_base = OTHER; note = 2'-fluorocytosine
  modified_base 64: mod_base = OTHER; note = 2'-Omethylguanosine
  modified_base 65: mod_base = OTHER; note = 2'-Omethylguanosine phosphorothiorate
  modified_base 66: mod_base = OTHER; note = 2'-Omethylcytosine
  modified_base 67: mod_base = OTHER; note = Guanosine phosphorothiorate
  modified_base 68: mod_base = OTHER; note = 2'-fluoroguanosine
  modified_base 69: mod_base = OTHER; note = 2'-Omethyladenosine phosphorothiorate
  modified_base 73: mod_base = OTHER; note = 2'-Omethylguanosine
  modified_base 74: mod_base = OTHER; note = Cytosine phosphorothiorate
  modified_base 75: mod_base = OTHER; note = 2'-Omethylcytosine

SEQ ID NO: 8886 - RNA, 86 nt, synthetic construct; identical to SEQ ID NO: 3290
  source 1..86: mol_type = other RNA
  modified_base 73: mod_base = OTHER; note = 2'-fluorocytosine

SEQ ID NO: 8887 - RNA, 76 nt, synthetic construct; identical to SEQ ID NO: 3332
  source 1..76: mol_type = other RNA
  modified_base 1: mod_base = OTHER; note = 2'-Omethylguanosine
  modified_base 10: mod_base = OTHER; note = 2'-Omethylguanosine
  modified_base 13: mod_base = OTHER; note = 2'-Omethylcytosine
  modified_base 17: mod_base = OTHER; note = Guanosine phosphorothiorate
  modified_base 18: mod_base = OTHER; note = 2'-Omethylguanosine
  modified_base 19: mod_base = OTHER; note = Adenosine phosphorothiorate
  modified_base 20: mod_base = OTHER; note = 2'-Omethyluridine
  modified_base 25: mod_base = OTHER; note = 2'-Omethylcytosine
  modified_base 29: mod_base = OTHER; note = 2'-Omethylguanosine
  modified_base 33: mod_base = OTHER; note = 2'-fluorouridine
  modified_base 35: mod_base = OTHER; note = Cytosine phosphorothiorate
  modified_base 37: mod_base = OTHER; note = Adenosine phosphorothiorate
  modified_base 38: mod_base = OTHER; note = Adenosine phosphorothiorate
  modified_base 41: mod_base = OTHER; note = 2'-fluorocytosine phosphorothiorate
  modified_base 43: mod_base = OTHER; note = 2'-Omethyladenosine
  modified_base 44: mod_base = OTHER; note = 2'-fluoroadenosine
  modified_base 46: mod_base = OTHER; note = Guanosine phosphorothiorate
  modified_base 50: mod_base = OTHER; note = 2'-Omethylcytosine
  modified_base 52: mod_base = OTHER; note = 2'-Omethylguanosine
  modified_base 54: mod_base = OTHER; note = Uridine phosphorothiorate
  modified_base 55: mod_base = OTHER; note = Uridine phosphorothiorate
  modified_base 56: mod_base = OTHER; note = 2'-Omethylcytosine
  modified_base 57: mod_base = OTHER; note = Guanosine phosphorothiorate
  modified_base 62: mod_base = OTHER; note = 2'-Omethylcytosine
  modified_base 63: mod_base = OTHER; note = 2'-fluorocytosine
  modified_base 65: mod_base = OTHER; note = 2'-Omethylcytosine
  modified_base 71: mod_base = OTHER; note = 2'-Omethyluridine
  modified_base 73: mod_base = OTHER; note = 2'-Omethylguanosine

SEQ ID NO: 8888 - RNA, 76 nt, synthetic construct; identical to SEQ ID NO: 625
  source 1..76: mol_type = other RNA
  modified_base 1: mod_base = OTHER; note = Guanosine phosphorothiorate
  modified_base 3: mod_base = OTHER; note = 2'-fluorocytosine
  modified_base 5: mod_base = OTHER; note = 2'-Omethylcytosine
  modified_base 10: mod_base = OTHER; note = 2'-Omethylguanosine
  modified_base 11: mod_base = OTHER; note = Cytosine phosphorothiorate
  modified_base 14: mod_base = OTHER; note = 2'-Omethyladenosine
  modified_base 16: mod_base = OTHER; note = 2'-fluorouridine
  modified_base 18: mod_base = OTHER; note = 2'-Omethylguanosine
  modified_base 20: mod_base = OTHER; note = Uridine phosphorothiorate
  modified_base 23: mod_base = OTHER; note = Cytosine phosphorothiorate
  modified_base 29: mod_base = OTHER; note = 2'-fluoroguanosine
  modified_base 33: mod_base = OTHER; note = 2'-fluorouridine
  modified_base 34: mod_base = OTHER; note = 2'-Omethyluridine
  modified_base 36: mod_base = OTHER; note = Adenosine phosphorothiorate
  modified_base 39: mod_base = OTHER; note = 2'-fluorouridine
  modified_base 43: mod_base = OTHER; note = 2'-Omethyladenosine
  modified_base 47: mod_base = OTHER; note = 2'-Omethyluridine
  modified_base 48: mod_base = OTHER; note = Uridine phosphorothiorate
  modified_base 49: mod_base = OTHER; note = Cytosine phosphorothiorate
  modified_base 50: mod_base = OTHER; note = 2'-fluorocytosine
  modified_base 51: mod_base = OTHER; note = 2'-Omethylguanosine
  modified_base 53: mod_base = OTHER; note = 2'-fluoroguanosine
  modified_base 54: mod_base = OTHER; note = 2'-fluorouridine
  modified_base 59: mod_base = OTHER; note = 2'-fluoroguanosine phosphorothiorate
  modified_base 64: mod_base = OTHER; note = 2'-fluoroguanosine phosphorothiorate
  modified_base 65: mod_base = OTHER; note = 2'-Omethylguanosine
  modified_base 66: mod_base = OTHER; note = 2'-Omethylcytosine
  modified_base 67: mod_base = OTHER; note = 2'-Omethylguanosine
  modified_base 68: mod_base = OTHER; note = 2'-Omethylguanosine
  modified_base 70: mod_base = OTHER; note = 2'-fluoroguanosine
  modified_base 71: mod_base = OTHER; note = 2'-fluorouridine
  modified_base 75: mod_base = OTHER; note = 2'-fluorocytosine
  modified_base 76: mod_base = OTHER; note = 2'-Omethyladenosine

SEQ ID NO: 8889 - RNA, 74 nt, synthetic construct; identical to SEQ ID NO: 3293
  source 1..74: mol_type = other RNA
  modified_base 2: mod_base = OTHER; note = 2'-Omethylcytosine
  modified_base 10: mod_base = OTHER; note = Cytosine phosphorothiorate
  modified_base 14: mod_base = OTHER; note = Adenosine phosphorothiorate
  modified_base 44: mod_base = OTHER; note = Guanosine phosphorothiorate
  modified_base 46: mod_base = OTHER; note = 2'-fluorouridine
  modified_base 73: mod_base = OTHER; note = Cytosine phosphorothiorate
  modified_base 74: mod_base = OTHER; note = 2'-fluoroadenosine

SEQ ID NO: 8890 - RNA, 76 nt, synthetic construct; identical to SEQ ID NO: 625
  source 1..76: mol_type = other RNA
  modified_base 54: mod_base = OTHER; note = Thymine

SEQ ID NO: 8891 - RNA, 76 nt, synthetic construct; identical to SEQ ID NO: 3318
  source 1..76: mol_type = other RNA
  modified_base 1: mod_base = OTHER; note = 2'-Omethylcytosine
  modified_base 2: mod_base = OTHER; note = 2'-Omethylcytosine
  modified_base 3: mod_base = OTHER; note = 2'-Omethyluridine
  modified_base 4: mod_base = OTHER; note = 2'-Omethyluridine
  modified_base 5: mod_base = OTHER; note = 2'-Omethylcytosine
  modified_base 6: mod_base = OTHER; note = 2'-Omethylguanosine
  modified_base 10: mod_base = OTHER; note = 2'-Omethylguanosine
  modified_base 11: mod_base = OTHER; note = 2'-Omethylcytosine
  modified_base 12: mod_base = OTHER; note = 2'-Omethyluridine
  modified_base 13: mod_base = OTHER; note = 2'-Omethylcytosine
  modified_base 22: mod_base = OTHER; note = 2'-Omethylguanosine
  modified_base 23: mod_base = OTHER; note = 2'-Omethyladenosine
  modified_base 24: mod_base = OTHER; note = 2'-Omethylguanosine
  modified_base 25: mod_base = OTHER; note = 2'-Omethylcytosine
  modified_base 49: mod_base = OTHER; note = 2'-Omethylguanosine
  modified_base 50: mod_base = OTHER; note = 2'-Omethylcytosine
  modified_base 51: mod_base = OTHER; note = 2'-Omethyluridine
  modified_base 52: mod_base = OTHER; note = 2'-Omethylguanosine
  modified_base 53: mod_base = OTHER; note = 2'-Omethylguanosine

SEQ ID NO: 8892 - RNA, 75 nt, synthetic construct; identical to SEQ ID NO: 3299
  source 1..75: mol_type = other RNA
  modified_base 2: mod_base = OTHER; note = 2'-Omethylcytosine phosphorothiorate
  modified_base 6: mod_base = OTHER; note = 2'-fluoroguanosine phosphorothiorate
  modified_base 10: mod_base = OTHER; note = 2'-fluorocytosine
  modified_base 17: mod_base = OTHER; note = Guanosine phosphorothiorate
  modified_base 20: mod_base = OTHER; note = 2'-Omethyladenosine
  modified_base 21: mod_base = OTHER; note = 2'-fluoroguanosine
  modified_base 23: mod_base = OTHER; note = 2'-fluoroguanosine phosphorothiorate
  modified_base 26: mod_base = OTHER; note = Uridine phosphorothiorate
  modified_base 28: mod_base = OTHER; note = 2'-Omethyladenosine phosphorothiorate
  modified_base 37: mod_base = OTHER; note = 2'-fluoroadenosine
  modified_base 38: mod_base = OTHER; note = 2'-fluorouridine
  modified_base 39: mod_base = OTHER; note = 2'-fluorocytosine
  modified_base 41: mod_base = OTHER; note = 2'-Omethylguanosine phosphorothiorate
  modified_base 46: mod_base = OTHER; note = 2'-fluorouridine
  modified_base 47: mod_base = OTHER; note = 2'-fluorocytosine
  modified_base 60: mod_base = OTHER; note = 2'-fluorocytosine
  modified_base 61: mod_base = OTHER; note = 2'-fluorocytosine
  modified_base 72: mod_base = OTHER; note = Guanosine phosphorothiorate
  modified_base 73: mod_base = OTHER; note = Cytosine phosphorothiorate
  modified_base 74: mod_base = OTHER; note = Cytosine phosphorothiorate

SEQ ID NO: 8893 - RNA, 76 nt, synthetic construct; identical to SEQ ID NO: 3318
  source 1..76: mol_type = other RNA
  modified_base 1: mod_base = OTHER; note = 2'-Omethylcytosine
  modified_base 2: mod_base = OTHER; note = 2'-Omethylcytosine
  modified_base 3: mod_base = OTHER; note = 2'-Omethyluridine
  modified_base 4: mod_base = OTHER; note = 2'-Omethyluridine
  modified_base 5: mod_base = OTHER; note = 2'-Omethylcytosine
  modified_base 6: mod_base = OTHER; note = 2'-Omethylguanosine
  modified_base 10: mod_base = OTHER; note = 2'-Omethylguanosine
  modified_base 11: mod_base = OTHER; note = 2'-Omethylcytosine
  modified_base 12: mod_base = OTHER; note = 2'-Omethyluridine
  modified_base 13: mod_base = OTHER; note = 2'-Omethylcytosine
  modified_base 22: mod_base = OTHER; note = 2'-Omethylguanosine
  modified_base 23: mod_base = OTHER; note = 2'-Omethyladenosine
  modified_base 24: mod_base = OTHER; note = 2'-Omethylguanosine
  modified_base 25: mod_base = OTHER; note = 2'-Omethylcytosine
  modified_base 49: mod_base = OTHER; note = 2'-Omethylguanosine
  modified_base 50: mod_base = OTHER; note = 2'-Omethylcytosine
  modified_base 51: mod_base = OTHER; note = 2'-Omethyluridine
  modified_base 52: mod_base = OTHER; note = 2'-Omethylguanosine
  modified_base 53: mod_base = OTHER; note = 2'-Omethylguanosine
  modified_base 73: mod_base = OTHER; note = 2'-Omethyladenosine

SEQ ID NO: 8894 - RNA, 76 nt, synthetic construct; identical to SEQ ID NO: 3318
  source 1..76: mol_type = other RNA
  modified_base 1: mod_base = OTHER; note = 2'-Omethylcytosine
  modified_base 52: mod_base = OTHER; note = 2'-Omethylguanosine
  modified_base 73: mod_base = OTHER; note = 2'-Omethyladenosine

SEQ ID NO: 8895 - RNA, 76 nt, synthetic construct; identical to SEQ ID NO: 3325
  source 1..76: mol_type = other RNA
  modified_base 1: mod_base = OTHER; note = 2'-Omethyluridine
  modified_base 10: mod_base = OTHER; note = 2'-Omethylguanosine
  modified_base 13: mod_base = OTHER; note = 2'-Omethylcytosine
  modified_base 17: mod_base = OTHER; note = Guanosine phosphorothiorate
  modified_base 18: mod_base = OTHER; note = 2'-Omethylguanosine
  modified_base 19: mod_base = OTHER; note = Adenosine phosphorothiorate
  modified_base 20: mod_base = OTHER; note = 2'-Omethyluridine
  modified_base 25: mod_base = OTHER; note = 2'-Omethylcytosine
  modified_base 29: mod_base = OTHER; note = 2'-Omethylguanosine
  modified_base 33: mod_base = OTHER; note = 2'-fluorouridine
  modified_base 35: mod_base = OTHER; note = Cytosine phosphorothiorate
  modified_base 37: mod_base = OTHER; note = Adenosine phosphorothiorate
  modified_base 38: mod_base = OTHER; note = Adenosine phosphorothiorate
  modified_base 41: mod_base = OTHER; note = 2'-fluorocytosine phosphorothiorate
  modified_base 43: mod_base = OTHER; note = 2'-Omethyladenosine
  modified_base 44: mod_base = OTHER; note = 2'-fluoroadenosine
  modified_base 46: mod_base = OTHER; note = Guanosine phosphorothiorate
  modified_base 50: mod_base = OTHER; note = 2'-Omethylcytosine
  modified_base 52: mod_base = OTHER; note = 2'-Omethylguanosine
  modified_base 54: mod_base = OTHER; note = Uridine phosphorothiorate
  modified_base 55: mod_base = OTHER; note = Uridine phosphorothiorate
  modified_base 56: mod_base = OTHER; note = 2'-Omethylcytosine
  modified_base 57: mod_base = OTHER; note = Guanosine phosphorothiorate
  modified_base 62: mod_base = OTHER; note = 2'-Omethylcytosine
  modified_base 63: mod_base = OTHER; note = 2'-fluorocytosine
  modified_base 65: mod_base = OTHER; note = 2'-Omethylguanosine
  modified_base 71: mod_base = OTHER; note = 2'-Omethyluridine
  modified_base 73: mod_base = OTHER; note = 2'-Omethylguanosine

SEQ ID NO: 8896 - RNA, 76 nt, synthetic construct; identical to SEQ ID NO: 3289
  source 1..76: mol_type = other RNA
  modified_base 1: mod_base = OTHER; note = 2'-Omethylguanosine phosphorothiorate
  modified_base 2: mod_base = OTHER; note = 2'-Omethylcytosine phosphorothiorate
  modified_base 3: mod_base = OTHER; note = 2'-Omethylcytosine
  modified_base 4: mod_base = OTHER; note = 2'-Omethyluridine
  modified_base 5: mod_base = OTHER; note = 2'-Omethylguanosine
  modified_base 6: mod_base = OTHER; note = 2'-Omethylguanosine
  modified_base 44: mod_base = OTHER; note = 2'-Omethylguanosine
  modified_base 45: mod_base = OTHER; note = 2'-Omethylguanosine
  modified_base 49: mod_base = OTHER; note = 2'-Omethylcytosine
  modified_base 50: mod_base = OTHER; note = 2'-Omethyladenosine
  modified_base 51: mod_base = OTHER; note = 2'-Omethylguanosine
  modified_base 52: mod_base = OTHER; note = 2'-Omethylguanosine
  modified_base 53: mod_base = OTHER; note = 2'-Omethylguanosine
  modified_base 54: mod_base = OTHER; note = 2'-Omethyluridine
  modified_base 61: mod_base = OTHER; note = 2'-Omethylcytosine
  modified_base 62: mod_base = OTHER; note = 2'-Omethylcytosine
  modified_base 63: mod_base = OTHER; note = 2'-fluorocytosine
  modified_base 64: mod_base = OTHER; note = 2'-Omethyluridine
  modified_base 65: mod_base = OTHER; note = 2'-Omethylguanosine
  modified_base 66: mod_base = OTHER; note = 2'-Omethyluridine
  modified_base 67: mod_base = OTHER; note = 2'-Omethylcytosine
  modified_base 68: mod_base = OTHER; note = 2'-Omethylcytosine
  modified_base 73: mod_base = OTHER; note = 2'-Omethylguanosine

SEQ ID NO: 8897 - RNA, 76 nt, synthetic construct; identical to SEQ ID NO: 3289
  source 1..76: mol_type = other RNA
  modified_base 1: mod_base = OTHER; note = 2'-Omethylguanosine
  modified_base 10: mod_base = OTHER; note = 2'-Omethylguanosine
  modified_base 13: mod_base = OTHER; note = 2'-Omethylcytosine
  modified_base 16: mod_base = OTHER; note = Uridine phosphorothiorate
  modified_base 18: mod_base = OTHER; note = Guanosine phosphorothiorate
  modified_base 19: mod_base = OTHER; note = 2'-Omethylguanosine phosphorothiorate
  modified_base 20: mod_base = OTHER; note = Uridine phosphorothiorate
  modified_base 25: mod_base = OTHER; note = 2'-Omethylcytosine
  modified_base 29: mod_base = OTHER; note = 2'-Omethyladenosine
  modified_base 33: mod_base = OTHER; note = 2'-fluorouridine phosphorothiorate
  modified_base 35: mod_base = OTHER; note = Uridine phosphorothiorate
  modified_base 37: mod_base = OTHER; note = Adenosine phosphorothiorate
  modified_base 38: mod_base = OTHER; note = Adenosine phosphorothiorate
  modified_base 41: mod_base = OTHER; note = 2'-fluorouridine
  modified_base 42: mod_base = OTHER; note = Guanosine phosphorothiorate
  modified_base 43: mod_base = OTHER; note = 2'-Omethyladenosine
  modified_base 44: mod_base = OTHER; note = 2'-fluoroguanosine
  modified_base 46: mod_base = OTHER; note = Guanosine phosphorothiorate
  modified_base 47: mod_base = OTHER; note = Uridine phosphorothiorate
  modified_base 50: mod_base = OTHER; note = 2'-Omethyladenosine
  modified_base 52: mod_base = OTHER; note = 2'-Omethylguanosine
  modified_base 54: mod_base = OTHER; note = Uridine phosphorothiorate
  modified_base 55: mod_base = OTHER; note = Uridine phosphorothiorate
  modified_base 56: mod_base = OTHER; note = 2'-Omethylcytosine
  modified_base 57: mod_base = OTHER; note = Adenosine phosphorothiorate
  modified_base 60: mod_base = OTHER; note = Uridine phosphorothiorate
  modified_base 62: mod_base = OTHER; note = 2'-Omethylcytosine
  modified_base 63: mod_base = OTHER; note = 2'-fluorocytosine
  modified_base 65: mod_base = OTHER; note = 2'-Omethylguanosine
  modified_base 71: mod_base = OTHER; note = 2'-Omethylguanosine
  modified_base 73: mod_base = OTHER; note = 2'-Omethylguanosine

SEQ ID NO: 8898 - RNA, 85 nt, synthetic construct; identical to SEQ ID NO: 3297
  source 1..85: mol_type = other RNA
  modified_base 1: mod_base = OTHER; note = 2'-Omethylguanosine
  modified_base 13: mod_base = OTHER; note = 2'-Omethylguanosine
  modified_base 17: mod_base = OTHER; note = 2'-Omethylguanosine
  modified_base 18: mod_base = OTHER; note = 2'-Omethylguanosine
  modified_base 25: mod_base = OTHER; note = 2'-Omethylcytosine
  modified_base 33: mod_base = OTHER; note = 2'-fluorouridine
  modified_base 34: mod_base = OTHER; note = 2'-Omethyluridine
  modified_base 35: mod_base = OTHER; note = Cytosine phosphorothiorate
  modified_base 37: mod_base = OTHER; note = Adenosine phosphorothiorate
  modified_base 38: mod_base = OTHER; note = Adenosine phosphorothiorate
  modified_base 41: mod_base = OTHER; note = 2'-Omethylcytosine
  modified_base 42: mod_base = OTHER; note = 2'-Omethyladenosine
  modified_base 43: mod_base = OTHER; note = 2'-Omethyladenosine
  modified_base 44: mod_base = OTHER; note = 2'-Omethyluridine
  modified_base 58: mod_base = OTHER; note = 2'-Omethylguanosine
  modified_base 59: mod_base = OTHER; note = 2'-Omethylcytosine
  modified_base 61: mod_base = OTHER; note = 2'-Omethylguanosine
  modified_base 63: mod_base = OTHER; note = Uridine phosphorothiorate
  modified_base 64: mod_base = OTHER; note = Uridine phosphorothiorate
  modified_base 65: mod_base = OTHER; note = 2'-Omethylcytosine
  modified_base 66: mod_base = OTHER; note = Guanosine phosphorothiorate
  modified_base 67: mod_base = OTHER; note = Adenosine phosphorothiorate
  modified_base 68: mod_base = OTHER; note = 2'-Omethyladenosine
  modified_base 70: mod_base = OTHER; note = 2'-Omethylcytosine
  modified_base 74: mod_base = OTHER; note = 2'-Omethylcytosine
  modified_base 82: mod_base = OTHER; note = 2'-Omethylguanosine

SEQ ID NO: 8899 - RNA, 76 nt, synthetic construct; identical to SEQ ID NO: 3490
  source 1..76: mol_type = other RNA
  modified_base 1: mod_base = OTHER; note = 2'-Omethylguanosine phosphorothiorate
  modified_base 2: mod_base = OTHER; note = 2'-Omethylguanosine phosphorothiorate
  modified_base 3: mod_base = OTHER; note = 2'-Omethylcytosine
  modified_base 4: mod_base = OTHER; note = 2'-Omethyluridine
  modified_base 5: mod_base = OTHER; note = 2'-Omethylcytosine
  modified_base 6: mod_base = OTHER; note = 2'-Omethylcytosine
  modified_base 16: mod_base = OTHER; note = 2'-Omethyluridine
  modified_base 17: mod_base = OTHER; note = 2'-Omethylguanosine
  modified_base 18: mod_base = OTHER; note = 2'-Omethylguanosine
  modified_base 20: mod_base = OTHER; note = 2'-Omethyluridine
  modified_base 25: mod_base = OTHER; note = 2'-Omethylcytosine
  modified_base 33: mod_base = OTHER; note = 2'-fluorouridine
  modified_base 35: mod_base = OTHER; note = Cytosine phosphorothiorate
  modified_base 37: mod_base = OTHER; note = Adenosine phosphorothiorate
  modified_base 38: mod_base = OTHER; note = Adenosine phosphorothiorate
  modified_base 41: mod_base = OTHER; note = 2'-Omethylcytosine
  modified_base 44: mod_base = OTHER; note = 2'-Omethyladenosine
  modified_base 45: mod_base = OTHER; note = 2'-Omethylguanosine
  modified_base 46: mod_base = OTHER; note = 2'-fluoroguanosine
  modified_base 47: mod_base = OTHER; note = 2'-fluorouridine
  modified_base 48: mod_base = OTHER; note = 2'-fluorouridine
  modified_base 49: mod_base = OTHER; note = 2'-Omethylguanosine
  modified_base 50: mod_base = OTHER; note = 2'-Omethylcytosine
  modified_base 51: mod_base = OTHER; note = 2'-Omethylguanosine
  modified_base 52: mod_base = OTHER; note = 2'-Omethylguanosine
  modified_base 53: mod_base = OTHER; note = 2'-Omethylguanosine
  modified_base 54: mod_base = OTHER; note = 2'-Omethyluridine
  modified_base 56: mod_base = OTHER; note = 2'-Omethylcytosine
  modified_base 59: mod_base = OTHER; note = 2'-Omethylguanosine
  modified_base 73: mod_base = OTHER; note = 2'-Omethylguanosine

SEQ ID NO: 8900 - RNA, 76 nt, synthetic construct; identical to SEQ ID NO: 3325
  source 1..76: mol_type = other RNA
  modified_base 1: mod_base = OTHER; note = 2'-Omethyluridine
  modified_base 2: mod_base = OTHER; note = 2'-Omethyladenosine
  modified_base 3: mod_base = OTHER; note = 2'-Omethylcytosine
  modified_base 4: mod_base = OTHER; note = 2'-Omethyladenosine
  modified_base 5: mod_base = OTHER; note = 2'-Omethylcytosine
  modified_base 6: mod_base = OTHER; note = 2'-Omethylcytosine
  modified_base 14: mod_base = OTHER; note = 2'-Omethyladenosine
  modified_base 15: mod_base = OTHER; note = 2'-Omethyladenosine
  modified_base 16: mod_base = OTHER; note = 2'-Omethyluridine
  modified_base 17: mod_base = OTHER; note = 2'-Omethylguanosine
  modified_base 18: mod_base = OTHER; note = 2'-Omethylguanosine
  modified_base 20: mod_base = OTHER; note = 2'-Omethyluridine
  modified_base 25: mod_base = OTHER; note = 2'-Omethylcytosine
  modified_base 41: mod_base = OTHER; note = 2'-Omethylcytosine
  modified_base 42: mod_base = OTHER; note = 2'-Omethyladenosine
  modified_base 43: mod_base = OTHER; note = 2'-Omethyladenosine
  modified_base 44: mod_base = OTHER; note = 2'-Omethyladenosine
  modified_base 49: mod_base = OTHER; note = 2'-Omethylcytosine
  modified_base 50: mod_base = OTHER; note = 2'-Omethylcytosine
  modified_base 52: mod_base = OTHER; note = 2'-Omethylguanosine
  modified_base 54: mod_base = OTHER; note = 2'-Omethyluridine
  modified_base 55: mod_base = OTHER; note = Uridine phosphorothiorate
  modified_base 56: mod_base = OTHER; note = 2'-Omethylcytosine
  modified_base 57: mod_base = OTHER; note = 2'-fluoroguanosine
  modified_base 59: mod_base = OTHER; note = 2'-Omethylguanosine
  modified_base 61: mod_base = OTHER; note = 2'-Omethylcytosine
  modified_base 65: mod_base = OTHER; note = 2'-Omethylguanosine
  modified_base 73: mod_base = OTHER; note = 2'-Omethylguanosine

SEQ ID NO: 8901 - RNA, 86 nt, synthetic construct; identical to SEQ ID NO: 3290
  source 1..86: mol_type = other RNA
  modified_base 15: mod_base = OTHER; note = 2'-Omethylguanosine

SEQ ID NO: 8902 - RNA, 85 nt, synthetic construct; identical to SEQ ID NO: 3297
  source 1..85: mol_type = other RNA
  modified_base 1: mod_base = OTHER; note = 2'-Omethylguanosine
  modified_base 40: mod_base = OTHER; note = 2'-fluorocytosine
  modified_base 41: mod_base = OTHER; note = 2'-Omethylcytosine phosphorothiorate
  modified_base 42: mod_base = OTHER; note = 2'-fluoroadenosine
  modified_base 43: mod_base = OTHER; note = 2'-Omethyladenosine phosphorothiorate
  modified_base 82: mod_base = OTHER; note = 2'-Omethylguanosine

SEQ ID NO: 8903 - RNA, 76 nt, synthetic construct; identical to SEQ ID NO: 625
  source 1..76: mol_type = other RNA
  modified_base 1: mod_base = OTHER; note = 2'-Omethylguanosine phosphorothiorate
  modified_base 2: mod_base = OTHER; note = 2'-fluoroguanosine
  modified_base 3: mod_base = OTHER; note = Cytosine phosphorothiorate
  modified_base 10: mod_base = OTHER; note = Guanosine phosphorothiorate
  modified_base 11: mod_base = OTHER; note = 2'-fluorocytosine
  modified_base 12: mod_base = OTHER; note = 2'-Omethylguanosine
  modified_base 16: mod_base = OTHER; note = 2'-Omethyluridine
  modified_base 18: mod_base = OTHER; note = 2'-Omethylguanosine
  modified_base 20: mod_base = OTHER; note = 2'-Omethyluridine
  modified_base 22: mod_base = OTHER; note = 2'-fluoroguanosine phosphorothiorate
  modified_base 23: mod_base = OTHER; note = 2'-Omethylcytosine
  modified_base 24: mod_base = OTHER; note = Guanosine phosphorothiorate
  modified_base 25: mod_base = OTHER; note = 2'-Omethylcytosine
  modified_base 29: mod_base = OTHER; note = 2'-Omethylguanosine
  modified_base 32: mod_base = OTHER; note = 2'-fluorocytosine
  modified_base 33: mod_base = OTHER; note = Uridine phosphorothiorate
  modified_base 34: mod_base = OTHER; note = Uridine phosphorothiorate
  modified_base 37: mod_base = OTHER; note = Adenosine phosphorothiorate
  modified_base 38: mod_base = OTHER; note = 2'-Omethyladenosine
  modified_base 43: mod_base = OTHER; note = 2'-Omethyladenosine
  modified_base 45: mod_base = OTHER; note = 2'-Omethylguanosine
  modified_base 50: mod_base = OTHER; note = 2'-Omethylcytosine phosphorothiorate
  modified_base 54: mod_base = OTHER; note = 2'-Omethyluridine phosphorothiorate
  modified_base 57: mod_base = OTHER; note = 2'-fluoroguanosine
  modified_base 58: mod_base = OTHER; note = 2'-fluoroadenosine
  modified_base 59: mod_base = OTHER; note = Guanosine phosphorothiorate
  modified_base 60: mod_base = OTHER; note = 2'-fluorouridine
  modified_base 64: mod_base = OTHER; note = 2'-fluoroguanosine
  modified_base 65: mod_base = OTHER; note = 2'-Omethylguanosine
  modified_base 66: mod_base = OTHER; note = 2'-fluorocytosine
  modified_base 67: mod_base = OTHER; note = 2'-fluoroguanosine
  modified_base 69: mod_base = OTHER; note = 2'-fluoroadenosine
  modified_base 74: mod_base = OTHER; note = 2'-Omethylcytosine phosphorothiorate
  modified_base 75: mod_base = OTHER; note = 2'-Omethylcytosine

SEQ ID NO: 8904 - RNA, 85 nt, synthetic construct; identical to SEQ ID NO: 3317
  source 1..85: mol_type = other RNA
  modified_base 1: mod_base = OTHER; note = 2'-Omethylguanosine phosphorothiorate
  modified_base 2: mod_base = OTHER; note = 2'-fluorocytosine
  modified_base 3: mod_base = OTHER; note = 2'-Omethyluridine phosphorothiorate
  modified_base 12: mod_base = OTHER; note = 2'-Omethylcytosine phosphorothiorate
  modified_base 26: mod_base = OTHER; note = Guanosine phosphorothiorate
  modified_base 27: mod_base = OTHER; note = Uridine phosphorothiorate
  modified_base 35: mod_base = OTHER; note = 2'-fluorouridine
  modified_base 45: mod_base = OTHER; note = Guanosine phosphorothiorate
  modified_base 46: mod_base = OTHER; note = Guanosine phosphorothiorate
  modified_base 50: mod_base = OTHER; note = 2'-Omethylcytosine phosphorothiorate
  modified_base 53: mod_base = OTHER; note = 2'-fluorocytosine
  modified_base 54: mod_base = OTHER; note = 2'-Omethylcytosine phosphorothiorate
  modified_base 57: mod_base = OTHER; note = Cytosine phosphorothiorate
  modified_base 60: mod_base = OTHER; note = Adenosine phosphorothiorate
  modified_base 66: mod_base = OTHER; note = Guanosine phosphorothiorate
  modified_base 83: mod_base = OTHER; note = Cytosine phosphorothiorate

SEQ ID NO: 8905 - RNA, 76 nt, synthetic construct; identical to SEQ ID NO: 625
  source 1..76: mol_type = other RNA
  modified_base 1: mod_base = OTHER; note = 2'-Omethylguanosine
  modified_base 2: mod_base = OTHER; note = 2'-Omethylguanosine
  modified_base 3: mod_base = OTHER; note = 2'-Omethylcytosine
  modified_base 4: mod_base = OTHER; note = 2'-Omethyluridine
  modified_base 5: mod_base = OTHER; note = 2'-Omethylcytosine
  modified_base 6: mod_base = OTHER; note = 2'-Omethylcytosine
  modified_base 7: mod_base = OTHER; note = Guanosine phosphorothiorate
  modified_base 10: mod_base = OTHER; note = 2'-Omethylguanosine
  modified_base 11: mod_base = OTHER; note = 2'-Omethylcytosine
  modified_base 12: mod_base = OTHER; note = 2'-Omethylguanosine
  modified_base 13: mod_base = OTHER; note = 2'-Omethylcytosine
  modified_base 15: mod_base = OTHER; note = 2'-Omethyladenosine
  modified_base 16: mod_base = OTHER; note = 2'-Omethyluridine
  modified_base 17: mod_base = OTHER; note = 2'-Omethylguanosine
  modified_base 18: mod_base = OTHER; note = 2'-fluoroguanosine phosphorothiorate
  modified_base 19: mod_base = OTHER; note = Adenosine phosphorothiorate
  modified_base 20: mod_base = OTHER; note = Uridine phosphorothiorate
  modified_base 21: mod_base = OTHER; note = 2'-fluoroadenosine phosphorothiorate
  modified_base 22: mod_base = OTHER; note = 2'-Omethylguanosine
  modified_base 23: mod_base = OTHER; note = 2'-Omethylcytosine
  modified_base 24: mod_base = OTHER; note = 2'-Omethylguanosine
  modified_base 25: mod_base = OTHER; note = 2'-Omethylcytosine
  modified_base 28: mod_base = OTHER; note = 2'-Omethyluridine phosphorothiorate
  modified_base 29: mod_base = OTHER; note = 2'-fluoroguanosine phosphorothiorate
  modified_base 30: mod_base = OTHER; note = 2'-Omethylguanosine phosphorothiorate
  modified_base 31: mod_base = OTHER; note = 2'-Omethyladenosine
  modified_base 33: mod_base = OTHER; note = 2'-fluorouridine
  modified_base 34: mod_base = OTHER; note = 2'-Omethyluridine phosphorothiorate
  modified_base 35: mod_base = OTHER; note = Cytosine phosphorothiorate
  modified_base 36: mod_base = OTHER; note = 2'-Omethyladenosine phosphorothiorate
  modified_base 37: mod_base = OTHER; note = Adenosine phosphorothiorate
  modified_base 38: mod_base = OTHER; note = Adenosine phosphorothiorate
  modified_base 39: mod_base = OTHER; note = 2'-Omethyluridine phosphorothiorate
  modified_base 40: mod_base = OTHER; note = 2'-Omethyluridine
  modified_base 41: mod_base = OTHER; note = 2'-Omethylcytosine
  modified_base 44: mod_base = OTHER; note = 2'-Omethyladenosine
  modified_base 48: mod_base = OTHER; note = 2'-fluorouridine phosphorothiorate
  modified_base 50: mod_base = OTHER; note = 2'-Omethylcytosine
  modified_base 51: mod_base = OTHER; note = 2'-Omethylguanosine
  modified_base 52: mod_base = OTHER; note = 2'-Omethylguanosine
  modified_base 53: mod_base = OTHER; note = 2'-fluoroguanosine
  modified_base 54: mod_base = OTHER; note = 2'-Omethyluridine
  modified_base 55: mod_base = OTHER; note = Uridine phosphorothiorate
  modified_base 56: mod_base = OTHER; note = Cytosine phosphorothiorate
  modified_base 57: mod_base = OTHER; note = 2'-Omethylguanosine
  modified_base 59: mod_base = OTHER; note = 2'-Omethylguanosine
  modified_base 61: mod_base = OTHER; note = 2'-Omethylcytosine phosphorothiorate
  modified_base 62: mod_base = OTHER; note = 2'-Omethylcytosine
  modified_base 63: mod_base = OTHER; note = 2'-fluorocytosine
  modified_base 64: mod_base = OTHER; note = 2'-Omethylguanosine
  modified_base 65: mod_base = OTHER; note = 2'-Omethylguanosine
  modified_base 66: mod_base = OTHER; note = 2'-fluorocytosine
  modified_base 67: mod_base = OTHER; note = 2'-Omethylguanosine phosphorothiorate
  modified_base 68: mod_base = OTHER; note = 2'-Omethylguanosine phosphorothiorate
  modified_base 69: mod_base = OTHER; note = 2'-fluoroadenosine phosphorothiorate
  modified_base 72: mod_base = OTHER; note = 2'-Omethylcytosine
  modified_base 73: mod_base = OTHER; note = 2'-Omethylguanosine
  modified_base 74: mod_base = OTHER; note = 2'-fluorocytosine phosphorothiorate
  modified_base 75: mod_base = OTHER; note = 2'-fluorocytosine phosphorothiorate
  modified_base 76: mod_base = OTHER; note = 2'-fluoroadenosine

SEQ ID NO: 8906 - RNA, 85 nt, synthetic construct; identical to SEQ ID NO: 3297
  source 1..85: mol_type = other RNA
  modified_base 17: mod_base = OTHER; note = 2'-Omethylguanosine
  modified_base 82: mod_base = OTHER; note = 2'-Omethylguanosine

SEQ ID NO: 8907 - RNA, 85 nt, synthetic construct; identical to SEQ ID NO: 3286
  source 1..85: mol_type = other RNA
  modified_base 1: mod_base = OTHER; note = 2'-Omethylcytosine phosphorothiorate
  modified_base 2: mod_base = OTHER; note = 2'-fluorocytosine phosphorothiorate
  modified_base 14: mod_base = OTHER; note = Guanosine phosphorothiorate
  modified_base 67: mod_base = OTHER; note = Adenosine phosphorothiorate
  modified_base 84: mod_base = OTHER; note = Cytosine phosphorothiorate
  modified_base 85: mod_base = OTHER; note = 2'-Omethyladenosine

SEQ ID NO: 8908 - RNA, 76 nt, synthetic construct; identical to SEQ ID NO: 3289
  source 1..76: mol_type = other RNA
  modified_base 1: mod_base = OTHER; note = 2'-Omethylguanosine phosphorothiorate
  modified_base 2: mod_base = OTHER; note = 2'-Omethylcytosine phosphorothiorate
  modified_base 3: mod_base = OTHER; note = 2'-Omethylcytosine
  modified_base 4: mod_base = OTHER; note = 2'-Omethyluridine
  modified_base 5: mod_base = OTHER; note = 2'-Omethylguanosine
  modified_base 6: mod_base = OTHER; note = 2'-Omethylguanosine
  modified_base 16: mod_base = OTHER; note = 2'-Omethyluridine
  modified_base 18: mod_base = OTHER; note = 2'-Omethylguanosine
  modified_base 19: mod_base = OTHER; note = 2'-Omethylguanosine
  modified_base 33: mod_base = OTHER; note = 2'-fluorouridine
  modified_base 35: mod_base = OTHER; note = Uridine phosphorothiorate
  modified_base 37: mod_base = OTHER; note = Adenosine phosphorothiorate
  modified_base 38: mod_base = OTHER; note = Adenosine phosphorothiorate
  modified_base 44: mod_base = OTHER; note = 2'-Omethylguanosine
  modified_base 45: mod_base = OTHER; note = 2'-Omethylguanosine
  modified_base 46: mod_base = OTHER; note = 2'-fluoroguanosine
  modified_base 47: mod_base = OTHER; note = 2'-fluorouridine
  modified_base 48: mod_base = OTHER; note = 2'-fluorocytosine
  modified_base 56: mod_base = OTHER; note = 2'-Omethylcytosine
  modified_base 59: mod_base = OTHER; note = 2'-Omethylguanosine
  modified_base 61: mod_base = OTHER; note = 2'-Omethylcytosine
  modified_base 62: mod_base = OTHER; note = 2'-Omethylcytosine
  modified_base 63: mod_base = OTHER; note = 2'-fluorocytosine
  modified_base 64: mod_base = OTHER; note = 2'-Omethyluridine
  modified_base 65: mod_base = OTHER; note = 2'-Omethylguanosine
  modified_base 66: mod_base = OTHER; note = 2'-Omethyluridine
  modified_base 67: mod_base = OTHER; note = 2'-Omethylcytosine
  modified_base 68: mod_base = OTHER; note = 2'-Omethylcytosine
  modified_base 73: mod_base = OTHER; note = 2'-Omethylguanosine

SEQ ID NO: 8909 - RNA, 75 nt, synthetic construct; identical to SEQ ID NO: 3311
  source 1..75: mol_type = other RNA
  modified_base 1: mod_base = OTHER; note = Guanosine phosphorothiorate
  modified_base 2: mod_base = OTHER; note = 2'-Omethylguanosine phosphorothiorate
  modified_base 12: mod_base = OTHER; note = Guanosine phosphorothiorate
  modified_base 18: mod_base = OTHER; note = 2'-fluoroguanosine phosphorothiorate
  modified_base 19: mod_base = OTHER; note = 2'-fluorouridine
  modified_base 23: mod_base = OTHER; note = Cytosine phosphorothiorate
  modified_base 24: mod_base = OTHER; note = 2'-fluoroadenosine
  modified_base 42: mod_base = OTHER; note = 2'-fluoroadenosine
  modified_base 60: mod_base = OTHER; note = 2'-fluorocytosine
  modified_base 64: mod_base = OTHER; note = 2'-fluoroguanosine phosphorothiorate
  modified_base 65: mod_base = OTHER; note = Uridine phosphorothiorate
  modified_base 66: mod_base = OTHER; note = 2'-fluoroguanosine
  modified_base 73: mod_base = OTHER; note = Cytosine phosphorothiorate
  modified_base 74: mod_base = OTHER; note = Cytosine phosphorothiorate
  modified_base 75: mod_base = OTHER; note = 2'-fluoroadenosine

SEQ ID NO: 8910 - RNA, 76 nt, synthetic construct; identical to SEQ ID NO: 625
  source 1..76: mol_type = other RNA
  modified_base 4: mod_base = OTHER; note = 2'-fluorouridine
  modified_base 11: mod_base = OTHER; note = 2'-Omethylcytosine phosphorothiorate
  modified_base 12: mod_base = OTHER; note = 2'-Omethylguanosine
  modified_base 16: mod_base = OTHER; note = 2'-fluorouridine
  modified_base 20: mod_base = OTHER; note = Uridine phosphorothiorate
  modified_base 22: mod_base = OTHER; note = 2'-fluoroguanosine
  modified_base 23: mod_base = OTHER; note = 2'-fluorocytosine phosphorothiorate
  modified_base 28: mod_base = OTHER; note = 2'-fluorouridine
  modified_base 29: mod_base = OTHER; note = Guanosine phosphorothiorate
  modified_base 30: mod_base = OTHER; note = 2'-fluoroguanosine
  modified_base 33: mod_base = OTHER; note = Uridine phosphorothiorate
  modified_base 41: mod_base = OTHER; note = 2'-fluorocytosine phosphorothiorate
  modified_base 42: mod_base = OTHER; note = 2'-fluoroadenosine
  modified_base 43: mod_base = OTHER; note = 2'-fluoroadenosine
  modified_base 44: mod_base = OTHER; note = 2'-fluoroadenosine
  modified_base 47: mod_base = OTHER; note = Uridine phosphorothiorate
  modified_base 48: mod_base = OTHER; note = 2'-Omethyluridine phosphorothiorate
  modified_base 49: mod_base = OTHER; note = 2'-fluorocytosine
  modified_base 50: mod_base = OTHER; note = 2'-Omethylcytosine
  modified_base 54: mod_base = OTHER; note = 2'-fluorouridine
  modified_base 56: mod_base = OTHER; note = 2'-Omethylcytosine
  modified_base 60: mod_base = OTHER; note = 2'-fluorouridine
  modified_base 63: mod_base = OTHER; note = 2'-fluorocytosine
  modified_base 64: mod_base = OTHER; note = 2'-Omethylguanosine
  modified_base 66: mod_base = OTHER; note = 2'-Omethylcytosine
  modified_base 67: mod_base = OTHER; note = Guanosine phosphorothiorate
  modified_base 68: mod_base = OTHER; note = 2'-fluoroguanosine
  modified_base 69: mod_base = OTHER; note = Adenosine phosphorothiorate
  modified_base 70: mod_base = OTHER; note = 2'-fluoroguanosine
  modified_base 71: mod_base = OTHER; note = Uridine phosphorothiorate
  modified_base 72: mod_base = OTHER; note = 2'-Omethylcytosine
  modified_base 73: mod_base = OTHER; note = 2'-Omethylguanosine
  modified_base 74: mod_base = OTHER; note = Cytosine phosphorothiorate
  modified_base 75: mod_base = OTHER; note = 2'-fluorocytosine

SEQ ID NO: 8911 - RNA, 76 nt, synthetic construct; identical to SEQ ID NO: 625
  source 1..76: mol_type = other RNA
  modified_base 2: mod_base = OTHER; note = 2'-fluoroguanosine phosphorothiorate
  modified_base 5: mod_base = OTHER; note = 2'-Omethylcytosine
  modified_base 6: mod_base = OTHER; note = 2'-Omethylcytosine
  modified_base 13: mod_base = OTHER; note = 2'-fluorocytosine
  modified_base 15: mod_base = OTHER; note = 2'-Omethyladenosine
  modified_base 17: mod_base = OTHER; note = Guanosine phosphorothiorate
  modified_base 18: mod_base = OTHER; note = 2'-fluoroguanosine
  modified_base 19: mod_base = OTHER; note = Adenosine phosphorothiorate
  modified_base 20: mod_base = OTHER; note = 2'-Omethyluridine
  modified_base 22: mod_base = OTHER; note = 2'-Omethylguanosine
  modified_base 29: mod_base = OTHER; note = 2'-fluoroguanosine
  modified_base 33: mod_base = OTHER; note = 2'-fluorouridine phosphorothiorate
  modified_base 34: mod_base = OTHER; note = 2'-fluorouridine
  modified_base 38: mod_base = OTHER; note = 2'-fluoroadenosine
  modified_base 43: mod_base = OTHER; note = 2'-Omethyladenosine
  modified_base 45: mod_base = OTHER; note = 2'-fluoroguanosine
  modified_base 46: mod_base = OTHER; note = 2'-Omethylguanosine phosphorothiorate
  modified_base 50: mod_base = OTHER; note = Cytosine phosphorothiorate
  modified_base 51: mod_base = OTHER; note = 2'-Omethylguanosine
  modified_base 52: mod_base = OTHER; note = 2'-fluoroguanosine
  modified_base 54: mod_base = OTHER; note = 2'-fluorouridine
  modified_base 57: mod_base = OTHER; note = 2'-fluoroguanosine phosphorothiorate
  modified_base 59: mod_base = OTHER; note = 2'-fluoroguanosine
  modified_base 60: mod_base = OTHER; note = 2'-Omethyluridine phosphorothiorate
  modified_base 62: mod_base = OTHER; note = 2'-Omethylcytosine
  modified_base 71: mod_base = OTHER; note = 2'-fluorouridine
  modified_base 72: mod_base = OTHER; note = 2'-Omethylcytosine phosphorothiorate
  modified_base 73: mod_base = OTHER; note = 2'-fluoroguanosine
  modified_base 74: mod_base = OTHER; note = 2'-fluorocytosine
  modified_base 75: mod_base = OTHER; note = Cytosine phosphorothiorate
  modified_base 76: mod_base = OTHER; note = 2'-fluoroadenosine

SEQ ID NO: 8912 - RNA, 85 nt, synthetic construct; identical to SEQ ID NO: 3297
  source 1..85: mol_type = other RNA
  modified_base 1: mod_base = OTHER; note = 2'-Omethylguanosine phosphorothiorate
  modified_base 2: mod_base = OTHER; note = 2'-Omethylcytosine phosphorothiorate
  modified_base 3: mod_base = OTHER; note = 2'-Omethyluridine
  modified_base 4: mod_base = OTHER; note = 2'-Omethylguanosine
  modified_base 5: mod_base = OTHER; note = 2'-Omethyluridine
  modified_base 6: mod_base = OTHER; note = 2'-Omethylguanosine
  modified_base 16: mod_base = OTHER; note = 2'-Omethyluridine
  modified_base 17: mod_base = OTHER; note = 2'-Omethylguanosine
  modified_base 18: mod_base = OTHER; note = 2'-Omethylguanosine
  modified_base 33: mod_base = OTHER; note = 2'-fluorouridine
  modified_base 35: mod_base = OTHER; note = Cytosine phosphorothiorate
  modified_base 37: mod_base = OTHER; note = Adenosine phosphorothiorate
  modified_base 38: mod_base = OTHER; note = Adenosine phosphorothiorate
  modified_base 44: mod_base = OTHER; note = 2'-Omethyluridine
  modified_base 56: mod_base = OTHER; note = 2'-fluoroguanosine
  modified_base 57: mod_base = OTHER; note = 2'-fluorocytosine
  modified_base 58: mod_base = OTHER; note = 2'-Omethylguanosine
  modified_base 59: mod_base = OTHER; note = 2'-Omethylcytosine
  modified_base 60: mod_base = OTHER; note = 2'-Omethyladenosine
  modified_base 63: mod_base = OTHER; note = 2'-Omethyluridine
  modified_base 65: mod_base = OTHER; note = 2'-Omethylcytosine
  modified_base 68: mod_base = OTHER; note = 2'-Omethyladenosine
  modified_base 70: mod_base = OTHER; note = 2'-Omethylcytosine
  modified_base 71: mod_base = OTHER; note = 2'-Omethylcytosine
  modified_base 72: mod_base = OTHER; note = 2'-fluorouridine
  modified_base 73: mod_base = OTHER; note = 2'-Omethylguanosine
  modified_base 74: mod_base = OTHER; note = 2'-Omethylcytosine
  modified_base 75: mod_base = OTHER; note = 2'-Omethyluridine
  modified_base 76: mod_base = OTHER; note = 2'-Omethylcytosine
  modified_base 77: mod_base = OTHER; note = 2'-Omethyladenosine
  modified_base 82: mod_base = OTHER; note = 2'-Omethylguanosine

SEQ ID NO: 8913 - RNA, 85 nt, synthetic construct; identical to SEQ ID NO: 3297
  source 1..85: mol_type = other RNA
  modified_base 1: mod_base = OTHER; note = 2'-Omethylguanosine phosphorothiorate
  modified_base 4: mod_base = OTHER; note = 2'-fluoroguanosine
  modified_base 18: mod_base = OTHER; note = 2'-Omethylguanosine
  modified_base 36: mod_base = OTHER; note = 2'-fluoroadenosine
  modified_base 46: mod_base = OTHER; note = 2'-fluoroguanosine phosphorothiorate
  modified_base 63: mod_base = OTHER; note = 2'-fluorouridine phosphorothiorate
  modified_base 82: mod_base = OTHER; note = 2'-Omethylguanosine phosphorothiorate

SEQ ID NO: 8914 - RNA, 75 nt, synthetic construct; identical to SEQ ID NO: 1045
  source 1..75: mol_type = other RNA
  modified_base 1: mod_base = OTHER; note = 2'-Omethylguanosine phosphorothiorate
  modified_base 2: mod_base = OTHER; note = 2'-Omethylguanosine phosphorothiorate
  modified_base 18: mod_base = OTHER; note = 2'-Omethylguanosine
  modified_base 20: mod_base = OTHER; note = 2'-fluoroadenosine phosphorothiorate
  modified_base 24: mod_base = OTHER; note = 2'-Omethyladenosine phosphorothiorate
  modified_base 26: mod_base = OTHER; note = 2'-Omethyluridine phosphorothiorate
  modified_base 33: mod_base = OTHER; note = 2'-fluorouridine
  modified_base 34: mod_base = OTHER; note = 2'-fluorouridine
  modified_base 36: mod_base = OTHER; note = 2'-fluoroadenosine
  modified_base 38: mod_base = OTHER; note = 2'-Omethyladenosine
  modified_base 47: mod_base = OTHER; note = 2'-Omethyluridine
  modified_base 52: mod_base = OTHER; note = 2'-Omethylguanosine
  modified_base 66: mod_base = OTHER; note = 2'-Omethylguanosine phosphorothiorate
  modified_base 72: mod_base = OTHER; note = 2'-Omethyluridine
  modified_base 74: mod_base = OTHER; note = 2'-Omethylcytosine phosphorothiorate

SEQ ID NO: 8915 - DNA, 76 bp, synthetic construct; identical to SEQ ID NO: 1924
  source 1..76: mol_type = other DNA
  modified_base 1: mod_base = OTHER; note = 2'-Omethylguanosine
  modified_base 2: mod_base = OTHER; note = 2'-fluoroguanosine phosphorothiorate
  modified_base 3: mod_base = OTHER; note = deoxycytosine phosphorothiorate
  modified_base 13: mod_base = OTHER; note = Cytosine phosphorothiorate
  modified_base 14: mod_base = OTHER; note = deoxyadenosine phosphorothiorate
  modified_base 15: mod_base = OTHER; note = Adenosine phosphorothiorate
  modified_base 16: mod_base = OTHER; note = 2'-fluorouridine
  modified_base 17: mod_base = OTHER; note = 2'-O-(2-Methoxyethyl) guanosine
  modified_base 24: mod_base = OTHER; note = Guanosine phosphorothiorate
  modified_base 25: mod_base = OTHER; note = 2'-O-(2-Methoxyethyl) 5-methylcytosine phosphorothiorate
  modified_base 26: mod_base = OTHER; note = 2'-O-(2-Methoxyethyl) adenosine
  modified_base 27: mod_base = OTHER; note = Uridine phosphorothiorate
  modified_base 28: mod_base = OTHER; note = 2'-fluorouridine
  modified_base 29: mod_base = OTHER; note = Guanosine phosphorothiorate
  modified_base 30: mod_base = OTHER; note = 2'-Omethylguanosine phosphorothiorate
  modified_base 31: mod_base = OTHER; note = 2'-Omethyladenosine phosphorothiorate
  modified_base 33: mod_base = OTHER; note = 2'-fluorouridine
  modified_base 34: mod_base = OTHER; note = 2'-O-(2-Methoxyethyl) thymine phosphorothiorate
  modified_base 39: mod_base = OTHER; note = 2'-Omethyluridine
  modified_base 41: mod_base = OTHER; note = Cytosine phosphorothiorate
  modified_base 42: mod_base = OTHER; note = 2'-fluoroadenosine
  modified_base 45: mod_base = OTHER; note = Guanosine phosphorothiorate
  modified_base 46: mod_base = OTHER; note = 2'-Omethylguanosine phosphorothiorate
  modified_base 49: mod_base = OTHER; note = 2'-Omethylcytosine
  modified_base 50: mod_base = OTHER; note = Cytosine phosphorothiorate
  modified_base 51: mod_base = OTHER; note = 2'-O-(2-Methoxyethyl) guanosine
  modified_base 61: mod_base = OTHER; note = 2'-O-(2-Methoxyethyl) 5-methylcytosine phosphorothiorate
  modified_base 62: mod_base = OTHER; note = 2'-O-(2-Methoxyethyl) 5-methylcytosine
  modified_base 64: mod_base = OTHER; note = Guanosine phosphorothiorate
  modified_base 67: mod_base = OTHER; note = 2'-O-(2-Methoxyethyl) guanosine
  modified_base 69: mod_base = OTHER; note = 2'-O-(2-Methoxyethyl) adenosine
  modified_base 71: mod_base = OTHER; note = 2'-O-(2-Methoxyethyl) thymine
  modified_base 74: mod_base = OTHER; note = Cytosine phosphorothiorate
  modified_base 75: mod_base = OTHER; note = 2'-Omethylcytosine
  modified_base 76: mod_base = OTHER; note = 2'-O-(2-Methoxyethyl) adenosine
  misc_feature 1..2: note = RNA
  misc_feature 3..5: note = DNA
  misc_feature 6..13: note = RNA
  misc_feature 14: note = DNA
  misc_feature 15..31: note = RNA
  misc_feature 32: note = DNA
  misc_feature 33..64: note = RNA
  misc_feature 65: note = DNA
  misc_feature 66..76: note = RNA

SEQ ID NO: 8916 - RNA, 85 nt, synthetic construct; identical to SEQ ID NO: 3297
  source 1..85: mol_type = other RNA
  modified_base 1: mod_base = OTHER; note = 2'-Omethylguanosine
  modified_base 13: mod_base = OTHER; note = 2'-Omethylguanosine
  modified_base 14: mod_base = OTHER; note = 2'-Omethyladenosine
  modified_base 15: mod_base = OTHER; note = 2'-Omethylguanosine
  modified_base 16: mod_base = OTHER; note = 2'-Omethyluridine
  modified_base 17: mod_base = OTHER; note = 2'-Omethylguanosine
  modified_base 18: mod_base = OTHER; note = 2'-Omethylguanosine
  modified_base 19: mod_base = OTHER; note = Uridine phosphorothiorate
  modified_base 20: mod_base = OTHER; note = 2'-Omethyluridine
  modified_base 21: mod_base = OTHER; note = Adenosine phosphorothiorate
  modified_base 25: mod_base = OTHER; note = 2'-Omethylcytosine
  modified_base 41: mod_base = OTHER; note = 2'-fluorocytosine
  modified_base 42: mod_base = OTHER; note = 2'-Omethyladenosine
  modified_base 43: mod_base = OTHER; note = 2'-Omethyladenosine
  modified_base 44: mod_base = OTHER; note = 2'-fluorouridine
  modified_base 58: mod_base = OTHER; note = 2'-Omethylguanosine
  modified_base 59: mod_base = OTHER; note = 2'-Omethylcytosine
  modified_base 61: mod_base = OTHER; note = 2'-Omethylguanosine
  modified_base 63: mod_base = OTHER; note = Uridine phosphorothiorate
  modified_base 64: mod_base = OTHER; note = Uridine phosphorothiorate
  modified_base 70: mod_base = OTHER; note = 2'-Omethylcytosine
  modified_base 74: mod_base = OTHER; note = 2'-Omethylcytosine
  modified_base 82: mod_base = OTHER; note = 2'-Omethylguanosine

SEQ ID NO: 8917 - RNA, 76 nt, synthetic construct; identical to SEQ ID NO: 625
  source 1..76: mol_type = other RNA
  modified_base 1: mod_base = OTHER; note = 2'-Omethylguanosine
  modified_base 2: mod_base = OTHER; note = 2'-fluoroguanosine
  modified_base 3: mod_base = OTHER; note = Cytosine phosphorothiorate
  modified_base 4: mod_base = OTHER; note = 2'-fluorouridine
  modified_base 5: mod_base = OTHER; note = Cytosine phosphorothiorate
  modified_base 6: mod_base = OTHER; note = 2'-fluorocytosine
  modified_base 10: mod_base = OTHER; note = Guanosine phosphorothiorate
  modified_base 11: mod_base = OTHER; note = 2'-fluorocytosine
  modified_base 14: mod_base = OTHER; note = 2'-fluoroadenosine
  modified_base 16: mod_base = OTHER; note = 2'-Omethyluridine
  modified_base 18: mod_base = OTHER; note = 2'-fluoroguanosine
  modified_base 20: mod_base = OTHER; note = Uridine phosphorothiorate
  modified_base 23: mod_base = OTHER; note = Cytosine phosphorothiorate
  modified_base 27: mod_base = OTHER; note = 2'-Omethyluridine phosphorothiorate
  modified_base 28: mod_base = OTHER; note = 2'-fluorouridine
  modified_base 30: mod_base = OTHER; note = Guanosine phosphorothiorate
  modified_base 31: mod_base = OTHER; note = 2'-Omethyladenosine
  modified_base 33: mod_base = OTHER; note = 2'-fluorouridine
  modified_base 39: mod_base = OTHER; note = 2'-fluorouridine phosphorothiorate
  modified_base 40: mod_base = OTHER; note = 2'-Omethyluridine
  modified_base 42: mod_base = OTHER; note = 2'-fluoroadenosine
  modified_base 46: mod_base = OTHER; note = 2'-Omethylguanosine phosphorothiorate
  modified_base 47: mod_base = OTHER; note = 2'-fluorouridine
  modified_base 49: mod_base = OTHER; note = 2'-Omethylcytosine
  modified_base 51: mod_base = OTHER; note = Guanosine phosphorothiorate
  modified_base 53: mod_base = OTHER; note = 2'-fluoroguanosine
  modified_base 56: mod_base = OTHER; note = 2'-fluorocytosine
  modified_base 57: mod_base = OTHER; note = 2'-Omethylguanosine
  modified_base 58: mod_base = OTHER; note = Adenosine phosphorothiorate
  modified_base 59: mod_base = OTHER; note = 2'-fluoroguanosine
  modified_base 62: mod_base = OTHER; note = 2'-fluorocytosine
  modified_base 63: mod_base = OTHER; note = 2'-fluorocytosine
  modified_base 67: mod_base = OTHER; note = 2'-Omethylguanosine
  modified_base 69: mod_base = OTHER; note = 2'-Omethyladenosine
  modified_base 70: mod_base = OTHER; note = 2'-Omethylguanosine
  modified_base 71: mod_base = OTHER; note = Uridine phosphorothiorate
  modified_base 72: mod_base = OTHER; note = 2'-Omethylcytosine
  modified_base 73: mod_base = OTHER; note = 2'-fluoroguanosine
  modified_base 75: mod_base = OTHER; note = 2'-Omethylcytosine phosphorothiorate

SEQ ID NO: 8918 - RNA, 76 nt, synthetic construct; identical to SEQ ID NO: 625
  source 1..76: mol_type = other RNA
  modified_base 1: mod_base = OTHER; note = 2'-fluoroguanosine
  modified_base 4: mod_base = OTHER; note = 2'-Omethyluridine
  modified_base 10: mod_base = OTHER; note = 2'-Omethylguanosine
  modified_base 12: mod_base = OTHER; note = 2'-fluoroguanosine
  modified_base 14: mod_base = OTHER; note = 2'-fluoroadenosine
  modified_base 18: mod_base = OTHER; note = 2'-Omethylguanosine
  modified_base 22: mod_base = OTHER; note = Guanosine phosphorothiorate
  modified_base 23: mod_base = OTHER; note = 2'-Omethylcytosine
  modified_base 27: mod_base = OTHER; note = 2'-fluorouridine
  modified_base 28: mod_base = OTHER; note = Uridine phosphorothiorate
  modified_base 29: mod_base = OTHER; note = 2'-fluoroguanosine
  modified_base 30: mod_base = OTHER; note = 2'-fluoroguanosine
  modified_base 38: mod_base = OTHER; note = 2'-Omethyladenosine
  modified_base 39: mod_base = OTHER; note = 2'-fluorouridine
  modified_base 40: mod_base = OTHER; note = Uridine phosphorothiorate
  modified_base 41: mod_base = OTHER; note = 2'-fluorocytosine
  modified_base 43: mod_base = OTHER; note = 2'-Omethyladenosine
  modified_base 44: mod_base = OTHER; note = Adenosine phosphorothiorate
  modified_base 45: mod_base = OTHER; note = 2'-fluoroguanosine
  modified_base 47: mod_base = OTHER; note = 2'-fluorouridine phosphorothiorate
  modified_base 48: mod_base = OTHER; note = 2'-fluorouridine
  modified_base 49: mod_base = OTHER; note = 2'-Omethylcytosine
  modified_base 50: mod_base = OTHER; note = 2'-Omethylcytosine phosphorothiorate
  modified_base 51: mod_base = OTHER; note = 2'-Omethylguanosine
  modified_base 52: mod_base = OTHER; note = Guanosine phosphorothiorate
  modified_base 53: mod_base = OTHER; note = 2'-Omethylguanosine
  modified_base 54: mod_base = OTHER; note = 2'-fluorouridine
  modified_base 56: mod_base = OTHER; note = 2'-Omethylcytosine
  modified_base 57: mod_base = OTHER; note = 2'-fluoroguanosine
  modified_base 59: mod_base = OTHER; note = 2'-Omethylguanosine phosphorothiorate
  modified_base 60: mod_base = OTHER; note = 2'-Omethyluridine
  modified_base 61: mod_base = OTHER; note = 2'-fluorocytosine
  modified_base 62: mod_base = OTHER; note = 2'-fluorocytosine
  modified_base 63: mod_base = OTHER; note = 2'-fluorocytosine
  modified_base 66: mod_base = OTHER; note = Cytosine phosphorothiorate
  modified_base 67: mod_base = OTHER; note = Guanosine phosphorothiorate
  modified_base 68: mod_base = OTHER; note = 2'-Omethylguanosine phosphorothiorate
  modified_base 76: mod_base = OTHER; note = 2'-fluoroadenosine

SEQ ID NO: 8919 - RNA, 76 nt, synthetic construct; identical to SEQ ID NO: 3318
  source 1..76: mol_type = other RNA
  modified_base 10: mod_base = OTHER; note = 2'-Omethylguanosine
  modified_base 11: mod_base = OTHER; note = 2'-Omethylcytosine
  modified_base 12: mod_base = OTHER; note = 2'-Omethyluridine
  modified_base 13: mod_base = OTHER; note = 2'-Omethylcytosine
  modified_base 22: mod_base = OTHER; note = 2'-Omethylguanosine
  modified_base 23: mod_base = OTHER; note = 2'-Omethyladenosine
  modified_base 24: mod_base = OTHER; note = 2'-Omethylguanosine
  modified_base 25: mod_base = OTHER; note = 2'-Omethylcytosine
  modified_base 49: mod_base = OTHER; note = 2'-Omethylguanosine
  modified_base 50: mod_base = OTHER; note = 2'-Omethylcytosine
  modified_base 51: mod_base = OTHER; note = 2'-Omethyluridine
  modified_base 52: mod_base = OTHER; note = 2'-Omethylguanosine
  modified_base 53: mod_base = OTHER; note = 2'-Omethylguanosine
  modified_base 73: mod_base = OTHER; note = 2'-Omethyladenosine

SEQ ID NO: 8920 - RNA, 86 nt, synthetic construct; identical to SEQ ID NO: 3290
  source 1..86: mol_type = other RNA
  modified_base 1: mod_base = OTHER; note = 2'-Omethyladenosine
  modified_base 2: mod_base = OTHER; note = 2'-Omethylcytosine
  modified_base 3: mod_base = OTHER; note = 2'-Omethylcytosine
  modified_base 4: mod_base = OTHER; note = 2'-Omethyladenosine
  modified_base 5: mod_base = OTHER; note = 2'-Omethylguanosine
  modified_base 6: mod_base = OTHER; note = 2'-Omethylguanosine
  modified_base 16: mod_base = OTHER; note = 2'-Omethyluridine
  modified_base 17: mod_base = OTHER; note = 2'-Omethylguanosine
  modified_base 18: mod_base = OTHER; note = 2'-Omethylguanosine
  modified_base 20: mod_base = OTHER; note = 2'-Omethyluridine
  modified_base 25: mod_base = OTHER; note = 2'-Omethylcytosine
  modified_base 33: mod_base = OTHER; note = 2'-fluorouridine
  modified_base 35: mod_base = OTHER; note = Cytosine phosphorothiorate
  modified_base 37: mod_base = OTHER; note = Guanosine phosphorothiorate
  modified_base 38: mod_base = OTHER; note = Adenosine phosphorothiorate
  modified_base 41: mod_base = OTHER; note = 2'-fluorocytosine
  modified_base 42: mod_base = OTHER; note = 2'-Omethyladenosine
  modified_base 43: mod_base = OTHER; note = 2'-Omethyladenosine
  modified_base 44: mod_base = OTHER; note = 2'-fluorouridine
  modified_base 59: mod_base = OTHER; note = 2'-Omethylguanosine
  modified_base 60: mod_base = OTHER; note = 2'-Omethyluridine
  modified_base 62: mod_base = OTHER; note = 2'-Omethylguanosine
  modified_base 64: mod_base = OTHER; note = 2'-Omethyluridine
  modified_base 65: mod_base = OTHER; note = Uridine phosphorothiorate
  modified_base 66: mod_base = OTHER; note = 2'-Omethylcytosine
  modified_base 67: mod_base = OTHER; note = 2'-fluoroguanosine
  modified_base 69: mod_base = OTHER; note = 2'-Omethyladenosine
  modified_base 71: mod_base = OTHER; note = 2'-Omethylcytosine
  modified_base 72: mod_base = OTHER; note = 2'-Omethylcytosine
  modified_base 73: mod_base = OTHER; note = 2'-fluorocytosine
  modified_base 74: mod_base = OTHER; note = 2'-Omethyladenosine
  modified_base 75: mod_base = OTHER; note = 2'-Omethylcytosine
  modified_base 83: mod_base = OTHER; note = 2'-Omethyladenosine

SEQ ID NO: 8921 - RNA, 75 nt, synthetic construct; identical to SEQ ID NO: 1045
  source 1..75: mol_type = other RNA
  modified_base 1: mod_base = OTHER; note = 2'-fluoroguanosine
  modified_base 2: mod_base = OTHER; note = 2'-Omethylguanosine phosphorothiorate
  modified_base 11: mod_base = OTHER; note = Uridine phosphorothiorate
  modified_base 15: mod_base = OTHER; note = 2'-fluoroadenosine
  modified_base 20: mod_base = OTHER; note = 2'-Omethyladenosine phosphorothiorate
  modified_base 21: mod_base = OTHER; note = 2'-Omethyladenosine
  modified_base 22: mod_base = OTHER; note = 2'-fluoroguanosine
  modified_base 25: mod_base = OTHER; note = 2'-fluorocytosine phosphorothiorate
  modified_base 40: mod_base = OTHER; note = Cytosine phosphorothiorate
  modified_base 44: mod_base = OTHER; note = 2'-fluorocytosine
  modified_base 59: mod_base = OTHER; note = 2'-fluorouridine phosphorothiorate
  modified_base 60: mod_base = OTHER; note = Cytosine phosphorothiorate
  modified_base 62: mod_base = OTHER; note = Cytosine phosphorothiorate
  modified_base 63: mod_base = OTHER; note = Guanosine phosphorothiorate
  modified_base 64: mod_base = OTHER; note = 2'-fluoroguanosine
  modified_base 67: mod_base = OTHER; note = Guanosine phosphorothiorate
  modified_base 72: mod_base = OTHER; note = Uridine phosphorothiorate
  modified_base 73: mod_base = OTHER; note = Cytosine phosphorothiorate
  modified_base 74: mod_base = OTHER; note = 2'-fluorocytosine phosphorothiorate
  modified_base 75: mod_base = OTHER; note = 2'-fluoroadenosine

SEQ ID NO: 8922 - RNA, 85 nt, synthetic construct; identical to SEQ ID NO: 3297
  source 1..85: mol_type = other RNA
  modified_base 1: mod_base = OTHER; note = 2'-Omethylguanosine
  modified_base 2: mod_base = OTHER; note = 2'-Omethylcytosine
  modified_base 3: mod_base = OTHER; note = 2'-Omethyluridine
  modified_base 4: mod_base = OTHER; note = 2'-Omethylguanosine
  modified_base 5: mod_base = OTHER; note = 2'-Omethyluridine
  modified_base 6: mod_base = OTHER; note = 2'-Omethylguanosine
  modified_base 14: mod_base = OTHER; note = 2'-Omethyladenosine
  modified_base 15: mod_base = OTHER; note = 2'-Omethylguanosine
  modified_base 16: mod_base = OTHER; note = 2'-Omethyluridine
  modified_base 17: mod_base = OTHER; note = 2'-Omethylguanosine
  modified_base 18: mod_base = OTHER; note = 2'-Omethylguanosine
  modified_base 20: mod_base = OTHER; note = 2'-Omethyluridine
  modified_base 25: mod_base = OTHER; note = 2'-Omethylcytosine
  modified_base 33: mod_base = OTHER; note = 2'-fluorouridine
  modified_base 35: mod_base = OTHER; note = Cytosine phosphorothiorate
  modified_base 37: mod_base = OTHER; note = Adenosine phosphorothiorate
  modified_base 38: mod_base = OTHER; note = Adenosine phosphorothiorate
  modified_base 58: mod_base = OTHER; note = 2'-Omethylguanosine
  modified_base 59: mod_base = OTHER; note = 2'-Omethylcytosine
  modified_base 61: mod_base = OTHER; note = 2'-Omethylguanosine
  modified_base 63: mod_base = OTHER; note = 2'-Omethyluridine
  modified_base 64: mod_base = OTHER; note = Uridine phosphorothiorate
  modified_base 65: mod_base = OTHER; note = 2'-Omethylcytosine
  modified_base 66: mod_base = OTHER; note = 2'-fluoroguanosine
  modified_base 68: mod_base = OTHER; note = 2'-Omethyladenosine
  modified_base 70: mod_base = OTHER; note = 2'-Omethylcytosine
  modified_base 71: mod_base = OTHER; note = 2'-Omethylcytosine
  modified_base 72: mod_base = OTHER; note = 2'-fluorouridine
  modified_base 73: mod_base = OTHER; note = 2'-Omethylguanosine
  modified_base 74: mod_base = OTHER; note = 2'-Omethylcytosine
  modified_base 82: mod_base = OTHER; note = 2'-Omethylguanosine

SEQ ID NO: 8923 - RNA, 75 nt, synthetic construct; identical to SEQ ID NO: 1045
  source 1..75: mol_type = other RNA
  modified_base 1: mod_base = OTHER; note = 2'-Omethylguanosine
  modified_base 19: mod_base = OTHER; note = 2'-Omethyluridine
  modified_base 20: mod_base = OTHER; note = 2'-Omethyladenosine
  modified_base 22: mod_base = OTHER; note = 2'-Omethylguanosine
  modified_base 40: mod_base = OTHER; note = 2'-fluorocytosine
  modified_base 41: mod_base = OTHER; note = 2'-Omethylcytosine
  modified_base 42: mod_base = OTHER; note = 2'-Omethyladenosine
  modified_base 43: mod_base = OTHER; note = 2'-Omethylguanosine
  modified_base 72: mod_base = OTHER; note = 2'-Omethyluridine

SEQ ID NO: 8924 - RNA, 76 nt, synthetic construct; identical to SEQ ID NO: 625
  source 1..76: mol_type = other RNA
  modified_base 3: mod_base = OTHER; note = 2'-Omethylcytosine
  modified_base 4: mod_base = OTHER; note = 2'-Omethyluridine
  modified_base 10: mod_base = OTHER; note = Guanosine phosphorothiorate
  modified_base 12: mod_base = OTHER; note = Guanosine phosphorothiorate
  modified_base 13: mod_base = OTHER; note = 2'-fluorocytosine
  modified_base 17: mod_base = OTHER; note = 2'-Omethylguanosine
  modified_base 18: mod_base = OTHER; note = 2'-fluoroguanosine
  modified_base 24: mod_base = OTHER; note = 2'-Omethylguanosine
  modified_base 25: mod_base = OTHER; note = 2'-fluorocytosine
  modified_base 28: mod_base = OTHER; note = 2'-fluorouridine
  modified_base 34: mod_base = OTHER; note = 2'-Omethyluridine
  modified_base 38: mod_base = OTHER; note = 2'-fluoroadenosine
  modified_base 40: mod_base = OTHER; note = 2'-fluorouridine
  modified_base 41: mod_base = OTHER; note = 2'-Omethylcytosine
  modified_base 42: mod_base = OTHER; note = Adenosine phosphorothiorate
  modified_base 47: mod_base = OTHER; note = 2'-fluorouridine
  modified_base 48: mod_base = OTHER; note = Uridine phosphorothiorate
  modified_base 51: mod_base = OTHER; note = 2'-Omethylguanosine phosphorothiorate
  modified_base 52: mod_base = OTHER; note = 2'-fluoroguanosine
  modified_base 53: mod_base = OTHER; note = 2'-fluoroguanosine
  modified_base 54: mod_base = OTHER; note = 2'-fluorouridine phosphorothiorate
  modified_base 59: mod_base = OTHER; note = 2'-fluoroguanosine
  modified_base 60: mod_base = OTHER; note = Uridine phosphorothiorate
  modified_base 61: mod_base = OTHER; note = 2'-fluorocytosine
  modified_base 62: mod_base = OTHER; note = 2'-Omethylcytosine phosphorothiorate
  modified_base 63: mod_base = OTHER; note = 2'-Omethylcytosine
  modified_base 64: mod_base = OTHER; note = 2'-Omethylguanosine
  modified_base 69: mod_base = OTHER; note = Adenosine phosphorothiorate
  modified_base 70: mod_base = OTHER; note = 2'-Omethylguanosine phosphorothiorate
  modified_base 71: mod_base = OTHER; note = 2'-fluorouridine
  modified_base 72: mod_base = OTHER; note = 2'-Omethylcytosine
  modified_base 73: mod_base = OTHER; note = 2'-fluoroguanosine
  modified_base 75: mod_base = OTHER; note = 2'-Omethylcytosine

SEQ ID NO: 8925 - RNA, 76 nt, synthetic construct; identical to SEQ ID NO: 625
  source 1..76: mol_type = other RNA
  modified_base 2: mod_base = OTHER; note = 2'-fluoroguanosine
  modified_base 5: mod_base = OTHER; note = 2'-fluorocytosine
  modified_base 11: mod_base = OTHER; note = Cytosine phosphorothiorate
  modified_base 14: mod_base = OTHER; note = 2'-Omethyladenosine
  modified_base 15: mod_base = OTHER; note = Adenosine phosphorothiorate
  modified_base 20: mod_base = OTHER; note = Uridine phosphorothiorate
  modified_base 22: mod_base = OTHER; note = 2'-fluoroguanosine
  modified_base 23: mod_base = OTHER; note = 2'-fluorocytosine
  modified_base 25: mod_base = OTHER; note = 2'-Omethylcytosine
  modified_base 29: mod_base = OTHER; note = 2'-Omethylguanosine
  modified_base 30: mod_base = OTHER; note = 2'-fluoroguanosine
  modified_base 31: mod_base = OTHER; note = 2'-fluoroadenosine
  modified_base 33: mod_base = OTHER; note = Uridine phosphorothiorate
  modified_base 34: mod_base = OTHER; note = 2'-Omethyluridine
  modified_base 37: mod_base = OTHER; note = Adenosine phosphorothiorate
  modified_base 38: mod_base = OTHER; note = 2'-fluoroadenosine
  modified_base 40: mod_base = OTHER; note = 2'-fluorouridine
  modified_base 41: mod_base = OTHER; note = 2'-fluorocytosine
  modified_base 50: mod_base = OTHER; note = 2'-fluorocytosine
  modified_base 51: mod_base = OTHER; note = 2'-Omethylguanosine
  modified_base 54: mod_base = OTHER; note = Uridine phosphorothiorate
  modified_base 57: mod_base = OTHER; note = 2'-fluoroguanosine
  modified_base 58: mod_base = OTHER; note = 2'-fluoroadenosine
  modified_base 62: mod_base = OTHER; note = 2'-fluorocytosine
  modified_base 65: mod_base = OTHER; note = 2'-fluoroguanosine
  modified_base 66: mod_base = OTHER; note = 2'-fluorocytosine phosphorothiorate
  modified_base 71: mod_base = OTHER; note = 2'-fluorouridine
  modified_base 72: mod_base = OTHER; note = 2'-fluorocytosine
  modified_base 75: mod_base = OTHER; note = 2'-fluorocytosine phosphorothiorate
  modified_base 76: mod_base = OTHER; note = 2'-fluoroadenosine

SEQ ID NO: 8926 - RNA, 85 nt, synthetic construct; identical to SEQ ID NO: 3301
  source 1..85: mol_type = other RNA
  modified_base 1: mod_base = OTHER; note = 2'-Omethylguanosine phosphorothiorate
  modified_base 2: mod_base = OTHER; note = Cytosine phosphorothiorate
  modified_base 3: mod_base = OTHER; note = Uridine phosphorothiorate
  modified_base 4: mod_base = OTHER; note = 2'-Omethylguanosine phosphorothiorate
  modified_base 11: mod_base = OTHER; note = 2'-fluorocytosine
  modified_base 12: mod_base = OTHER; note = 2'-Omethylcytosine phosphorothiorate
  modified_base 14: mod_base = OTHER; note = 2'-Omethyladenosine
  modified_base 15: mod_base = OTHER; note = 2'-fluoroguanosine
  modified_base 33: mod_base = OTHER; note = 2'-fluorouridine
  modified_base 34: mod_base = OTHER; note = 2'-fluorouridine
  modified_base 44: mod_base = OTHER; note = 2'-Omethyluridine
  modified_base 46: mod_base = OTHER; note = 2'-Omethylguanosine
  modified_base 56: mod_base = OTHER; note = 2'-fluoroguanosine phosphorothiorate
  modified_base 58: mod_base = OTHER; note = Guanosine phosphorothiorate
  modified_base 60: mod_base = OTHER; note = 2'-Omethyladenosine
  modified_base 64: mod_base = OTHER; note = 2'-fluorouridine
  modified_base 69: mod_base = OTHER; note = 2'-fluorouridine
  modified_base 73: mod_base = OTHER; note = 2'-fluoroguanosine phosphorothiorate
  modified_base 80: mod_base = OTHER; note = 2'-fluoroguanosine
  modified_base 82: mod_base = OTHER; note = 2'-Omethylguanosine

SEQ ID NO: 8927 - DNA, 76 bp, synthetic construct; identical to SEQ ID NO: 1924
  source 1..76: mol_type = other DNA
  modified_base 1: mod_base = OTHER; note = 2'-Omethylguanosine
  modified_base 2: mod_base = OTHER; note = 2'-fluoroguanosine phosphorothiorate
  modified_base 4: mod_base = OTHER; note = 2'-fluorouridine
  modified_base 5: mod_base = OTHER; note = Cytosine phosphorothiorate
  modified_base 6: mod_base = OTHER; note = 2'-fluorocytosine
  modified_base 7: mod_base = OTHER; note = Guanosine phosphorothiorate
  modified_base 8: mod_base = OTHER; note = 2'-fluorouridine
  modified_base 11: mod_base = OTHER; note = 2'-O-(2-Methoxyethyl) 5-methylcytosine
  modified_base 12: mod_base = OTHER; note = 2'-O-(2-Methoxyethyl) guanosine phosphorothiorate
  modified_base 13: mod_base = OTHER; note = 2'-Omethylcytosine
  modified_base 15: mod_base = OTHER; note = Adenosine phosphorothiorate
  modified_base 16: mod_base = OTHER; note = 2'-O-(2-Methoxyethyl) thymine
  modified_base 17: mod_base = OTHER; note = Guanosine phosphorothiorate
  modified_base 21: mod_base = OTHER; note = Adenosine phosphorothiorate
  modified_base 22: mod_base = OTHER; note = 2'-Omethylguanosine
  modified_base 30: mod_base = OTHER; note = 2'-fluoroguanosine
  modified_base 31: mod_base = OTHER; note = 2'-Omethyladenosine phosphorothiorate
  modified_base 33: mod_base = OTHER; note = Uridine phosphorothiorate
  modified_base 39: mod_base = OTHER; note = 2'-O-(2-Methoxyethyl) thymine
  modified_base 40: mod_base = OTHER; note = 2'-O-(2-Methoxyethyl) thymine
  modified_base 42: mod_base = OTHER; note = Adenosine phosphorothiorate
  modified_base 43: mod_base = OTHER; note = 2'-Omethyladenosine
  modified_base 44: mod_base = OTHER; note = Adenosine phosphorothiorate
  modified_base 49: mod_base = OTHER; note = Cytosine phosphorothiorate
  modified_base 50: mod_base = OTHER; note = 2'-O-(2-Methoxyethyl) 5-methylcytosine phosphorothiorate
  modified_base 51: mod_base = OTHER; note = Guanosine phosphorothiorate
  modified_base 52: mod_base = OTHER; note = deoxyguanosine phosphorothiorate
  modified_base 53: mod_base = OTHER; note = Guanosine phosphorothiorate
  modified_base 54: mod_base = OTHER; note = 2'-Omethyluridine
  modified_base 56: mod_base = OTHER; note = Cytosine phosphorothiorate
  modified_base 62: mod_base = OTHER; note = 2'-fluorocytosine
  modified_base 67: mod_base = OTHER; note = 2'-fluoroguanosine phosphorothiorate
  modified_base 68: mod_base = OTHER; note = 2'-fluoroguanosine
  modified_base 72: mod_base = OTHER; note = Cytosine phosphorothiorate
  modified_base 73: mod_base = OTHER; note = Guanosine phosphorothiorate
  modified_base 74: mod_base = OTHER; note = 2'-Omethylcytosine phosphorothiorate
  modified_base 75: mod_base = OTHER; note = 2'-fluorocytosine phosphorothiorate
  modified_base 76: mod_base = OTHER; note = 2'-Omethyladenosine
  misc_feature 1..17: note = RNA
  misc_feature 18..19: note = DNA
  misc_feature 20..31: note = RNA
  misc_feature 32: note = DNA
  misc_feature 33: note = RNA
  misc_feature 34: note = DNA
  misc_feature 35..47: note = RNA
  misc_feature 48: note = DNA
  misc_feature 49..51: note = RNA
  misc_feature 52: note = DNA
  misc_feature 53..76: note = RNA

SEQ ID NO: 8928 - RNA, 86 nt, synthetic construct; identical to SEQ ID NO: 3290
  source 1..86: mol_type = other RNA
  modified_base 17: mod_base = OTHER; note = 2'-Omethylguanosine

SEQ ID NO: 8929 - RNA, 85 nt, synthetic construct; identical to SEQ ID NO: 3317
  source 1..85: mol_type = other RNA
  modified_base 1: mod_base = OTHER; note = 2'-Omethylguanosine phosphorothiorate
  modified_base 2: mod_base = OTHER; note = Cytosine phosphorothiorate
  modified_base 17: mod_base = OTHER; note = 2'-Omethylguanosine phosphorothiorate
  modified_base 25: mod_base = OTHER; note = 2'-Omethylcytosine
  modified_base 36: mod_base = OTHER; note = 2'-fluoroadenosine
  modified_base 46: mod_base = OTHER; note = Guanosine phosphorothiorate

SEQ ID NO: 8930 - RNA, 74 nt, synthetic construct; identical to SEQ ID NO: 3293
  source 1..74: mol_type = other RNA
  modified_base 1: mod_base = OTHER; note = 2'-Omethyladenosine phosphorothiorate
  modified_base 2: mod_base = OTHER; note = 2'-fluorocytosine
  modified_base 4: mod_base = OTHER; note = 2'-Omethyluridine
  modified_base 8: mod_base = OTHER; note = Guanosine phosphorothiorate
  modified_base 12: mod_base = OTHER; note = 2'-Omethylcytosine phosphorothiorate
  modified_base 18: mod_base = OTHER; note = 2'-Omethyluridine
  modified_base 24: mod_base = OTHER; note = Guanosine phosphorothiorate
  modified_base 39: mod_base = OTHER; note = 2'-Omethyladenosine
  modified_base 41: mod_base = OTHER; note = 2'-Omethyladenosine
  modified_base 50: mod_base = OTHER; note = Uridine phosphorothiorate
  modified_base 62: mod_base = OTHER; note = Guanosine phosphorothiorate
  modified_base 73: mod_base = OTHER; note = 2'-Omethylcytosine phosphorothiorate
  modified_base 74: mod_base = OTHER; note = 2'-fluoroadenosine

SEQ ID NO: 8931 - RNA, 85 nt, synthetic construct; identical to SEQ ID NO: 3310
  source 1..85: mol_type = other RNA
  modified_base 1: mod_base = OTHER; note = 2'-Omethylcytosine
  modified_base 6: mod_base = OTHER; note = Adenosine phosphorothiorate
  modified_base 11: mod_base = OTHER; note = Cytosine phosphorothiorate
  modified_base 45: mod_base = OTHER; note = Guanosine phosphorothiorate
  modified_base 47: mod_base = OTHER; note = Cytosine phosphorothiorate
  modified_base 84: mod_base = OTHER; note = 2'-Omethylcytosine phosphorothiorate

SEQ ID NO: 8932 - RNA, 74 nt, synthetic construct; identical to SEQ ID NO: 3293
  source 1..74: mol_type = other RNA
  modified_base 1: mod_base = OTHER; note = 2'-fluoroadenosine phosphorothiorate
  modified_base 2: mod_base = OTHER; note = 2'-Omethylcytosine
  modified_base 4: mod_base = OTHER; note = 2'-Omethyluridine
  modified_base 8: mod_base = OTHER; note = 2'-fluoroguanosine
  modified_base 22: mod_base = OTHER; note = Guanosine phosphorothiorate
  modified_base 27: mod_base = OTHER; note = 2'-Omethyluridine
  modified_base 49: mod_base = OTHER; note = 2'-fluoroguanosine
  modified_base 73: mod_base = OTHER; note = 2'-Omethylcytosine phosphorothiorate

SEQ ID NO: 8933 - RNA, 75 nt, synthetic construct; identical to SEQ ID NO: 1045
  source 1..75: mol_type = other RNA
  modified_base 1: mod_base = OTHER; note = Guanosine phosphorothiorate
  modified_base 10: mod_base = OTHER; note = Guanosine phosphorothiorate
  modified_base 24: mod_base = OTHER; note = 2'-fluoroadenosine
  modified_base 26: mod_base = OTHER; note = 2'-fluorouridine
  modified_base 44: mod_base = OTHER; note = 2'-fluorocytosine
  modified_base 58: mod_base = OTHER; note = 2'-fluoroguanosine
  modified_base 59: mod_base = OTHER; note = Uridine phosphorothiorate
  modified_base 63: mod_base = OTHER; note = Guanosine phosphorothiorate
  modified_base 64: mod_base = OTHER; note = 2'-fluoroguanosine
  modified_base 69: mod_base = OTHER; note = 2'-fluoroadenosine
  modified_base 73: mod_base = OTHER; note = Cytosine phosphorothiorate

SEQ ID NO: 8934 - RNA, 75 nt, synthetic construct; identical to SEQ ID NO: 1045
  source 1..75: mol_type = other RNA
  modified_base 1: mod_base = OTHER; note = 2'-fluoroguanosine phosphorothiorate
  modified_base 2: mod_base = OTHER; note = 2'-Omethylguanosine phosphorothiorate
  modified_base 11: mod_base = OTHER; note = Uridine phosphorothiorate
  modified_base 12: mod_base = OTHER; note = Guanosine phosphorothiorate
  modified_base 17: mod_base = OTHER; note = Guanosine phosphorothiorate
  modified_base 19: mod_base = OTHER; note = 2'-fluorouridine
  modified_base 38: mod_base = OTHER; note = Adenosine phosphorothiorate
  modified_base 41: mod_base = OTHER; note = 2'-fluorocytosine
  modified_base 42: mod_base = OTHER; note = 2'-fluoroadenosine
  modified_base 49: mod_base = OTHER; note = Cytosine phosphorothiorate
  modified_base 55: mod_base = OTHER; note = 2'-fluorocytosine phosphorothiorate
  modified_base 67: mod_base = OTHER; note = Guanosine phosphorothiorate
  modified_base 68: mod_base = OTHER; note = 2'-fluoroadenosine
  modified_base 73: mod_base = OTHER; note = Cytosine phosphorothiorate
  modified_base 74: mod_base = OTHER; note = 2'-Omethylcytosine

SEQ ID NO: 8935 - RNA, 85 nt, synthetic construct; identical to SEQ ID NO: 3286
  source 1..85: mol_type = other RNA
  modified_base 1: mod_base = OTHER; note = 2'-Omethylcytosine
  modified_base 13: mod_base = OTHER; note = 2'-Omethyladenosine
  modified_base 35: mod_base = OTHER; note = 2'-fluoroadenosine
  modified_base 36: mod_base = OTHER; note = 2'-fluoroguanosine
  modified_base 40: mod_base = OTHER; note = Cytosine phosphorothiorate
  modified_base 44: mod_base = OTHER; note = 2'-Omethylguanosine
  modified_base 46: mod_base = OTHER; note = 2'-fluoroadenosine phosphorothiorate
  modified_base 48: mod_base = OTHER; note = Adenosine phosphorothiorate
  modified_base 51: mod_base = OTHER; note = 2'-fluorouridine phosphorothiorate
  modified_base 58: mod_base = OTHER; note = 2'-Omethylguanosine
  modified_base 60: mod_base = OTHER; note = 2'-fluoroguanosine phosphorothiorate
  modified_base 75: mod_base = OTHER; note = 2'-fluorouridine phosphorothiorate
  modified_base 83: mod_base = OTHER; note = 2'-Omethylcytosine

SEQ ID NO: 8936 - RNA, 86 nt, synthetic construct
  source 1..86: mol_type = other RNA
accaggatggccgagtggttaaggcgttggacttcagatccaatggatgtatatccacgtgggttcgaaccccactcctggtacca

SEQ ID NO: 8937 - RNA, 76 nt, synthetic construct; identical to SEQ ID NO: 625
  source 1..76: mol_type = other RNA
  modified_base 4: mod_base = OTHER; note = 2'-Omethyluridine
  modified_base 8: mod_base = OTHER; note = Uridine phosphorothiorate
  modified_base 9: mod_base = OTHER; note = Guanosine phosphorothiorate
  modified_base 11: mod_base = OTHER; note = 2'-Omethylcytosine
  modified_base 12: mod_base = OTHER; note = Guanosine phosphorothiorate
  modified_base 13: mod_base = OTHER; note = 2'-Omethylcytosine
  modified_base 14: mod_base = OTHER; note = 2'-fluoroadenosine
  modified_base 16: mod_base = OTHER; note = 2'-fluorouridine
  modified_base 17: mod_base = OTHER; note = 2'-Omethylguanosine phosphorothiorate
  modified_base 18: mod_base = OTHER; note = 2'-Omethylguanosine
  modified_base 19: mod_base = OTHER; note = Adenosine phosphorothiorate
  modified_base 20: mod_base = OTHER; note = 2'-Omethyluridine phosphorothiorate
  modified_base 24: mod_base = OTHER; note = Guanosine phosphorothiorate
  modified_base 25: mod_base = OTHER; note = 2'-Omethylcytosine
  modified_base 26: mod_base = OTHER; note = 2'-Omethyladenosine
  modified_base 28: mod_base = OTHER; note = 2'-fluorouridine
  modified_base 29: mod_base = OTHER; note = 2'-Omethylguanosine
  modified_base 38: mod_base = OTHER; note = Adenosine phosphorothiorate
  modified_base 39: mod_base = OTHER; note = 2'-Omethyluridine phosphorothiorate
  modified_base 40: mod_base = OTHER; note = 2'-fluorouridine phosphorothiorate
  modified_base 44: mod_base = OTHER; note = 2'-Omethyladenosine
  modified_base 50: mod_base = OTHER; note = 2'-Omethylcytosine
  modified_base 51: mod_base = OTHER; note = Guanosine phosphorothiorate
  modified_base 52: mod_base = OTHER; note = 2'-Omethylguanosine
  modified_base 53: mod_base = OTHER; note = Guanosine phosphorothiorate
  modified_base 58: mod_base = OTHER; note = 2'-fluoroadenosine
  modified_base 61: mod_base = OTHER; note = Cytosine phosphorothiorate
  modified_base 62: mod_base = OTHER; note = 2'-Omethylcytosine
  modified_base 64: mod_base = OTHER; note = 2'-Omethylguanosine
  modified_base 69: mod_base = OTHER; note = 2'-Omethyladenosine
  modified_base 71: mod_base = OTHER; note = 2'-Omethyluridine
  modified_base 73: mod_base = OTHER; note = 2'-fluoroguanosine
  modified_base 74: mod_base = OTHER; note = 2'-fluorocytosine
  modified_base 75: mod_base = OTHER; note = 2'-Omethylcytosine

SEQ ID NO: 8938 - RNA, 76 nt, synthetic construct; identical to SEQ ID NO: 3289
  source 1..76: mol_type = other RNA
  modified_base 61: mod_base = OTHER; note = 2'-Omethylcytosine
  modified_base 62: mod_base = OTHER; note = 2'-Omethylcytosine
  modified_base 63: mod_base = OTHER; note = 2'-Omethylcytosine
  modified_base 64: mod_base = OTHER; note = 2'-Omethyluridine
  modified_base 65: mod_base = OTHER; note = 2'-Omethylguanosine

SEQ ID NO: 8939 - RNA, 75 nt, synthetic construct; identical to SEQ ID NO: 3311
  source 1..75: mol_type = other RNA
  modified_base 1: mod_base = OTHER; note = 2'-fluoroguanosine phosphorothiorate
  modified_base 2: mod_base = OTHER; note = 2'-Omethylguanosine phosphorothiorate
  modified_base 12: mod_base = OTHER; note = Guanosine phosphorothiorate
  modified_base 13: mod_base = OTHER; note = 2'-fluorouridine
  modified_base 18: mod_base = OTHER; note = 2'-Omethylguanosine phosphorothiorate
  modified_base 21: mod_base = OTHER; note = 2'-Omethyladenosine phosphorothiorate
  modified_base 22: mod_base = OTHER; note = 2'-fluoroguanosine
  modified_base 28: mod_base = OTHER; note = 2'-fluorouridine
  modified_base 40: mod_base = OTHER; note = 2'-Omethylcytosine
  modified_base 48: mod_base = OTHER; note = 2'-fluorocytosine
  modified_base 60: mod_base = OTHER; note = Cytosine phosphorothiorate
  modified_base 67: mod_base = OTHER; note = Guanosine phosphorothiorate
  modified_base 73: mod_base = OTHER; note = Cytosine phosphorothiorate
  modified_base 74: mod_base = OTHER; note = 2'-Omethylcytosine

SEQ ID NO: 8940 - RNA, 76 nt, synthetic construct; identical to SEQ ID NO: 625
  source 1..76: mol_type = other RNA
  modified_base 1: mod_base = OTHER; note = 2'-Omethylguanosine phosphorothiorate
  modified_base 2: mod_base = OTHER; note = 2'-Omethylguanosine
  modified_base 3: mod_base = OTHER; note = 2'-Omethylcytosine
  modified_base 4: mod_base = OTHER; note = 2'-Omethyluridine
  modified_base 5: mod_base = OTHER; note = 2'-Omethylcytosine
  modified_base 6: mod_base = OTHER; note = 2'-Omethylcytosine
  modified_base 10: mod_base = OTHER; note = 2'-Omethylguanosine
  modified_base 11: mod_base = OTHER; note = 2'-Omethylcytosine
  modified_base 12: mod_base = OTHER; note = 2'-Omethylguanosine
  modified_base 13: mod_base = OTHER; note = 2'-Omethylcytosine
  modified_base 14: mod_base = OTHER; note = 2'-Omethyladenosine
  modified_base 15: mod_base = OTHER; note = 2'-fluoroadenosine
  modified_base 16: mod_base = OTHER; note = 2'-Omethyluridine
  modified_base 17: mod_base = OTHER; note = 2'-Omethylguanosine
  modified_base 18: mod_base = OTHER; note = 2'-Omethylguanosine
  modified_base 19: mod_base = OTHER; note = 2'-fluoroadenosine
  modified_base 20: mod_base = OTHER; note = 2'-Omethyluridine
  modified_base 22: mod_base = OTHER; note = 2'-Omethylguanosine
  modified_base 23: mod_base = OTHER; note = 2'-Omethylcytosine
  modified_base 24: mod_base = OTHER; note = 2'-Omethylguanosine
  modified_base 25: mod_base = OTHER; note = 2'-Omethylcytosine
  modified_base 40: mod_base = OTHER; note = 2'-fluorouridine
  modified_base 41: mod_base = OTHER; note = 2'-fluorocytosine
  modified_base 42: mod_base = OTHER; note = 2'-fluoroadenosine
  modified_base 43: mod_base = OTHER; note = 2'-fluoroadenosine
  modified_base 49: mod_base = OTHER; note = 2'-Omethylcytosine
  modified_base 50: mod_base = OTHER; note = 2'-Omethylcytosine
  modified_base 51: mod_base = OTHER; note = 2'-Omethylguanosine
  modified_base 52: mod_base = OTHER; note = 2'-Omethylguanosine
  modified_base 53: mod_base = OTHER; note = 2'-Omethylguanosine
  modified_base 54: mod_base = OTHER; note = 2'-Omethyluridine
  modified_base 56: mod_base = OTHER; note = 2'-Omethylcytosine
  modified_base 57: mod_base = OTHER; note = 2'-fluoroguanosine
  modified_base 59: mod_base = OTHER; note = 2'-Omethylguanosine
  modified_base 61: mod_base = OTHER; note = 2'-Omethylcytosine
  modified_base 62: mod_base = OTHER; note = 2'-Omethylcytosine
  modified_base 63: mod_base = OTHER; note = 2'-Omethylcytosine
  modified_base 64: mod_base = OTHER; note = 2'-Omethylguanosine
  modified_base 65: mod_base = OTHER; note = 2'-Omethylguanosine
  modified_base 66: mod_base = OTHER; note = 2'-Omethylcytosine
  modified_base 67: mod_base = OTHER; note = 2'-Omethylguanosine
  modified_base 68: mod_base = OTHER; note = 2'-Omethylguanosine
  modified_base 69: mod_base = OTHER; note = 2'-Omethyladenosine
  modified_base 73: mod_base = OTHER; note = 2'-Omethylguanosine

SEQ ID NO: 8941 - RNA, 76 nt, synthetic construct; identical to SEQ ID NO: 625
  source 1..76: mol_type = other RNA
  modified_base 10: mod_base = OTHER; note = 2'-Omethylguanosine
  modified_base 11: mod_base = OTHER; note = 2'-Omethylcytosine
  modified_base 12: mod_base = OTHER; note = 2'-Omethylguanosine
  modified_base 13: mod_base = OTHER; note = 2'-Omethylcytosine
  modified_base 22: mod_base = OTHER; note = 2'-Omethylguanosine
  modified_base 23: mod_base = OTHER; note = 2'-Omethylcytosine
  modified_base 24: mod_base = OTHER; note = 2'-Omethylguanosine
  modified_base 25: mod_base = OTHER; note = 2'-Omethylcytosine
  modified_base 40: mod_base = OTHER; note = 2'-fluorouridine
  modified_base 41: mod_base = OTHER; note = 2'-fluorocytosine
  modified_base 42: mod_base = OTHER; note = 2'-fluoroadenosine
  modified_base 43: mod_base = OTHER; note = 2'-fluoroadenosine
  modified_base 54: mod_base = OTHER; note = Uridine phosphorothiorate
  modified_base 55: mod_base = OTHER; note = Uridine phosphorothiorate
  modified_base 56: mod_base = OTHER; note = Cytosine phosphorothiorate
  modified_base 57: mod_base = OTHER; note = Guanosine phosphorothiorate

SEQ ID NO: 8942 - RNA, 85 nt, synthetic construct; identical to SEQ ID NO: 3310
  source 1..85: mol_type = other RNA
  modified_base 1: mod_base = OTHER; note = 2'-fluorocytosine
  modified_base 25: mod_base = OTHER; note = 2'-fluoroguanosine
  modified_base 33: mod_base = OTHER; note = 2'-fluorocytosine
  modified_base 44: mod_base = OTHER; note = Guanosine phosphorothiorate
  modified_base 55: mod_base = OTHER; note = 2'-Omethylcytosine
  modified_base 58: mod_base = OTHER; note = Guanosine phosphorothiorate
  modified_base 70: mod_base = OTHER; note = 2'-fluorocytosine
  modified_base 84: mod_base = OTHER; note = Cytosine phosphorothiorate

SEQ ID NO: 8943 - RNA, 76 nt, synthetic construct; identical to SEQ ID NO: 3289
  source 1..76: mol_type = other RNA
  modified_base 43: mod_base = OTHER; note = 2'-Omethyladenosine
  modified_base 52: mod_base = OTHER; note = 2'-Omethylguanosine

SEQ ID NO: 8944 - RNA, 75 nt, synthetic construct; identical to SEQ ID NO: 3306
  source 1..75: mol_type = other RNA
  modified_base 1: mod_base = OTHER; note = 2'-Omethylguanosine
  modified_base 13: mod_base = OTHER; note = 2'-Omethylcytosine
  modified_base 17: mod_base = OTHER; note = 2'-Omethylguanosine
  modified_base 18: mod_base = OTHER; note = 2'-Omethylguanosine
  modified_base 24: mod_base = OTHER; note = 2'-Omethylcytosine
  modified_base 32: mod_base = OTHER; note = 2'-fluorouridine
  modified_base 33: mod_base = OTHER; note = 2'-Omethylcytosine
  modified_base 34: mod_base = OTHER; note = Uridine phosphorothiorate
  modified_base 36: mod_base = OTHER; note = Guanosine phosphorothiorate
  modified_base 37: mod_base = OTHER; note = Adenosine phosphorothiorate
  modified_base 40: mod_base = OTHER; note = 2'-fluoroadenosine
  modified_base 41: mod_base = OTHER; note = 2'-Omethylguanosine
  modified_base 42: mod_base = OTHER; note = 2'-Omethyladenosine
  modified_base 43: mod_base = OTHER; note = 2'-fluoroadenosine
  modified_base 48: mod_base = OTHER; note = 2'-Omethylguanosine
  modified_base 49: mod_base = OTHER; note = 2'-Omethylcytosine
  modified_base 50: mod_base = OTHER; note = 2'-Omethylguanosine
  modified_base 51: mod_base = OTHER; note = 2'-Omethyluridine
  modified_base 52: mod_base = OTHER; note = 2'-Omethylguanosine
  modified_base 53: mod_base = OTHER; note = Uridine phosphorothiorate
  modified_base 54: mod_base = OTHER; note = Uridine phosphorothiorate
  modified_base 60: mod_base = OTHER; note = 2'-Omethylcytosine
  modified_base 64: mod_base = OTHER; note = 2'-Omethyluridine
  modified_base 72: mod_base = OTHER; note = 2'-Omethyladenosine

SEQ ID NO: 8945 - RNA, 85 nt, synthetic construct; identical to SEQ ID NO: 3288
  source 1..85: mol_type = other RNA
  modified_base 1: mod_base = OTHER; note = 2'-Omethylcytosine
  modified_base 16: mod_base = OTHER; note = Guanosine phosphorothiorate
  modified_base 25: mod_base = OTHER; note = 2'-fluoroguanosine phosphorothiorate
  modified_base 26: mod_base = OTHER; note = 2'-fluorouridine
  modified_base 30: mod_base = OTHER; note = 2'-fluoroadenosine
  modified_base 32: mod_base = OTHER; note = 2'-fluorouridine
  modified_base 37: mod_base = OTHER; note = 2'-fluoroadenosine phosphorothiorate
  modified_base 40: mod_base = OTHER; note = 2'-fluorocytosine phosphorothiorate
  modified_base 43: mod_base = OTHER; note = 2'-Omethyluridine
  modified_base 46: mod_base = OTHER; note = Adenosine phosphorothiorate
  modified_base 47: mod_base = OTHER; note = 2'-Omethylcytosine
  modified_base 50: mod_base = OTHER; note = 2'-Omethyladenosine
  modified_base 56: mod_base = OTHER; note = 2'-Omethylguanosine
  modified_base 59: mod_base = OTHER; note = 2'-Omethyluridine
  modified_base 61: mod_base = OTHER; note = 2'-Omethylguanosine
  modified_base 65: mod_base = OTHER; note = Cytosine phosphorothiorate
  modified_base 75: mod_base = OTHER; note = 2'-fluorouridine phosphorothiorate
  modified_base 84: mod_base = OTHER; note = 2'-fluorocytosine
  modified_base 85: mod_base = OTHER; note = 2'-fluoroadenosine

SEQ ID NO: 8946 - RNA, 76 nt, synthetic construct; identical to SEQ ID NO: 3289
  source 1..76: mol_type = other RNA
  modified_base 1: mod_base = OTHER; note = 2'-Omethylguanosine
  modified_base 13: mod_base = OTHER; note = 2'-Omethylcytosine
  modified_base 14: mod_base = OTHER; note = 2'-Omethyladenosine
  modified_base 15: mod_base = OTHER; note = 2'-Omethylguanosine
  modified_base 16: mod_base = OTHER; note = 2'-Omethyluridine
  modified_base 18: mod_base = OTHER; note = 2'-Omethylguanosine
  modified_base 19: mod_base = OTHER; note = 2'-Omethylguanosine
  modified_base 20: mod_base = OTHER; note = Uridine phosphorothiorate
  modified_base 21: mod_base = OTHER; note = Adenosine phosphorothiorate
  modified_base 25: mod_base = OTHER; note = 2'-Omethylcytosine
  modified_base 33: mod_base = OTHER; note = 2'-fluorouridine
  modified_base 34: mod_base = OTHER; note = 2'-Omethyluridine
  modified_base 35: mod_base = OTHER; note = Uridine phosphorothiorate
  modified_base 37: mod_base = OTHER; note = Adenosine phosphorothiorate
  modified_base 38: mod_base = OTHER; note = Adenosine phosphorothiorate
  modified_base 49: mod_base = OTHER; note = 2'-Omethylcytosine
  modified_base 50: mod_base = OTHER; note = 2'-Omethyladenosine
  modified_base 52: mod_base = OTHER; note = 2'-Omethylguanosine
  modified_base 54: mod_base = OTHER; note = Uridine phosphorothiorate
  modified_base 55: mod_base = OTHER; note = Uridine phosphorothiorate
  modified_base 56: mod_base = OTHER; note = 2'-Omethylcytosine
  modified_base 57: mod_base = OTHER; note = Adenosine phosphorothiorate
  modified_base 58: mod_base = OTHER; note = Adenosine phosphorothiorate
  modified_base 59: mod_base = OTHER; note = 2'-Omethylguanosine
  modified_base 61: mod_base = OTHER; note = 2'-Omethylcytosine
  modified_base 65: mod_base = OTHER; note = 2'-Omethylguanosine
  modified_base 73: mod_base = OTHER; note = 2'-Omethylguanosine

SEQ ID NO: 8947 - RNA, 76 nt, synthetic construct; identical to SEQ ID NO: 3419
  source 1..76: mol_type = other RNA
  modified_base 1: mod_base = OTHER; note = 2'-Omethylguanosine phosphorothiorate
  modified_base 2: mod_base = OTHER; note = 2'-Omethylguanosine
  modified_base 3: mod_base = OTHER; note = 2'-Omethylcytosine
  modified_base 4: mod_base = OTHER; note = 2'-Omethyluridine
  modified_base 5: mod_base = OTHER; note = 2'-Omethylcytosine
  modified_base 6: mod_base = OTHER; note = 2'-Omethylcytosine
  modified_base 44: mod_base = OTHER; note = 2'-Omethyladenosine
  modified_base 45: mod_base = OTHER; note = 2'-Omethylguanosine
  modified_base 46: mod_base = OTHER; note = 2'-fluoroguanosine
  modified_base 47: mod_base = OTHER; note = 2'-fluorouridine
  modified_base 48: mod_base = OTHER; note = 2'-Omethyluridine
  modified_base 49: mod_base = OTHER; note = 2'-Omethylcytosine
  modified_base 73: mod_base = OTHER; note = 2'-Omethylguanosine

SEQ ID NO: 8948 - RNA, 76 nt, synthetic construct; identical to SEQ ID NO: 625
  source 1..76: mol_type = other RNA
  modified_base 1: mod_base = OTHER; note = 2'-Omethylguanosine
  modified_base 10: mod_base = OTHER; note = 2'-Omethylguanosine
  modified_base 13: mod_base = OTHER; note = 2'-Omethylcytosine
  modified_base 17: mod_base = OTHER; note = Guanosine phosphorothiorate
  modified_base 18: mod_base = OTHER; note = 2'-Omethylguanosine
  modified_base 19: mod_base = OTHER; note = Adenosine phosphorothiorate
  modified_base 20: mod_base = OTHER; note = 2'-Omethyluridine
  modified_base 25: mod_base = OTHER; note = 2'-Omethylcytosine
  modified_base 29: mod_base = OTHER; note = 2'-Omethylguanosine
  modified_base 33: mod_base = OTHER; note = 2'-fluorouridine
  modified_base 35: mod_base = OTHER; note = Cytosine phosphorothiorate
  modified_base 37: mod_base = OTHER; note = Adenosine phosphorothiorate
  modified_base 38: mod_base = OTHER; note = Adenosine phosphorothiorate
  modified_base 41: mod_base = OTHER; note = 2'-fluorocytosine
  modified_base 43: mod_base = OTHER; note = 2'-Omethyladenosine
  modified_base 46: mod_base = OTHER; note = Guanosine phosphorothiorate
  modified_base 50: mod_base = OTHER; note = 2'-Omethylcytosine
  modified_base 52: mod_base = OTHER; note = 2'-Omethylguanosine
  modified_base 54: mod_base = OTHER; note = Uridine phosphorothiorate
  modified_base 55: mod_base = OTHER; note = Uridine phosphorothiorate
  modified_base 56: mod_base = OTHER; note = 2'-Omethylcytosine
  modified_base 57: mod_base = OTHER; note = Guanosine phosphorothiorate
  modified_base 62: mod_base = OTHER; note = 2'-Omethylcytosine
  modified_base 63: mod_base = OTHER; note = 2'-fluorocytosine
  modified_base 65: mod_base = OTHER; note = 2'-Omethylguanosine
  modified_base 71: mod_base = OTHER; note = 2'-Omethyluridine
  modified_base 73: mod_base = OTHER; note = 2'-Omethylguanosine

SEQ ID NO: 8949 - RNA, 76 nt, synthetic construct; identical to SEQ ID NO: 3318
  source 1..76: mol_type = other RNA
  modified_base 1: mod_base = OTHER; note = 2'-Omethylcytosine
  modified_base 13: mod_base = OTHER; note = 2'-Omethylcytosine
  modified_base 14: mod_base = OTHER; note = 2'-Omethyladenosine
  modified_base 15: mod_base = OTHER; note = 2'-Omethylguanosine
  modified_base 16: mod_base = OTHER; note = 2'-Omethyluridine
  modified_base 18: mod_base = OTHER; note = 2'-Omethylguanosine
  modified_base 19: mod_base = OTHER; note = 2'-Omethylguanosine
  modified_base 20: mod_base = OTHER; note = Uridine phosphorothiorate
  modified_base 21: mod_base = OTHER; note = Adenosine phosphorothiorate
  modified_base 25: mod_base = OTHER; note = 2'-Omethylcytosine
  modified_base 33: mod_base = OTHER; note = Uridine phosphorothiorate
  modified_base 34: mod_base = OTHER; note = 2'-Omethylcytosine
  modified_base 35: mod_base = OTHER; note = Uridine phosphorothiorate
  modified_base 37: mod_base = OTHER; note = Guanosine phosphorothiorate
  modified_base 38: mod_base = OTHER; note = Adenosine phosphorothiorate
  modified_base 49: mod_base = OTHER; note = 2'-Omethylguanosine
  modified_base 50: mod_base = OTHER; note = 2'-Omethylcytosine
  modified_base 52: mod_base = OTHER; note = 2'-Omethylguanosine
  modified_base 54: mod_base = OTHER; note = Uridine phosphorothiorate
  modified_base 55: mod_base = OTHER; note = Uridine phosphorothiorate
  modified_base 56: mod_base = OTHER; note = 2'-Omethylcytosine
  modified_base 57: mod_base = OTHER; note = Guanosine phosphorothiorate
  modified_base 58: mod_base = OTHER; note = Adenosine phosphorothiorate
  modified_base 59: mod_base = OTHER; note = 2'-Omethyladenosine
  modified_base 61: mod_base = OTHER; note = 2'-Omethylcytosine
  modified_base 65: mod_base = OTHER; note = 2'-Omethylcytosine
  modified_base 73: mod_base = OTHER; note = 2'-Omethyladenosine

SEQ ID NO: 8950 - RNA, 86 nt, synthetic construct; identical to SEQ ID NO: 3290
  source 1..86: mol_type = other RNA
  modified_base 1: mod_base = OTHER; note = 2'-Omethyladenosine
  modified_base 44: mod_base = OTHER; note = 2'-Omethyluridine
  modified_base 83: mod_base = OTHER; note = 2'-Omethyladenosine

SEQ ID NO: 8951 - RNA, 76 nt, synthetic construct; identical to SEQ ID NO: 625
  source 1..76: mol_type = other RNA
  modified_base 3: mod_base = OTHER; note = 2'-Omethylcytosine
  modified_base 4: mod_base = OTHER; note = 2'-fluorouridine
  modified_base 6: mod_base = OTHER; note = 2'-Omethylcytosine
  modified_base 7: mod_base = OTHER; note = Guanosine phosphorothiorate
  modified_base 12: mod_base = OTHER; note = 2'-fluoroguanosine phosphorothiorate
  modified_base 13: mod_base = OTHER; note = 2'-fluorocytosine
  modified_base 17: mod_base = OTHER; note = 2'-Omethylguanosine
  modified_base 18: mod_base = OTHER; note = 2'-fluoroguanosine phosphorothiorate
  modified_base 21: mod_base = OTHER; note = Adenosine phosphorothiorate
  modified_base 26: mod_base = OTHER; note = 2'-fluoroadenosine
  modified_base 33: mod_base = OTHER; note = Uridine phosphorothiorate
  modified_base 34: mod_base = OTHER; note = 2'-fluorouridine
  modified_base 39: mod_base = OTHER; note = 2'-Omethyluridine
  modified_base 42: mod_base = OTHER; note = Adenosine phosphorothiorate
  modified_base 43: mod_base = OTHER; note = 2'-Omethyladenosine
  modified_base 44: mod_base = OTHER; note = 2'-fluoroadenosine
  modified_base 49: mod_base = OTHER; note = 2'-Omethylcytosine phosphorothiorate
  modified_base 50: mod_base = OTHER; note = 2'-fluorocytosine
  modified_base 51: mod_base = OTHER; note = Guanosine phosphorothiorate
  modified_base 52: mod_base = OTHER; note = 2'-Omethylguanosine
  modified_base 53: mod_base = OTHER; note = 2'-Omethylguanosine phosphorothiorate
  modified_base 54: mod_base = OTHER; note = 2'-Omethyluridine
  modified_base 55: mod_base = OTHER; note = Uridine phosphorothiorate
  modified_base 58: mod_base = OTHER; note = Adenosine phosphorothiorate
  modified_base 61: mod_base = OTHER; note = 2'-fluorocytosine
  modified_base 62: mod_base = OTHER; note = 2'-fluorocytosine
  modified_base 64: mod_base = OTHER; note = 2'-fluoroguanosine
  modified_base 65: mod_base = OTHER; note = 2'-fluoroguanosine
  modified_base 66: mod_base = OTHER; note = 2'-fluorocytosine
  modified_base 68: mod_base = OTHER; note = 2'-Omethylguanosine
  modified_base 69: mod_base = OTHER; note = 2'-Omethyladenosine
  modified_base 70: mod_base = OTHER; note = Guanosine phosphorothiorate
  modified_base 71: mod_base = OTHER; note = 2'-fluorouridine
  modified_base 72: mod_base = OTHER; note = Cytosine phosphorothiorate
  modified_base 73: mod_base = OTHER; note = 2'-Omethylguanosine

SEQ ID NO: 8952 - RNA, 75 nt, synthetic construct; identical to SEQ ID NO: 1045
  source 1..75: mol_type = other RNA
  modified_base 1: mod_base = OTHER; note = 2'-Omethylguanosine phosphorothiorate
  modified_base 2: mod_base = OTHER; note = 2'-Omethylguanosine phosphorothiorate
  modified_base 3: mod_base = OTHER; note = 2'-Omethyluridine
  modified_base 4: mod_base = OTHER; note = 2'-Omethyluridine
  modified_base 5: mod_base = OTHER; note = 2'-Omethylcytosine
  modified_base 6: mod_base = OTHER; note = 2'-Omethylcytosine
  modified_base 16: mod_base = OTHER; note = 2'-Omethyluridine
  modified_base 17: mod_base = OTHER; note = 2'-Omethylguanosine
  modified_base 18: mod_base = OTHER; note = 2'-Omethylguanosine
  modified_base 20: mod_base = OTHER; note = 2'-Omethyladenosine
  modified_base 22: mod_base = OTHER; note = 2'-Omethylguanosine
  modified_base 24: mod_base = OTHER; note = 2'-Omethyladenosine
  modified_base 25: mod_base = OTHER; note = 2'-Omethylcytosine
  modified_base 33: mod_base = OTHER; note = 2'-fluorouridine
  modified_base 35: mod_base = OTHER; note = Uridine phosphorothiorate
  modified_base 37: mod_base = OTHER; note = Adenosine phosphorothiorate
  modified_base 38: mod_base = OTHER; note = Adenosine phosphorothiorate
  modified_base 44: mod_base = OTHER; note = 2'-Omethylcytosine
  modified_base 45: mod_base = OTHER; note = 2'-Omethylguanosine
  modified_base 46: mod_base = OTHER; note = 2'-fluoroadenosine
  modified_base 47: mod_base = OTHER; note = 2'-fluorouridine
  modified_base 48: mod_base = OTHER; note = 2'-Omethylcytosine
  modified_base 49: mod_base = OTHER; note = 2'-Omethylcytosine
  modified_base 50: mod_base = OTHER; note = 2'-Omethylguanosine
  modified_base 51: mod_base = OTHER; note = 2'-Omethyladenosine
  modified_base 52: mod_base = OTHER; note = 2'-Omethylguanosine
  modified_base 53: mod_base = OTHER; note = 2'-Omethyluridine
  modified_base 55: mod_base = OTHER; note = 2'-Omethylcytosine
  modified_base 58: mod_base = OTHER; note = 2'-Omethylguanosine
  modified_base 60: mod_base = OTHER; note = 2'-Omethylcytosine
  modified_base 61: mod_base = OTHER; note = 2'-Omethyluridine
  modified_base 62: mod_base = OTHER; note = 2'-fluorocytosine
  modified_base 63: mod_base = OTHER; note = 2'-Omethylguanosine
  modified_base 64: mod_base = OTHER; note = 2'-Omethylguanosine
  modified_base 65: mod_base = OTHER; note = 2'-Omethyluridine
  modified_base 66: mod_base = OTHER; note = 2'-Omethylguanosine
  modified_base 67: mod_base = OTHER; note = 2'-Omethylguanosine
  modified_base 72: mod_base = OTHER; note = 2'-Omethyluridine

SEQ ID NO: 8953 - RNA, 86 nt, synthetic construct; identical to SEQ ID NO: 3290
  source 1..86: mol_type = other RNA
  modified_base 66: mod_base = OTHER; note = Cytosine phosphorothiorate

SEQ ID NO: 8954 - DNA, 76 bp, synthetic construct; identical to SEQ ID NO: 1924
  source 1..76: mol_type = other DNA
  misc_feature 1..65: note = RNA
  misc_feature 66..72: note = DNA
  misc_feature 73..76: note = RNA

SEQ ID NO: 8955 - RNA, 86 nt, synthetic construct; identical to SEQ ID NO: 3290
  source 1..86: mol_type = other RNA
  modified_base 50: mod_base = OTHER; note = 2'-fluorouridine

SEQ ID NO: 8956 - RNA, 85 nt, synthetic construct; identical to SEQ ID NO: 3286
  source 1..85: mol_type = other RNA
  modified_base 1: mod_base = OTHER; note = 2'-Omethylcytosine
  modified_base 11: mod_base = OTHER; note = Cytosine phosphorothiorate
  modified_base 16: mod_base = OTHER; note = 2'-Omethylguanosine
  modified_base 18: mod_base = OTHER; note = 2'-Omethyluridine
  modified_base 27: mod_base = OTHER; note = 2'-fluorouridine
  modified_base 30: mod_base = OTHER; note = 2'-fluoroadenosine
  modified_base 34: mod_base = OTHER; note = 2'-Omethyluridine phosphorothiorate
  modified_base 41: mod_base = OTHER; note = Adenosine phosphorothiorate
  modified_base 43: mod_base = OTHER; note = 2'-Omethyluridine
  modified_base 46: mod_base = OTHER; note = Adenosine phosphorothiorate
  modified_base 48: mod_base = OTHER; note = 2'-Omethyladenosine
  modified_base 51: mod_base = OTHER; note = Uridine phosphorothiorate
  modified_base 53: mod_base = OTHER; note = 2'-fluorouridine
  modified_base 55: mod_base = OTHER; note = 2'-fluorocytosine
  modified_base 57: mod_base = OTHER; note = 2'-Omethylcytosine
  modified_base 76: mod_base = OTHER; note = Cytosine phosphorothiorate
  modified_base 84: mod_base = OTHER; note = 2'-Omethylcytosine
  modified_base 85: mod_base = OTHER; note = 2'-Omethyladenosine

SEQ ID NO: 8957 - RNA, 76 nt, synthetic construct; identical to SEQ ID NO: 625
  source 1..76: mol_type = other RNA
  modified_base 1: mod_base = OTHER; note = 2'-Omethylguanosine
  modified_base 13: mod_base = OTHER; note = 2'-Omethylcytosine
  modified_base 17: mod_base = OTHER; note = Guanosine phosphorothiorate
  modified_base 18: mod_base = OTHER; note = 2'-Omethylguanosine
  modified_base 19: mod_base = OTHER; note = Adenosine phosphorothiorate
  modified_base 20: mod_base = OTHER; note = 2'-Omethyluridine
  modified_base 25: mod_base = OTHER; note = 2'-Omethylcytosine
  modified_base 29: mod_base = OTHER; note = 2'-Omethylguanosine
  modified_base 33: mod_base = OTHER; note = 2'-fluorouridine
  modified_base 35: mod_base = OTHER; note = Cytosine phosphorothiorate
  modified_base 37: mod_base = OTHER; note = Adenosine phosphorothiorate
  modified_base 38: mod_base = OTHER; note = Adenosine phosphorothiorate
  modified_base 41: mod_base = OTHER; note = 2'-Omethylcytosine
  modified_base 43: mod_base = OTHER; note = 2'-Omethyladenosine
  modified_base 44: mod_base = OTHER; note = 2'-fluoroadenosine
  modified_base 46: mod_base = OTHER; note = Guanosine phosphorothiorate
  modified_base 50: mod_base = OTHER; note = 2'-Omethylcytosine
  modified_base 52: mod_base = OTHER; note = 2'-Omethylguanosine
  modified_base 54: mod_base = OTHER; note = Uridine phosphorothiorate
  modified_base 55: mod_base = OTHER; note = Uridine phosphorothiorate
  modified_base 56: mod_base = OTHER; note = 2'-Omethylcytosine
  modified_base 57: mod_base = OTHER; note = Guanosine phosphorothiorate
  modified_base 62: mod_base = OTHER; note = 2'-Omethylcytosine
  modified_base 63: mod_base = OTHER; note = 2'-fluorocytosine
  modified_base 65: mod_base = OTHER; note = 2'-Omethylguanosine
  modified_base 71: mod_base = OTHER; note = 2'-Omethyluridine
  modified_base 73: mod_base = OTHER; note = 2'-Omethylguanosine

SEQ ID NO: 8958 - RNA, 85 nt, synthetic construct; identical to SEQ ID NO: 3317
  source 1..85: mol_type = other RNA
  modified_base 1: mod_base = OTHER; note = 2'-Omethylguanosine phosphorothiorate
  modified_base 4: mod_base = OTHER; note = 2'-fluoroguanosine
  modified_base 18: mod_base = OTHER; note = 2'-Omethylguanosine
  modified_base 36: mod_base = OTHER; note = 2'-fluoroadenosine
  modified_base 46: mod_base = OTHER; note = 2'-fluoroguanosine phosphorothiorate
  modified_base 63: mod_base = OTHER; note = 2'-fluorouridine phosphorothiorate
  modified_base 82: mod_base = OTHER; note = 2'-Omethylguanosine phosphorothiorate

SEQ ID NO: 8959 - RNA, 76 nt, synthetic construct; identical to SEQ ID NO: 3295
  source 1..76: mol_type = other RNA
  modified_base 1: mod_base = OTHER; note = 2'-Omethylcytosine
  modified_base 2: mod_base = OTHER; note = 2'-Omethylcytosine phosphorothiorate
  modified_base 8: mod_base = OTHER; note = 2'-Omethyluridine
  modified_base 15: mod_base = OTHER; note = 2'-fluoroguanosine phosphorothiorate
  modified_base 20: mod_base = OTHER; note = 2'-Omethyluridine
  modified_base 26: mod_base = OTHER; note = 2'-fluoroguanosine phosphorothiorate
  modified_base 27: mod_base = OTHER; note = 2'-fluoroguanosine phosphorothiorate
  modified_base 28: mod_base = OTHER; note = Adenosine phosphorothiorate
  modified_base 29: mod_base = OTHER; note = 2'-fluoroguanosine phosphorothiorate
  modified_base 30: mod_base = OTHER; note = 2'-Omethylguanosine
  modified_base 37: mod_base = OTHER; note = 2'-fluoroguanosine phosphorothiorate
  modified_base 46: mod_base = OTHER; note = 2'-fluoroguanosine phosphorothiorate
  modified_base 54: mod_base = OTHER; note = 2'-fluorouridine phosphorothiorate
  modified_base 59: mod_base = OTHER; note = 2'-fluoroadenosine
  modified_base 72: mod_base = OTHER; note = 2'-fluoroguanosine

SEQ ID NO: 8960 - RNA, 76 nt, synthetic construct; identical to SEQ ID NO: 625
  source 1..76: mol_type = other RNA
  modified_base 6: mod_base = OTHER; note = 2'-Omethylcytosine
  modified_base 9: mod_base = OTHER; note = Guanosine phosphorothiorate
  modified_base 10: mod_base = OTHER; note = Guanosine phosphorothiorate
  modified_base 11: mod_base = OTHER; note = 2'-Omethylcytosine
  modified_base 13: mod_base = OTHER; note = 2'-fluorocytosine
  modified_base 14: mod_base = OTHER; note = 2'-fluoroadenosine
  modified_base 18: mod_base = OTHER; note = Guanosine phosphorothiorate
  modified_base 19: mod_base = OTHER; note = Adenosine phosphorothiorate
  modified_base 20: mod_base = OTHER; note = 2'-fluorouridine
  modified_base 21: mod_base = OTHER; note = Adenosine phosphorothiorate
  modified_base 22: mod_base = OTHER; note = 2'-fluoroguanosine phosphorothiorate
  modified_base 23: mod_base = OTHER; note = 2'-fluorocytosine
  modified_base 26: mod_base = OTHER; note = 2'-fluoroadenosine
  modified_base 27: mod_base = OTHER; note = 2'-fluorouridine
  modified_base 28: mod_base = OTHER; note = 2'-Omethyluridine
  modified_base 30: mod_base = OTHER; note = 2'-Omethylguanosine phosphorothiorate
  modified_base 31: mod_base = OTHER; note = 2'-fluoroadenosine
  modified_base 33: mod_base = OTHER; note = 2'-fluorouridine
  modified_base 37: mod_base = OTHER; note = Adenosine phosphorothiorate
  modified_base 38: mod_base = OTHER; note = 2'-Omethyladenosine
  modified_base 40: mod_base = OTHER; note = 2'-Omethyluridine phosphorothiorate
  modified_base 44: mod_base = OTHER; note = Adenosine phosphorothiorate
  modified_base 45: mod_base = OTHER; note = 2'-fluoroguanosine
  modified_base 46: mod_base = OTHER; note = 2'-Omethylguanosine
  modified_base 49: mod_base = OTHER; note = 2'-fluorocytosine
  modified_base 51: mod_base = OTHER; note = 2'-Omethylguanosine phosphorothiorate
  modified_base 54: mod_base = OTHER; note = 2'-fluorouridine
  modified_base 60: mod_base = OTHER; note = Uridine phosphorothiorate
  modified_base 64: mod_base = OTHER; note = Guanosine phosphorothiorate
  modified_base 65: mod_base = OTHER; note = 2'-Omethylguanosine phosphorothiorate
  modified_base 66: mod_base = OTHER; note = 2'-Omethylcytosine
  modified_base 67: mod_base = OTHER; note = 2'-fluoroguanosine
  modified_base 70: mod_base = OTHER; note = 2'-fluoroguanosine
  modified_base 73: mod_base = OTHER; note = 2'-fluoroguanosine
  modified_base 74: mod_base = OTHER; note = 2'-Omethylcytosine

SEQ ID NO: 8961 - RNA, 76 nt, synthetic construct; identical to SEQ ID NO: 3289
  source 1..76: mol_type = other RNA
  modified_base 1: mod_base = OTHER; note = 2'-Omethylguanosine phosphorothiorate
  modified_base 2: mod_base = OTHER; note = 2'-Omethylcytosine
  modified_base 74: mod_base = OTHER; note = Cytosine phosphorothiorate
  modified_base 75: mod_base = OTHER; note = 2'-Omethylcytosine

SEQ ID NO: 8962 - RNA, 76 nt, synthetic construct; identical to SEQ ID NO: 625
  source 1..76: mol_type = other RNA
  modified_base 3: mod_base = OTHER; note = Cytosine phosphorothiorate
  modified_base 4: mod_base = OTHER; note = Uridine phosphorothiorate
  modified_base 6: mod_base = OTHER; note = 2'-fluorocytosine
  modified_base 10: mod_base = OTHER; note = 2'-fluoroguanosine
  modified_base 13: mod_base = OTHER; note = 2'-Omethylcytosine
  modified_base 15: mod_base = OTHER; note = 2'-Omethyladenosine
  modified_base 18: mod_base = OTHER; note = 2'-fluoroguanosine
  modified_base 20: mod_base = OTHER; note = Uridine phosphorothiorate
  modified_base 22: mod_base = OTHER; note = 2'-Omethylguanosine
  modified_base 23: mod_base = OTHER; note = Cytosine phosphorothiorate
  modified_base 24: mod_base = OTHER; note = 2'-fluoroguanosine
  modified_base 25: mod_base = OTHER; note = 2'-fluorocytosine
  modified_base 27: mod_base = OTHER; note = 2'-fluorouridine
  modified_base 28: mod_base = OTHER; note = 2'-fluorouridine
  modified_base 30: mod_base = OTHER; note = 2'-Omethylguanosine
  modified_base 38: mod_base = OTHER; note = Adenosine phosphorothiorate
  modified_base 39: mod_base = OTHER; note = 2'-Omethyluridine
  modified_base 42: mod_base = OTHER; note = 2'-Omethyladenosine phosphorothiorate
  modified_base 44: mod_base = OTHER; note = Adenosine phosphorothiorate
  modified_base 45: mod_base = OTHER; note = 2'-fluoroguanosine phosphorothiorate
  modified_base 46: mod_base = OTHER; note = 2'-fluoroguanosine
  modified_base 49: mod_base = OTHER; note = 2'-Omethylcytosine
  modified_base 50: mod_base = OTHER; note = 2'-Omethylcytosine
  modified_base 55: mod_base = OTHER; note = Uridine phosphorothiorate
  modified_base 56: mod_base = OTHER; note = 2'-Omethylcytosine
  modified_base 60: mod_base = OTHER; note = 2'-fluorouridine phosphorothiorate
  modified_base 61: mod_base = OTHER; note = 2'-Omethylcytosine
  modified_base 64: mod_base = OTHER; note = 2'-fluoroguanosine
  modified_base 65: mod_base = OTHER; note = 2'-Omethylguanosine
  modified_base 69: mod_base = OTHER; note = 2'-fluoroadenosine phosphorothiorate
  modified_base 71: mod_base = OTHER; note = 2'-fluorouridine
  modified_base 72: mod_base = OTHER; note = 2'-Omethylcytosine
  modified_base 73: mod_base = OTHER; note = Guanosine phosphorothiorate
  modified_base 75: mod_base = OTHER; note = 2'-fluorocytosine

SEQ ID NO: 8963 - RNA, 76 nt, synthetic construct; identical to SEQ ID NO: 625
  source 1..76: mol_type = other RNA
  modified_base 1: mod_base = OTHER; note = 2'-Omethylguanosine phosphorothiorate
  modified_base 2: mod_base = OTHER; note = 2'-Omethylguanosine
  modified_base 17: mod_base = OTHER; note = 2'-Omethylguanosine
  modified_base 33: mod_base = OTHER; note = 2'-fluorouridine
  modified_base 35: mod_base = OTHER; note = Cytosine phosphorothiorate
  modified_base 37: mod_base = OTHER; note = Adenosine phosphorothiorate
  modified_base 38: mod_base = OTHER; note = Adenosine phosphorothiorate
  modified_base 52: mod_base = OTHER; note = 2'-fluoroguanosine
  modified_base 56: mod_base = OTHER; note = 2'-Omethylcytosine
  modified_base 62: mod_base = OTHER; note = 2'-Omethylcytosine
  modified_base 65: mod_base = OTHER; note = 2'-Omethylguanosine
  modified_base 73: mod_base = OTHER; note = 2'-Omethylguanosine
  modified_base 75: mod_base = OTHER; note = 2'-fluorocytosine phosphorothiorate

SEQ ID NO: 8964 - RNA, 76 nt, synthetic construct; identical to SEQ ID NO: 625
  source 1..76: mol_type = other RNA
  modified_base 54: mod_base = OTHER; note = Uridine phosphorothiorate
  modified_base 55: mod_base = OTHER; note = Uridine phosphorothiorate
  modified_base 56: mod_base = OTHER; note = 2'-Omethylcytosine
  modified_base 57: mod_base = OTHER; note = Guanosine phosphorothiorate

SEQ ID NO: 8965 - RNA, 76 nt, synthetic construct; identical to SEQ ID NO: 625
  source 1..76: mol_type = other RNA
  modified_base 1: mod_base = OTHER; note = 2'-Omethylguanosine
  modified_base 2: mod_base = OTHER; note = 2'-Omethylguanosine
  modified_base 3: mod_base = OTHER; note = 2'-Omethylcytosine
  modified_base 4: mod_base = OTHER; note = 2'-Omethyluridine
  modified_base 5: mod_base = OTHER; note = 2'-Omethylcytosine
  modified_base 6: mod_base = OTHER; note = 2'-Omethylcytosine
  modified_base 9: mod_base = OTHER; note = Guanosine phosphorothiorate
  modified_base 10: mod_base = OTHER; note = 2'-Omethylguanosine
  modified_base 13: mod_base = OTHER; note = 2'-Omethylcytosine
  modified_base 14: mod_base = OTHER; note = 2'-Omethyladenosine
  modified_base 15: mod_base = OTHER; note = 2'-fluoroadenosine
  modified_base 16: mod_base = OTHER; note = 2'-Omethyluridine
  modified_base 17: mod_base = OTHER; note = Guanosine phosphorothiorate
  modified_base 18: mod_base = OTHER; note = 2'-Omethylguanosine
  modified_base 19: mod_base = OTHER; note = Adenosine phosphorothiorate
  modified_base 20: mod_base = OTHER; note = 2'-Omethyluridine
  modified_base 21: mod_base = OTHER; note = 2'-fluoroadenosine
  modified_base 25: mod_base = OTHER; note = 2'-Omethylcytosine
  modified_base 29: mod_base = OTHER; note = 2'-Omethylguanosine
  modified_base 33: mod_base = OTHER; note = 2'-fluorouridine
  modified_base 35: mod_base = OTHER; note = Cytosine phosphorothiorate
  modified_base 37: mod_base = OTHER; note = Adenosine phosphorothiorate
  modified_base 38: mod_base = OTHER; note = Adenosine phosphorothiorate
  modified_base 40: mod_base = OTHER; note = 2'-fluorouridine
  modified_base 41: mod_base = OTHER; note = 2'-Omethylcytosine
  modified_base 42: mod_base = OTHER; note = 2'-Omethyladenosine
  modified_base 43: mod_base = OTHER; note = 2'-Omethyladenosine
  modified_base 44: mod_base = OTHER; note = 2'-fluoroadenosine
  modified_base 45: mod_base = OTHER; note = 2'-Omethylguanosine
  modified_base 46: mod_base = OTHER; note = Guanosine phosphorothiorate
  modified_base 48: mod_base = OTHER; note = 2'-fluorouridine
  modified_base 49: mod_base = OTHER; note = 2'-Omethylcytosine
  modified_base 50: mod_base = OTHER; note = 2'-Omethylcytosine
  modified_base 51: mod_base = OTHER; note = 2'-Omethylguanosine
  modified_base 52: mod_base = OTHER; note = 2'-Omethylguanosine
  modified_base 53: mod_base = OTHER; note = 2'-Omethylguanosine
  modified_base 54: mod_base = OTHER; note = Uridine phosphorothiorate
  modified_base 55: mod_base = OTHER; note = Uridine phosphorothiorate
  modified_base 56: mod_base = OTHER; note = 2'-Omethylcytosine
  modified_base 57: mod_base = OTHER; note = Guanosine phosphorothiorate
  modified_base 59: mod_base = OTHER; note = 2'-O-(2-Methoxyethyl) guanosine
  modified_base 61: mod_base = OTHER; note = 2'-Omethylcytosine
  modified_base 62: mod_base = OTHER; note = 2'-Omethylcytosine
  modified_base 63: mod_base = OTHER; note = 2'-fluorocytosine
  modified_base 64: mod_base = OTHER; note = 2'-Omethylguanosine
  modified_base 65: mod_base = OTHER; note = 2'-Omethylguanosine
  modified_base 66: mod_base = OTHER; note = 2'-Omethylcytosine
  modified_base 67: mod_base = OTHER; note = 2'-Omethylguanosine
  modified_base 68: mod_base = OTHER; note = 2'-Omethylguanosine
  modified_base 69: mod_base = OTHER; note = 2'-fluoroadenosine
  modified_base 70: mod_base = OTHER; note = 2'-fluoroguanosine
  modified_base 71: mod_base = OTHER; note = 2'-Omethyluridine
  modified_base 73: mod_base = OTHER; note = 2'-Omethylguanosine
  modified_base 74: mod_base = OTHER; note = Cytosine phosphorothiorate
  modified_base 75: mod_base = OTHER; note = 2'-fluorocytosine phosphorothiorate

SEQ ID NO: 8966 - RNA, 76 nt, synthetic construct; identical to SEQ ID NO: 625
  source 1..76: mol_type = other RNA
  modified_base 1: mod_base = OTHER; note = 2'-fluoroguanosine
  modified_base 2: mod_base = OTHER; note = 2'-fluoroguanosine
  modified_base 3: mod_base = OTHER; note = 2'-fluorocytosine
  modified_base 4: mod_base = OTHER; note = 2'-fluorouridine
  modified_base 5: mod_base = OTHER; note = 2'-fluorocytosine
  modified_base 6: mod_base = OTHER; note = 2'-fluorocytosine
  modified_base 7: mod_base = OTHER; note = 2'-fluoroguanosine

SEQ ID NO: 8967 - RNA, 86 nt, synthetic construct; identical to SEQ ID NO: 3290
  source 1..86: mol_type = other RNA
  modified_base 72: mod_base = OTHER; note = 2'-Omethylcytosine
  modified_base 73: mod_base = OTHER; note = 2'-Omethylcytosine

SEQ ID NO: 8968 - RNA, 76 nt, synthetic construct; identical to SEQ ID NO: 625
  source 1..76: mol_type = other RNA
  modified_base 1: mod_base = OTHER; note = 2'-Omethylguanosine phosphorothiorate
  modified_base 2: mod_base = OTHER; note = 2'-Omethylguanosine
  modified_base 3: mod_base = OTHER; note = 2'-Omethylcytosine
  modified_base 4: mod_base = OTHER; note = 2'-Omethyluridine
  modified_base 5: mod_base = OTHER; note = 2'-Omethylcytosine
  modified_base 6: mod_base = OTHER; note = 2'-Omethylcytosine
  modified_base 14: mod_base = OTHER; note = 2'-Omethyladenosine
  modified_base 15: mod_base = OTHER; note = 2'-Omethyladenosine
  modified_base 16: mod_base = OTHER; note = 2'-Omethyluridine
  modified_base 17: mod_base = OTHER; note = 2'-Omethylguanosine
  modified_base 18: mod_base = OTHER; note = 2'-Omethylguanosine
  modified_base 20: mod_base = OTHER; note = 2'-Omethyluridine
  modified_base 25: mod_base = OTHER; note = 2'-Omethylcytosine
  modified_base 33: mod_base = OTHER; note = 2'-fluorouridine
  modified_base 35: mod_base = OTHER; note = Cytosine phosphorothiorate
  modified_base 37: mod_base = OTHER; note = Adenosine phosphorothiorate
  modified_base 38: mod_base = OTHER; note = Adenosine phosphorothiorate
  modified_base 49: mod_base = OTHER; note = 2'-Omethylcytosine
  modified_base 50: mod_base = OTHER; note = 2'-Omethylcytosine
  modified_base 52: mod_base = OTHER; note = 2'-Omethylguanosine
  modified_base 54: mod_base = OTHER; note = 2'-Omethyluridine
  modified_base 55: mod_base = OTHER; note = Uridine phosphorothiorate
  modified_base 56: mod_base = OTHER; note = 2'-Omethylcytosine
  modified_base 57: mod_base = OTHER; note = 2'-fluoroguanosine
  modified_base 59: mod_base = OTHER; note = 2'-Omethylguanosine
  modified_base 61: mod_base = OTHER; note = 2'-Omethylcytosine
  modified_base 62: mod_base = OTHER; note = 2'-Omethylcytosine
  modified_base 63: mod_base = OTHER; note = 2'-fluorocytosine
  modified_base 64: mod_base = OTHER; note = 2'-Omethylguanosine
  modified_base 65: mod_base = OTHER; note = 2'-Omethylguanosine
  modified_base 73: mod_base = OTHER; note = 2'-Omethylguanosine

SEQ ID NO: 8969 - RNA, 86 nt, synthetic construct; identical to SEQ ID NO: 3290
  source 1..86: mol_type = other RNA
  modified_base 1: mod_base = OTHER; note = 2'-Omethyladenosine phosphorothiorate
  modified_base 2: mod_base = OTHER; note = 2'-Omethylcytosine
  modified_base 3: mod_base = OTHER; note = 2'-Omethylcytosine
  modified_base 4: mod_base = OTHER; note = 2'-Omethyladenosine
  modified_base 5: mod_base = OTHER; note = 2'-Omethylguanosine
  modified_base 6: mod_base = OTHER; note = 2'-Omethylguanosine
  modified_base 44: mod_base = OTHER; note = 2'-Omethyluridine
  modified_base 57: mod_base = OTHER; note = 2'-fluoroguanosine
  modified_base 58: mod_base = OTHER; note = 2'-fluorocytosine
  modified_base 59: mod_base = OTHER; note = 2'-Omethylguanosine
  modified_base 83: mod_base = OTHER; note = 2'-Omethyladenosine

SEQ ID NO: 8970 - RNA, 75 nt, synthetic construct; identical to SEQ ID NO: 1045
  source 1..75: mol_type = other RNA
  modified_base 1: mod_base = OTHER; note = 2'-Omethylguanosine phosphorothiorate
  modified_base 2: mod_base = OTHER; note = 2'-Omethylguanosine phosphorothiorate
  modified_base 12: mod_base = OTHER; note = Guanosine phosphorothiorate
  modified_base 19: mod_base = OTHER; note = 2'-fluorouridine
  modified_base 22: mod_base = OTHER; note = 2'-fluoroguanosine
  modified_base 23: mod_base = OTHER; note = 2'-fluorocytosine
  modified_base 31: mod_base = OTHER; note = 2'-Omethyladenosine
  modified_base 50: mod_base = OTHER; note = Guanosine phosphorothiorate
  modified_base 51: mod_base = OTHER; note = 2'-fluoroadenosine
  modified_base 63: mod_base = OTHER; note = Guanosine phosphorothiorate
  modified_base 66: mod_base = OTHER; note = 2'-fluoroguanosine
  modified_base 73: mod_base = OTHER; note = Cytosine phosphorothiorate
  modified_base 74: mod_base = OTHER; note = 2'-Omethylcytosine

SEQ ID NO: 8971 - RNA, 75 nt, synthetic construct; identical to SEQ ID NO: 3306
  source 1..75: mol_type = other RNA
  modified_base 1: mod_base = OTHER; note = 2'-Omethylguanosine
  modified_base 2: mod_base = OTHER; note = 2'-Omethyladenosine
  modified_base 3: mod_base = OTHER; note = 2'-Omethylcytosine
  modified_base 4: mod_base = OTHER; note = 2'-Omethylcytosine
  modified_base 5: mod_base = OTHER; note = 2'-Omethyluridine
  modified_base 6: mod_base = OTHER; note = 2'-Omethylcytosine
  modified_base 65: mod_base = OTHER; note = 2'-Omethylcytosine
  modified_base 66: mod_base = OTHER; note = 2'-Omethylguanosine
  modified_base 67: mod_base = OTHER; note = 2'-Omethylguanosine
  modified_base 72: mod_base = OTHER; note = 2'-Omethyladenosine

SEQ ID NO: 8972 - RNA, 76 nt, synthetic construct; identical to SEQ ID NO: 625
  source 1..76: mol_type = other RNA
  modified_base 1: mod_base = OTHER; note = 2'-Omethylguanosine phosphorothiorate
  modified_base 2: mod_base = OTHER; note = 2'-Omethylguanosine
  modified_base 3: mod_base = OTHER; note = 2'-Omethylcytosine
  modified_base 4: mod_base = OTHER; note = 2'-Omethyluridine
  modified_base 5: mod_base = OTHER; note = 2'-Omethylcytosine
  modified_base 6: mod_base = OTHER; note = 2'-Omethylcytosine
  modified_base 10: mod_base = OTHER; note = 2'-Omethylguanosine
  modified_base 11: mod_base = OTHER; note = 2'-Omethylcytosine
  modified_base 12: mod_base = OTHER; note = 2'-Omethylguanosine
  modified_base 13: mod_base = OTHER; note = 2'-Omethylcytosine
  modified_base 16: mod_base = OTHER; note = 2'-Omethyluridine
  modified_base 17: mod_base = OTHER; note = 2'-Omethylguanosine
  modified_base 18: mod_base = OTHER; note = 2'-Omethylguanosine
  modified_base 22: mod_base = OTHER; note = 2'-Omethylguanosine
  modified_base 23: mod_base = OTHER; note = 2'-Omethylcytosine
  modified_base 24: mod_base = OTHER; note = 2'-Omethylguanosine
  modified_base 25: mod_base = OTHER; note = 2'-Omethylcytosine
  modified_base 54: mod_base = OTHER; note = 2'-Omethyluridine phosphorothiorate
  modified_base 55: mod_base = OTHER; note = Uridine phosphorothiorate
  modified_base 56: mod_base = OTHER; note = 2'-Omethylcytosine
  modified_base 57: mod_base = OTHER; note = 2'-fluoroguanosine
  modified_base 59: mod_base = OTHER; note = 2'-Omethylguanosine
  modified_base 73: mod_base = OTHER; note = 2'-Omethylguanosine

SEQ ID NO: 8973 - RNA, 86 nt, synthetic construct; identical to SEQ ID NO: 3290
  source 1..86: mol_type = other RNA
  modified_base 1: mod_base = OTHER; note = 2'-Omethyladenosine
  modified_base 2: mod_base = OTHER; note = 2'-Omethylcytosine
  modified_base 3: mod_base = OTHER; note = 2'-Omethylcytosine
  modified_base 4: mod_base = OTHER; note = 2'-Omethyladenosine
  modified_base 5: mod_base = OTHER; note = 2'-Omethylguanosine
  modified_base 6: mod_base = OTHER; note = 2'-Omethylguanosine
  modified_base 14: mod_base = OTHER; note = 2'-Omethyladenosine
  modified_base 15: mod_base = OTHER; note = 2'-Omethylguanosine
  modified_base 16: mod_base = OTHER; note = 2'-Omethyluridine
  modified_base 17: mod_base = OTHER; note = 2'-Omethylguanosine
  modified_base 18: mod_base = OTHER; note = 2'-Omethylguanosine
  modified_base 20: mod_base = OTHER; note = 2'-Omethyluridine
  modified_base 25: mod_base = OTHER; note = 2'-Omethylcytosine
  modified_base 33: mod_base = OTHER; note = 2'-fluorouridine
  modified_base 35: mod_base = OTHER; note = Cytosine phosphorothiorate
  modified_base 37: mod_base = OTHER; note = Guanosine phosphorothiorate
  modified_base 38: mod_base = OTHER; note = Adenosine phosphorothiorate
  modified_base 59: mod_base = OTHER; note = 2'-Omethylguanosine
  modified_base 60: mod_base = OTHER; note = 2'-Omethyluridine
  modified_base 62: mod_base = OTHER; note = 2'-Omethylguanosine
  modified_base 64: mod_base = OTHER; note = 2'-Omethyluridine
  modified_base 65: mod_base = OTHER; note = Uridine phosphorothiorate
  modified_base 66: mod_base = OTHER; note = 2'-Omethylcytosine
  modified_base 67: mod_base = OTHER; note = 2'-fluoroguanosine
  modified_base 69: mod_base = OTHER; note = 2'-Omethyladenosine
  modified_base 71: mod_base = OTHER; note = 2'-Omethylcytosine
  modified_base 72: mod_base = OTHER; note = 2'-Omethylcytosine
  modified_base 73: mod_base = OTHER; note = 2'-fluorocytosine
  modified_base 74: mod_base = OTHER; note = 2'-Omethyladenosine
  modified_base 75: mod_base = OTHER; note = 2'-Omethylcytosine
  modified_base 83: mod_base = OTHER; note = 2'-Omethyladenosine

SEQ ID NO: 8974 - RNA, 76 nt, synthetic construct
  source 1..76: mol_type = other RNA
ggctccgtggcgcaatggatagcgcattcactttcaaagtgaaaggttccgggttcgagtcccggcggagtcgcca

SEQ ID NO: 8975 - RNA, 76 nt, synthetic construct; identical to SEQ ID NO: 625
  source 1..76: mol_type = other RNA
  modified_base 1: mod_base = OTHER; note = 2'-Omethylguanosine
  modified_base 2: mod_base = OTHER; note = 2'-Omethylguanosine
  modified_base 3: mod_base = OTHER; note = 2'-Omethylcytosine
  modified_base 4: mod_base = OTHER; note = 2'-Omethyluridine
  modified_base 5: mod_base = OTHER; note = 2'-Omethylcytosine
  modified_base 6: mod_base = OTHER; note = 2'-Omethylcytosine
  modified_base 10: mod_base = OTHER; note = 2'-Omethylguanosine
  modified_base 11: mod_base = OTHER; note = 2'-Omethylcytosine
  modified_base 12: mod_base = OTHER; note = 2'-Omethylguanosine
  modified_base 13: mod_base = OTHER; note = 2'-Omethylcytosine
  modified_base 14: mod_base = OTHER; note = 2'-Omethyladenosine
  modified_base 15: mod_base = OTHER; note = 2'-fluoroadenosine
  modified_base 16: mod_base = OTHER; note = 2'-Omethyluridine
  modified_base 17: mod_base = OTHER; note = 2'-Omethylguanosine
  modified_base 18: mod_base = OTHER; note = 2'-Omethylguanosine
  modified_base 19: mod_base = OTHER; note = 2'-fluoroadenosine
  modified_base 20: mod_base = OTHER; note = 2'-Omethyluridine
  modified_base 21: mod_base = OTHER; note = 2'-fluoroadenosine
  modified_base 22: mod_base = OTHER; note = 2'-Omethylguanosine
  modified_base 23: mod_base = OTHER; note = 2'-Omethylcytosine
  modified_base 24: mod_base = OTHER; note = 2'-Omethylguanosine
  modified_base 25: mod_base = OTHER; note = 2'-Omethylcytosine
  modified_base 38: mod_base = OTHER; note = Adenosine phosphorothiorate
  modified_base 39: mod_base = OTHER; note = Uridine phosphorothiorate
  modified_base 40: mod_base = OTHER; note = 2'-fluorouridine
  modified_base 43: mod_base = OTHER; note = 2'-Omethyladenosine
  modified_base 44: mod_base = OTHER; note = 2'-Omethyladenosine
  modified_base 45: mod_base = OTHER; note = 2'-Omethylguanosine
  modified_base 46: mod_base = OTHER; note = 2'-fluoroguanosine
  modified_base 48: mod_base = OTHER; note = 2'-fluorouridine
  modified_base 49: mod_base = OTHER; note = 2'-Omethylcytosine
  modified_base 50: mod_base = OTHER; note = 2'-Omethylcytosine
  modified_base 54: mod_base = OTHER; note = 2'-Omethyluridine phosphorothiorate
  modified_base 55: mod_base = OTHER; note = Uridine phosphorothiorate
  modified_base 56: mod_base = OTHER; note = 2'-Omethylcytosine
  modified_base 57: mod_base = OTHER; note = 2'-fluoroguanosine
  modified_base 61: mod_base = OTHER; note = 2'-Omethylcytosine
  modified_base 62: mod_base = OTHER; note = 2'-Omethylcytosine
  modified_base 63: mod_base = OTHER; note = 2'-fluorocytosine
  modified_base 64: mod_base = OTHER; note = 2'-Omethylguanosine
  modified_base 65: mod_base = OTHER; note = 2'-Omethylguanosine
  modified_base 66: mod_base = OTHER; note = 2'-Omethylcytosine
  modified_base 67: mod_base = OTHER; note = 2'-Omethylguanosine
  modified_base 68: mod_base = OTHER; note = 2'-Omethylguanosine
  modified_base 69: mod_base = OTHER; note = 2'-Omethyladenosine
  modified_base 70: mod_base = OTHER; note = 2'-fluoroguanosine

SEQ ID NO: 8976 - RNA, 76 nt, synthetic construct; identical to SEQ ID NO: 625
  source 1..76: mol_type = other RNA
  modified_base 1: mod_base = OTHER; note = 2'-fluoroguanosine
  modified_base 2: mod_base = OTHER; note = 2'-Omethylguanosine
  modified_base 12: mod_base = OTHER; note = 2'-Omethylguanosine
  modified_base 14: mod_base = OTHER; note = 2'-fluoroadenosine
  modified_base 16: mod_base = OTHER; note = 2'-fluorouridine
  modified_base 18: mod_base = OTHER; note = 2'-fluoroguanosine
  modified_base 20: mod_base = OTHER; note = 2'-Omethyluridine
  modified_base 26: mod_base = OTHER; note = 2'-fluoroadenosine
  modified_base 28: mod_base = OTHER; note = Uridine phosphorothiorate
  modified_base 32: mod_base = OTHER; note = 2'-fluorocytosine
  modified_base 33: mod_base = OTHER; note = 2'-fluorouridine phosphorothiorate
  modified_base 34: mod_base = OTHER; note = 2'-fluorouridine
  modified_base 38: mod_base = OTHER; note = Adenosine phosphorothiorate
  modified_base 40: mod_base = OTHER; note = 2'-Omethyluridine
  modified_base 41: mod_base = OTHER; note = 2'-fluorocytosine
  modified_base 43: mod_base = OTHER; note = 2'-fluoroadenosine
  modified_base 44: mod_base = OTHER; note = Adenosine phosphorothiorate
  modified_base 45: mod_base = OTHER; note = 2'-fluoroguanosine
  modified_base 47: mod_base = OTHER; note = 2'-Omethyluridine phosphorothiorate
  modified_base 49: mod_base = OTHER; note = Cytosine phosphorothiorate
  modified_base 54: mod_base = OTHER; note = Uridine phosphorothiorate
  modified_base 55: mod_base = OTHER; note = Uridine phosphorothiorate
  modified_base 56: mod_base = OTHER; note = 2'-fluorocytosine phosphorothiorate
  modified_base 58: mod_base = OTHER; note = 2'-fluoroadenosine
  modified_base 61: mod_base = OTHER; note = 2'-fluorocytosine
  modified_base 65: mod_base = OTHER; note = 2'-fluoroguanosine
  modified_base 66: mod_base = OTHER; note = Cytosine phosphorothiorate
  modified_base 67: mod_base = OTHER; note = 2'-fluoroguanosine
  modified_base 69: mod_base = OTHER; note = 2'-fluoroadenosine phosphorothiorate
  modified_base 71: mod_base = OTHER; note = Uridine phosphorothiorate
  modified_base 73: mod_base = OTHER; note = Guanosine phosphorothiorate
  modified_base 74: mod_base = OTHER; note = 2'-fluorocytosine

SEQ ID NO: 8977 - RNA, 76 nt, synthetic construct; identical to SEQ ID NO: 3295
  source 1..76: mol_type = other RNA
  modified_base 1: mod_base = OTHER; note = 2'-Omethylcytosine phosphorothiorate
  modified_base 2: mod_base = OTHER; note = 2'-Omethylcytosine phosphorothiorate
  modified_base 8: mod_base = OTHER; note = 2'-fluorouridine phosphorothiorate
  modified_base 15: mod_base = OTHER; note = 2'-fluoroguanosine phosphorothiorate
  modified_base 26: mod_base = OTHER; note = Guanosine phosphorothiorate
  modified_base 29: mod_base = OTHER; note = 2'-fluoroguanosine
  modified_base 43: mod_base = OTHER; note = 2'-fluorouridine
  modified_base 49: mod_base = OTHER; note = 2'-fluoroguanosine phosphorothiorate
  modified_base 75: mod_base = OTHER; note = 2'-fluorocytosine
  modified_base 76: mod_base = OTHER; note = 2'-Omethyladenosine

SEQ ID NO: 8978 - RNA, 85 nt, synthetic construct; identical to SEQ ID NO: 3297
  source 1..85: mol_type = other RNA
  modified_base 1: mod_base = OTHER; note = 2'-Omethylguanosine phosphorothiorate
  modified_base 2: mod_base = OTHER; note = Cytosine phosphorothiorate
  modified_base 28: mod_base = OTHER; note = 2'-fluorouridine
  modified_base 57: mod_base = OTHER; note = 2'-Omethylcytosine phosphorothiorate
  modified_base 74: mod_base = OTHER; note = 2'-fluorocytosine phosphorothiorate
  modified_base 83: mod_base = OTHER; note = Cytosine phosphorothiorate

SEQ ID NO: 8979 - RNA, 74 nt, synthetic construct; identical to SEQ ID NO: 3293
  source 1..74: mol_type = other RNA
  modified_base 1: mod_base = OTHER; note = 2'-Omethyladenosine
  modified_base 2: mod_base = OTHER; note = Cytosine phosphorothiorate
  modified_base 3: mod_base = OTHER; note = Cytosine phosphorothiorate
  modified_base 4: mod_base = OTHER; note = 2'-fluorouridine
  modified_base 8: mod_base = OTHER; note = 2'-fluoroguanosine
  modified_base 9: mod_base = OTHER; note = 2'-fluoroguanosine
  modified_base 11: mod_base = OTHER; note = 2'-fluoroguanosine
  modified_base 12: mod_base = OTHER; note = 2'-Omethylcytosine phosphorothiorate
  modified_base 24: mod_base = OTHER; note = 2'-fluoroguanosine
  modified_base 27: mod_base = OTHER; note = 2'-Omethyluridine phosphorothiorate
  modified_base 40: mod_base = OTHER; note = Guanosine phosphorothiorate
  modified_base 42: mod_base = OTHER; note = Adenosine phosphorothiorate
  modified_base 43: mod_base = OTHER; note = 2'-fluoroguanosine
  modified_base 50: mod_base = OTHER; note = Uridine phosphorothiorate
  modified_base 51: mod_base = OTHER; note = 2'-fluoroguanosine
  modified_base 60: mod_base = OTHER; note = 2'-fluoroadenosine
  modified_base 62: mod_base = OTHER; note = Guanosine phosphorothiorate
  modified_base 73: mod_base = OTHER; note = 2'-Omethylcytosine phosphorothiorate

SEQ ID NO: 8980 - RNA, 76 nt, synthetic construct; identical to SEQ ID NO: 625
  source 1..76: mol_type = other RNA
  modified_base 1: mod_base = OTHER; note = 2'-Omethylguanosine phosphorothiorate
  modified_base 2: mod_base = OTHER; note = 2'-Omethylguanosine phosphorothiorate
  modified_base 16: mod_base = OTHER; note = 2'-O-(2-Methoxyethyl) thymine
  modified_base 33: mod_base = OTHER; note = 2'-O-(2-Methoxyethyl) thymine
  modified_base 54: mod_base = OTHER; note = 2'-fluorouridine
  modified_base 74: mod_base = OTHER; note = Cytosine phosphorothiorate
  modified_base 75: mod_base = OTHER; note = 2'-Omethylcytosine phosphorothiorate
  modified_base 76: mod_base = OTHER; note = 2'-Omethyladenosine

SEQ ID NO: 8981 - RNA, 74 nt, synthetic construct; identical to SEQ ID NO: 3293
  source 1..74: mol_type = other RNA
  modified_base 6: mod_base = OTHER; note = Guanosine phosphorothiorate
  modified_base 25: mod_base = OTHER; note = Uridine phosphorothiorate
  modified_base 42: mod_base = OTHER; note = Adenosine phosphorothiorate
  modified_base 46: mod_base = OTHER; note = 2'-fluorouridine
  modified_base 50: mod_base = OTHER; note = Uridine phosphorothiorate
  modified_base 67: mod_base = OTHER; note = Guanosine phosphorothiorate
  modified_base 73: mod_base = OTHER; note = 2'-Omethylcytosine phosphorothiorate

SEQ ID NO: 8982 - RNA, 76 nt, synthetic construct; identical to SEQ ID NO: 625
  source 1..76: mol_type = other RNA
  modified_base 1: mod_base = OTHER; note = 2'-Omethylguanosine phosphorothiorate
  modified_base 2: mod_base = OTHER; note = 2'-Omethylguanosine
  modified_base 13: mod_base = OTHER; note = 2'-Omethylcytosine
  modified_base 22: mod_base = OTHER; note = 2'-Omethylguanosine
  modified_base 23: mod_base = OTHER; note = 2'-Omethylcytosine
  modified_base 24: mod_base = OTHER; note = 2'-Omethylguanosine
  modified_base 25: mod_base = OTHER; note = 2'-Omethylcytosine
  modified_base 33: mod_base = OTHER; note = 2'-fluorouridine
  modified_base 35: mod_base = OTHER; note = Cytosine phosphorothiorate
  modified_base 37: mod_base = OTHER; note = Adenosine phosphorothiorate
  modified_base 38: mod_base = OTHER; note = Adenosine phosphorothiorate
  modified_base 50: mod_base = OTHER; note = 2'-Omethylcytosine
  modified_base 52: mod_base = OTHER; note = 2'-fluoroguanosine
  modified_base 54: mod_base = OTHER; note = Uridine phosphorothiorate
  modified_base 55: mod_base = OTHER; note = Uridine phosphorothiorate
  modified_base 56: mod_base = OTHER; note = Cytosine phosphorothiorate
  modified_base 57: mod_base = OTHER; note = Guanosine phosphorothiorate
  modified_base 62: mod_base = OTHER; note = 2'-Omethylcytosine
  modified_base 63: mod_base = OTHER; note = 2'-fluorocytosine
  modified_base 65: mod_base = OTHER; note = 2'-Omethylguanosine
  modified_base 68: mod_base = OTHER; note = 2'-Omethylguanosine
  modified_base 73: mod_base = OTHER; note = 2'-Omethylguanosine
  modified_base 75: mod_base = OTHER; note = 2'-fluorocytosine phosphorothiorate

SEQ ID NO: 8983 - RNA, 76 nt, synthetic construct; identical to SEQ ID NO: 625
  source 1..76: mol_type = other RNA
  modified_base 2: mod_base = OTHER; note = 2'-fluoroguanosine
  modified_base 4: mod_base = OTHER; note = Uridine phosphorothiorate
  modified_base 5: mod_base = OTHER; note = 2'-Omethylcytosine
  modified_base 6: mod_base = OTHER; note = 2'-Omethylcytosine
  modified_base 7: mod_base = OTHER; note = Guanosine phosphorothiorate
  modified_base 10: mod_base = OTHER; note = 2'-fluoroguanosine
  modified_base 15: mod_base = OTHER; note = 2'-fluoroadenosine
  modified_base 20: mod_base = OTHER; note = Uridine phosphorothiorate
  modified_base 21: mod_base = OTHER; note = Adenosine phosphorothiorate
  modified_base 22: mod_base = OTHER; note = 2'-fluoroguanosine
  modified_base 23: mod_base = OTHER; note = Cytosine phosphorothiorate
  modified_base 24: mod_base = OTHER; note = 2'-fluoroguanosine
  modified_base 26: mod_base = OTHER; note = 2'-Omethyladenosine phosphorothiorate
  modified_base 30: mod_base = OTHER; note = 2'-fluoroguanosine
  modified_base 32: mod_base = OTHER; note = 2'-fluorocytosine
  modified_base 33: mod_base = OTHER; note = 2'-fluorouridine
  modified_base 34: mod_base = OTHER; note = 2'-Omethyluridine
  modified_base 39: mod_base = OTHER; note = 2'-fluorouridine
  modified_base 40: mod_base = OTHER; note = 2'-Omethyluridine
  modified_base 42: mod_base = OTHER; note = Adenosine phosphorothiorate
  modified_base 43: mod_base = OTHER; note = 2'-Omethyladenosine
  modified_base 47: mod_base = OTHER; note = 2'-fluorouridine
  modified_base 49: mod_base = OTHER; note = 2'-fluorocytosine
  modified_base 51: mod_base = OTHER; note = Guanosine phosphorothiorate
  modified_base 54: mod_base = OTHER; note = 2'-fluorouridine
  modified_base 56: mod_base = OTHER; note = 2'-fluorocytosine
  modified_base 57: mod_base = OTHER; note = 2'-Omethylguanosine
  modified_base 58: mod_base = OTHER; note = 2'-fluoroadenosine
  modified_base 62: mod_base = OTHER; note = 2'-fluorocytosine
  modified_base 64: mod_base = OTHER; note = 2'-Omethylguanosine
  modified_base 66: mod_base = OTHER; note = Cytosine phosphorothiorate
  modified_base 67: mod_base = OTHER; note = 2'-fluoroguanosine
  modified_base 68: mod_base = OTHER; note = Guanosine phosphorothiorate
  modified_base 71: mod_base = OTHER; note = 2'-Omethyluridine
  modified_base 74: mod_base = OTHER; note = 2'-Omethylcytosine phosphorothiorate
  modified_base 75: mod_base = OTHER; note = 2'-Omethylcytosine

SEQ ID NO: 8984 - RNA, 76 nt, synthetic construct; identical to SEQ ID NO: 3295
  source 1..76: mol_type = other RNA
  modified_base 1: mod_base = OTHER; note = 2'-Omethylcytosine
  modified_base 2: mod_base = OTHER; note = 2'-Omethylcytosine phosphorothiorate
  modified_base 3: mod_base = OTHER; note = 2'-Omethyluridine phosphorothiorate
  modified_base 16: mod_base = OTHER; note = Uridine phosphorothiorate
  modified_base 25: mod_base = OTHER; note = 2'-fluorocytosine phosphorothiorate
  modified_base 27: mod_base = OTHER; note = 2'-fluoroguanosine
  modified_base 38: mod_base = OTHER; note = Adenosine phosphorothiorate
  modified_base 54: mod_base = OTHER; note = 2'-Omethyluridine
  modified_base 67: mod_base = OTHER; note = 2'-fluorocytosine
  modified_base 69: mod_base = OTHER; note = 2'-fluoroadenosine
  modified_base 75: mod_base = OTHER; note = Cytosine phosphorothiorate

SEQ ID NO: 8985 - RNA, 85 nt, synthetic construct; identical to SEQ ID NO: 3288
  source 1..85: mol_type = other RNA
  modified_base 1: mod_base = OTHER; note = 2'-Omethylcytosine
  modified_base 3: mod_base = OTHER; note = 2'-fluoroadenosine
  modified_base 17: mod_base = OTHER; note = Guanosine phosphorothiorate
  modified_base 23: mod_base = OTHER; note = 2'-fluoroguanosine
  modified_base 29: mod_base = OTHER; note = 2'-fluoroguanosine
  modified_base 32: mod_base = OTHER; note = 2'-fluorouridine
  modified_base 34: mod_base = OTHER; note = 2'-fluorocytosine phosphorothiorate
  modified_base 38: mod_base = OTHER; note = 2'-Omethyluridine
  modified_base 45: mod_base = OTHER; note = 2'-fluoroguanosine phosphorothiorate
  modified_base 48: mod_base = OTHER; note = Adenosine phosphorothiorate
  modified_base 56: mod_base = OTHER; note = 2'-Omethylguanosine
  modified_base 58: mod_base = OTHER; note = 2'-Omethylguanosine
  modified_base 61: mod_base = OTHER; note = 2'-fluoroguanosine
  modified_base 79: mod_base = OTHER; note = 2'-fluoroguanosine
  modified_base 84: mod_base = OTHER; note = 2'-Omethylcytosine phosphorothiorate

SEQ ID NO: 8986 - RNA, 74 nt, synthetic construct; identical to SEQ ID NO: 3293
  source 1..74: mol_type = other RNA
  modified_base 1: mod_base = OTHER; note = 2'-fluoroadenosine
  modified_base 9: mod_base = OTHER; note = Guanosine phosphorothiorate
  modified_base 22: mod_base = OTHER; note = Guanosine phosphorothiorate
  modified_base 27: mod_base = OTHER; note = 2'-fluorouridine
  modified_base 46: mod_base = OTHER; note = 2'-fluorouridine
  modified_base 48: mod_base = OTHER; note = 2'-fluorocytosine
  modified_base 62: mod_base = OTHER; note = 2'-fluoroguanosine
  modified_base 73: mod_base = OTHER; note = 2'-Omethylcytosine phosphorothiorate

SEQ ID NO: 8987 - RNA, 85 nt, synthetic construct; identical to SEQ ID NO: 3297
  source 1..85: mol_type = other RNA
  modified_base 1: mod_base = OTHER; note = 2'-Omethylguanosine phosphorothiorate
  modified_base 2: mod_base = OTHER; note = 2'-Omethylcytosine phosphorothiorate
  modified_base 13: mod_base = OTHER; note = 2'-fluoroguanosine
  modified_base 14: mod_base = OTHER; note = 2'-fluoroadenosine
  modified_base 63: mod_base = OTHER; note = 2'-fluorouridine
  modified_base 68: mod_base = OTHER; note = 2'-Omethyladenosine
  modified_base 84: mod_base = OTHER; note = Cytosine phosphorothiorate
  modified_base 85: mod_base = OTHER; note = 2'-Omethyladenosine

SEQ ID NO: 8988 - RNA, 75 nt, synthetic construct; identical to SEQ ID NO: 3311
  source 1..75: mol_type = other RNA
  modified_base 1: mod_base = OTHER; note = 2'-Omethylguanosine phosphorothiorate
  modified_base 12: mod_base = OTHER; note = 2'-fluoroguanosine
  modified_base 14: mod_base = OTHER; note = 2'-Omethyladenosine
  modified_base 15: mod_base = OTHER; note = Adenosine phosphorothiorate
  modified_base 19: mod_base = OTHER; note = 2'-fluorouridine
  modified_base 21: mod_base = OTHER; note = Adenosine phosphorothiorate
  modified_base 22: mod_base = OTHER; note = 2'-fluoroguanosine
  modified_base 23: mod_base = OTHER; note = 2'-fluorocytosine
  modified_base 26: mod_base = OTHER; note = Uridine phosphorothiorate
  modified_base 28: mod_base = OTHER; note = 2'-fluorouridine
  modified_base 38: mod_base = OTHER; note = 2'-fluoroadenosine
  modified_base 39: mod_base = OTHER; note = Uridine phosphorothiorate
  modified_base 41: mod_base = OTHER; note = 2'-Omethylcytosine
  modified_base 55: mod_base = OTHER; note = 2'-Omethylcytosine
  modified_base 63: mod_base = OTHER; note = 2'-Omethylguanosine phosphorothiorate
  modified_base 64: mod_base = OTHER; note = Guanosine phosphorothiorate
  modified_base 65: mod_base = OTHER; note = 2'-fluorouridine
  modified_base 72: mod_base = OTHER; note = Uridine phosphorothiorate
  modified_base 73: mod_base = OTHER; note = 2'-fluorocytosine
  modified_base 74: mod_base = OTHER; note = 2'-Omethylcytosine
  modified_base 75: mod_base = OTHER; note = 2'-fluoroadenosine

SEQ ID NO: 8989 - RNA, 76 nt, synthetic construct; identical to SEQ ID NO: 625
  source 1..76: mol_type = other RNA
  modified_base 1: mod_base = OTHER; note = 2'-Omethylguanosine
  modified_base 10: mod_base = OTHER; note = 2'-Omethylguanosine
  modified_base 13: mod_base = OTHER; note = 2'-Omethylcytosine
  modified_base 17: mod_base = OTHER; note = Guanosine phosphorothiorate
  modified_base 18: mod_base = OTHER; note = 2'-Omethylguanosine
  modified_base 20: mod_base = OTHER; note = 2'-Omethyluridine
  modified_base 25: mod_base = OTHER; note = 2'-Omethylcytosine
  modified_base 29: mod_base = OTHER; note = 2'-Omethylguanosine
  modified_base 33: mod_base = OTHER; note = 2'-fluorouridine
  modified_base 35: mod_base = OTHER; note = Cytosine phosphorothiorate
  modified_base 37: mod_base = OTHER; note = Adenosine phosphorothiorate
  modified_base 38: mod_base = OTHER; note = Adenosine phosphorothiorate
  modified_base 43: mod_base = OTHER; note = 2'-Omethyladenosine
  modified_base 44: mod_base = OTHER; note = 2'-fluoroadenosine
  modified_base 46: mod_base = OTHER; note = Guanosine phosphorothiorate
  modified_base 50: mod_base = OTHER; note = 2'-Omethylcytosine
  modified_base 52: mod_base = OTHER; note = 2'-Omethylguanosine
  modified_base 54: mod_base = OTHER; note = Uridine phosphorothiorate
  modified_base 55: mod_base = OTHER; note = Uridine phosphorothiorate
  modified_base 56: mod_base = OTHER; note = 2'-Omethylcytosine
  modified_base 57: mod_base = OTHER; note = Guanosine phosphorothiorate
  modified_base 62: mod_base = OTHER; note = 2'-Omethylcytosine
  modified_base 63: mod_base = OTHER; note = 2'-fluorocytosine
  modified_base 65: mod_base = OTHER; note = 2'-Omethylguanosine
  modified_base 71: mod_base = OTHER; note = 2'-Omethyluridine
  modified_base 73: mod_base = OTHER; note = 2'-Omethylguanosine

SEQ ID NO: 8990 - RNA, 74 nt, synthetic construct; identical to SEQ ID NO: 3293
  source 1..74: mol_type = other RNA
  modified_base 1: mod_base = OTHER; note = Adenosine phosphorothiorate
  modified_base 2: mod_base = OTHER; note = 2'-fluorocytosine
  modified_base 3: mod_base = OTHER; note = Cytosine phosphorothiorate
  modified_base 4: mod_base = OTHER; note = Uridine phosphorothiorate
  modified_base 6: mod_base = OTHER; note = Guanosine phosphorothiorate
  modified_base 8: mod_base = OTHER; note = Guanosine phosphorothiorate
  modified_base 9: mod_base = OTHER; note = 2'-fluoroguanosine
  modified_base 11: mod_base = OTHER; note = 2'-fluoroguanosine
  modified_base 14: mod_base = OTHER; note = 2'-fluoroadenosine phosphorothiorate
  modified_base 24: mod_base = OTHER; note = 2'-fluoroguanosine
  modified_base 27: mod_base = OTHER; note = 2'-Omethyluridine
  modified_base 35: mod_base = OTHER; note = 2'-Omethylguanosine phosphorothiorate
  modified_base 42: mod_base = OTHER; note = Adenosine phosphorothiorate
  modified_base 43: mod_base = OTHER; note = 2'-fluoroguanosine
  modified_base 46: mod_base = OTHER; note = Uridine phosphorothiorate
  modified_base 48: mod_base = OTHER; note = 2'-fluorocytosine
  modified_base 62: mod_base = OTHER; note = Guanosine phosphorothiorate
  modified_base 65: mod_base = OTHER; note = 2'-fluoroguanosine
  modified_base 73: mod_base = OTHER; note = 2'-Omethylcytosine phosphorothiorate

SEQ ID NO: 8991 - RNA, 86 nt, synthetic construct; identical to SEQ ID NO: 3290
  source 1..86: mol_type = other RNA
  modified_base 74: mod_base = OTHER; note = 2'-fluoroadenosine

SEQ ID NO: 8992 - RNA, 75 nt, synthetic construct; identical to SEQ ID NO: 1045
  source 1..75: mol_type = other RNA
  modified_base 1: mod_base = OTHER; note = 2'-fluoroguanosine phosphorothiorate
  modified_base 2: mod_base = OTHER; note = 2'-Omethylguanosine phosphorothiorate
  modified_base 3: mod_base = OTHER; note = 2'-fluorouridine phosphorothiorate
  modified_base 11: mod_base = OTHER; note = 2'-fluorouridine
  modified_base 18: mod_base = OTHER; note = 2'-fluoroguanosine
  modified_base 19: mod_base = OTHER; note = Uridine phosphorothiorate
  modified_base 21: mod_base = OTHER; note = 2'-fluoroadenosine
  modified_base 23: mod_base = OTHER; note = 2'-fluorocytosine phosphorothiorate
  modified_base 35: mod_base = OTHER; note = Uridine phosphorothiorate
  modified_base 40: mod_base = OTHER; note = Cytosine phosphorothiorate
  modified_base 41: mod_base = OTHER; note = 2'-fluorocytosine
  modified_base 53: mod_base = OTHER; note = 2'-fluorouridine phosphorothiorate
  modified_base 56: mod_base = OTHER; note = 2'-Omethylguanosine
  modified_base 64: mod_base = OTHER; note = Guanosine phosphorothiorate
  modified_base 66: mod_base = OTHER; note = 2'-fluoroguanosine
  modified_base 69: mod_base = OTHER; note = 2'-fluoroadenosine
  modified_base 72: mod_base = OTHER; note = Uridine phosphorothiorate

SEQ ID NO: 8993 - RNA, 76 nt, synthetic construct
  source 1..76: mol_type = other RNA
ggctccgtggcgcaatggatagcgcagtggacttcaaattcactccgtccgggttcgagtcccggcggagtcgcca

SEQ ID NO: 8994 - RNA, 76 nt, synthetic construct; identical to SEQ ID NO: 625
  source 1..76: mol_type = other RNA
  modified_base 1: mod_base = OTHER; note = 2'-Omethylguanosine phosphorothiorate
  modified_base 2: mod_base = OTHER; note = 2'-Omethylguanosine phosphorothiorate
  modified_base 3: mod_base = OTHER; note = 2'-Omethylcytosine
  modified_base 4: mod_base = OTHER; note = 2'-Omethyluridine
  modified_base 5: mod_base = OTHER; note = 2'-Omethylcytosine
  modified_base 6: mod_base = OTHER; note = 2'-Omethylcytosine
  modified_base 14: mod_base = OTHER; note = 2'-Omethyladenosine
  modified_base 15: mod_base = OTHER; note = 2'-Omethyladenosine
  modified_base 16: mod_base = OTHER; note = 2'-Omethyluridine
  modified_base 17: mod_base = OTHER; note = 2'-Omethylguanosine
  modified_base 18: mod_base = OTHER; note = 2'-Omethylguanosine
  modified_base 20: mod_base = OTHER; note = 2'-Omethyluridine
  modified_base 25: mod_base = OTHER; note = 2'-Omethylcytosine
  modified_base 33: mod_base = OTHER; note = 2'-fluorouridine
  modified_base 35: mod_base = OTHER; note = Cytosine phosphorothiorate
  modified_base 37: mod_base = OTHER; note = Adenosine phosphorothiorate
  modified_base 38: mod_base = OTHER; note = Adenosine phosphorothiorate
  modified_base 41: mod_base = OTHER; note = 2'-fluorocytosine
  modified_base 42: mod_base = OTHER; note = 2'-Omethyladenosine
  modified_base 43: mod_base = OTHER; note = 2'-Omethyladenosine
  modified_base 44: mod_base = OTHER; note = 2'-fluoroadenosine
  modified_base 49: mod_base = OTHER; note = 2'-Omethylcytosine
  modified_base 50: mod_base = OTHER; note = 2'-Omethylcytosine
  modified_base 52: mod_base = OTHER; note = 2'-Omethylguanosine
  modified_base 54: mod_base = OTHER; note = 2'-Omethyluridine
  modified_base 55: mod_base = OTHER; note = Uridine phosphorothiorate
  modified_base 56: mod_base = OTHER; note = 2'-Omethylcytosine
  modified_base 57: mod_base = OTHER; note = 2'-fluoroguanosine
  modified_base 59: mod_base = OTHER; note = 2'-Omethylguanosine
  modified_base 61: mod_base = OTHER; note = 2'-Omethylcytosine
  modified_base 62: mod_base = OTHER; note = 2'-Omethylcytosine
  modified_base 63: mod_base = OTHER; note = 2'-fluorocytosine
  modified_base 64: mod_base = OTHER; note = 2'-Omethylguanosine
  modified_base 65: mod_base = OTHER; note = 2'-Omethylguanosine
  modified_base 74: mod_base = OTHER; note = Cytosine phosphorothiorate
  modified_base 75: mod_base = OTHER; note = 2'-Omethylcytosine phosphorothiorate

SEQ ID NO: 8995 - RNA, 85 nt, synthetic construct; identical to SEQ ID NO: 3301
  source 1..85: mol_type = other RNA
  modified_base 1: mod_base = OTHER; note = 2'-Omethylguanosine phosphorothiorate
  modified_base 2: mod_base = OTHER; note = Cytosine phosphorothiorate
  modified_base 13: mod_base = OTHER; note = 2'-fluoroguanosine phosphorothiorate
  modified_base 14: mod_base = OTHER; note = 2'-fluoroadenosine
  modified_base 16: mod_base = OTHER; note = 2'-Omethyluridine
  modified_base 18: mod_base = OTHER; note = 2'-Omethylguanosine
  modified_base 26: mod_base = OTHER; note = Guanosine phosphorothiorate
  modified_base 27: mod_base = OTHER; note = 2'-Omethyluridine
  modified_base 40: mod_base = OTHER; note = 2'-fluorocytosine
  modified_base 41: mod_base = OTHER; note = 2'-fluorocytosine
  modified_base 42: mod_base = OTHER; note = Adenosine phosphorothiorate
  modified_base 48: mod_base = OTHER; note = 2'-Omethylguanosine phosphorothiorate
  modified_base 53: mod_base = OTHER; note = 2'-fluorocytosine
  modified_base 55: mod_base = OTHER; note = Cytosine phosphorothiorate
  modified_base 57: mod_base = OTHER; note = 2'-fluorocytosine phosphorothiorate
  modified_base 60: mod_base = OTHER; note = 2'-fluoroadenosine
  modified_base 72: mod_base = OTHER; note = 2'-fluorouridine
  modified_base 73: mod_base = OTHER; note = 2'-fluoroguanosine
  modified_base 80: mod_base = OTHER; note = 2'-Omethylguanosine phosphorothiorate
  modified_base 82: mod_base = OTHER; note = 2'-fluoroguanosine phosphorothiorate
  modified_base 83: mod_base = OTHER; note = 2'-fluorocytosine

SEQ ID NO: 8996 - RNA, 76 nt, synthetic construct; identical to SEQ ID NO: 625
  source 1..76: mol_type = other RNA
  modified_base 1: mod_base = OTHER; note = 2'-Omethylguanosine phosphorothiorate
  modified_base 2: mod_base = OTHER; note = 2'-Omethylguanosine
  modified_base 13: mod_base = OTHER; note = 2'-Omethylcytosine
  modified_base 33: mod_base = OTHER; note = 2'-fluorouridine
  modified_base 35: mod_base = OTHER; note = Cytosine phosphorothiorate
  modified_base 37: mod_base = OTHER; note = Adenosine phosphorothiorate
  modified_base 52: mod_base = OTHER; note = 2'-Omethylguanosine
  modified_base 62: mod_base = OTHER; note = 2'-Omethylcytosine
  modified_base 63: mod_base = OTHER; note = 2'-fluorocytosine
  modified_base 73: mod_base = OTHER; note = 2'-Omethylguanosine
  modified_base 75: mod_base = OTHER; note = 2'-fluorocytosine phosphorothiorate
  modified_base 76: mod_base = OTHER; note = 2'-Omethyladenosine

SEQ ID NO: 8997 - RNA, 76 nt, synthetic construct
  source 1..76: mol_type = other RNA
ggctccgtggcgcaatggatagcgcattggacttcaaattcaaaggttccggataggagttccggcggagtcgcca

SEQ ID NO: 8998 - RNA, 75 nt, synthetic construct; identical to SEQ ID NO: 3299
  source 1..75: mol_type = other RNA
  modified_base 1: mod_base = OTHER; note = 2'-Omethylcytosine
  modified_base 9: mod_base = OTHER; note = Guanosine phosphorothiorate
  modified_base 20: mod_base = OTHER; note = 2'-fluoroadenosine
  modified_base 25: mod_base = OTHER; note = Adenosine phosphorothiorate
  modified_base 36: mod_base = OTHER; note = Adenosine phosphorothiorate
  modified_base 60: mod_base = OTHER; note = 2'-fluorocytosine
  modified_base 61: mod_base = OTHER; note = Cytosine phosphorothiorate

SEQ ID NO: 8999 - RNA, 85 nt, synthetic construct; identical to SEQ ID NO: 3297
  source 1..85: mol_type = other RNA
  modified_base 1: mod_base = OTHER; note = 2'-Omethylguanosine
  modified_base 2: mod_base = OTHER; note = 2'-Omethylcytosine
  modified_base 3: mod_base = OTHER; note = 2'-Omethyluridine
  modified_base 4: mod_base = OTHER; note = 2'-Omethylguanosine
  modified_base 5: mod_base = OTHER; note = 2'-Omethyluridine
  modified_base 6: mod_base = OTHER; note = 2'-Omethylguanosine

SEQ ID NO: 9000 - RNA, 85 nt, synthetic construct; identical to SEQ ID NO: 3310
  source 1..85: mol_type = other RNA
  modified_base 1: mod_base = OTHER; note = 2'-fluorocytosine phosphorothiorate
  modified_base 11: mod_base = OTHER; note = Cytosine phosphorothiorate
  modified_base 16: mod_base = OTHER; note = 2'-Omethylguanosine
  modified_base 32: mod_base = OTHER; note = 2'-fluorouridine
  modified_base 43: mod_base = OTHER; note = 2'-Omethyluridine
  modified_base 56: mod_base = OTHER; note = 2'-Omethylguanosine
  modified_base 67: mod_base = OTHER; note = Adenosine phosphorothiorate

SEQ ID NO: 9001 - RNA, 75 nt, synthetic construct; identical to SEQ ID NO: 3306
  source 1..75: mol_type = other RNA
  modified_base 1: mod_base = OTHER; note = 2'-Omethylguanosine
  modified_base 2: mod_base = OTHER; note = 2'-Omethyladenosine
  modified_base 3: mod_base = OTHER; note = 2'-Omethylcytosine
  modified_base 4: mod_base = OTHER; note = 2'-Omethylcytosine
  modified_base 5: mod_base = OTHER; note = 2'-Omethyluridine
  modified_base 6: mod_base = OTHER; note = 2'-Omethylcytosine
  modified_base 14: mod_base = OTHER; note = 2'-Omethyladenosine
  modified_base 15: mod_base = OTHER; note = 2'-Omethyladenosine
  modified_base 16: mod_base = OTHER; note = 2'-Omethylcytosine
  modified_base 17: mod_base = OTHER; note = 2'-Omethylguanosine
  modified_base 18: mod_base = OTHER; note = 2'-Omethylguanosine
  modified_base 21: mod_base = OTHER; note = 2'-Omethylguanosine
  modified_base 22: mod_base = OTHER; note = 2'-Omethylcytosine
  modified_base 23: mod_base = OTHER; note = 2'-Omethylguanosine
  modified_base 24: mod_base = OTHER; note = 2'-Omethylcytosine
  modified_base 32: mod_base = OTHER; note = 2'-fluorouridine
  modified_base 34: mod_base = OTHER; note = Uridine phosphorothiorate
  modified_base 36: mod_base = OTHER; note = Guanosine phosphorothiorate
  modified_base 37: mod_base = OTHER; note = Adenosine phosphorothiorate
  modified_base 40: mod_base = OTHER; note = 2'-Omethyladenosine
  modified_base 41: mod_base = OTHER; note = 2'-Omethylguanosine
  modified_base 42: mod_base = OTHER; note = 2'-Omethyladenosine
  modified_base 43: mod_base = OTHER; note = 2'-Omethyladenosine
  modified_base 48: mod_base = OTHER; note = 2'-Omethylguanosine
  modified_base 49: mod_base = OTHER; note = 2'-Omethylcytosine
  modified_base 51: mod_base = OTHER; note = 2'-Omethyluridine
  modified_base 53: mod_base = OTHER; note = 2'-Omethyluridine
  modified_base 54: mod_base = OTHER; note = Uridine phosphorothiorate
  modified_base 55: mod_base = OTHER; note = 2'-Omethylcytosine
  modified_base 56: mod_base = OTHER; note = 2'-fluoroadenosine
  modified_base 58: mod_base = OTHER; note = 2'-Omethyladenosine
  modified_base 60: mod_base = OTHER; note = 2'-Omethylcytosine
  modified_base 64: mod_base = OTHER; note = 2'-Omethyluridine
  modified_base 72: mod_base = OTHER; note = 2'-Omethyladenosine

SEQ ID NO: 9002 - RNA, 75 nt, synthetic construct; identical to SEQ ID NO: 3306
  source 1..75: mol_type = other RNA
  modified_base 1: mod_base = OTHER; note = 2'-Omethylguanosine
  modified_base 19: mod_base = OTHER; note = 2'-fluorouridine
  modified_base 20: mod_base = OTHER; note = 2'-fluoroadenosine
  modified_base 21: mod_base = OTHER; note = 2'-Omethylguanosine
  modified_base 39: mod_base = OTHER; note = 2'-fluorocytosine
  modified_base 40: mod_base = OTHER; note = 2'-Omethyladenosine
  modified_base 41: mod_base = OTHER; note = 2'-Omethylguanosine
  modified_base 42: mod_base = OTHER; note = 2'-Omethyladenosine
  modified_base 72: mod_base = OTHER; note = 2'-Omethyladenosine

SEQ ID NO: 9003 - RNA, 76 nt, synthetic construct; identical to SEQ ID NO: 625
  source 1..76: mol_type = other RNA
  modified_base 1: mod_base = OTHER; note = 2'-fluoroguanosine phosphorothiorate
  modified_base 3: mod_base = OTHER; note = Cytosine phosphorothiorate
  modified_base 4: mod_base = OTHER; note = 2'-Omethyluridine
  modified_base 6: mod_base = OTHER; note = 2'-fluorocytosine
  modified_base 11: mod_base = OTHER; note = 2'-fluorocytosine
  modified_base 12: mod_base = OTHER; note = 2'-fluoroguanosine
  modified_base 13: mod_base = OTHER; note = 2'-fluorocytosine phosphorothiorate
  modified_base 14: mod_base = OTHER; note = 2'-fluoroadenosine phosphorothiorate
  modified_base 15: mod_base = OTHER; note = 2'-fluoroadenosine
  modified_base 18: mod_base = OTHER; note = 2'-fluoroguanosine
  modified_base 20: mod_base = OTHER; note = 2'-fluorouridine
  modified_base 22: mod_base = OTHER; note = 2'-Omethylguanosine phosphorothiorate
  modified_base 23: mod_base = OTHER; note = 2'-Omethylcytosine
  modified_base 24: mod_base = OTHER; note = 2'-fluoroguanosine phosphorothiorate
  modified_base 27: mod_base = OTHER; note = 2'-Omethyluridine
  modified_base 30: mod_base = OTHER; note = 2'-Omethylguanosine
  modified_base 34: mod_base = OTHER; note = Uridine phosphorothiorate
  modified_base 41: mod_base = OTHER; note = 2'-fluorocytosine
  modified_base 44: mod_base = OTHER; note = Adenosine phosphorothiorate
  modified_base 45: mod_base = OTHER; note = 2'-Omethylguanosine
  modified_base 46: mod_base = OTHER; note = Guanosine phosphorothiorate
  modified_base 53: mod_base = OTHER; note = 2'-Omethylguanosine
  modified_base 58: mod_base = OTHER; note = 2'-fluoroadenosine
  modified_base 59: mod_base = OTHER; note = 2'-Omethylguanosine
  modified_base 60: mod_base = OTHER; note = 2'-fluorouridine
  modified_base 61: mod_base = OTHER; note = 2'-fluorocytosine
  modified_base 65: mod_base = OTHER; note = 2'-Omethylguanosine phosphorothiorate
  modified_base 67: mod_base = OTHER; note = 2'-Omethylguanosine
  modified_base 72: mod_base = OTHER; note = 2'-Omethylcytosine
  modified_base 73: mod_base = OTHER; note = Guanosine phosphorothiorate

SEQ ID NO: 9004 - RNA, 85 nt, synthetic construct; identical to SEQ ID NO: 3297
  source 1..85: mol_type = other RNA
  modified_base 13: mod_base = OTHER; note = 2'-Omethylguanosine
  modified_base 82: mod_base = OTHER; note = 2'-Omethylguanosine

SEQ ID NO: 9005 - RNA, 85 nt, synthetic construct; identical to SEQ ID NO: 3286
  source 1..85: mol_type = other RNA

SEQ ID NO: 9006 - RNA, 76 nt, synthetic construct; identical to SEQ ID NO: 625
  source 1..76: mol_type = other RNA
  modified_base 1: mod_base = OTHER; note = 2'-Omethylguanosine
  modified_base 2: mod_base = OTHER; note = 2'-Omethylguanosine
  modified_base 3: mod_base = OTHER; note = 2'-Omethylcytosine
  modified_base 4: mod_base = OTHER; note = 2'-Omethyluridine
  modified_base 5: mod_base = OTHER; note = 2'-Omethylcytosine
  modified_base 6: mod_base = OTHER; note = 2'-Omethylcytosine
  modified_base 7: mod_base = OTHER; note = Guanosine phosphorothiorate
  modified_base 9: mod_base = OTHER; note = 2'-Omethylguanosine phosphorothiorate
  modified_base 10: mod_base = OTHER; note = 2'-Omethylguanosine
  modified_base 11: mod_base = OTHER; note = 2'-Omethylcytosine
  modified_base 12: mod_base = OTHER; note = 2'-Omethylguanosine
  modified_base 13: mod_base = OTHER; note = 2'-Omethylcytosine
  modified_base 14: mod_base = OTHER; note = 2'-Omethyladenosine
  modified_base 15: mod_base = OTHER; note = 2'-Omethyladenosine
  modified_base 17: mod_base = OTHER; note = 2'-Omethylguanosine
  modified_base 18: mod_base = OTHER; note = 2'-Omethylguanosine
  modified_base 20: mod_base = OTHER; note = 2'-Omethyluridine
  modified_base 21: mod_base = OTHER; note = 2'-fluoroadenosine phosphorothiorate
  modified_base 22: mod_base = OTHER; note = 2'-Omethylguanosine
  modified_base 23: mod_base = OTHER; note = 2'-Omethylcytosine
  modified_base 24: mod_base = OTHER; note = 2'-Omethylguanosine
  modified_base 25: mod_base = OTHER; note = Cytosine phosphorothiorate
  modified_base 26: mod_base = OTHER; note = Adenosine phosphorothiorate
  modified_base 28: mod_base = OTHER; note = 2'-Omethyluridine phosphorothiorate
  modified_base 29: mod_base = OTHER; note = 2'-fluoroguanosine phosphorothiorate
  modified_base 30: mod_base = OTHER; note = 2'-Omethylguanosine phosphorothiorate
  modified_base 31: mod_base = OTHER; note = 2'-Omethyladenosine phosphorothiorate
  modified_base 32: mod_base = OTHER; note = 2'-Omethylcytosine phosphorothiorate
  modified_base 33: mod_base = OTHER; note = 2'-fluorouridine
  modified_base 35: mod_base = OTHER; note = Cytosine phosphorothiorate
  modified_base 36: mod_base = OTHER; note = 2'-Omethyladenosine phosphorothiorate
  modified_base 37: mod_base = OTHER; note = Adenosine phosphorothiorate
  modified_base 38: mod_base = OTHER; note = Adenosine phosphorothiorate
  modified_base 40: mod_base = OTHER; note = 2'-Omethyluridine
  modified_base 41: mod_base = OTHER; note = 2'-fluorocytosine
  modified_base 42: mod_base = OTHER; note = Adenosine phosphorothiorate
  modified_base 44: mod_base = OTHER; note = 2'-Omethyladenosine
  modified_base 47: mod_base = OTHER; note = Uridine phosphorothiorate
  modified_base 48: mod_base = OTHER; note = 2'-fluorouridine
  modified_base 49: mod_base = OTHER; note = 2'-Omethylcytosine
  modified_base 50: mod_base = OTHER; note = 2'-Omethylcytosine
  modified_base 51: mod_base = OTHER; note = 2'-Omethylguanosine phosphorothiorate
  modified_base 52: mod_base = OTHER; note = 2'-Omethylguanosine
  modified_base 53: mod_base = OTHER; note = 2'-Omethylguanosine
  modified_base 54: mod_base = OTHER; note = 2'-fluorouridine
  modified_base 55: mod_base = OTHER; note = Uridine phosphorothiorate
  modified_base 56: mod_base = OTHER; note = 2'-Omethylcytosine
  modified_base 57: mod_base = OTHER; note = 2'-Omethylguanosine
  modified_base 59: mod_base = OTHER; note = 2'-Omethylguanosine
  modified_base 60: mod_base = OTHER; note = 2'-Omethyluridine phosphorothiorate
  modified_base 61: mod_base = OTHER; note = 2'-Omethylcytosine phosphorothiorate
  modified_base 62: mod_base = OTHER; note = 2'-Omethylcytosine
  modified_base 63: mod_base = OTHER; note = 2'-fluorocytosine
  modified_base 64: mod_base = OTHER; note = 2'-Omethylguanosine
  modified_base 65: mod_base = OTHER; note = Guanosine phosphorothiorate
  modified_base 66: mod_base = OTHER; note = 2'-Omethylcytosine phosphorothiorate
  modified_base 67: mod_base = OTHER; note = 2'-Omethylguanosine phosphorothiorate
  modified_base 68: mod_base = OTHER; note = 2'-Omethylguanosine
  modified_base 69: mod_base = OTHER; note = 2'-fluoroadenosine
  modified_base 70: mod_base = OTHER; note = 2'-fluoroguanosine phosphorothiorate
  modified_base 71: mod_base = OTHER; note = 2'-Omethyluridine phosphorothiorate
  modified_base 72: mod_base = OTHER; note = 2'-Omethylcytosine
  modified_base 73: mod_base = OTHER; note = 2'-fluoroguanosine phosphorothiorate
  modified_base 74: mod_base = OTHER; note = 2'-fluorocytosine phosphorothiorate
  modified_base 75: mod_base = OTHER; note = 2'-fluorocytosine
  modified_base 76: mod_base = OTHER; note = 2'-Omethyladenosine

SEQ ID NO: 9007 - RNA, 75 nt, synthetic construct; identical to SEQ ID NO: 1045
  source 1..75: mol_type = other RNA
  modified_base 1: mod_base = OTHER; note = 2'-Omethylguanosine phosphorothiorate
  modified_base 2: mod_base = OTHER; note = 2'-Omethylguanosine phosphorothiorate
  modified_base 12: mod_base = OTHER; note = Guanosine phosphorothiorate
  modified_base 13: mod_base = OTHER; note = 2'-fluorouridine
  modified_base 22: mod_base = OTHER; note = 2'-fluoroguanosine
  modified_base 24: mod_base = OTHER; note = 2'-fluoroadenosine
  modified_base 40: mod_base = OTHER; note = Cytosine phosphorothiorate
  modified_base 41: mod_base = OTHER; note = 2'-fluorocytosine
  modified_base 59: mod_base = OTHER; note = 2'-fluorouridine
  modified_base 64: mod_base = OTHER; note = Guanosine phosphorothiorate
  modified_base 65: mod_base = OTHER; note = 2'-fluorouridine
  modified_base 74: mod_base = OTHER; note = Cytosine phosphorothiorate
  modified_base 75: mod_base = OTHER; note = 2'-fluoroadenosine

SEQ ID NO: 9008 - RNA, 85 nt, synthetic construct; identical to SEQ ID NO: 3288
  source 1..85: mol_type = other RNA
  modified_base 1: mod_base = OTHER; note = 2'-Omethylcytosine
  modified_base 8: mod_base = OTHER; note = Guanosine phosphorothiorate
  modified_base 26: mod_base = OTHER; note = 2'-fluorouridine
  modified_base 29: mod_base = OTHER; note = 2'-fluoroguanosine
  modified_base 39: mod_base = OTHER; note = Cytosine phosphorothiorate
  modified_base 40: mod_base = OTHER; note = Cytosine phosphorothiorate
  modified_base 44: mod_base = OTHER; note = 2'-fluoroguanosine
  modified_base 45: mod_base = OTHER; note = Guanosine phosphorothiorate
  modified_base 46: mod_base = OTHER; note = 2'-Omethyladenosine
  modified_base 48: mod_base = OTHER; note = 2'-Omethyladenosine
  modified_base 55: mod_base = OTHER; note = 2'-fluorocytosine
  modified_base 56: mod_base = OTHER; note = Guanosine phosphorothiorate
  modified_base 57: mod_base = OTHER; note = 2'-Omethylcytosine
  modified_base 60: mod_base = OTHER; note = 2'-fluoroguanosine phosphorothiorate
  modified_base 84: mod_base = OTHER; note = Cytosine phosphorothiorate

SEQ ID NO: 9009 - RNA, 85 nt, synthetic construct; identical to SEQ ID NO: 3301
  source 1..85: mol_type = other RNA
  modified_base 1: mod_base = OTHER; note = 2'-Omethylguanosine phosphorothiorate
  modified_base 2: mod_base = OTHER; note = 2'-Omethylcytosine phosphorothiorate
  modified_base 3: mod_base = OTHER; note = 2'-Omethyluridine phosphorothiorate
  modified_base 5: mod_base = OTHER; note = Uridine phosphorothiorate
  modified_base 12: mod_base = OTHER; note = 2'-Omethylcytosine phosphorothiorate
  modified_base 15: mod_base = OTHER; note = 2'-Omethylguanosine phosphorothiorate
  modified_base 18: mod_base = OTHER; note = 2'-Omethylguanosine phosphorothiorate
  modified_base 24: mod_base = OTHER; note = 2'-Omethylguanosine phosphorothiorate
  modified_base 27: mod_base = OTHER; note = 2'-fluorouridine
  modified_base 28: mod_base = OTHER; note = 2'-fluorouridine
  modified_base 33: mod_base = OTHER; note = 2'-fluorouridine
  modified_base 39: mod_base = OTHER; note = 2'-Omethyluridine phosphorothiorate
  modified_base 44: mod_base = OTHER; note = 2'-Omethyluridine
  modified_base 45: mod_base = OTHER; note = 2'-Omethylguanosine phosphorothiorate
  modified_base 47: mod_base = OTHER; note = Guanosine phosphorothiorate
  modified_base 49: mod_base = OTHER; note = 2'-Omethyluridine phosphorothiorate
  modified_base 54: mod_base = OTHER; note = 2'-Omethylcytosine
  modified_base 56: mod_base = OTHER; note = 2'-Omethylguanosine
  modified_base 62: mod_base = OTHER; note = 2'-fluoroguanosine
  modified_base 71: mod_base = OTHER; note = 2'-fluorocytosine phosphorothiorate
  modified_base 83: mod_base = OTHER; note = Cytosine phosphorothiorate
  modified_base 84: mod_base = OTHER; note = Cytosine phosphorothiorate

SEQ ID NO: 9010 - RNA, 86 nt, synthetic construct; identical to SEQ ID NO: 3290
  source 1..86: mol_type = other RNA
  modified_base 4: mod_base = OTHER; note = 2'-fluoroadenosine

SEQ ID NO: 9011 - RNA, 76 nt, synthetic construct
  source 1..76: mol_type = other RNA
gcctccgtggcgcaatggatagcgcattggacttcaaattcaaaggttccgggttcgagccccggcggaggcgcca

SEQ ID NO: 9012 - RNA, 76 nt, synthetic construct; identical to SEQ ID NO: 3318
  source 1..76: mol_type = other RNA
  modified_base 52: mod_base = OTHER; note = 2'-Omethylguanosine
  modified_base 73: mod_base = OTHER; note = 2'-Omethyladenosine

SEQ ID NO: 9013 - RNA, 76 nt, synthetic construct; identical to SEQ ID NO: 625
  source 1..76: mol_type = other RNA
  modified_base 1: mod_base = OTHER; note = 2'-Omethylguanosine
  modified_base 2: mod_base = OTHER; note = 2'-Omethylguanosine
  modified_base 3: mod_base = OTHER; note = 2'-Omethylcytosine
  modified_base 10: mod_base = OTHER; note = 2'-Omethylguanosine
  modified_base 11: mod_base = OTHER; note = 2'-Omethylcytosine
  modified_base 12: mod_base = OTHER; note = 2'-Omethylguanosine
  modified_base 13: mod_base = OTHER; note = 2'-Omethylcytosine
  modified_base 14: mod_base = OTHER; note = 2'-Omethyladenosine
  modified_base 15: mod_base = OTHER; note = 2'-fluoroadenosine
  modified_base 16: mod_base = OTHER; note = 2'-Omethyluridine
  modified_base 17: mod_base = OTHER; note = 2'-Omethylguanosine
  modified_base 18: mod_base = OTHER; note = 2'-Omethylguanosine
  modified_base 19: mod_base = OTHER; note = 2'-fluoroadenosine
  modified_base 20: mod_base = OTHER; note = 2'-Omethyluridine
  modified_base 21: mod_base = OTHER; note = 2'-fluoroadenosine
  modified_base 22: mod_base = OTHER; note = 2'-Omethylguanosine
  modified_base 23: mod_base = OTHER; note = 2'-Omethylcytosine
  modified_base 24: mod_base = OTHER; note = 2'-Omethylguanosine
  modified_base 25: mod_base = OTHER; note = 2'-Omethylcytosine
  modified_base 38: mod_base = OTHER; note = Adenosine phosphorothiorate
  modified_base 39: mod_base = OTHER; note = Uridine phosphorothiorate
  modified_base 40: mod_base = OTHER; note = 2'-fluorouridine
  modified_base 43: mod_base = OTHER; note = 2'-Omethyladenosine
  modified_base 44: mod_base = OTHER; note = 2'-Omethyladenosine
  modified_base 45: mod_base = OTHER; note = 2'-Omethylguanosine
  modified_base 46: mod_base = OTHER; note = 2'-fluoroguanosine
  modified_base 48: mod_base = OTHER; note = 2'-fluorouridine
  modified_base 49: mod_base = OTHER; note = 2'-Omethylcytosine
  modified_base 50: mod_base = OTHER; note = 2'-Omethylcytosine
  modified_base 51: mod_base = OTHER; note = 2'-Omethylguanosine
  modified_base 52: mod_base = OTHER; note = 2'-Omethylguanosine
  modified_base 53: mod_base = OTHER; note = 2'-Omethylguanosine
  modified_base 54: mod_base = OTHER; note = 2'-Omethyluridine
  modified_base 61: mod_base = OTHER; note = 2'-Omethylcytosine
  modified_base 62: mod_base = OTHER; note = 2'-Omethylcytosine
  modified_base 63: mod_base = OTHER; note = 2'-fluorocytosine
  modified_base 64: mod_base = OTHER; note = 2'-Omethylguanosine
  modified_base 65: mod_base = OTHER; note = 2'-Omethylguanosine
  modified_base 66: mod_base = OTHER; note = 2'-Omethylcytosine
  modified_base 67: mod_base = OTHER; note = 2'-Omethylguanosine
  modified_base 68: mod_base = OTHER; note = 2'-Omethylguanosine
  modified_base 69: mod_base = OTHER; note = 2'-Omethyladenosine
  modified_base 70: mod_base = OTHER; note = 2'-fluoroguanosine

SEQ ID NO: 9014 - RNA, 76 nt, synthetic construct; identical to SEQ ID NO: 3295
  source 1..76: mol_type = other RNA
  modified_base 1: mod_base = OTHER; note = 2'-fluorocytosine phosphorothiorate
  modified_base 3: mod_base = OTHER; note = 2'-fluorouridine
  modified_base 6: mod_base = OTHER; note = Guanosine phosphorothiorate
  modified_base 25: mod_base = OTHER; note = 2'-fluorocytosine
  modified_base 29: mod_base = OTHER; note = 2'-Omethylguanosine
  modified_base 39: mod_base = OTHER; note = 2'-fluorouridine phosphorothiorate
  modified_base 46: mod_base = OTHER; note = 2'-fluoroguanosine phosphorothiorate
  modified_base 49: mod_base = OTHER; note = 2'-fluoroguanosine phosphorothiorate
  modified_base 52: mod_base = OTHER; note = 2'-fluoroguanosine
  modified_base 54: mod_base = OTHER; note = 2'-Omethyluridine
  modified_base 75: mod_base = OTHER; note = Cytosine phosphorothiorate

SEQ ID NO: 9015 - RNA, 75 nt, synthetic construct; identical to SEQ ID NO: 1045
  source 1..75: mol_type = other RNA
  modified_base 1: mod_base = OTHER; note = 2'-Omethylguanosine phosphorothiorate
  modified_base 2: mod_base = OTHER; note = 2'-Omethylguanosine
  modified_base 73: mod_base = OTHER; note = Cytosine phosphorothiorate
  modified_base 74: mod_base = OTHER; note = 2'-Omethylcytosine

SEQ ID NO: 9016 - RNA, 85 nt, synthetic construct; identical to SEQ ID NO: 3297
  source 1..85: mol_type = other RNA
  modified_base 1: mod_base = OTHER; note = 2'-Omethylguanosine phosphorothiorate
  modified_base 2: mod_base = OTHER; note = 2'-Omethylcytosine phosphorothiorate
  modified_base 3: mod_base = OTHER; note = 2'-Omethyluridine
  modified_base 4: mod_base = OTHER; note = 2'-Omethylguanosine
  modified_base 5: mod_base = OTHER; note = 2'-Omethyluridine
  modified_base 6: mod_base = OTHER; note = 2'-Omethylguanosine
  modified_base 75: mod_base = OTHER; note = 2'-Omethyluridine
  modified_base 76: mod_base = OTHER; note = 2'-Omethylcytosine
  modified_base 77: mod_base = OTHER; note = 2'-Omethyladenosine
  modified_base 78: mod_base = OTHER; note = 2'-Omethylcytosine
  modified_base 80: mod_base = OTHER; note = 2'-Omethylguanosine
  modified_base 81: mod_base = OTHER; note = 2'-fluorocytosine
  modified_base 82: mod_base = OTHER; note = 2'-Omethylguanosine

SEQ ID NO: 9017 - RNA, 76 nt, synthetic construct; identical to SEQ ID NO: 625
  source 1..76: mol_type = other RNA
  modified_base 1: mod_base = OTHER; note = 2'-Omethylguanosine phosphorothiorate
  modified_base 2: mod_base = OTHER; note = 2'-Omethylguanosine
  modified_base 17: mod_base = OTHER; note = 2'-Omethylguanosine
  modified_base 33: mod_base = OTHER; note = 2'-fluorouridine
  modified_base 35: mod_base = OTHER; note = Cytosine phosphorothiorate
  modified_base 37: mod_base = OTHER; note = Adenosine phosphorothiorate
  modified_base 38: mod_base = OTHER; note = Adenosine phosphorothiorate
  modified_base 52: mod_base = OTHER; note = 2'-Omethylguanosine
  modified_base 56: mod_base = OTHER; note = 2'-Omethylcytosine
  modified_base 59: mod_base = OTHER; note = 2'-Omethylguanosine
  modified_base 62: mod_base = OTHER; note = 2'-Omethylcytosine
  modified_base 63: mod_base = OTHER; note = 2'-fluorocytosine
  modified_base 73: mod_base = OTHER; note = 2'-Omethylguanosine
  modified_base 75: mod_base = OTHER; note = 2'-fluorocytosine phosphorothiorate
